United States Patent Application Publication US 2014/0325702 A1 - sequence listing, part 42

SEQ ID NO: 92762 - DNA, 438 bp, Heterodera glycines
cacaaattccgtccggcaattcttcttcatttcccattgtttctgcaaaaacgacgcaaattcataccgattcaaatttcagaacgactaaaatgccaacaacacttgcaaaaacaactccctttttcattgatccgccgtcaaatgaacgaattattttcaacgacccgcgaagacaaatgaaaaagcacaacagcagcagagaaatggggaaaagcgatgccaaaacatcggaaaaagaagacaaaagagagggaggagaaggcgaacaaagcgcgaaaaagatgaaccaaacggaaccaattcaaccgacactcaaccatgaagcaacgattggcccacaacatttggccattcggcgaattcgctacccccaaatgatggagcagagaacggctctttttcgtccctccgccgcttcgccgatgggtcggccga

SEQ ID NO: 92763 - DNA, 353 bp, Heterodera glycines
gacgactcggcggaagagatgcgattggtcaaaagtcggatgaagggaataatggcacacattcgtgccaatgaacagttgttcacgcaaattgtacaatcgctacaattgaacactcaccagcgaactgtgctggagcaaattttggcctgaggggggaaagcggtgacaagcgacggaactgatcagagtgatcaatgaaggaatgataagacggacattaacatcggacgaaacggataccaattaaattcaccctttattatgcagatgttgttttgttatcactatcgttatattaattatcaccatacaaatgcgcttttctgttaaaaaaaaaaaaaaaaaaaaaa

SEQ ID NO: 92764 - DNA, 394 bp, Heterodera glycines
aagcagcgcaaatggcacagcacggaatgaaaaagaagacgactttacctgcgggggcaaaacaaaaatcaatgaagcgggcgcaaaagggggcaccgacaagaggacccaaaaagggctttaaatcaattgttccaccaaaaaaggcatcggctgtcaaacaagcgaaggtaaatacggaagtcagtcggatgatcaacgagaagaacgaagaaatggtcagagaaagggccgacagagacgtcggaaaaacgacgaagcaaacaaaaaacacttgactatttttgattttgtgatgttacgggaagatttatgacaattggtacacaattttttttttgttttagtgtattaattatgcatttaatatgaaaaaaaaaaaaaaaaaaaaaaa

SEQ ID NO: 92765 - DNA, 646 bp, Heterodera glycines
tttaagactgttcaattgcaattccgctgcttttcaactttttctttttcgcaatgatttcttccgccggccttttaaatgccgaaacgaatccgacagaagatactcaccaacaaaaacagaccgatgagccaaaatatgcaatgccaacaaataacgtaagttcccacgttttggacattgcggtgggacgaccagcggagggagtcaaatgcacagcgtacaaatggaaaatgagtgaacaacgttccgaaaagaatgtcaccggcgatgagcacgacgaagaggggggcacttgggaactgtggggacaaacagagacaaatgagcagggacgaatcgcaattgtgcatccgggaaaggcattgagcgaaggcattttcaaattgcacttccgcacgaaggaatattttgaagggcaaaagcgcaacactttttaccctttcatcgagatcgttttccaaattgatgatcccaccgcccattaccacgtgccaatcactttgagtaactttggctattccacgtacaaaggccaataatagcgatggaattacgacgcaattgcacttttttggtcatcgataaatgttttgagcatttcccgctgatttgttcatgtaaatccatctttttttttgtccga

SEQ ID NO: 92766 - DNA, 335 bp, Heterodera glycines
cacagtttgggccatttacgccgactggtctcacactagagagtggaaaaattcccttaaactaaaaaatgtcgatgacatggccaaagtatctgggtagctacatcacgctacagaatgcatttcggatgaccctcgcagccctcattcctgctgttgcaaaaatgtatgaagactctgaagtagcaaggctcaccaggtttcgggaccggtctgccatgtttggcagaccacctccacctcctggtgttgaagaaattccatcatggtaacacttatgttacatggctagtttgaataaacttctcagttgcaaaaaaaaaaaaaaaaaaaaa

SEQ ID NO: 92767 - DNA, 392 bp, Heterodera glycines
gtccaattaagatttggcaacagttttctgctttccatcaccgttgccaacccgtccaaagccatcggtgccaaattggacaaaatggtccgtgatgcgatggcttcgccgcagtgccaagacccgctgaattctgccatattgcgctgggaattgccacgtcaaaaggacaccacttggagcgtgctgttcgaacgagcgcaggcattggccgaccaattcccggtcaaactcaagaaagcgaccgacggactcccccaaattgtggacttttcgctcactcagaattcgctggagcaagtgttcatgagcttgaccaatgtggacgtgtaactttttcgccttggattcaagcgattttctgtatccctgcggctctgttcagcacaata

SEQ ID NO: 92768 - DNA, 309 bp, Heterodera glycines
  unsure (1)..(309): unsure at all n locations
caagaaagggccaaagaacactcgcatttgatccaactcggcgccattttcctcggtttcctcgtaattaatgcgctgcaactttacgagcagctgaccaattcgggccatcatcaccatcaccactgaatgaatgaattgaatcgtccaattccaaggagcgaatttatcaaaagcgggcaatatatttattattttaattgtttttataataaatttaaaatgaatatatttgtacaaacttttttatttttttaagaaataaagaaaaatattgcnnannaaaaaaaaaaaaaaaaaaaaaaaaaa

SEQ ID NO: 92769 - DNA, 434 bp, Heterodera glycines
  unsure (1)..(434): unsure at all n locations
attcagtctcgaaaaagaaatgaagccatcattcaacttcaagcttttcgcatccgtctttcttgtgctttgtgtggcctcgcttgtcctctgtgagcataagcgagcagccgcagcagaagcatgtaatcaccccaaaagcgctggaactggcaacttggcactcaaacgatggtggtgggacggtcgtcattgtaagcaattcacctacaaagggcagggcggaaacacaaacaatttcccatcaaagaagcattgtgatcaagtgtgcaagccatgaaatgtgccgtggaatgatggtatgaagcgtgaagagacatgcaaagaagaaaagcgaagaaaatttaatgaaatttttcattaatcaccaataaataaagatttgattgaataaataaaattgcatcgttcaaaaaaaaaaaannaaaaaaaaa

SEQ ID NO: 92770 - DNA, 584 bp, Heterodera glycines
ggaccattccaaccctaatttctctgctaaaccctagttgtttggcatttcctctcttctccctcgtaaatcttctcccattccctccggtaactttccagatccaaataaatcatggttttctgggtttttggctacggttcactggtgtggaaccctggattcgattacgacgagaagattattggtttcatcaaggactacagacgcgtgtttgatttagcgtgcattgatcaccggggaacacctgaaaacccagcgagaacttgcacattggaggagaaagaaggggctatttgctggggagctgcttattgtgttcgaggaggccctgaaaaggaaaaattggctatgcagtatttggagcgacgggaatgtgaatatgacagaaagactcttgtaaacttcttcaaggaaggagattcactgcatcctactttaactgatgtaatagtattcacatctactccagacaaagtgaacaacaaatactacctgggacctgctccacttgaagacatggctaggcaaatagcaactgcatatggcccttgcggaacaacagggattacattttccttcta

SEQ ID NO: 92771 - DNA, 577 bp, Heterodera glycines
ccatgctctccccaagtcaatgcactcggccccatccgcccggccctgactccctgacgccgtccattctgctactctgccaccattggaacccaacaactgaacgcgccgcctgccgcctgccgcctgccgccaagactcgacccacccacctcaccggcacaccaacgcttgacgcccaatcaagaccatggccgaatcctcattccaatcctccttccgcgccttccaacaagcacgcaccaacccgccgccggcccctccggtctcggcgcccgcccccgcgcccgccgcgcaatcgggatcatggacgcgatggatggactcgatgcgcggtgggccaaacgaagaccaagctgccgaggaaggtcgcgggctgctgtcaggcctaatgcccggtaatacaccgcagcggcagcaggtggatgcaaggacaagggcgtttgaagtggcgtgtggatgttgtccagcgctgtctgtgtcgcagcggtttatcgtgtttgcgtgctgcaccggcggcgggctgctcttctttttcctctccttcttcatgctgcccatgttcgtcatcgccccg

SEQ ID NO: 92772 - DNA, 576 bp, Heterodera glycines
cgtccgatgtctctctgttggccttctcatgccattccgaagcgtttttggtccattctttgggttgactgtcgcgttcgttacgccgttctgacctttctttttcccaattgctccatccctctggtcgagccccacctgcacagtcttctgctcacattgcttcaccatgttttgcttgtgttcatttgccttttcttcgtaccaatgagtcggaatcgttggaaatttaacttccaatcgtttctgctcggcgtggtcaacggatggtccatcgccttcgctttggtccattcttctcgactacacacagtgactttttgtatttacgcctattttttcagtctttttcatttctccgagtttcttatgacagctctgacaaatgttgagtcccttcggccggattctttccttctcgaccattcctctgcttattggacagctgccatttgttcgtggattgaattttggacgcgggcgtgggcttttccaacgttttgttcattgtatatttcgtccatcggtgtttgttgctgtatatgtgcgcgaattttttcgcaaattggcaatgtg

SEQ ID NO: 92773 - DNA, 160 bp, Heterodera glycines
ggatgaccaacgaacacttctacgatttgttggcacgagctcagaaagagccggagcccgactactccaaccagttcgatgcggcatgtgccgagttgttgtgcaagttcaaggagggcgggaagcagctgaaccaccgggtgcagaaacgaatggccac

SEQ ID NO: 92774 - DNA, 633 bp, Heterodera glycines
gaagcgccttcctcagtcgcggtggacgacgcctcattcgattacagcgccggtggcgatgaattggccaacaaatccacgccgaggcgtcgtcgcgggtacattccgtactcgaccatttacgaacggcagaagggcggctattgggtgccgggattgcaagtggaggcaacaattgtgcatgtggagcgcgatgtttcgtcgagttaccacattctgaacccattcatatacaccatcgaacttgagcacggtcgctacaaatggaggacaatcaaacggtacaaagacttttccgcgctgagcagtcgtttgttggcgcatcggacggcggaacggatcaaagcgcccgtccgaagggcccgaaacatattggaggaggtcattgaggggaacgacgacgcggaggaggagggaaagggcgaaaagccaccccattcgcaagacaacgtattggtgcggggactcgaatttgacgaaagtgatgagcgggagaatgggcttcgtccggattcgacttgggacgatttgcaaggggagagcagcaagacggacgaggacctgccgatgagcagtgttccctattttccgatggtgcccgactcaatgattgcggaggagcacatggaagag

SEQ ID NO: 92775 - DNA, 313 bp, Heterodera glycines
aaaacaattccaaatttgacggattgcccctcttcacaaagcgacaaaatgccccccccaaaaattgcccaatttgtttgcccggcccattaaacggaaattggcccaccgaactgttgaaaagcgacatcaaatcgttgccatgaaagctctcgtgaattggcacttcccgcgggaaggactgttcattcacatggccatgaatgtaaaaacgaatgggccaaccccgggacaatttgtgttgcaattcggtgataatgggcaaattaaaagcgaggtcggagatcacctgagtgtactgccaaaggtaaaa

SEQ ID NO: 92776 - DNA, 495 bp, Heterodera glycines
gtccaattaagtattcagatagtttactactcttctccattttttgttaaaccttgttgcactcccaattagccatacacaaatagtgtgtaatatggctgattcttggcaaacagaaacgaaggacagtgatgaaagtggtgacaggacaaactcagcacaccaaaatgagtctggcaatgagaattggcgactttctgcataccaaactcaatcgacagaagaagtgcctttgcctgatgatttgtccgccattcctgtgccgacggaacacgaaatgaatccagcatggctaatagcacaagaagcacttccttccatcggtggcagaccggaccaacaccaacaacaacacgaacagccgcaacaatttgagggcggaagttacgaggcggcagcagcgctgtacggatggccaccaaccatgggcagttcgttcaattcgtactatcatcatcagcagcagcatatggcttaccaagaccaacaatacca

SEQ ID NO: 92777 - DNA, 479 bp, Heterodera glycines
gtccaattaagctaatttgttcttatttttttgccttcgagtttttccatttgccaatgcattggcattttttgatggccttagaattttggccattgctcttccgttagcttattgcctcgtcgatattaaagaattggaatatttgcgggccctcgacgattccatttcgtacagagtcctggtttagccatttgaccaattacctgaacaatttcctccatcaaagccacaacaataagtcaaagaccggtttccccaagaaaaagacgggggccaagaacccattttaaaacattaaaaattcttgccccccccccccctgaaaaaatattaaagaaatttgggggggggaaacccccccgcggagggggtctttccccttttttccccccccggggcccctttttttgaaagagggcccccgggggggaacccccccctttgaacaatatttgggcgcgggcgaggaaaaaaaa

SEQ ID NO: 92778 - DNA, 622 bp, Heterodera glycines
aggtgctgttaatctattatttaaattcatttaattgtggcttatggatgtaaacgccgaactcccgccggacttcgaatggtatcaaaatcaaatagcgggtcatcttccctctgttatacgtaatggcgtaaggcaaattggcattttgcacgaacgtggccgaaccgatgtaattctgaagttggttcaggagggaattcgcggccaacgtgagataggattttaccgacggatcgcagcaatttgtgagggccaagggatcaattgcgaagaaacggacgaagtggagggcacactgctgaaggagttggccatgctcatcccccgattttacggatgccgacagattttattggacgaaaatggtccaccgaaggaattcattcaattggaagatgtcactgagaaattcaaatgcccctgcataatggatgtaaagatgggccgcatttcggccgacccattggccagtgaggagaaaagaatggccgaagaagtgaagtcgccgttgcagaagaaaattggatttcgtatactcgggcacagagtacaaaatgaggacggattgcagataagcagagaaagaatttggggacgcgaaaggacggaagagaacatt

SEQ ID NO: 92779 - DNA, 636 bp, Heterodera glycines
aattaaaccaagtttgttcaatgaacgaacatttgcgcgcagaaaatgcgcggctcattcagcaacaggtcaacaatgtgtcctcctcatcggccacttcatcagcagcaggtggcagcggcggcggcatcgctttgccatctgctaatcacccatttgtttcaccaacctcattagtgccacaactggaggcagcaaactcattttggcaagcagttgtcggtatcagcagcagcagcggtagtggtggcgttgggaccactaatgacggtaattacgctgctggccatcaacagcaagcagtagccacatcatctgcattattatttaatagggcaacaacattaacgccagcagggattggttcgtcgtcagcagctgacgacgattccaaggtgggctcatcgtcgcgatcggccaaactgaagcgcgagttgcgttttcactgcgattggcccggctgtgcatatgcaactgcttacgggggcgacttgaacaagcacaagcgcaagcacacgggcgaacggccttatcagtgtgatcagtgccatgccacgtttggtcaacactcttcactttcggcacaccgatacacgcacagtgacatgaagcggtttcattgtcctcagtgtgaat

SEQ ID NO: 92780 - DNA, 135 bp, Heterodera glycines
aacaattcgacctcttcatgaacgggcaggcaaaaaggaattgttactgaagagacttttgcattaaaagacaacgatgtaataaacaacaatcatacgttggttatatttacaaataaatctaccaatttggtc

SEQ ID NO: 92781 - DNA, 638 bp, Heterodera glycines
caccgacccaattaaggccaatcaggatgcccagcgattgtggcgcgccggtgaggcacgcctcggcaccgacgaaatcgccttcaactctattttggcggtgcagaactttgcgcagcttcgcatggtctttgacgaataccaacgacagcatggccattccattgaacaggcaattagcaacgagtttagcggtgacattcgtgatgccaatttggctttggtgaagagtattcgcaaccgtgcctcatatttcgctgagcttctccacaattcgatgaagggcattggcacccgcgacaccgatttgattcgcctcgtcgtcacccgctccgaagtcgacttggccgacattcgccaggcatatcaaaatatgtacggcacttcactggaaaatgccatcgctagcgactgctctggcgcttataaggatggtttggtcgctattgtgaagggatattaccactgattgcgatggcactgctgtgaagaacttccaaacgataaaaaagagattaaaataaaatagcagttgctaattactaataatttaagtgtgtgaatatgtatcactttgtattgtaatgacccatttcgaaaataataacttgcctgccaatgtgccgcataaataaaca

SEQ ID NO: 92782 - DNA, 619 bp, Heterodera glycines
gtccaattaagggcttttaattgctaaaatgtgtaaaaaaagttttaataaattgctaaattcacaaaaatgttccttggctcttttcatccgccatttttttcgtttcccaacaaaattttgtcaaaaaatttctgaccaattcatgcaaaatgccatcactgctgaagcactgtcatcattggcatcgccggtgcattgttttagcactccgatggcattggcattcattgaccatttgaggaatgaaaagcagcaaaacattgttttcgtcgatgcattcacttggcttcggtggcattttcaatgcgaccgtccctatgagctttcttttacgtcttctattaattcctccgatggaattattgatcatttctctcgcatttgcttcgtccgtccttttccttttgctttgctaaattttcgatttgcaattctttcgccctttactgcttttaatctgtttggaatctcaacaattggaaatgaattcacaaatgtttttctcgttaatgcaatttgcgttgagtcatcgcctaaatttgcgccctcttttcatgtcaaattaattgaccaacacattaactcatttccttttgagtgtccattggagcctgaa

SEQ ID NO: 92783 - DNA, 515 bp, Heterodera glycines
gtttttctgtttcggcgcgatttgaaacaaatttttgccgctcttaacgtgacgatcagtgacactgaacagagagacattgagcgtgaatatgaaaaaatgaaagtgattggaaatccgaaggaaatgagagaggaaaagcccaatgaacggacccatttgctgagcgaatttgaagacgaacacatggcgaagaacaacggcggggggcaatttggcacaaaagaaacagtgacggcaccgatagcggaagggggaaaaggggaagagggaacggaggcgagcagtaactgcaacacaacaacaacacaatgggggacgacagggatgagcagtgactgcaacacaacaacagcagcagcagcgcaattggagtggcataatgaagcggaggaacaaaggacaaagaatcagctggcaaaaggaaaagaagaaggtgattctggagtgattgtgccatgaaattcaaaacaacaattttattttttatgttggttaaaaaatacaatcaaaaa

SEQ ID NO: 92784 - DNA, 606 bp, Heterodera glycines
atttcaccagcggaattaaaaaaacgagaaaaatttatgggttcgaattctgtcgaaatgctggacgaacgagaacagcagcaaatggaggaggaggaggaggacagctgctactgggtgaccgtctttggcttttctcctgaccatttacaacacattttggaactgttttctcgccacggcgatataatggcacaaaagactccaaaacggggcaattgggtgcacattcgctactccactccaatccatgcaaaacaggcgttgggcagaaacggcagcatttttgaagggcaaatgatcggcgtggttccgtgccaagaccgcgaagcgctggaagacgatttgtcactttcccgaagtgcaactccgctcatcccgcgacattctgtgacccctcatgacacttctcgacagaacggctctttgttggacggcaactattccatccatgacgactcacaaatggtcccttcaacatctcaatacaaaaccaatggacttccaagccgggctcgactcagcatttcgtctcgtgccggaatgcgtccattgaatgccagtgccatttcggacggaccgaaccaaagtatggatttgagtttc

SEQ ID NO: 92785 - DNA, 638 bp, Heterodera glycines
agctaactcatcaaatattcccaatcaggaggtctcttgcctcgatgtattattccttgtcacagattgagaatcatctttttcttaacagtcgcgacctcaatccaaacatggcagcgggtgcttcgacttcacgaaacctcttaaatgttgcgtcagttgaaattgcagcgcagaacgaatgtttcaccgtttgggagccgctgcaacttcgtcaggaatggactatcagcaactttgccaaggcattggatttggctactcccggcatttgtatgcgaagcaagaatttccgtgatgagtcaatgccggaaatttgctggcaactttgcctttacccgggtgggaagcgcgaggagaacagtgggaatgtgtcgctgttcctcaaaatgtcaacgacgcagtcgcagcgcgagttcactgttcgtgccgagtatcatttttatttcgtggatgagcagggcattgccaaattcagcaacgtgaacactggcgatttcaaagtgaagccatccaaaggctcacactcttggggactgcgcaacattccgcgcacaaaagtgaagagttgcattcgtcccgacttgtcgctgcacatcgtctgccaaatcgaactggtccccgacttcagcaaagtg

SEQ ID NO: 92786 - DNA, 561 bp, Heterodera glycines
gccattcttattcaaactgattgcaacctgaagcattagcctttaaacatcccaacacgctacacaatgtccacgctccgcttcaccccgaacccagccgacgccccgacctcgcacacgctccccggcacgcaccccgagttctctgtgcacgacgcgttccgccacggcctgcactcggtcaagcatgaagtgggcgccgttgcacaccacccgctcgagcccgtcctggcacaggccgaccagttcgccatgcagcgaaagctcacgctgcagcgccaagtgtacggcctgcacgcgccgctccgggtccagatggagcggtcgctgttggcgctcaagcatcagagtcccgtgttcaagagtgtgaatttggggctggaggtgatggcgggcaaggatgagtcgattgatgtcgaggatgtgcttggtgatcgcgacgagtgtgtcgacgacgttgatttccacgccgtcatggagcgcaagttgaagatcaaggtctgagcacgggacgaggttctcgttgctttgctttgttgttctcgtcacagtcgttgatgt

SEQ ID NO: 92787 - DNA, 611 bp, Heterodera glycines
ccgcttcctccgatggacaacaattggtcggtggtgttgatgaggaacagcaacgagcgcgaccagcactcgtccttgaactcgacgaccaccgtggcattgatgtgctgtacagtgttcagaatgatccgaatttgggccccctgccgactcagacaaagggcgaattctgacggatgggcggccgacggtcggtccaggaaaacgtggcgaagcgcctccagaattttgctggaaattgacaaattataatttgtttctttcataaaaaaaatccggaaaatttcatcccaaaatttcaaaaatttataaaattgagggatacgaaaattgtttaaacaaatccatgcgaatcagtagcagtagaaattctatgggtaaataattatttgaaatcaaattcgtaagggtctttgaaaaattctttccaattttgacatttaccgaaaatatctgtccgggtgtgccaacaaatgtttggggcagcagtcgtgcggtgaggcggtcaatgcgctggcccatgccaaataaatgcgaaccgcggcgcgcaaagtgtcgtggcattgggtgggcacaaagggcaattggagggcatggtttaccaccgaaag

SEQ ID NO: 92788 - DNA, 630 bp, Heterodera glycines
acgcctgtcacattggcctcaaaatccttggcactcaatttttgaaggttcaaaaaacagatcaaagcgtgggttggagttctgtgttcgcaacatgctgtgttccggcagaaagtgccggcattttttacttcgaagtgcgcatttttcacgtgctcagttgcttcaccatcggactggccaccaagcaaatgccattggcgccacaattggccgtgccggaacacaactcttcttccgctcctgcatctgatcccggtggcaccacccatttgtttgcattaagccaacacagcaaggaccaacaacattaacaacgaaaagaacaacagaatttttatgtggcgatattgttggatttggcattgaattggcaaatcgacggatttttgtcacgaagaatgggcgccgtttggttattgccgatttgttcttttctgctgcgcaaccgctctttccgtttgtctctttgagagattttggtgccacaattgaagctaattttgggccaaacttcaaatttaatccttaaaaagcgtaagaaaaaaacacacattttgttcattttatgcgcctttccgtggttttatttattttttttattttatttattaaagtatgcattaaaat

SEQ ID NO: 92789 - DNA, 584 bp, Heterodera glycines
aaagaaataaaaaaaatagtgtaaatttaaataatgtacaatggaaaaaggaacacatatgttagatgttgtgtgtatcaattgattttggctaatttgaggcaggcacaacatcttttgccggccagccgcctcctgctgtagttgcctttttgcaacacaaccaaccaatgcgcacaaatcccataccctcactcaggctcaaggcctcagcaccacaaccatcaccaaggtcactgtagaatagacactgatgagagcaagcaaactgctgacacgtgaagaagattgaaatggaaagatgggatgtgaggaaaatgagggacggtagtggttttggtggtgcgtgtttggcgtgtgtgcatgggcaaaggacgaggacaacgcacagaacacaacggcagaaatggcggagggagtttgaggtgtacgtacacccaaggatggggggggggggatccgatgctaaattgaaattccaacaccaaaccaaaattcttatccattcgaggttgaactataagctattaagaacaattaggaaaatatttgttgtgagacagttgagaaaattgcgcctaata

SEQ ID NO: 92790 - DNA, 636 bp, Heterodera glycines
atacatttacataacaaattttttgcttaatgggaaagacttcaaaggataaacgtgacatttattatcgacttgcgaaggaggaaggctggcgagctcgttccgcttataaattgcttcaaattgatgagatttgcaaaatcttcgacggtgtctttagggtggtcgatttatgtgctgcgcccggcagttggagtcaggttttgtccaaaaaattatatgtgagcgagaaggacgaagaaaaacggaagagagtgaaaattgttgcggtggatttgcagccaatggcgccattgccgggagttattcagctacaaggggacatcaccgaggttggcacagctcaacaaatcatttcttattttgatggttccctggcccaacttgtagtttgtgatggagctccggatgtcaccggtcttcacgcctttgatgaatacatgcaaagtcaactcgtttattcggccttcagcattacttctcatattctccaaaatggcggcacttttgtttcaaagatttttcgggctaaaaatgtgaatttgctctacgcccaaatgaaatgctttttcaaggaggtgtcgtgttgcaagcccaagagcagtcgactgagcagttgtgaggcgttcatcgtct

SEQ ID NO: 92791 - DNA, 303 bp, Heterodera glycines
cacaatggcaccggcactaacattggttccggcactggcaacagtcacaatggcaccggcactttagccttgaggcgcccgtgggggtgtccgccgctggtccgaaacgtggacagacgccggccgcgtaggtcaaggaaacgcacccgtggctcctacagcgacaattccgacggatcggcattcactctttttcatggaatgcatggtagttttgatacttggggcactgcgggcattgacgaatgggaccaatcggcacagagtgtacacaattacgccatggaattgatgactttgccg

SEQ ID NO: 92792 - DNA, 577 bp, Heterodera glycines
gccaaataaatattccttgaaatttttttattgcaattatggagttggagccgatcatcaaacagaaacacaaattgccacgagaaaagtttcccaacgacgtgtggcacagagagcgttatgcccgtgacagtctgataatgctcacctttggcagtgccactgttatcggtgtcatttacaccaccagaccgacctggtccaagtggcttttgaagctttctcgcaacagagttgggaccaaaggagcaggttcgtttcgccccaaaagtgccgcccttcttgtgccattcgtcccgatgttgtccaaccgtgccaatcactccactttcccgcacaatttggtctccccaacagtgcatcgccgttttgtgattgtcggccgggtcattgctctctccacctttttattcgccatgtatatttttcggatggatgagcgttttattaggctttgcgagaacattatgaaagagattgacgatgacgatcattgaatgattgatttggaagggatgaccaatgttaggctttgtttgtgctatcgagataaaaataattcataaacggacgaatt

SEQ ID NO: 92793 - DNA, 131 bp, Heterodera glycines; identical to SEQ ID NO: 82401

SEQ ID NO: 92794 - DNA, 424 bp, Heterodera glycines
gttggttctacctgtatcgctatgtaaattgcgtggaatccgtactgctcgaacatcaccttaagcaaagggatatcgatcgacctttcgagtcgcttttgttggacgaacttggaacattttttcgcgattgctgttcgggttcagcggaggctcgcttctccggcccaaacgtgtagtcccagagatggcccatgtcgtcccaattccgcacaatgccgttctccatcgggtagctcacgtccaacatgtgccgtaactcggagcattcctcgccgaccatcaaatcctaacaaaatttactgtgattgtgacggtactgacaaaatgactcactttaatttggatgttgttcactaattgttgttgggatctgaccaaaggccgtccaaagcgtgaagcggccacaaccatcaaacaatgt

SEQ ID NO: 92795 - DNA, 418 bp, Heterodera glycines
gcgacggaattgggcacatcagaatgttccatttcctgggagtgtgaagcccgtgtacggtgcacggtatccgcctttacagtccagcaacgaaagcaatgaaacaccggcaaaaaccgacaacaaattcaaaaattatgaggaaagtgtttccgacgtttgggacccgggcgtaccggtggacgattcgctcgttctttcagcggctgccaaagtattggaaaggcatgcggccgattttcagactagcggtcagtctgcaggagggacggcgatgagccaacggcacaatgccgtgatgcccgtgcattacccttccgttccgtcgcggcacagcaaaatgcaagcgatgcaacgtcttgcgacacaacgcgagccgatcccgggagtgaaccctttgccatcttctgccaattcg

SEQ ID NO: 92796 - DNA, 640 bp, Heterodera glycines
cacaaattaattaattggaaaaagggaaaagcgtgctaattgaaccaccaaaatgaaccgacgttggatttgtggcgacgtgtggatggacattctgccatcatttgaccatgctcaactcggcctcaaaatggcattgctttccgaccgtttcgatgttttggtggacaaacatttcgacagaaaaagcgaattgacaatttggagacaaatcaaaattagcaaggacaaaggaccaaaagcgaaactgtctgtggagatcggtgccaaatttgtggcatttccattgccgaaccattcgctgccaaacaaaatctgctttaaggaccttcggattgactacattgaccattctgtgttcgcatttctccgttccaacaagccaattttggacagaatgggcaccaaattggaagtgtttgtgcatgcaattgatacggatgtccaaccgatttgggatgtttttatccgtcaaatttggccactttttgcgcaaaacattcaccatttgggctttttggatggcgatgatttggacaatttgtgtcgccgcacatcgccaacaattctcactgatcttgatcaattgatttcaatcgattctggtgctctattctccgatggaattgctgatgatggg

SEQ ID NO: 92797 - DNA, 490 bp, Heterodera glycines
ggtgtgctctctgttggctatcatcaccacagattttcactctgatcttctctgttactccgacgatcgagcccaagtgaatgtcggactgcgccacacgattgaggccttccatttcaacaccgactcggcctgaactgacttgatgggacttgcacatggtcctgcctccccctggccaacccccgtgaatcccccttcaactccctcttcattgccaaacatccactgcctcggacactgatctactgagacataggcctctactcgccacaattgtccccctgatcagcctctggccgttgccggacctcctggacactccggattccctccacgcacaggacaacccctactgtctgtacaacctgtgaaagcccctcctccatgtccgaccatcattatccgctgcctgctctgctttgataagtctactcgtgcccctggaggacggggactccttggacagacatgcaatgcctctgtacct

SEQ ID NO: 92798 - DNA, 320 bp, Heterodera glycines
  unsure (1)..(320): unsure at all n locations
ccaagtttgagtttgctaaataaaatggttaacgtgaagaagggcaccgtcattcgttgtgacccggcaatgcgacagttcctgaagcatttggacgagacacgggctctgggcaggccgttcatcgtcaaggaccttgacgagttttgtttgttcgtggagcgtgacattgtgccaatgttggagcagagaatggatgcccttatggatgctttaacacccgacactcaaacataaaacccacaattttttgtttctcatttcctcaaatatttattgaaaaatttaattcgcnaaaaaaaaaaaaaaaaaaaaaaaaa

SEQ ID NO: 92799 - DNA, 632 bp, Heterodera glycines
gtttgagaggataatacaaacagtcgacgttaatcaagatgatgacaccacatcaagatttccataattcaagcgtcgcaatgcaacaacaacaaacactttgtcctcctgaatcaaccttgtggatgggcgacttgaaaccggaatgggatgcaaattttgttcgtgaagcgtttggagaaaatgcaggcgatgttactaatgtcaaaatgcggtcgacttattgtttcgttgaattccgagacggaccaactgctcgaactgcgatgttgagggttaatgggatgacgttacctaatgatccaagtgggacgtcgcgctttaatttggcctttgcaaattcgccccatcatatgtctattgaatacaatctttttgtgaacaatttggctccagatgttgatgatgtggcactgtttcgattgtttggtgaacgctatatgtcttgccgaggtgcaaaagtttacagaaacgaagatggagcatcgaaggaacaaggatttgttcggtttacttctgaaactgaccaacaaaaggctttggttgaactgaacaaacacaaatttcatggtcgcgatttatttctcaagcttgcaagaccgaaaactcgtggtggacctgccgagaaacga

SEQ ID NO: 92800 - DNA, 616 bp, Heterodera glycines
  unsure (1)..(616): unsure at all n locations
gttgaagccattcgtttttctatttttaattttgtcatcaacaaaatatatttgtccaaataaacacaaagacattcgcgattatacggacgctgacatcgaaaaattatatgatcaatgggaagaaaatgatgaagacgaactcccagaagatgagaaacctccctgccaacgaaaaaggccccaaattgacctcgaatcgcttcagcaaagaactgattctccggatgagttattaaaattaacgaaaagtggtcaaactgtgatgatgtttgtgtcggtgaaggatcaaaaatctgagggtaaaacaagcaaagacttcaccgacaaaatttcttcgttatggctgtcgaacttccacaacaatcacatcgatgccaaagtgttcattgtcgataatgatcgagttctttacatgttttctgaaggttctcaagcatgggatgcgcgtgattttttgctttctcaacccgaatgtgtcgaagttgtgttggagggcaaaacaatggcgggaaaagggtcgaaggagggaaaacataccgaattttgaacatttcatttacaattttattttagaatagcanaaaaaaatttttaaaaaatangccgctgccga

SEQ ID NO: 92801 - DNA, 614 bp, Heterodera glycines
cttcccccgagtttctgattttcggaaggctcattctcggcgcaaatatgggcctttctacaggcctcgtgccgatgtatctaatggaaatcactccgacaaaatatcgcggcgctgccggcacatttcacatggttgcggttgccttctccgattggttttcgcttttactcggactgccggaagtgttgggcagtgccgacaattggccattggcttttgctttccccggctttcccgcctttttgctttgtttggttttgcctttctgtccggagagtcccaaatacacacttttcgcaagaggtgatcatgctaaagccatggaggacttgaagaaattggtggacgaagacgaggccgaatttatgtacgaatcgctgcaaagcgaagcagcactcatgcaagatggctcctgctgcactttccgccaaattttcttcgaacgcgaattccgcctgccccttctgatcaccatcgtggtgatggtcacccaacagttcaccggctgttccgccgtgttcgcctattccactgatatgttcatcgacgccgggctcgacccacgaaccgcgcgcttcagcactttggccgttggcgttgcttattttctg

SEQ ID NO: 92802 - DNA, 547 bp, Heterodera glycines
aaattcgcataaaatgaccggaccgccgttgagccgtaaacggcgtggggcggtgcccacgcgcatcgaacaattggagcgaatgttggacatgacaaaatttattgaccaattgaaacgtctgatcgaccagccgattaaaatccctggcactctgtcaattgggccaggccaggcgcggaacaaacaaatccccggaaaagccaagcgtgaccttctcttttttgaagacatttggtctgaacgtgccgatcggatggcggacaccagcgccctgtacaacaccagcgacatcggcgaacgcaaatggctgctcgatttgctgatggaggagtcggacccggactcgggcggcgaggagcacatcacggagcaggacttgaaggaaattgtcaagattcatcacaagcgcaggaagttccaaaaggagtaccacagtgacctgaccaattcacagtacacatattatggggccggactgatcagtgcgttcgaccgtttctccgaaaatcagaagaatgttcggaaggaatttgaagttggcacc

SEQ ID NO: 92803 - DNA, 377 bp, Heterodera glycines
  unsure (1)..(377): unsure at all n locations
cgttcatctgctgttgatgctcgtgagcgctgttgtgttcatcatcttcagccaatgctgcggttgctgtaagaaaaagagaacgattcaaagtatgagacattggccagtttggatgcaaacatctttgtgaagtccggatcaccacaaccagcgccaaatgaattccagtcaaaggtggccggctccaaattctcaccgaatcctaatccacaacaggcaaaggctgggggatcgcaattcgctccgagtaagagcaacaaccgcaacaactcggtccgggcaaagagcaatgtttttgtgttccatccaaatgcatttctgtccccattttcagtaaaagattcaaagtatcnaaaaaaaaaaaaaaaaaaaaa

SEQ ID NO: 92804 - DNA, 643 bp, Heterodera glycines
cagagtggaaacccatgcaacgagcacgcacttgaatactcttcgcatccggcactcttgaccgcccctagcctttgccatcgctgtgccctccaccgccatgtctgccgccgccgccgccccaatggacccaaggaatcaagccgactccgttagtgtcgcatccattctcgacaatgtcgacctggctgcggcatcgaagtcactcagccccgtcggtcaactcggctctggggtcgaatacattttcaccaacgacgtcccatttaccggtgcctctggcggctttgttccctctcgcgggtggaccgacgatctttgctatggcacggggactgcatacctttctggactcatggtgggtggggcctggggctttttccaagggctccgcacaccgctggaaatccgctccaccaagcttcgcatcaacgccgtccttaacggcatgacccgccgcggtccctttgttggcaattccgttggcatgctggcaatgatatacaatggcctcaactcagccatttcatcgcaagttgagcctcagcacaagccggtggcatccattgccgctgctgccgccgccggcgcattgttcaagtccactgctggattgcggccaatggccatcacatcgctcgct

SEQ ID NO: 92805 - DNA, 621 bp, Heterodera glycines
ggtggccgggctattgaaatacgcggccgaatacactttctttctggctccgtttataaattcgtacaagcgactgcagccgaacagttgggcaccaacaaaaatttgttggactgtcgacaatcggacgagttcgttccgtttgtgcggccaaagttcgtccaacgttcacatcgaatgtcgtattggtggggccgacctcaacccgtacttggcattcgccgcactgatcgcagcgggcattgcgggcattgaagaagggttggaattgccaaaggccgttgcctgcaatgtctacgcttcggccgatgccattcccgaattgccgaaaagtctgcgaattgcggcggaacttatggccaattcggaaatgttgaaaagagcgttgggtgaaaatgttttacgacactacaaaaattcggcatgcattgaattggaggactttgaaaaggaagtgaccgattgggagctgagaagggcatttgacagatgttgaagacggacggacggacggacggaagaatgccccggggggaaagaattaaaataaataattgatcaaaaaaataatcatttgtaaaattacactttattattatatttgcattggcaaaggcaact

SEQ ID NO: 92806 - DNA, 508 bp, Heterodera glycines
ctccgaagacaaaggccgcgtgttcggcgcttctcacgtccctttgccgacaatggacgaggaggcgcgtgagcagaagataaaggaactgatagcgatgacggaggaaacgcatcggaaaagggcggaacggaagcgacaaaggaatgaggaggaagcggaagaacgacggaggctgaacagagtgagggcgagaatgggactcgaacccattccaagcagtgaggacgaagaagaagaacaaaaaggtgcagcagaagcaacggagttggatgtttccgccattccgttgcctccctcttcgcccgaagcaaaaacgactaaagagcctgagcagaaaaagcaaaggtttggagtgcgggagtgggaccgtggcaaaatcggatgcatgcgatgggcggaggaacagcgggacgaacgcgaggacgaatttgcacctccttcattttattacggcgaagaaaacgacgcaagggggaagaagaaacgcaaaaactgaagctaaaga

SEQ ID NO: 92807 - DNA, 621 bp, Heterodera glycines
gcgtggcaaaactgatgaccccggaggagttgaccaaccctaacgtggacgagaagagcgtgatgacttatctgtcgcagtttccgcgtgctcgtccgctctactcggcctcgacccgcgcccccttggaacaacaagactccgaaggcacaaccttggacgactccaatcaatcggatataccggtcccggctatccaaccgttctcttttgacgaagaaccgcttgacaatgttggggaagagtgccagcaattgactctgtcgcaaatggacgacgacgacaacaacggagtgaccacggcactcacctgtgtgaccaaaacgaccacatcttacacaattgggcagcagaatgaggctgatgacgagtttccaaatgagccgtctttgcccactgacatggaaaacattccgcaacagaatcatcagctgtacaacctcatggtttgtgagtcggacttaaacgacggaattgccgagacggcggcagagccgacgactgactttgacgctgtacggatgacttatcggcacgaggagctgcaatatgagccgttggtggtggtgtcagacgaagagacggttgccctcgggacgaccgccgtacgtcctcagcccg

SEQ ID NO: 92808 - DNA, 524 bp, Heterodera glycines
gggaaaccgataaaaaagcaaattcaggaaaatttagaggaagaaatcgtgaatgaagattttttcaatgtgcaggaagatcagccgccgcggagagtgccgatgatggtactgaagagcaacattcaacgggacaaagtccgtcacaacagattcaagttgcccgagcgttcacacgaagatctttttcgagaaaaagttcgcacaggtccggccatgaaaagtttgtatgaaaacgatgaactgatcgatgtgcgcgggggtgacggaacggcgttaataatgagtgattttgatggttttgtgccccaactgaccaaaaatattgcggagaaaggcattgaacgaccaacgctgatccaaaaatgtgtgatgcccataatacttacgaaatcggaatttgacttgctggcgcgtgccgagacgggcaccggcaaaacggcggcgtttctctttccgatcattcatttgttggaaagcgatcgtttggcaattgggacgaagccttccactggaaggaaatc

SEQ ID NO: 92809 - DNA, 313 bp, Heterodera glycines
gtttgagtaactcacattccttgcgcgactgaatggctctgactgtgtatttgcccagcaaaaaggtggagaagcaaagggacagcgcgagagatccgtactgaagaagagaaagggaaaaacggacgagcagagaaagaagggacgaaagtgcggagaacagagaaccaattttgcccatttgggtgaagaagaaagtgtaaatcgtagtaacaaagcgaagaatggaaggaatgaattaatctgctgatttggaaaagttgggtgaaattggtaataaaaaacagaagcaaaaaaaaaaaaaaaaaaaaaa

SEQ ID NO: 92810 - DNA, 260 bp, Heterodera glycines
gccatcacaaaaacgcaccaccgccagctcctgatggtgatcctcctcctcctcctcctcctggaccgcctccgcccccaccgccgccgccaccgcctggcggtggcggccgattcagtccgcgttgaggctcgtccaaaaagtgcagctcacggtcaccggcaccgacaaagtaacgtgcaagccacggcagaacaggtcgtgtcaactgagttttaggtggatggttgcatcccacaaaaatttgccaaaaaatgcca

SEQ ID NO: 92811 - DNA, 621 bp, Heterodera glycines
ctcacacttacatagcattatctcctcaaccaaaccaaaccaaacctattcaattcaatcaacccacaatgaaacccaccgccttcctcaccgccacggccacggccacagccaccgcctgcctcctgctcctgtcatgcacgggtcccgccgccgccatgccccacccggaccctcaccctcacccccaaaacgactgcaaagcctgcatcgaaatgatcccggcctgccccgcgtgtcccgccggcgaactgtgtgcgcgctcctctaacacgtgccaagaatgtgcgtccgcgcggtgcttcaagctcgccgagctcgcccagttgccgcccgggtttgcgcctgccttggggcagcagcagcccggaacttttactttcccgcccatgcccaccatgtcgggcggcaccgtgttttctacgtcgattgggatgactgtcatcaacggcacaaccgtcacgccaaccgcaaccgccacacccgacacttcgtcggtgtcgctgactgccccgcccacggctagtcccacgggcacccagggtgccgcgggcacgggcaacggcgcaggcaaatcatccgggtcgtcggcagccatggcgttggtggtcgcgtgcgttg

SEQ ID NO: 92812 - DNA, 310 bp, Heterodera glycines
ccgaatttacgtgggccatattccatacgaagccagggaaagggatgtcgaacgcttctttaaaggatatggacggattcacgacattctgatcaagcgcggctatgctttcgttgagttggactatcctcgtgatgctgatgacgcggcgtatgaccttaacggtcgctctttgatgggaatgagagttctggactaaatcgccaaaactcgtccatggcgcaatggcgattcttggagttcacgccgtctctcgcgttctcgttcgcgctctcatgacaaacgctcgcattcacgaagtcgctctcga

SEQ ID NO: 92813 - DNA, 304 bp, Heterodera glycines
ggacggtggaggagcgggaatggccggttgacagggcgcaccgattgcattcccacgccatagctgcacgagtgggaacgagtgtctggtggattctcattgcaacggcaccatttgcgcgtgccgctagggattgctcactttgcgaattgccgactcgcacaattgtgtacctggagacccacgaaaaacgcgctctaccaacaacaacggaggacttgtgatcgcatttaatccaaacaacgaaacggatggcagcgattctgccgcacataatgaacaaaatgtctgtgtcacgaccaac

SEQ ID NO: 92814 - DNA, 514 bp, Heterodera glycines
aatcgacgacttcttctgccagtgttgtgagcgttcagctgcgtgaagtgcccatcaaagacttcaaggacgtgcttccggtgctgcagaaaacgctcaacgaattggaacatccgttcatcaagaaggccgaagaaataagcggaatggaacgtgagaagctcttctacatcacttcctctcttgtgctgctcgtgttgatgctctgccctggcaatatgcttctctctactcttatcactgtggcctacccaatgtacgcgagcttgttgaccctcaacactcaaaacacatcggaatacacccagtggctcgtttattggtgcgtgttcgccgagttttgccagttcgactatctctttggctctatcaatggccttctgctgctgtacgtgcctctgaagaccgtctttctgctctacttggcccttccgcaaacttatggcgctcacaacttgtacgtgaagcatatccgcaaagtgcttgccgtgacgaacgtattggacaagatgaa

SEQ ID NO: 92815 - DNA, 547 bp, Heterodera glycines
ggaccattcggagagtgccaaaggccttttgggcgacggactcatcccaaagggacacggagagattggcgatcccctttggctgttcgacatggaccgaccgttcattatgcgctctgatgggtcggcacttgctgtcctccgttcccctgatcgctctttgggtggagacgctctttggcacttgtgcgacggtgtgccgcccacgccgttcgtttcgcccactgaactgggcttcaccgtcttcaagcatctgtgtctgtcgcctgatcaaagggcgctgtactgtctggccagtggtccccggagggcttcttctctgatcagattggacttgtccactgattgtcacacagtcgccgttatccgtgaagcgcgtgcgcactccgaactctctcagttgcccctctctgtttcatcactgatcactttcaccgctaatggtcattccctggaggggtatttctacgctcctcacagtcacacgcattgtgcgcctgaagggaaactcccgccggtagttcttttcgtccacggcgggaccacc

SEQ ID NO: 92816 - DNA, 400 bp, Heterodera glycines
taaaaacctgctcattggtaaaaaatgaaatccttctttaatttcccatttgtcttttgtattcttttgctcattggctgcgttgacaaatgcgtcggaggagtcgcggcattgccgccaaaatatttgggcattgaaaaccatgacaaatgcttaaccgacgagccaataggctcttcgcgtcggctttgtttgccagcgcagaaaaaaatcgaatgccaagatgaaacgttgaaagcgcttaatgatttggaagaaggccaacatccgccgacttgcgcatgaatccgaagacagaagcgaaagaagcaaatgaagggattgaagaatgacagggaaaagcctggctgaacaaaattttgtctacaaaaatgaaataaaaagttattgaaaataaaaa

SEQ ID NO: 92817 - DNA, 554 bp, Heterodera glycines
gccgcttccgctgggtcgttgctgtttgacagcgctgcttctgctgccgctgctgatccatccaatttcatggcgatgatgatgatgaacaacaacggcggtgggacagcgcatcgttggcaaaacggcagcaacggcgtcaccaacaatagccataacaacaatggcatcgctgctgctgccgccggtggtggaacatttgacggtgaccagttcaagtgggacgatgcggcttcacgcgtgcggacattggacgaggcgttcaccaagctggtcgacatgaacaatctgatcaagcagcagccgccggtgccatccgtgaagagcaacaacaccaacccgtttgttgtctgatcactcgctcactccgctcgctgatcaacaaccatcgagaccgactgatcagttttgccagtggtcgcgcgcgcgtgtgtgtgaccgatcaattattgattgtttttcttccattttttgtgtccgtgtcttgtgaatgtgtgtgacagacattattacctatatcattattattattattaattattattttaattttg

SEQ ID NO: 92818 - DNA, 250 bp, Heterodera glycines
gtgctctctgttggctatcatcgccacggtcatcactctggcatctctgaactctgagacgtaccaaatgaacctcaaggtgtgcgcaggagttgaggccttccgggtccacaccgactcgacctggactgacttgatggacttgcgagtggtcgtaacgcccgcgacaaagccccgtgataaccccttcaactccgtcttctttgtctaacgtcccctgcccggactctgccagtgctctgggctccaa

SEQ ID NO: 92819 - DNA, 413 bp, Heterodera glycines
ctaaaatgcaagagactcacattgttctcgggattgcctcggtgtgctctctgttggctatcatcgccacagtcgtcactctgccatctctgtactcggagatgagccaaatgaacagcaaagtgcgcgacggagttgaggccttccgcgtcaacaccgactcggcctggactgacttgatggacgtgcaagtggtcgtgacgccgccgtcgaagccccgtgataaccccttcaaagcataagcgacaagcgcagggagaagagaaccgaaagacaaaggaccgacgcgaaagcgaagctgaagatgatcataattgggtggaagttgttgtcggaatttgtgttcaccagcgcatttcccacacgaataaagggcattcactcgataatcatcgagtaacatacattaaaaa

SEQ ID NO: 92820 - DNA, 439 bp, Heterodera glycines
ggaaagggaatacgctaagcccgcggcggaagtgcgacgaaatttggacaaggaatgggccaaatgggcactgcccgccaaagtgaaggacttgcgggccgaactgctcgccgtcgcatgcgcaacggaaccgacggaattggccaccgtcggcacagaattgggccgaattgtcacgtatttcgacgccttcggcacttttgtcgacaaacatttgtatggaatgttccccgtcacacgctttctcctcccttcgcttgtcagtggcgacgcaaaacggccgctcagcgaattgtccgttttcgaatggcgccacggacagagaccaaatgccgtactcgtcgaacaattcggcgcagcaccccacaatcagtctcccccgacagatgacggacaaataacagccgccgatgacgatgaaattgactttggcgatgat

SEQ ID NO: 92821 - DNA, 316 bp, Heterodera glycines
cgcgtgaggagcaaaagtcatccgaatttggtgaccattggcttctcagatgacgaaattggaccgatgctttcgaattctgctgcgtccatttcgaggaacagatcgggctgagaaggaattcaaactgcggatcaccaacagatgagccctaagcacaatggccacttggatggaattatctctgatcattatcatttcataaattatatatttcctatcagcagacgtctgattttttgtcactgatttcgcgtgtatattctgtgtgcacatatattgtatgtatttgtcttggtaaaggaagtaaagcgcc

SEQ ID NO: 92822 - DNA, 545 bp, Heterodera glycines
ttgctgtccgctcgccttttcttctgaccaatgggccccctcttctctgttcggcaccttccgcttgtcctcctcctcgtgctgcttcttccctctttccttctgtccggcatggtcaatgtttgcagcgatgtcaaagactgtgccaattgcactcgctctttcctgaacatttttgcgtttcgtgaatactgtatgtggtgttattccacaaattcctgcggtggtccgttggtttgccccagcggcgtcgctgtcgccacgcgcgaccctttcaaatgcccgcagaaagcgtcgacggcgaagggccgccgatacactgacaaattgggacgatcattgtacgcgttgactttggcagctaaacagaaggatccgagttactgcttgaagaacagcagaagcgatgtgaaagtaatcaaatattacgaagttgaatgtgatcaggccaaaaatacttgtgccggaatgatagccgtgtcggaggaagccaaagctttgtacatcatttatcgtgactcgaccatcgatcgccagctattgca

SEQ ID NO: 92823 - DNA, 459 bp, Heterodera glycines
  unsure (1)..(459): unsure at all n locations
atttggtgaacttaactatttcagtttactaaaaagtccgtctccgaaggcgacttgtggcaatcgttttttcgccgaatttctctccgcgaccattttctcgatgtcagagtttacttcgtccgacggatcagggaaaagcgttagcagtaaggtcagtgagtcggaaagctacgacgcgaccacgcttggtaaattgatgaacctcgacgccaaagtctcttgatggctccgagaaagagccttatacggacgacgatcngactgttggttattgtctttcgttggctggccttaacaatcttcatgtggactaccgccaaaacaaggcctttctggaccaaatgtagggctggcgctgcagggaggagaaggacagccaagacgacctgcgaagcctgatcgacccgtgcctacttgcccgccccagaacatcccctgcccacgctgccctgctgg

SEQ ID NO: 92824 - DNA, 361 bp, Heterodera glycines
  unsure (1)..(361): unsure at all n locations
gcctttatgcggaaaacagtaaaattgccgattctttgttggctgctcacattgacaggagcaatcagaagggaacgatcaacttttgctgcattgcctccaaatgggaccatttgcgtgcgctcggcaccctccgcacgcggcccatttaccgtcggcacacgcgcgtggtgccgtccaacatcaaatatgagaagctgttcgccatgaatgttggcatcaacattttctgaacattgcgcaaaaaaagagggtgatcggaacagcagagatttgattgaacaatgaaaaaatcaaatgaacaaagtaaagtgatcagaaaagtttttattttaaattataaatgggtaaaannnaaaaa

SEQ ID NO: 92825 - DNA, 477 bp, Heterodera glycines
tgagattgttcaattagaatgggcgctaaagcgaataataagcgcaatggccgagtgcaatacgaaccggccaaagattttcgtgggaaaatgttggagctcgtctattggcgtgacccccaaaagagcggtgccgttttggcctctctctttctctgcgtttacgttttccaacacttttccgtcctttccgttctcataaatggcgccctttgccttttgcttgccaccgtcggcttccgcgtgtttaagctggccgaagcccacttcaaaaagttgcccgatgccagcgccaacccgtaccagcagtacttggacatggaggtggccgtgccaatggacaaactccaccaccatgtagacttggccgtggaatacgcactgttcctggccaagaaaatccgtcacatttatctgtccgatgctttgctcgactcaattaagttcggtttgattctccactcgctgtcctacgtg

SEQ ID NO: 92826 - DNA, 229 bp, Heterodera glycines
tattgaggtatcactggatcgttcaatgcaataggttaaatcgggttagcgcaatttgcgtcgagcgagcgcttcaaacaatgccaagtacccagtggacgccgctgcagttggcggggcggtgatgggcggaccggtgggaatcgcggccggctcattggtggcagggattgcggcggccgtaaggggcgcttttgcaggcctttacggagggcgtgtgctgaaacgg

SEQ ID NO: 92827 - DNA, 625 bp, Heterodera glycines
caattgctggagaagttgaaggcaacaaagtgaaggaattgaaggcgaaggaaggggaggaggaaaaggcagttgacaatggggacgagtcggttgaggacgaccgcgcattcggcacaaaaacgccgccggcgtcgcaactgcgccaaacgccgcctctctcggccagcattcgggctccgaccgtgcgcaagcgttgctccgcagtctttggtgcaaggacgagccacacttccactagtggcggcggtggtggtgggctgtccgcgttgaccagtgcgatgttgggcaagaagccacgcaagcagtccgtgctggacaacgcccagtccggctggcgctcatttgtgcaggaggaacagttggagcaggagatggagtcgcacatgcgcagcaaggacgcctatttggacaagcaggagtttctgctccgcgcggactacagccaatttgagcgggagcgcgacttgcgtgcgcaggaaagacgggttcagcaacagcagcaggccaacagcggcagcaagccgagataaatgcgtattttgtgtaaagaaatggggaaaatgattgatatttggatcggaactctcaaattcgactgtctttttgatgaaatttttgtttc

SEQ ID NO: 92828 - DNA, 388 bp, Heterodera glycines
acgcgttgtgcaacagaaggcgtgcctgcatctgccgcccctgcccaccaccaccatcggttcgttcccgcaaagggcgacggtgcgcgcgatgcttgccttattccaagcgcacaaaacggcggacgcggattattgggcatttatcaacgcggatacggatcggtgcattcagatgcaggatgacattggtttggatgtgcttgtccacagtgaattcgagcgccatgacatgggcgaatatttcgctgaacatttgcacggcttttgcgtcacttccaacggatgggctcagtgctatgggtcgcgctgtgttaagccccccgtcctttacggcgacgtgctaaaggcggggccaaagaccgtggaaatgacccaatttgcgcaa

SEQ ID NO: 92829 - DNA, 491 bp, Heterodera glycines
ctggctcgagagttttgtccgaccaaaatttgctttttggtcaccagctttggcaccacctttttttctttacctttgttattgtttttgttgttctgtttgtagatttggtgatgtttagcttttgtgatgttccaattttccttttttgtgtgtttttgtctcttaatttgtcctccattcccccccccccccctccgttgtgctgcttaattattttacaataacaattctgcttttttaatttttcttgtcataatttttttttctatctccctccattcactttcttcgttgttatttatggttgtgccctgccccccccccccatttccatgcaattgtttaattccgaaaatccccgcccaactgactacacccaaccagtgtttgtcgcccatttatatgatctcttttgtctcatcccttccttgctccctcaatggcactttgcgtgatgataatcttctttttcccgaatttaattttcg

SEQ ID NO: 92830 - DNA, 517 bp, Heterodera glycines
ttttgtcgtcactgagcgctccccgacccaccaaattcaaatttacaaccaatacggccaattcattcgcaaattcggcgcttccatcctgcaacacccgcgcggcgtctgtgtggacagtcagggccgaattgtggtggtggagtgcaaagtgatgcgcgtgctcatcttcgacatgttcttttacattctgcacaaattcagctgttcacgctatttggagtttcccaacggcgtttgcaccaccgacaaagaagaaattctaatcagtgacaaccgggcacattccatcaaagtgttcaattacgagggccaatttttgcgtcagatcggtggcgagggggtgactaattatccgattggggtcggcatcaaccaacttggcgagattgtggtggcggataatcataacaatttcaacttgaccgtcttcagtcaggacggcactctgctgagtgcctttgagtcgaaggtgaagcacgcgcaatgttacgacgtggcgttgatcgacgattcg

SEQ ID NO: 92831 - DNA, 575 bp, Heterodera glycines
ctcggacagtaatgaccaatgcagaagcggaattgccagataacgcgccgaaacgtcgcttcattaaccgagggatcaaccgtgtggagttgttgggtggtgtcggtggacaaccggtggtcaaacagactgcccaagggtcagccttcgcgtcgttcaatctgtacaccaatgtggaccgtcggctgtccagcgggggcacaatgacaagcacggaggtgcacaacgtgatcgcattcggtgttatggccagatacgtggagaagaacgtcgaccgagggacccgtgtttacttgaccggacgtcttcactacactggcggtcagctgaacgcggacgggtcgcgctccccgcgcatttgttcagtcaacttggagagcatctacccgttgtccaagccaggcgcgatgtacagcctctgcggcggcggtggtggcgcttctcgcgaaggtgctgatgacgggcttaaggattgaatgaatgaaatgatatcaattgttttgttgttgatgcggacaatatacctatgtgttgtacgcgagcccacttttttgatttttgataaattttgacac

SEQ ID NO: 92832 - DNA, 499 bp, Heterodera glycines
  unsure (1)..(499): unsure at all n locations
cacgaaggttggtcaccaaaacttatggtacaagacacaacaattgcacagggaacaaggaataaaatatcttgaagaaatgcacagcctttcctggaccaacattttcgataatacctaaataaaccaacgcccattgccattttggcggacaaggtgaacatgctggacaccaagcttgaggatgtgctgtacacggggttcaactgggccaacatgcaccagtcgcgcttgagcgttgtggccatttcaaacacattggacttggcnggaacggtttcttttcccaacggattgccaggccaatgggtaacaatcgactcaattttcaaccctacgaattcaaagaaattgaggagattatcagaggtcggctcaccgaatgccctgaaggcgcattcgaccccaaagccattgaattggcatcaaaaaaagttgcggccatttccggcgatttacataaagcgtttgaactgatacggcgtggcattgacattgc

SEQ ID NO: 92833 - DNA, 638 bp, Heterodera glycines
gtttgaggtccgttcatttttctgttcccaaaatgtcggctcttccgtcgccactgttggcttttgccacttcgattcgcttttgtacgtcgacgcgacaaaatctaaaaatcaaccaaaacacgaaggtggtcgtccaaggctttaccggcaaacagggcactttccacggccagcaaatgattgagtacggcacgaatgttgtggccggtgtgtcgccctcaaaagcgggcactgagcactttttaaagccgatatttgcaacagtcaaagatgcccggaaaaaaactggtgccgacgcttcagtgatttatgtgccggcgccctttgccgcggctgccatcgacgaagcgatcgacgccgaaatccctttggttgtgtgcatcaccgagggaatcccccaattggacatggtccgtgtcaagaaccgtcttctgaagcagaatcggactcggctgctcggccccaattgtccgggaatcattgcgcctggcgaatgcaaaattggcataatgccgggtcacatccacgaaaaaggcgttattggcatcgtttcgcgatcgggcacactcacttatgaggccgttcaacagaccactgagacgggccttggccaaactttgtgcgtgggcattggt

SEQ ID NO: 92834 - DNA, 568 bp, Heterodera glycines
ggtttgagctgttattaaatgggcaccgcggaagataagggagccgctgaaggccgagcggcagagtctgcgaccggtcgcattcgccgccacgtgctgggcgacggtggcaatcacctcctgtctgatcattttcccgctgattgtccattacatccaaacattggaggccaacgttcagttggacctcgacttttgcaagtcacgcgcccgggacatgttcaaggaaatgttcgaaattaaaacgggcggaaaaggcggcgaagcggcggccgcgcgattggccaacatggcaatccagcgtcgccagttggagaagcgtgacacgctcggcgactattggtcgcgccgtctgcatgacatggcgttgcgggacgacccggtggacgagcgggcggaaggcattggcggacgactcggcggcagcggcggcggcgccacgtcgccccaggcgccgaccaccggcggcgtcgccaaaacggcggtgacatccaacgcgagcaaaatcggcggcacttcgtcgacacgcggcggaagcagcagcagcaaagagagtgcaccgcgcgcg

SEQ ID NO: 92835 - DNA, 362 bp, Heterodera glycines
tcccatggctatccgtttctttcgctcccctcaccctcattaacctaagttttgcgcctcattctcggccttttctttatatggcgtcattagcaacgtaagcaattagcaaagcacaaatcggagcatcaacggacggaatgccaattaaaatttggcggttcggtgcctttccttttatttgaaaactttttgtgttttccaattctaagaacagtcagtcttttgagagtttgtcaacacattgaggcctctgccttcatttgatagtgttgctttgataaggtgcgaattcgcttcccttttggtcgttcgtttccgccgtttcggcgtgccattggcacttcgctgcgctgttccct

SEQ ID NO: 92836 - DNA, 641 bp, Heterodera glycines
catgacagacaagcgggagaagaagccgtcggcgcagccgcaacaacagcaacacgaagatggagcagtacaacagcaaaaggggaagggcaccaatgccaaaatggcatttgatgacgaggaggagttgcaggacgaggagacggagcagttctaccagcaattcgcgggcagcaccaccagcagcaaattggcggccaagagcaaaaagttttccgaggatgagcgcaacaaatacgttggacagttcagtgtcgtcatgggcatgttgcagaatgtcaatcacattgagtttgacaaaacgttggcccgactgagtacgaatggcgattatcgtaaggcgtttccgtccgctgccgacctgctcgcattcatcaccgtcaattgtccgaacatcaaggccatcaaagtgtccaagcaggatgtggcactgttgtggagcgagcgcagtgacgagttggtgtcgctgctgttgcaacacgtgggcaaggtgatcctgaagaagagcgttggcaaggcctacgattactaggacatctcatcatcatcatagcgaacggcacattttgtttttggcatttttctttttcattgacactattgaaatgttttgttgcttctcattttgaccttttgtcgcc

SEQ ID NO: 92837 - DNA, 615 bp, Heterodera glycines
ccattcattgatcattcgttcgttcgttcttcgtttcgtcaatggcattctcttccgtcttttgccgatctccgtcccttttgtcccttttgcccattttgcttctgatcattgcccagtttgttaatggcatggactttgatgaattcgaattgccttccgatcgattggacgcattccaaaaacggagggcgcgcgaacttttcggaaagcgaagcgcaccacctccggcagcagtcgcaaattacgaacgacactcccgaagaacacgagaattgttcgggaagagagcagctgctgttgaaccgttcacggaagcggaggaagttccactgatggtactctctttgaccgagggggacgagcagtacaatgccaacacaaacaacgaaaacgacggtcggagaaggcaaatgccaattataaatacgcggctcagaatgtttcagcctaaaaatacggccgatgcgatggcggaggaagcgccgtttggcaccgacggtggccgactttggcagtggcaaaggccgcgccggggcgtccatcgcgaattgttcggacgatgaggcgaaggaaatgaaaggacgactatctgccgatgtccaatttgttagc

SEQ ID NO: 92838 - DNA, 592 bp, Heterodera glycines
cgactttttcgccctgacaatgtctttcaaattgattcttctgatcgctgtgccaatgtttgtcatttgttgtgccattcttttgaagtattgggaccgcctcaaaaaaccaccaaaacaacaacgagaccatcgcaaaattgaaagagtgccggaaattgtcttaacaatttgctccgacgaaatgtcatcagacaaccaaaatgaagcagaggcgaagatggcgaaagcaattttcatttctgctgactgttggctttgtgtattcgatttgcttacgccttcacaacttggccacggaattgcgatgatcagccaccgatttgacttttacgtcgatgaacacttcaaaactcgcaaatggacgctgaaacctattcaaattgaaataacaattggagaaaatggcacaaaggaaatggaaattgtcaatgatgatggagaagcattgccaattccgaaaatgaaaatgccacgcaaagtcatcggattcaaacgcatcgaaatctctttcatcgacaaaaatgtcatcgcttttctccaccgttttggccaacttttcgccgtatgtccgattaatttgttcatcggc

SEQ ID NO: 92839 - DNA, 550 bp, Heterodera glycines
  unsure (1)..(550): unsure at all n locations
gagaaattncccgggntgcatgtactaaaagggagggaggnngaaaatnncatcgaccggaagaagcacattttcaaattggcacagggcgaatatgtggcaccggaaaaaaatcaaaagtgtttatgtgcaatgcccacttgtccagcaagtttatgtggacggcgacagtttggaacgaaatttggtggcgatcgttgttccaccggagaaaaccctcaagcgattgtacaaggaattgcacggcacagcccaaaatggcgatttggagaagcgctttcaggaaatttgtacggacaaaaagattgtcgaagctgtgttgaaacaaatgcaacagatgggcaaagagcagaagctgagcagcattgagcaggtaaaggcaatttttctcgaggtggagccgttcagcgtagaaaatgggcttttgacgccgacactgaagtcgaagaggccccaacttcgacaaaaataccgggaacaaatcgcggcactgtacagaacgggcgaaaagtaaacgaattgccattggaaagacggagaaaaatgcctc

SEQ ID NO: 92840 - DNA, 385 bp, Heterodera glycines
gtttcgtccgacgcccggcccacgatggcgcgaggaggacggcctcgaaattgaggtgacccacaaaattgaggaaagcgcttgccgtcgttcggcacccggcgacaccattcaccagcactacacactgaacttggcggacggcacattcatcgactcgtccttctcacgcagcaaaccgttcattttccgtctccaccacggcgaagtgatcgccggaatggaccgtgccatgacctcgatgtgcgagggcgaacgtcgtcgcgttgtgatcccggccgcattgggctatgggggacaggggcgtgacaatatcccccggcggcgccactctctacttttaactttgagctgcgcaaacttgatcaaaccgacggcagaagaa

SEQ ID NO: 92841 - DNA, 382 bp, Heterodera glycines
ctactacatcttctttgctaaacttcaactgcccagacgactgtcaacgcagcgtggcctccaacattcaaggtgttcccctggttcttccggaccgttcggaccgcctggacagcccggtactttctgtgaggcgcatgacaggccggacagtgctggacagcctgggaaaaccgctcctccttgaccgaccaaaaagatcccctggccacactggcctgctggcccgccctgccgcctcggagagactggaccgcccggagagcaacgagaacctgctaaacctgtgacgcccgactatggaggaggacctgttactcctagggctgccggaccccaaggacagtctgtactgcccggactacccagaggctctggccaa

SEQ ID NO: 92842 - DNA, 595 bp, Heterodera glycines
ggaatgtcaacaaattgaggagcgtactgatcggacaggaagtgacggagagcagcggagcaggaccagaagcagctgatacgagcggaggcagcagtcgcagcggtggccattcgcccgccttttctccccaattggtccggccccattttgagtttgtcgaccttggcggcggcagcttcatcaaagtggtgtccagcgaggcgtgtgcccttctctccgcgctcaccgaactgatcaagaaaggcgagcccgaggatgtgttgttggagcgtgtgccgcttctgctggccacgctgttgcaggtgttggccgcgcttgtggacacgcaatactcaagcgcccaaaagcacgccgttgtgccggaacgggacgccaccgtcggcaatggcaacgggcggaagcgtcgcttccgcctcatcgacgacgaccactcaatgccaacaatcagtgagcagcagcggcacagtttcatcatcacagactgcagcaaattctgctgctactgctgcggcttcaacgacgccgtctacgcccacaatggtttcaggcggcgttgcaatgcaatcacctactaaaaagggcgccggaggtg

SEQ ID NO: 92843 - DNA, 451 bp, Heterodera glycines
tcacattgttctctggattgcctcggtgtgctctctggtgaatatcatcgccacagtcggcactctgccatctctgtactcagagatgaggcaaatgaacaacaaagtgcgcgacggacttgagggcttcggcgtcaacaccgactcgtcctgcactgacttgatggacgtgcaagtggacatgacgccgacgtcgaaaccccgtgataaccccttcaactccatcttctttgtcaaacgtcaactggccggacactgccagtgcgcttgcctccctcttgtacgctgcagaacatgtcccgccccgccctgacctgactgcctggcacggctggcccggatggaaggggacggaccggacgggaaggatggccagggacaacccggctcgcccctttctgggtggacgaaaatggtacctttggcacccttcggaccccgaggaaaacct

SEQ ID NO: 92844 - DNA, 187 bp, Heterodera glycines
  unsure (1)..(187): unsure at all n locations
ggagatgagccaaatgaacagcaaagtgcgcgacggagatgaggccttcccgcgcagcaccgactccgcctggcctgacttgatggacgtgcacccggccgcgacgccgccgtagaagccccgtgatcacccctgcgactctattttttttgccaaacgtcnactgtccgggaactgccagtgtgct

SEQ ID NO: 92845 - DNA, 232 bp, Heterodera glycines
ctcgacgtgctctctgatgggtatctgggccacacgaatggatctcgcatctgtgctctctgaaaggacccccatgaacaccagagtgcacgactgaattcacgtcttccattctaacgcctgctcaaactggactgacttgatggacgtgcaggtggccgtgacttccacaacggaatgccgtgataagcccttcaactccatattgggtgccagatctctgctgcccagc

SEQ ID NO: 92846 - DNA, 378 bp, Heterodera glycines
  unsure (1)..(378): unsure at all n locations
caaacccaattgatgctgggcggggggccggcagcggcgcagggactgccgccaacgcaaacgaaagcaattcgacgacgaaaacggggcattaaaacgtccggactgatcgccggggcactgatcggcacgggggcagccgttggagcgaacgcatacaaaaaatacaaagcgaataagggctaagggagcggaggacagacaaagagagagaaagggacaaatggaagcgacggagaattaattggaagtgatcaattaacactaatatgcatcattaaaagaccaattagcacacaattgacatttattatgaaccacatttaaaatcattttaaagagaaccatcacagtaccnnaaaaaaaaaaaaaaaaaaa

SEQ ID NO: 92847 - DNA, 139 bp, Heterodera glycines
cacggagaggactgagttgatggacgtgcaagtggtcgagacgacgccgaggaagacccgggataaccccttcaactccatcttttgtgcaaaacgtcgaatgagcggacactgccagtgcgctggcctcaaacagcca

SEQ ID NO: 92848 - DNA, 384 bp, Heterodera glycines
cgcaatttacgaaaattatataatttgttcggcctcaaacagcgaatttccggacggtgaaaaggagcgtatttacgtattccatgccgaaaaacaattggatttgtacgaagcaaattccatccaaacaaatcgaattttgcaaatggccctcaatcgctctcatttgctcactttcgacgtgaattcgctgatcgccatttattctctgtcgctttccctcgaaaatgatcaaagcgcagattcgctctctttggaatgccttgccgaaattcgtattgctgaattcctgccccatccgaactgtctcgtctcaatggaccagacgaggctcaatttctattcggatgctgttcccttttgtgatgatttggactccctttt

SEQ ID NO: 92849 - DNA, 601 bp, Heterodera glycines
tttaaaatgtccgacgaaatcaaagaactgaaggccattacgctgcaaattctgaagaatcagacgttgatgatcgctcatttagtcaatcaggcacgccaaaataaaccgcagcaacacgtccaaccgccgctgatgttgaagcaggtcaagacggagccgtgtgagcctccgtcgacggtgtcaaagcgaaaggcgccgtcggccgtggagcagccattgaatgaaatcagtttcatcaacaaaaacaacggcggatgcgctacggtcaataaacgtcgcaggatgagcgcaccgaacaccgctgggatggccaccaaacagaacaacaccaaattctgcaaaatttgcgatgccgtggtggacgagaatagtctcgtgagtcacatttgggagcacattctgaaaaagatgatgaaagagaaggcggacttgtccaatgcgtacagtttcgtttgcgacgtcaacggatgcgtcttccgtaccaacaagttggaagcggccggtggccatgccatcaaacacccggaagtggagcgtaacaaggttgtgttggacaatcgtgaaaattcggagccgctctttctcgccactctcgcgc

SEQ ID NO: 92850 - DNA, 418 bp, Heterodera glycines
acgcacaaggcccgacagagttcaggccttccgcccatccccgagtctgcctggaatgccttgtatggacgtgcaaggggtcgagaggacgccgacaaaaggacgggataacccacttccgtccaacttccgagccttatgttgtctgcccgcacattgccaatgtcctgggctccgacgtgctggctgtccccctggtccaccctgaccgaccggaccggatggacagtctggacatcctggaggcgggggaccccccggacactctgaagatcctggccatcccactcctcgttgatcgtcccaaaatgtaccccgaccacgatgacctgctagggcccccggacgaccctgaggacatgaatcggccggagcccaaggagtcgcggtgaatgctgacacgacggatcagggtggt

SEQ ID NO: 92851 - DNA, 369 bp, Heterodera glycines
caatcttcatggcgactacaaccaaaacaaggcctttttggtgcagaagttggtatgccgctggaggggctagaatcgccgcgaacgtggacaacgttatcaaatttgcgacttgggacatgtttttcgaagcgcgtcgcattttgcaggctgacatggaagtgcgtcactttttctacaatccaaatccggcaattgctcttcaaaacaacattaactcaatttccgatcgtctctacaaccgtggttacgttttggtcagatgactcgcagaaattgaagacgcagccgtgtcagttcttcgagttttaaaggatgatccattgttcattcagcattttttgttgcaaataaagacttattgccttt

SEQ ID NO: 92852 - DNA, 230 bp, Heterodera glycines
  unsure (1)..(230): unsure at all n locations
ccggactcggngtgagaacggacagcccggccagtctggaaaccccggcccgcaaggataccctggcgacggcggaagccccggacaacccggcaaccccggaggcagctgcgagcccggacagcccggagcacagggatccagcggccaatgctaccattgcccatgttataacaccgcccccggctactgagtgtgatcagtcgactatcgacaattggagaagaacc

SEQ ID NO: 92853 - DNA, 646 bp, Heterodera glycines
cttctttataaattttctgtgtttaccaattcaaaaaaaagatgtctgacaatccaaacgaagcaaataaagaaatggaaaaagagatcttcatctctgccgactgttggctcaaagtgttcgatttgctgccgccctctcaggccttggcattgcgatgatcagccgccgatttgactattacgtcgacgaacactttaaaacgcgcaaatggacattgggcgtaatgaaaattcaaagcaaaattgtacagaatggcgcaaagaaaatggaaattgtcaattccgatggaaaagaattgccaatccctcaaaatccgttgcccaacaaagtcatcggattcagaaacatttggatattcttcctcgaccacaatgtgctcatttttctccgccatttccaccgttttttccccacttgcgcaacaaaattggaagttgagactgaaaatgttcgcgtttcggagttccttctgctcaacatttggccaatgctcaaggacaccatccgtgagatgtctttggacgacttcaaccgtcgtcaaattcgccaattggccccgtcaatgctaaacgattgtcaatctctcatctctgtcactttctatggccccatttaccccgaatttccgcctgatgacagtgcc

SEQ ID NO: 92854 - DNA, 361 bp, Heterodera glycines
  unsure (1)..(361): unsure at all n locations
agtcggaattgcttcccattgttcagtggtcgcgattttggacactcttgtggtgatcccgcaactgtgtcctacaatctacgaaatgaacaaccgcgtgntggacggtgtataagctttccgcgtgcaaacggattccgcgtggactgagatgatgttggtgcacatcagtgtcacgccgccgacacatctgcgagagcatcccttcaactccattttcctacgcgcttctttttacggcattgcctccccaatgcgatttcgcgactgcagcatccncagctgtccctcctggtccatgcctggggcagtctgggcccgcccgcgacaccccggacgagccacggggggcgtcggtgga

SEQ ID NO: 92855 - DNA, 624 bp, Heterodera glycines
ctcggaatgcgaatttatttttgcttaatcttttatttttgctgtttttctttgttggtttgccgtccaaagaaagccaagacgaagaaaccgaagaataaaaaatttgactacaataaattgcgagatccggacagaaaaggatgttatggtggcactgctgactttcattatttcggcaacaaaagcgaagcggtggataatagcaaatgcattcgttggcttagcgtcacaaaatggattatgcaccaattccgaggctaccaactttattattttgctgacgaattcactgagcacaaccattgcagaaacattgacctgaccatttacacgccgaacccgaagctgtccaatgcaagtgcgcacctttttcttggctacgacgagcaaattgcgaaggggccgtggtgctatgtggagaagaagggggatatgcccgaacatttgacggcgaaatggaaaggatatcatttgacggaccctgggaacagcaagaaaactatccgctttcccgacaaaatcaatcaattaaaaatgaaatacgaaccgaagccatgcttcaaaatgtgcaaatgaattggtggtagacgagatgagaaaactttggaagttcttaatttg

SEQ ID NO: 92856 - DNA, 570 bp, Heterodera glycines
agtagtgctttatattgccattcttcaaattaaacttttgctaaaattccatggacgaatcggcgaaaaagacgctaaaacaaattccactgctgaaaacaaatgcagggccacgagacggacccctttggcttgaacggttgaaggaggagtacaacagtttgatcgcgttcattgagcacaacaagcagggcgatgccgactggtttcgacttgagtcgagcgcggatggcactcgatggttcggcaaatgttggacctaccacaacaaaatcaaatacgaattcgatgtggagttcgacgtgccgattacatacccaaaaactgctccagaaattgcccttcccgaattggacggaaaaacggcgaaaatgtacaggggaggcaaaatttgtttaagtgatcacttcaagccattgtgggcgagaaatgtgccgaagtttggcattgcccatgccttctcacttggccttggcccatggatggctgtcgagattcccgacctgatcgaacgtggcgtgctcacactaaaataaaaaacattgttgctgcaaaagaagagggcaccgg

SEQ ID NO: 92857 - DNA, 579 bp, Heterodera glycines
gtgaattttgtgttggcactgaacgtgccgatgagtgtgctgctgcgcgaagcggtggttgaacggctggtcgagccggcttgggctgccatgtccatgtcaccgaaagagttgctctcgcgccaattgatgcccaaaattggcaaggctaccggtcttcgtccgtcgctgaactcggacctgacgctgaccgtcacattggaaaatgacgaatttgtgcagtccgactttgactttctcgtcctgtattttcccgacgaattcatgcgaggccatgccccaaaacggaggcgccgtggcggagggagtcgcacaccaaattctggtggcacaaatgtcgttgttgaagaccatgccgtcgtggacatggcctcttctctgctgaccaaaatgaagatcaaagcggcgcgcgaccaaatgagccgtgccgtggcaaacattttcaaattttcgcccgcctcgcttccctgcacttgcaaatccgtcactttggagcggttgccgttgttcatcggcggtcgctattgcaaatactcgcgcgcactgccccagtcgccatggattggcgccagcgatgaa

SEQ ID NO: 92858 - DNA, 361 bp, Heterodera glycines
  unsure (1)..(361): unsure at all n locations
cnatggagaagacgctacantcatttccactgctgaaaacaaatgcagggccacgagacggacccctttggcttgaacggntgaaggaggagtacaacagtttgatcgcgttcattgagcacaacaagcagggcgatgccgactggtttcgacttgagtcgagttttttttttttactcgatggttcggcaaatgttggacctaccacatcaacaccccatacgaattccatgtggagttcgacgtgccgatgacatacccaaaaactgctccaaaaattgcccttcccgaattggacggaaaaacggcgaaaatgtacaggggaggcaaaatttgtttaagtgatcacttcaagccattg

SEQ ID NO: 92859 - DNA, 634 bp, Heterodera glycines
gttcattacgttcacctgacccgcgcatttgtgccaaatttgcttgtgatggcaccactgatccaatcagaaatggccaatcatcgctgtttcaacaacgaagaaattatgagaatgtaaattcaacaacattttgtgcaccagcaacggaagaaattgaggaagatggaatttgcaaaacggacgatgactctttcaatgactacgaatttttccatccacgacaaacgacgtgcagcactattcggggcgaagaagcggaggcgaaaagagagaagaaggggacggaggacaacaacaatttgtcatcgtcatcttcggtcagcacaatcaccgcaatgacacggacaaaaacattgccaaatggggcgaaacaacacgaagaagggcacaagaaacggtctctccaccaggaacccctttcccggaaaaagagcagcaaccaagttttggaaaggagttcgctcatatcttcgccgtcctccgatcacacagagctcgaagtgttccacccctccgactgtagcttggcaccctcaagttcttcatgttcctcgtcagatagccttgaaaaccaccggcagtcccggcattgtcccgagttggcgaacaatttgcagtcccagtcccacca

SEQ ID NO: 92860 - DNA, 535 bp, Heterodera glycines
attctattttgattgctttaatttaaaatctcaacttcgatatggattccaattccaattcacataaaaaatcgaaaattgtcggaattgtcacccgtggcgtggaattgggagcaggaaaatcgctcatttgtgtttggaactcacgttcccccctcaaagagtacaaattcccacgctgggcctccgaatacaccgtttggttcaattggggagaaatcgtgtggattgagccgagcaaatccgttgatgaggtgcaagacccgagaaacatcagcaaattggagccggacaatgaacgattgcggaagatcaagtcacttacccaattggacacgaggcactgtttttgatcaaagtgatcgtcgcttttccgccgccttcggtcgaccattatcgcgatgagctcgctgcttcgaagtctttgggttgccgtgcgatcggatggagtgtcgaaatgggaaaagttgcacttttggacgaggcattggtctttaaaccgggcgtttgttacagcggttacgtcgcacgcatc

SEQ ID NO: 92861 - DNA, 525 bp, Heterodera glycines
cccccccctaaatttgtcctcctcctgtgtgaactgtgaatgaatgaatgagtgatttattattaattattgtacatatatatggcgtagttttgtgttgtctaaaaccgtcggcgccgccgggccgccccgccgccgtctgctcgaaataatgcgcaagggactttttggtcacaaaatttatcaattgggggggctgtgtggtggtggtggtggcggcggtgtctcgacaaatttttttccccatttgctaaatttactccctcccgatcattatatatttatttttaattattacccgttaattagatgggaggaggagggtttgtaaatttgtcttcgatgtattttttcaaaaaaaaaaaaaattttgtttgggaaaagtgcaatatgcaacaaataaattaaattagggcttgacacaggggcggggttccgcgcgacattttgcgggatcccactccaaaatcagtcctgcattcttggaatttgcggggatatttattactcccgcggaatcccttc

SEQ ID NO: 92862 - DNA, 598 bp, Heterodera glycines
ccatcaaagaaagaacaacttgccaatgccaaaagtgcggttccaccgaagaaagaacaacttgccaaaactgtggttccaccgaagaaagaacagctgaagttcgaggacagtgaagaggaggacgaagtgacggatgaagagctggacgacgaagagatggacgatgaggaattggaggacgaatccgaatcagacgaagaggaggaacaacagatggtcaagtctttaaaggctggcactccaaccgttgcccaaacgcagcagcaaattgccaatgccaaaagcgcggttccatcaaagaaagaacagttgtctacccaaactgacaaatacaagggaattgctgcggaagaagagcgtcgtcgtgctgagagggataaggtaactcttttttttacgctgtgaaacgttgcaaaagatgaccgatggtgagatcaaagctcttcatcccgatgccttagctgtacgcaccaacaacagggctttttgctggatggtttttgcatcggaacctactgcggataaggcatttgccgtgttgtcaaagaagggacgaattggggggaaggaattgtacgttgacaaatgtggaacc

SEQ ID NO: 92863 - DNA, 606 bp, Heterodera glycines
gcaccacgatcagttgcggatgaactcaattgtcgaacattttcatctgatctggaggcaatgagtgcctcaggccatgtcattcgactcaagaatatgctcaggtgaatttgaacattgctgggtacacagtccgttcattaatttattttgtggatgattccgaatttactgtggcccgggattacagtgtaattgtcggttgggatgtctttgaaaaattgcccccaataaaattcgatcatttaaacgggaaattttttgttggggacaacgaatccaaattgtgctatcgttcaattcttactgaacgatttgcgcgtgtcggcagagaaaaacacactcattccggccgactcccaaatattggtcgatgcttcaatcgaatcatccccaaacccaaaaaattcattttgcattgatcgccctgacataagtcttattaagaagggactgtcagtcattaatagtgtctcgcctgcgggccaataacaaataaaagtggcagtggtcaacccaaccatggaaccaaaatggatttggaaaggaacacatttggcatttgccaatgaattgttatgtgaccgaaatggacttttgaaggaa

SEQ ID NO: 92864 - DNA, 458 bp, Heterodera glycines
gtgagtgcgggtggtggtcggcagaatggtgagttttccgggcccttcagttcccagagtgtgctgccgtggttgttcggtagtccatggtccgtgacattggtgtcgtcgtggttgtccaggcattgggccgtgtggttgctttggttgaccaaattgttgagcgtgttttggttatggtcgccgttgtgcgtggtggatttgtagtcgttgtgcgtggtggatttgtagtcgttgtccacggtggatttgttggtgccggtggagtcgttgtttggctcagactccgattaagtgcgaggactttgtcaatgtatcgctggacgtatggactgtgttttgttgccgtcctcttgtcacgttccgtgaataggttgaggaagttggaaatgtagccgccgtgccatgttttgacttccgcaaattttttttgtcgggttggttgtccttgtgccgca

SEQ ID NO: 92865 - DNA, 578 bp, Heterodera glycines
ccgcgaggggacgaaaagcagaagcaagagagaagagctgaggatgatcagctgttgagctgttctcttccgtcccaccttttcggcgatttgacctccgcttccgtcgcgacgccttccgccgttgcgccaacgagtgccgacctcatcgttcatcgccgttgtgctgctgaccagtgctgttgctgtgcttccccccgctcgttccccgtttgccatcgtcggcccctcccctccggcacttttttgccatccgcaaatgctgtaactgaacagcacgggggaggagggggacttctactgccgatgggcatccacgagaacaaatacgcgacccaacaaaggcaaacattcgccgaagcgaacggcggcacttttcgccgcgagggcggcgaagagcgacagaagcagcagcagcaacagtacttcacattccacccgaaagcactgcacaaagaattcccccgcgtggaggagcgtcccagcgttttggagatggaacagtccttcctgctgcgccaccagcagcgccagcgtctccgttcgggcacccccgaacggcgttcgtttcccctctt

SEQ ID NO: 92866 - DNA, 579 bp, Heterodera glycines
gaacgatggcttcgaagtggactcagtcaagagaaagcagatgccgacaatgactacgacttgaatttggacggcaccacactgaacgaattcgcagcagcggtcggccttttttacctgacaatgttcgacggaaaattggcgcacctttcggccgacggaattcgctcaatggacagaccgctgagtgaatggatgtatgagccaagtccgctgatgttcagcgaacgcatcgacggcattttcagatttttgctccgtcagcctggtctgatgcccggcctgcatatgagtggcgaactgcgcgacaaactgtttcgccagggcggtccccatgggttggacttggccgcactgatcgtccaaatgggccgtgaccatggcctgcccgggtacacgcgggtgcgcgaggcgtgcggcgaaatgccgcaggtgaaatccttcgacgatttggcagaaattgtcgtggagccgaagcgaattttgcccattttggcacgccattttcgccgtgttcaggacgtggacctttttctgttggggctggccgaacggccccggcggggcgctttggtgggc

SEQ ID NO: 92867 - DNA, 526 bp, Heterodera glycines
tttgagagttgtataatttcaatgcctcacgtcatcgaacacaaaatccgtctgctcggcagtccctcgtcccctcaccgttcgccacccccgtcggaattcggacggcacgtcgaactccaaaaggacaaaagttgggccgaaatgccatttgagcgaaatgatgccaaggaaaagcagcagcagcagcagaagaggaggagcactttctcaggcggagaagagacttttggggtggaaagttttgagagaaaccttcgctattcaccgcacgaggtcgatcgccaacacttttctgtccgaacattcgaagaaaaaattcccctggggggcggagaaaatgaaaggagcggcggcgttaggttcgtaggccaacacgagcagactcaggaaaatgcttctgaccacggcgaaaataatcactttcttctgcgccgttccccccatttggacacgacgccaattcgaattccacgagttcgaattagtccatccatcgagagggaactcggcacggggtgggcgg

SEQ ID NO: 92868 - DNA, 577 bp, Heterodera glycines
tttccagaatttttccgtgtatttaaatcatttttattaaaatcgaaataaaaagtgaagaatattgatgggattaaaaatattaggtaaaaattacgaataatgagcaaaagaagggttatctagtaacgtattcaaaaaacaaaatttcgaagcttattgttaactttttatttaaatgcttacaattagcagttgcttacaattagaaaaagattcttctatcttaagccttcgaattgatatcaagatcgtccaatttggatggacacaccttcaaaatctttatttaacacggcgattcaattttgggctctaagtacaattaagttggatttttcgtcttagtggtctgtgagttagtcaacaaaaaggggtctcacaaagggaggtggccaagtttcccgtattcccgtccaataacattttcattcattttttcaaaatgtacgttaaccccaaaaatattctttttctactccaaaaatattttaaaaaatataatgaagaaacctcattaaatgatcctgaaattgctattgccaaaaattttgcttctgaaattgaacgatgcctc

SEQ ID NO: 92869 - DNA, 477 bp, Heterodera glycines
aaacaatccgctaaatttggaagtgttaggttccaattaactatttgtcctccttcgacttggccatgtctttggccctttgcgcagctccctttttcctttttgctctttcttcggcttctcctcccttcttggccactttcaacggttgtccccaactgatcgatggccaattgctcgactttgttaactccgggggcattcggctaacaaaaagcaaaacggggaattgcgatcggttgatcagctgcgatttgatcggggctccagtggaactaacaaaagtcgaatggtacgtaaacggaaggaaaatccaacggacgaacgaagggacggaaagggaagagacagcggaaaacgcacaatcagaaaacgaacggacagaacgaagcgcaattggagtaggcgaggtgagtcaccgtttctgtgccgacaattggctcgttgatgagccttcgcttaatgagaatggcatgg

SEQ ID NO: 92870 - DNA, 474 bp, Heterodera glycines
tttgtgtgttaattaatgctaatgaggagggatcatcgggcgactttttactaactgatggcctcttcccttgtgtttattctaattctgcctaattggatgctgtgcccttcagctgttaacaaaatttattccgttgactttaattgccaaggagccttctttgatgaaacagcgggtccctccccccctttccccgcttcttcccttccttacccttccctcccctcttctatctccccttcccttccctctccttccctcttctctccccccgtttctctcttctccctttttcccctcctttctcttggcaaataaaagcattcccttccattaacttttcctttccaatcctcatcgcagaagggtgccaaccgcctttccgctgtccaccgcttttcagcttctctgattctgattgtgagagattcttccgcttttccattcattcccctttatatacgggggggg

SEQ ID NO: 92871 - DNA, 525 bp, Heterodera glycines
atcggtctcattttgtttttcgctaatgatcaatgatcattttatcactgtctgaccaatcacttaactgatcactcacattttgacattttgttgcatccttcaatttccatttgccaaatgccacaacattcaatcaccaaatcaatcctcccgtgccatccctctccgtatccaaaaaatgccataaaaataaagcatcgcctgcgccgtgcactgctcggcccatgttttgccgtcgttctcccgccaccaccaccgagtgccattggtgccgaatttgtgccaccccctgtgccgctgatgtgcacctgcgacaccgttgtcgcgattgcactggcaccctcccggttgtcgtcccgcatgttggccggcaaagatacaccggcgctgccacgccgtgcactcagcacgctggtccgtgccacggtctacgactacgaactgggcaaacgccgcaaactgtccgcctcaatgcgaaccgagtaaacaatgatggcggcacaatgccttttatgcccataa

SEQ ID NO: 92872 - DNA, 486 bp, Heterodera glycines
attcactcgatcaaagaacggcttgacaaatatggaggttgaggtgaaacagcaagagggtttctatctgaaggcaattgtgaccgatgtgttggagaattcgctggacgttgtttatgaccgtggatgccgaaagccggaaactgtggaattcagccaatgtcgtgctgtcatcattgaaaatgcgcagcaaaagcgaccgtcaaaatgcggcgacattgttgatgcccttgttccgattgacaattctacgatgacttccaggcctacaagaagatgaagattcgggagatcaagggcgattttgcggttgtgtgcagcgtggacaattccggagacggcaacgtgtcagcattgggcagtgaagtgatcccgttggaccaatgccgtcatccggcaatgtgtatgctaattgatgccagctcagtgaaacagtgcgccatttcggtgccggacgatttggtcaactattttgtgcatggcgaa

SEQ ID NO: 92873 - DNA, 599 bp, Heterodera glycines
cctgaacaacgggtttaacaccgcaaccgcacaacagacgtgccattgtgtggccaatgccggtgtaaagtaagcaaagaatttttatttaattaaatttaaattaatttatattttcaaaatttagggacttgaagtcggtctgtaacaaagtcgtcatttcataaatggacaaatggacgaatatattcgataaaattcatattttgatcaaagaatttaactctggaattttgataagcgaaattaaattattttgcaaatgaggaaattgaaaattaacgataaaacttttgcattacattagagaaataaaattcacgataaatcaaattaaataataaatttcaaaaatttaaattttgaatggcatttcaaataacacaaaggcatcgtttgcattgccacttttgactggcaattaaattgtaggcaatataaatttaaaatgtttgttcaaacaatttgcttagatttatgcccctgatatacttaatttcttaattctctctttctctctcttatcctctgatcattgttcccccgtcaatgtcagcccggggggcggtccttcttttcactaatcgagactctttata

SEQ ID NO: 92874 - DNA, 649 bp, Heterodera glycines; identical to SEQ ID NO: 72365

SEQ ID NO: 92875 - DNA, 508 bp, Heterodera glycines
agcgtggataatgggatcgacaacaaatgagcaaaatgaagaacaacaaaattgcttgatgaaacaagacttcgaaaagctcaatctggtaaaaattgtacaccgtctgacagaagaactgatcagtcggcaggtaaccataaacattgggacaattgcacatgtggcacatggtaaagtcaacactcgtctaaggaatttcgggagtgcatacggtcaaattcaaaaacgaattggaacgaaacatcactatcaaattgggctatgcaaatgcaaagatctttcgttgctccaatatcaaatgtccccggccgcattgctacaggtctgctgggtccagccactcccgaccgtttcccatgtgaacggcccgattgcggtggtgactttgtgtgtgttcgccatgtttctttcgtcgactgtcctggccacgacattctgatggccacgatgcttaatggtgctgctgtcatggatgctgcgcttcttctggtggccggcaatgagc

SEQ ID NO: 92876 - DNA, 554 bp, Heterodera glycines
ccaacacatttcatttttgtgccttttttttattatttttaaaaccatttgtcaatgtttggtcttcacttttgggactcaatacggctttggtcatttaaatccaacttttcatttatatcacttcagatcacctgaaggagtggtcaggtcttattggtgtatttgacttttttgatcagaattgaaagattataactagggataagaatttaagtattacttttaagtaatttttcaacggtaggggtcagtttcggttttatgaaaccaatgaatttaaaatagtctttttttgtgtaatttgtggcgctgatcacaaatatgacctttgtttttcaaaattcagaaccccaaacccgaacgaaaattcgaaattcataaattacaatgaagacatatttttaggggttttcgaggtggctgaaaatggatatggcagccgttttgccctagaaaatacccgaactcgaacaaaaaaatcgattttttctcaacaaacactcggatgtaatgacaactcgtaagaaatgtaactcgtataattgcttgag

SEQ ID NO: 92877 - DNA, 617 bp, Heterodera glycines
gtggactgccacgctgacagtctttgcttgatggcgtcaacgcgtttggtgttcgttcggcgagtgttttcttgccccaaataagctttcaatgtttgttctaatatttttttttataatttcctctttgatttatttgcattttaagcattcgcgggccatcattttcaatccgttgaacccgaccatacgtattcacggcagccgttgtagtttggcatcaattcacccgccccctcaactattacattggtcttgaagtaacccatcttttctgtattttttacttgtaaacccccaaaaaacttaacaaattttacaagtgtctgccatcgcccgaccctttccgacttaatttttgaagtcagcagaaacatcgaccgacaagtggactcagcgaattgagctcggaatttcgtgcactatgaaaattttgaagattcgatcatacaattccccttttttcgattcattcaatatttaaaaatatcattatttttcgtgaaaattgttatttgtttatgcgattctgataaagtattaatgaatttcgtattttgaagctttaggaatgtaatttcaagactttttcgctaatttttatttggcgggatttc

SEQ ID NO: 92878 - DNA, 541 bp, Heterodera glycines
gaattgcatggtacgagaaataattagcataaatttatacaaacaataccctatatcaacaaaacatattgaatcaatcaataagacctgaacgaaaaattgctaaaaaacatgtattaccataaatccaaaaatgctactttatccaactgagccaccaattttaagtgaaaacactgccaaaatttcgattttcgaggccctttaactcctggaaattttttcgacacctaaaacaaaattcacaatggaagtctgtctatccaatggtatataacctatatgcattttccgagttaccgatcgcgaggttcccttgtaaatactaatttgataggattcatgacaaggtgtctgaaaacgaaaaccaaaaaaaaattttttttcaaaaataaaaacgaacgaaacaatttatttttttgaattgtcagtgggtaaaagaaaaattgagaattttttgtaaattttataaaaaaaattttgtcaaaattaatttttgctgcctttttacattttttgtgcctttttcgcattttaatgg

SEQ ID NO: 92879 - DNA, 549 bp, Heterodera glycines
aaataacagtacagttagaaattttcatctaaattaaaatggacaaaaattttacgcaacaaatttattttaaaaacaacaacaattaaatattgaaaaacatctaaaacataatagtgagaatttcaagcgggaaaaaggttttgtgatcaccgcctccaaattctacgacacacggcaagttgggatgatgcaaacggattccatgttttatgtagtaatgcattcgtacctaaaatctttaattatgtccaccaaattgccaaaaagtaccgtaattcccaagaagccgcggtaggccgggactgagtgggcgtcgagaatggagaggtcgttacagcgcaccgggaaatttcgaacaaaagggcgcaggtgggcggtccgcagctgagcagagcgcaagtgctcgacaatgtctcggcgcttctccaagttttggaacaacacgtgcagctcatgcgcgctacagttgaagcgcttgcataagtgctcgacgagcgggatcgggcgcgggcgttctgcacaagcacaagtctttggggtacctaa

SEQ ID NO: 92880 - DNA, 530 bp, Heterodera glycines
gttgttcaacagcaggtggtgcatgtactggttgaacatgttgttgcccattttgctttggcgattcgtccgattcaaattatagtcactgttgtcgttgtacacacaacagtgggcgtttgttgtccatcattgtgtgttgttttcacttcaccaacgggcatttgcttctcattgtttgagaatttggctgtccctcctgtgaattttttttttttgagaaattcaatttttatattctgagattttccatttttttcgaagttgacaagtatgtttagattttcacccgttataaaaatgataaataggaaaattaaaatataaggaacaattttgctaataaatatactaattctaagaaattcataaattcgggagacggaagcttttgatgggcctgtgccacagctaatttattatcgtaactattatcatttattctggattagttaccgtatccttttctatgtaaatgatgaacaatcaatggaatatgagggcatttatccaatacatttgcagcatta

SEQ ID NO: 92881 - DNA, 637 bp, Heterodera glycines
ttataatttttatggaaaatcagggcacttcaaccgcttctttatcctcaacatccgaagcatctccagaaaatgtttcagagctttgcaagaagctccatgtagcaactgcaaatttggttcgtcagtcaaacaaattgccaatgttaggcgatggccacgaattgtactcatcctttgctgattatgcagaatttatgcgagtccaacgcaaccgggccatcattatgcttcgaagactcacaaattaccaatgtcgtctgaatgagtccgttttgaatgatggcatgggcccattgattggcttttgtgatgcgttcgtcgaccgtgccgtttgttttaggtcatttgaaggctaaaatcccatttatttgtaggccattgcattggatgagcatcagcgatcattgacccgcgatcggattaaagcccggcaaatttcgttgggcgctgaaccaattcttagaagcgccacttccaccattgttgcgagcgcttcgaattcacaaattgtaaagtcaggctcagctgcggacgcgtacagccgaaatgcgcacggaggcggcgctttccgtgacggcggcggtcgttttgcagtgttttctacgcacagcgaaatgatgacggaaaacacagc

SEQ ID NO: 92882 - DNA, 395 bp, Heterodera glycines
ggccggtgggggccagggatagcacggaattccgacttccgaaatttttgataaaaagtcggaatttttttgagttttttttttcaaaaaattagcaatttttgtacaattttctgttaataaattgcattgaaatttttaaaaatttcccggcggcgcctatcggcaccgccggacctaaaaatccttaattctcttgaaaatgtgctagaaatcgctaaatttggccattttcgtggacaaatctgttaacaaatctcattaaaaatcactaaaatttttccagcggcgcctatcggcaccgccggacctctccccctattacccaaattttctttgaataaagcgcgccgcaaaaaagggtgtaactgtcccaaaaaaaaaaaaaaaaaaaa

SEQ ID NO: 92883 - DNA, 632 bp, Heterodera glycines
gttagtgttggtgatgatcgatcctcccactgctcctcaacctgtataaggcaatccacctcctgcctttggttaattaattgacgccatgcggtcgatgatgggtcattttctctgctgatttaattaaatttccttactcggtacacatgagcctgcgaagtgaaccactaaaattgtgccaacttatcgtccaacgagatgctgcctactcctgtgtggttgagctgggccaatattcgcttgttcagttcaaagatctcaaccatcatttgaccaccttccaacggacgtatgtacgcgaagttcgccgttgtgcagaaattgagcggtgccttcgctatttggagactgaagtcgtggaggggggcgtcagcgaccacattccgccattggacaccactcgaacggacatcactctgttgcgtgaaatgtacgatttggagtcacacttatacgacatcgagagggacatccggcagtttcttgccaacgaggcccagctgaagcgcaatttcaacgatttgaagcagttcaaaagtgtctatgaaaaggtggaagctttcttcagagtgcacattgagaacacggcaaagactgagttggaaagtgaacagctcgagattaacgac

SEQ ID NO: 92884 - DNA, 578 bp, Heterodera glycines
caattgagtcaaatttggtttttaattttattcttacagagatgagagatgcctaaagacccaatttaattctgctttgatcgtcattggatttaaaatttcatgaattatcgcctaaaagcattgaaatgattttgattagcattgtgctagtgaaatggataacaatgatattttttaaataatttcatttatttcttgagcagttttgtttcaatttttggcaaatatttggcctttttaggattttagcaaatatttttggtgtttttggcacacatatatatatatatatgtagtatatatttgggtttttagcaaataaaatccaggcactttccataagtaaaaataggtaatcagctaaattttgtttataaaagtttttaaatttacaagaatttttcaatactccgcatatttttggaaatattaaaatgatttattagataagaaaattaatataaaaataattttagctatctgaccaacatgaaagattcaaaccaagtctttttaaaaaattctttcgtctttagtggttgtgcattttcaattcaaaacttaacccaacaaaa

SEQ ID NO: 92885 - DNA, 639 bp, Heterodera glycines
gggatggacacggccgaatcagcgtcagttgcaccaaatcctacgggggaagtcggcgaaacggttgaaccttctcgcgttgtgtctgatttgatgtggctgaccgaccagtgcgaacggagatgcatgttcgaatgtgccaagtgggcgagtgaacagctgagtcatctgcccgaccaacactttgaagcatttgaattacaaaatcccgaccagcgacaaagcattggctgtgaagcgacgaatcgaatgccaaccaaaagacgagcgttggtcagctttgtccgggctttgattctcaacagagactacgacagagcgaagtcttttttcctttcgacggacattggtcaaatgtcctgtcttgaggccttcttgttttacttctcttggtatatgctttcggttcgaaatcgcgtggaaaatgaagcggatgaattggatcggaatgacgaatttgagaacaacgaattggccaatttgaggaccgaaatggaagcggcaaagctcaaacaacccgaccttttcgactgttttttgaattatttattgggcaccgttcaaaaagaaagtggcgccgacgaactcgcaattcgcacatttactgaggcgatacaaatggacaaacgttgttggccc

SEQ ID NO: 92886 - DNA, 549 bp, Heterodera glycines
gacacggagccggtgatcatggaaaatgttcaggacaaacaggtccttctcgacaatttgcatcccgggtcggaatacgaagtgaccgtcactctccgacaaccgcccggcgttgaccgccgtgtcgcgcccaaaaaggcagtccaacgcttccaaacggcggatcagccgccgagcggcgcaccgaacaaattgcgagtggaggttttatgggataccaaattggcattcggatgggaaccgccggagtgcttagagcagaacggcgagatcagtcagtacgagtacgagctgaacgggttggacgagtggaaccaggggacacgccagggcgtcagcccacgcacacgcgcagacattggcgaactgttgcccggctcactgtaccgcttcagggtcagagcgttcacttctgccgggcccggaccgtggtcagagccgatcgacgcgcgcacgacgggctccgagttgggaccgcctcgcgaactttcgcccattagttctctgcagaatgccatccaattggcctggctcccgccccatcccgaa

SEQ ID NO: 92887 - DNA, 221 bp, Heterodera glycines
  unsure (1)..(221): unsure at all n locations
accagaacaaggaaagcgaccggccatttcttctgctgttgggaaggcaaaagcaaccaaactgcctgcagccctattcccatgctaatcacctaattagccactaataacaccaaataacaaaactgtcccctgcttctcccaannatggcccccaaatgccttccgctcgaacttttgtacaantttgtgcctttcatccctgccgaanatgccacacc

SEQ ID NO: 92888 - DNA, 567 bp, Heterodera glycines
aaatatttttagcgattttttgaaaaaattaaaagccaagtactctgataagatatctaaaaaatgcaaaatcataaaaacttagaaaatacactgtaatggaaggactacggtaggtttccatcctccaacaaattacgctgcaaattgcagagattgtcctcataccgtatccatttaaaaaacacacagtatcactgacttatactttctgctttcccaatttcgctttaaggaattcagtgtttatcagccattccctacatttttcttcccattcattagtggtgcggtgggaatgccattttttgcttttgcgtcgcctttgtcaccgccaacggcgccgcctctttttggcaatccgtcgctctttgctttcccaccatttttactcttctcaaccgctgtcaacagttctttttgtgcctgaattttcattaaattcaatgcataattattattttttattcatctaaaaaaatgaagtgatcggatgaaggaagtcccggaactgagagggaattttcctgggacatttttacaatagcccaagatagggactgtatc

SEQ ID NO: 92889 - DNA, 535 bp, Heterodera glycines
gttgtgtgaatcgaatcggacaattgctggctattttaatgtgaagattttgacggacgaccatctgaatgagtacagaaaacagttcttcatcggcccaaaagtgaacttcaccatttgcaccgaagctgacctcagcgttcgttcgccggtcaaagaattttgggatcatcgcgtattgggcatcagtgaaggcattgaacatgtcggttctcttcgacaagacttggcgctgtacttgctgatctgctggatcatctgctacttttgcatttttaaaggcgtcaaatggacgggaaaagttgtctatctgaccgcatcatttccctatttgatgctgttctttttgcttttgcgcggcctttcgttgcctggcgccagcctcggcctcgaattttatttgaaacccgacttttccaaactgttggagagcaaagtttgggttgacgcggtcacacaggtgtttttctcttatgggcttggcgttggtgcacttgtggcattgggctcatacaacaaatatcacaacaatgtt

SEQ ID NO: 92890 - DNA, 571 bp, Heterodera glycines
gagaactagtgggagatcggcaagttgcagaacgaattggaggcgtaccgaacgcatgtgcaattgctaagccaaaagaacagcggattcaactgcgtcatccaaatgtttgacaaccgattgcagtctataatgacggcattggcaaaactgcagcagaaacagaacgtaaagcgagacgaggtggaaaaactgtgcaacgaaattgaacaattgcgagcgatgagtgtgaaggccggcgtaacaccgtattggaacacggaaggagcccagggtacggtagcgaaggggggcaaagaggaggagcaaccgcaacagaacggacggggcagcaaaaagagttggattcgaagttcgttcagccgcgcctttcacaaaggcaacaaaaagagcaagcagcaacagcagaaggagaacaacgacgccgcggacaacaactcgctcaattcgttctcctccttcgcccattccaatcccagcaaaagtgccaatgccatcagttcgtcttcgtccgtttcggtgacctccaaaatggacaccgccaacagaacgcaattgggcgagctgagtc

SEQ ID NO: 92891 - DNA, 452 bp, Heterodera glycines
tcactttttcgaattcacttgaataccaataagctagtgaatctcacgaaatcaccgacgctctgccccggctctttttcgaactgaacttctagcacttttctgcctttctgcaagtgtcccccacccatttcctccattattggttcgtcacctcccaagaagactcatccaaagacccattggtgttttggttcgacggtgggcccggctgttcttcgctggacggactcgtcaacgaaatgggcccttatttggtgaacccggatggacaaacgctgcgagagaatcccttctcctggaacaaatttgcatcgatggtttacatcgaagcgccagcgggggtcggcttttcctacgccaccgacggaaacacaacaacaaacgacgacttgacttcgcttcgaaattacgaggccatcaaacagttcttcgccaaacacccgtctttc

SEQ ID NO: 92892 - DNA, 535 bp, Heterodera glycines
cggcgaaatgccagcgtcggtatcctcaccaaatgataaccagaatggtcccgtgaatgaaattgcgcgcattgacaacgcccacacgggatggatttggtgcatttcggtggcccccgacggacgccatttttattccgccggatgggacgcacaaattcagcaatggcacttggccgaaagccgaatcgagcgtggccttgcgctcaatttcccctctttggccgcgctttggtgcgttttggaggatcaaaatgtgctgtacgccagcacgtacagacgtggcccaattctgttcgacttacgggccggcacccatccgcaacatgagctgaacgtgcacaacaatttcccagtgttcgaattggccacggggccaaattgcaaccaattgttttctattggtgaggataatcggctcgtttcggtggacaaacgacgcttttcggcattgctttctgaacatcgtgcgcccgtcagtcacgtggactatgcggacgggcatttgtgcctcagtctgaagaatgggcagctg

SEQ ID NO: 92893 - DNA, 244 bp, Heterodera glycines
  unsure (1)..(244): unsure at all n locations
gctgactgatgcccaacaaaaacggaaagagcgtattgttcgaaatctgcaagaagtgattggtgatgaaaagctcacgaaacaaattggagcgggcaaaaacatccacgtctattggggcaccgccaccaccggacgtccccatgtcggatatttggttccaatcccaaaaatangggactttttgcgaaacgatattcgtgtgaccattctttttgcggaccttcacgcggtcctcgaccac

SEQ ID NO: 92894 - DNA, 328 bp, Heterodera glycines
ccaggactcaaatgtcccgctcaggccaaaaattttttctatttccgggaaaaaatcgaaatttttccgaaaaaaataccagtcgatagagctcgaaaaactatgttttggaagtggtcttcgtttttctgggaaaattcgttaaaaattcttaaaattcaaaaacccgaaaaccgttttttaggcctagctcgaaaaattttgaaaattttcgaaattttaaaatctgaaaaaatcgagcttattgaactctacaataagtctgctggccaccctgcgctcaggtcaaaccctaatgagttattcgcctggtactgaagtgaaaaaa

SEQ ID NO: 92895 - DNA, 353 bp, Heterodera glycines
tttctcagagtttcggtgtgatcgactcagcaaatttacagatcggcactcgtttaggagggggcgcttttggttgtgttaacgaagcgaagtggaccctaagttgtgcgaaagaggcagagaaacagcagggcaaaaccggaaaagcgagcaaaagctcgaaaagggtggccattaaaacattcacaaattttgctgacatggagaaagaagcgggtctgctcaaacagctcgaccacccaaatattttgcgaatgtttggtgtgacaaaattggatgacaaaaacgcaatggtcattgagctgatgaacttgggcgatttgaaaacgtacgttgatggaaggaagccgaag

SEQ ID NO: 92896 - DNA, 330 bp, Heterodera glycines
  unsure (1)..(330): unsure at all n locations
attaaatcagagggggaaaaaaattcgtaggggtcggaacggtgcactataaatgttgctgctgaaatgcatttcgccgaaacataacgtcaccagngaaaaacaaattttaatcgaactttttgtaatttttttgtaaaaatttcaagaaattccaagaaaaacctaagattgcattaaaaataaaattcagaattcggctattaagttaaaaaaaatttatcggcaacctttgttctgcaaaaaaattttctaacaaaatttcaagcaaaaaaaaatggatcgctgaaaatttattcaaaaatgttttacatgccctgttccaaggtc

SEQ ID NO: 92897 - DNA, 598 bp, Heterodera glycines
agaccaataaaatcatcagcagaattggctaatcagaaagaaacggggtacttttatcatcaaattaatttaaacgccatttacaatattttttaaagtgttagatcctttggcgacgatccttcgccgcccaattggctctcaaattggccatcttcggatgcccccaattggccgacttccgccgcttctcccattttggtgccggccaccactccgccgtcgaatttaaccgaacaaaatgaccgactcaaaaaatggaagcaaaacagcgaaagggccaaaaggccattcgaaagtgacggaggcgaagagtcatcagacggaaagcggacgattttatccatgggaattggaattgttcacgcaatactcacactttttgcctccctttttctaatgctatgaaagaattttattcgcttaaatatttattttaaataatttaccacataaacaatttattcacttttcaataattttaaataacttaattaaggattgaaattgtttctgactttttttagttttagttttattcgccaaaagtcaataataaaatggtcaaacgattatcagaatgatcaatttcattttg

SEQ ID NO: 92898 - DNA, 246 bp, Heterodera glycines
agtggaattgggagcagtggcggcagccaaacgaacgacgcaaaagcgaaagtcggcacgaaaagcgacaaaaagcaaagggaaggagggacggcagaggacggcacaatgccaaaacagacgcaaaacgacccaatggcgggcgccggcgccgatctgctcagagacggcagcgaccttttctcgccctccggcacgttcaacagcagtttaaacgaaagcacttcgcccattggtggctccacc

SEQ ID NO: 92899 - DNA, 612 bp, Heterodera glycines
aggccccgaccttgttgaaatgattatctccagcacacctcattgctcaacgaaaaacaccatggtgtactacctggagggcattacactcggctcataaatgtgcgatttgagtgccgatgtacccattcacttcgaaaagatggcgcctaatttggagcgcatactctaaaacttgctgatgagtgatcattctgctgatcatgacgtcgctggtatatgtgacccatttttgcagggcgaaattctcaagctattgaggattttgggcatatatgacccaggggacaatgaataaatgaatgacattttggcacaagtggcaacgaatactgaaacgacaaaaaatgttggcaatgtcattttatatgaaacggtattgactataatggccaacaaaagtgaaagcggcttgcgagctttggccgtgaacattttgggtcgttttttgctttactccgacatatacattcgatatgttgcactgaacactctgctcaaaactgatgcaattgatttccactcagtgctgaggcatcgctccactgtggtggaatgtcagagggatgccgacatttccgtcttaaagacggctcgtggacgtagctttgc

SEQ ID NO: 92900 - DNA, 569 bp, Heterodera glycines
gttcggtttttctgctgtgctaatgataaggattaataaatttgaaccgaaggaagagccacgcgatgagaacgaatttgaaggacaatccccccgaaaatcggacgagaaaatcattgtgaaaacggactttcgacaacaaaattccgcggaaagcgatgatcccccctccgacgtcgccgccgtcggattgtccgacattttgggactgtcagaaaaggaattggcgaagcgcatttatcaggcggagacgggcatcaaatgcctttattttgtgctcatcagaaagacggaacaaatgcgctatttggtgaaggcgcgcaaattgaagacaatttttgctgagcaaaagccatcgacggaagaaattgtaccgggccgtccccgcaagtcactgaccaatttcgacccgacatgtgccgactatcgttccctgcaccgcattttgatgagtgataaggagagggccgaaatgtaccggaagcggaaccaacagcagcgcgagcggagacggcaaatgacgaaggacgaattggcagaggcgagggccaaggcacggcaaaaggcgg

SEQ ID NO: 92901 - DNA, 633 bp, Heterodera glycines
gcatttcccacaggcgaaaaagggagggactgaaaggggcggcgacggaattggacgaagaagtgaagcgaagcaacgcactcagggcggaaatgttgcggatggaaaagtacgacaaatttgtgattaatccgctgtttggggccaacattttctgccaaaggcaaattacggcaccgcgatattttgtgagaaatcactcgtcaaaagcaaatggacaattgggaggagaagacacagccaatggcaagggacggggcccactttaaaggtcgcccactgagttttgggagcaacagtaccctctgcataagcacgcctttgatgggaacgcggagcgcatacgggaactgcttgcccagggcgatgaccccaatgagcaggacaatgacctttggactccgctccattactgtgccttttacaaccgattggaggcgtgcgaaacattgcttctccacccacgcaccaatgtgaatgttgtcaatggcactggggcgacgccgcttcatttcgccgctctgaacggcaacatttacgtggccgagttgattttgtcccaccaattggccgacattaacattcgcgacgccaccggaaaaactccgttggacctttgcgttttggtgccga

SEQ ID NO: 92902 - DNA, 353 bp, Heterodera glycines
acattcgtcaacagtttgacgaagcggaagttctgcaggaacaactacaaaaccaagaagagcagcagaatgatgagaatgtggacccgcgactgcatcagcaacgtgcagcacagcaggcgcaatatgaacgtctcgtgcgtttacaattgcgagagtcccgccgttttcgaattggggtcgcttcgtcagttctcgtcccccctcccttgttttgggagggggagtgtgtcatttgcactaatgcacgtgcaaacttttacaacattcgctgtgggcatgtgtgcctctgcgctgattgcgcagttgctgccgtaatccagcgaattactgtttgtggttttgtgccgtgc

SEQ ID NO: 92903 - DNA, 562 bp, Heterodera glycines
ccccaattacccttaattactcttaattaccctttcgacccctccccttcaaaatggctgcttggttggatgccttcgtgcaaaagtaccgttccaatcgtcgtgtgttgctatgcattgtgtacgttgcgcttttcctggacaacatgttgttgaccacagtggtgccgatcattcccgaatatttgctgcgcattcagcacccaaactcaacggatgttgctgaacaaccggtacagcgagctggacatgggcacggaagcagcaatgggcacagcctcatcactgccgcaggaaaaagtgcggatgaaacggcaaacggcgatcggatgggacagcgcggcgtgggaaaagccaccggtgaacgatgatcagcagcagcagaagggggcgaaaaaacacagaaaagccaagggaaacggacgcgtcgccggagggatgggcaggggacggacgaggacaacgacagtgccaacgtacgacacggacgacgagtacgaggcgttgccggacgagttcagcatcgggagtcccttggacgaattggacttacccatgggac

SEQ ID NO: 92904 - DNA, 607 bp, Heterodera glycines
  unsure (1)..(607): unsure at all n locations
taaaaattgaaccagaatatatataaatgtttagatttaagaaaaacaactttttttaatggagcaaaattttcaaatattcaatgtggatgacacaaaatttcgacacccatttacattgacaatatctggcagtacgggaagtggaaaatcagagtgggttatgcgctttttgaaaaatgttgatacgcttattacaaatgggccaataaataaagttttctattgctacggagagtttaaccaaaacattgcttctcttcaaaaaatgggatcgatcggcggggtacaagtgagcacccattcaggggctcccgacgaagaaatggtaaaacaaaagtcacgcgatgctaaaggaaagttattgatggtactggatgacctgatggttgggattggacaaaattttttggacacaattttcacacgcggttcgcacaactggggggtcagtgttgtgttagtgactcagcatttgtttagcaaggaattgcgcatcgccaggaacaactcacactacatggtgttaatgcgaaatcctgcgggggcgctacaagtacgcaccctggccacccaattgttccctgggcgtgtanggcatttgatg

SEQ ID NO: 92905 - DNA, 591 bp, Heterodera glycines
aaacagccggcggttggggaccagcatcagccagaaatcacaaacaccatctctgctgctgaggtgctttcatcaaagcgatttataaaagttgtcagctcgacctcaatgtgttcgggagttgccggcgggatcgaattcttgtcatagctactgcatccaaccatctttattttattataattcttacatacatttaaatattctcatgcaattctggtctttgcttatgttcttcctctaacccagaattacaaaattagaaaaataatatttaattttaggtacaggatgaagcagattctacggttacttctgaaacaattgtgccaaattccaacagaattgcgaaaacacattggtcaacccttgaacagaatatcaaagccatgaaggttgttgttggactttatccatttgttattttggtgcgtccttttgtaggtcgctgaattacgtgatgaacttgaagcgcggaagctggaatcgcgaggcgtaaagaatgtgttgatgcaacgtcttcatgaggcgattgaaaaggaaaagaatgaggaaaatccgactgaaggacaaacgaaggaattaattgaa

SEQ ID NO: 92906 - DNA, 632 bp, Heterodera glycines
taaattggtgaacattcaataacgaaaagaagaaaccatgggtcaaattcgtggatgatcgactcgaaacggacaatggcaaacagacgagaagcgaacccaacaaaccaagcgaggccaagcacaacaaaaacgagcagagtggaataaccaccaatgctggaggcgctgactgcggcagtaaggctctttttctccttattggcaagttcactcattattgccgctaaataaaaggattattatacaagccaattttagacaatgctttggtttcaatgaaaaataaatatgagaaaactaacaacagggatattgagaaaagaaaaagaaaatacaagacaagagaaaatgtagaaaaaaacgagaacgagacgcgctaaaagtcaagaaaagagacgagaattctcttttaacgaacacctaattattaattaatcagaaatttttggttcgtatttttacggaacataatcgggccggccggaatttgtatttcaaactgccggaataaaacggggcgggaataaaattgtttgccttcaatttagaaaacaaaaatcatctcaaaatttaaccaatcaacctttttttaaaactatcaaaaattctaaatttaaaattttctaaaa

SEQ ID NO: 92907 - DNA, 569 bp, Heterodera glycines
ttcctgtgtctgtcagttatgcggtattttgtggccattagtgctgctttctcctggccattatacgtcgactcaaatcattcctcgggtatatttatgccccccccccccccctccgtccaaatgttcacgtcgatcgaagtgccaattgaacaattgttcgccagcataaaaaggggctgatgggtggatatttgatgtgaaaagcatttccgtttgcttttccttttgtaaaattcgtttgaaatgccaaatttcggcccgaaaatgccgtctccgtttcgccttccatttttgctgctccttttcggcactttcctttggtttgcgctgttttctcccatttaaaggcttctttcgccctttgtcagtttcgtcccctttttcccctcatcggctgcccaaaggttcggcagtcagtcgaagcagcagcgaagtcgccaaatccgtccgtttcgacccctttttaatggccaaaaaatgccgaagttttgcagatgcccagtcccaaattgtggccaatctcttcgccaattacgacccgaaccaacggccccccgtccgaggtc

SEQ ID NO: 92908 - DNA, 159 bp, Heterodera glycines
atgtaaaaattaacagaaattcacgggttcattcgatagttgcgagaaattccccggagaaactccaaaataatgtgaaatttattttttgaactcgcatctccaaaattttgtcatcccatcagaactcattttagcgaaggtgtaaaggtggccttc

SEQ ID NO: 92909 - DNA, 390 bp, Heterodera glycines
agatatccaatttacacttacaaattattctgaaattttctacgattctaagcctaaaaatgacaggaaaaattttaaattaaatttcattatttttggaccgattttttaaaggaattatagggagacaaaaacaagaaaaaatacagaaataatgattttgaattttcgcttttaaaaattaagcgttcattcaaattttagaacatgaatcattgtttttatcatatagaactgaaataagtttatcatctaattaatttctctcactcaccttaacttcatcactgagccaatttggtcgtacagaaacctgtgtcaattatattaaatatattttaatattttttcaaataatttacttcgttgtgcacttctttgtaaaatcta

SEQ ID NO: 92910 - DNA, 175 bp, Heterodera glycines
  unsure (1)..(175): unsure at all n locations
cgccancgaaaagaagaggcaggcgangaagatcgagaaggacaatgccancgaccgggcggacgccgcggaggaaaagggccgacaaacgcaggaacggnaggagcgcgtcgaggaggaantgcgggacacgcagaagaaaacgacggcgaccgagaacgaattggacaaggct

SEQ ID NO: 92911 - DNA, 633 bp, Heterodera glycines
aaatgacccaatgtaatgaattatgttcggaattgctccaaaatggaagtccaaataattacaacagcagcaacactaccaattgtgacaacgatgccgattcggcaaattcgctagcaacaggcacaaaattagtcgccgcggggcgaaatttttcaaataaaaaagtgcccgtgtcatccccaaaatgtgtgccgaccactgctgaaaatgtcatcaaacgaccgccacttttctacgattcgaaacggcgtcgggttgacaaattctaccaaaaacagagcagcttggtggaatactttgaacaagacagcaaacagattcagaattatcagcagcgtcgtctgaattcgaattgttcgcttgatgttcggcgaacactcagctcggactcacgaaatttcagctccgctaatttcaatggccaacattcactcgagaatggtggcgaagaaccggcgcaagagtttgacgactccacagtgagcagactgttggagccgcctcctctgtcgctgggtgtgaagaatgtcggaaatggcacaatttcgttgcccaaagttcgggtcatccgacccgcgggaagcttgcgtaactgtgctgcacagcactgcccttctctcgcaatgtccg

SEQ ID NO: 92912 - DNA, 638 bp, Heterodera glycines
gaaagttgcgcgaacaccaaatccaccgtatgacgcattacggttatgacaaccgtaccttcatggactcggccctgtccttctatgcccacatgctgtacaatttgggcgtgttggctgcacggatacaggtaaaaaaagaagaaggatggcatgccaattggtcataggtctcccggacaaatgcatttgtcaattagtgatatagtatcccaaaaacctattaccgtatcttattctccacatggaaatttcttttttttctactaaattagcgcacaaataagggtagaattgaaatctcattgggatgtgatcaccaatgtttatttgatcactaagtcatatatttcaaattgaattatgcgccaattcaaaaatgaacaattaaaatatccccctagggcttttccatccaaatccgattggtttaaattaccccaatggcatttcctttcgattgccttaaatgcataaattattgatcaaatacataaattactcacccccccccagggcttttccatcgaaattcgctccaacaaatcgttggcgccgaccggcacaaagctggtcagccccctgctgcacatggtgtacggcatggcggatgttctgctcggcgactccatcatctg

SEQ ID NO: 92913 - DNA, 662 bp, Heterodera glycines
gtatcaagaacgaggctgaacagctctccggcactgcgttcaccgctccgcgctgctccaaccggcgcagttggctgtaccgcgtccggccgtccgtcctccacaggcctttccgccgtttggagggcaacggacgcttcacgaatgatttctctcaatttgcccccaatccaaatcaaatgcggtggaaaccgcatccaatgccaaattcggtggctaatggcgccccatcattggactttgtccagggcctttacaccttttgtggggccggacatccgacaattcgcaatggattggccattcacttttacacatgcaacgcaaaaatggatcaaaaggcaatgtacaattctgatggtgactttctaatcgtgccgcagcacggcattcttcacatagtcactgaaatgggcgtaattaacgtgggaccgcaggaaatcgccgtcgtccctcaaggcgtccgtttctccgtcgacgtttccgtgccgagccgcggttatcttctcgaagttttcgacgaacattttcgacttcccgaattgggcccaatcggtgccaacggattggcaaatgcccattggtttcgcattccgaccgcttggtttgaggagagagagacttcattctgcatcatcaacagattccaaggacaactcttc

SEQ ID NO: 92914 - DNA, 609 bp, Heterodera glycines
gaagacgccgtcgaatgtgaacgggcggattgtcctctgaccagcaaagcaatcatccaaaatgtgcttgcggttggtgtggaggacgaagacagaaagcacacgtggatggaagacgcagaatggtttatcacgcagggggcactgcaatgtgcacgtgccgtattctcatttacgctgaacacattcccgaagaagaaaggcatctggacgagagcagcgttctttgaacgtgagcacgggacggtcgaagcgtacgaggaattgctgaaaaaagcaacggagaattgtgctgacgccgaaaacctttggctgatgcatgcgaaatcgcgttggcaaggcggcgacgtggagggatcacgacagatcctttcacaagcattcaaacataatccgaactccgaggaaatttggacagccgctgttaagctggaatcggaaaaccaggaatttgaccgtgcccgaaaattattagaaagagcgcgcaattctgccccttctccgcgtttttggatgaaaagtgctcgattagaatggtgtctagacaacttagacagagcaaatgaattactcgctgagggaattggccgttaccccgactttgagaaa

SEQ ID NO: 92915 - DNA, 631 bp, Heterodera glycines
gcaggttgtcgacgtaggcattttcagccatttcaatggccaatggggacccgtcctgcttcaggtgcttctggatggtggctgccagcaaaaagggtgaggcaatgactccgaatggcacccttgaccatcggtagatgaccacgttatccggcaacggtggtttacggacgtcgttaacccagagcactttgcagaattcgcggtcgcgctccagcaagctgagtgaattgaaggccttttccaagtcaccccacagcgcaatgccagccaagcggaagcgcatgagaatcccagcgagttccggcataattacgggccctctgaacatgcacttgttcagagagttttgcccctttggatgggcagaagcgtcaaggacttgacggaatttgtgtgtgacaacacaatgatgcggcaggaaatgctcgagtcctcgagtacgaacggctggttcgatgagccccagtcgaagctgttcctggattgtggcttcgtacttggcaagaagttcgggaaaatgttgaagacggttgagaattgaagacaatcggcgatgggccatggcaaaatttgagggcaggtccggcggaaaattcttccatggccatcccacgctgtatcttccgtt

SEQ ID NO: 92916 - DNA, 628 bp, Heterodera glycines
tttcaactactcgaccaaatttttgaaattttattggcttccggcattaccggactcagaaattttactaaaccaaatttaccaaaatgtaaaactgatcccctccctgccctccaaaaattattttttgaataatgagctaaaaaatttagtgacaccgaaaggcaaaaaaaaaaattcgttccctcatttaggagaaatgtttatgaaaatcttattttttgagtcaaaataattagattttaagacttttaaaagaaaaataatccatttttgccaatttcggggtttttgttccgcacattttggcattttcttttccatacaaacaaacagttgcccttttaaaagaaaaccgtagaatcaattctaaatttaaaaacctaaatttttttttgcactttttgacattttttggtgaaatttgattcatttttttgtgcgtgcccttcggcgggagaccgaccgcggcaccttttgtgtgccatggtgagaaaaaatagggcgtatggcccggcaccgccgccggcgccgccaaaattggatttgaatttgcttttggcgcctatttgtggcgatgtgtcgtcaatatttgccatcaaattccaccaccatcattcgcacaacc

SEQ ID NO: 92917 - DNA, 582 bp, Heterodera glycines
ctggcgatagcaggaaagaacacgttcggcgagcagaaagtaagtggccgtcaaatgattatattcgtttaattcaatggcactgaaaatggcaaaaaagtcaacgaaagtttcttaatggaaatgaaaaaaattggtaacagaaaagcctggccattttccctggaaaaaataaaaattcgaccctatagcattttttaccaaagaatttcctcctctccgccaattttcccggccaccatttgctcgacaatcgtcgcatgagcacacgcgggcaaatggtcgcgtattatcagtggcagtgcctcggcgtgtcccttgtcgccggcttttacctatgaaaaggaaataatgacaaatccttcatcaaaatgtattccattttcaccgacttacccatttgttctgcacaatttgctcaagggttgctctacgcgacggatcacgcaaaagcatcgacgaaattagcctaattaatggggcgggggaaacaatgtaatcacacaaaatgccggcgaaggaataccttcgacaatcgacggacacgtggtcgggaaacgaaaatttgcagtccaaaatcct

SEQ ID NO: 92918 - DNA, 591 bp, Heterodera glycines
gattgacccaacttttgtgcaccaaatgactgttgccgaggtgaacaatcaaatggcatcgacaggacatgaagcgccacccccggtgaaaaagtactatggaatgagggaaaagcatgatggtgggcgaccaaatgaacgacagacatacggcgaggaagacaaaagcaatgcccaaaatcaaatgctgacgagggatgaacgacggaagatcagaagagagcgaaaagcgatgagtgacttagcggacgacggcactcgaattcccgaaggtttggtcgagctgaaatttgaagcaccggcagcagcggcggaagaacaattgatcgaaggagagacgtcgacaaagtcggctttcgtttccaaattttccacgcatccgctgggcccatgggttccggtcaaaaaggaggagaaaaggcccgatctcgactcggccgactctgagcttcaacctcatggaaagaagcgagcaaagcattacgacgacttgcccgagcagtcgtacgggcccgggtcagctgactactcgcaaacgccggctgaactgcttgaaattgccgaaatggaccctgacgatttgtcattcaa

SEQ ID NO: 92919 - DNA, 288 bp, Heterodera glycines
atttcacacggatttaattggtccgatcgatttcaaagaatgttctctgattaaagtttgatcggaagtgtgaaatccactctgatcgttcctcacacccattgtccctgctaaaaattgtgggaaaatacaaatccatctcactcagcccacccttgcccaacgaattcacttccctcccgcattgtgatgatcaatctttcttcccccccccccccgccttcaccaattttattttccatctgtgttttaagtcgacattttgttaactttttgcagaaaacccgc

SEQ ID NO: 92920 - DNA, 596 bp, Heterodera glycines
acgcaatgcaaaagcgcgtgttggactgtatccattacatccgacggcacgcgcaaatgcatgacgaaagggtggacagatcattaagaaaaattgaaaattaaaaatgaaattaatgaaacccaggccatccttggctccattttgcccgcccgactgcgcggcgaattggccgttcatcttcactttgaaaccattgtaaaatcacccgaaattgcttacaacaatgaatggtttgaatgattcccttccaattaagagccgagtgcaattgtttgcccattgtgagacttcgcttctctacgaattggtcttacgcttaaaaatgcaaatggtaattaaattctacataaaattaatcctgaatatcagcaaaacaaaattcaaagattcgtgataaggtcggggtttaattgattgtcagaattgttaaaagctaagtccttctgcatttttctggtcgagctcggtctgtttttggtctgaacaccttcagagtgcctgggcccgaccaaagtcgggatttcttatgctcaccaattaactcgcaattagagaatggcaaacagaaatgcctaattcggccactgatttga

SEQ ID NO: 92921 - DNA, 562 bp, Heterodera glycines
atatgaggaaggacggaggaaattactggaggaggaagcgaaggagagaatggagggattgtcgtctgaagaatcggatttcgattcgtatataccgggacggcaacggaagcgagagcaggagcatctgctattgttgctgaaaaacttaattcactcgtccgccctttctgaatcacaagcggacaaagagtggaagcggcagacggaagaattattagcacaaaaacgcaaaaagaaagaagaggagaaaaaggcggaggagtcgaagaaaagtctgctggaaaaacacaacgaattgctgcatcaggagcacgacgatgacagagaagaaattgataagccaatggaacaggaggacaaaatcctgcaaagtgtgactcagacgagtgcactcgcaacggtggcggaaatagcgaagggtgtcagatacacagagtccattaaaacgtggtggaaaccgccgcgtcacattcggcaccaaactctccaggaccacgagaagttcagaacgctggaaggccattcaattgagggagaacactgccctcaggcaattggc

SEQ ID NO: 92922 - DNA, 591 bp, Heterodera glycines
caattgcctactcacacttcggtggacgattcgacatggttttggtcttcaaagaattgctaatggaggggctcaacccatcaatgattaaaaaaggaaatcgcttattcgaaatgaaggtggattaattttcttattatatttttattttcaattcaggtcaaaagcagaaagaagatgaatccgaatgtaacttttcgggactcgtggaatctgatcccaggaccgctttcttcaatggtcccaatgtttggcctggatgtccaagacaagccatttttcccacatttggcaaaccgaccggaaaattatggatgccaaattttcccatcgaaaacggattatttggctgacggaatgaacctggaaaagcgcaaagaattcgacacttggtaccaacaaaaccgaaacacaccatttctgctcgatgaagcattggctaggtatctcattctttgttaaattaaattttctaattttaagctactgcaaaaatgatgttgatattttaatggctgggcttattgtatttcgtttggaatttttggagatgaccaaacgaccggctgggtccgatggaaaagcggacag

SEQ ID NO: 92923 - DNA, 576 bp, Heterodera glycines
ctcaacttgggattcatttgatttccaagcggctgcccaaaaggcgttcgatattttccgccaagggcctgtcggttggaatacttcctcgtcataccgacgtctgaatgcaattgttgagggactttctgagtgtgaaaaaagacgatgcgatcgcactgttggatttggtgggtctccggatgaaagaggcgagacgactttggatgcactggtgatggatggcccagggcataaaagtggggcagttgcggaactacgtcgaataaaaagcgccgccaaggtcgcgtgggctgtgatgaattacactgaacattctttgcttgccggagagaaagcaacagaatttgcactggcaatgggctttgaagaggaatcgttgtccaccgaagaatcgttggaaatgcatcgaaattggctaaaagcgaaatgccaaccgaatttttggaggaatgttcaacccgacccccactcgcagtgcggcccatacaaaccgaattggagggaagcggacggagccgactttttgtcaccaacaaaacaactcgataattcaattggattcggttttaggaa

SEQ ID NO: 92924 - DNA, 133 bp, Heterodera glycines
aatttgtccaagcgcattgtcttcggatgagcaaaacgaagcacaaaagattcgcaatttgttgtcgtcatttaagggaaccgaagacgatcttcttggttatttgttcgaagactgtttggaaaatccaaaa

SEQ ID NO: 92925 - DNA, 591 bp, Heterodera glycines
ctcttctttttaatattgatcactgacttatgcatttaattcgtttatcattgaagcatttggtttaattgattagattttctaatccaaaaaacccctcaattctgaatcttcatgatcagcccaattattcaagtaaaacatttttgcccaacttttttggcattttttgatttacggatgggactgattgctcgatgatggtggctttaaatatgtttacttctgagtttccggtcactgttgtgatgtacaccttcaggtcctggtgatgctcgttcagctccgacgagccgctgggcgagaacatcgctcgctttgagaaggaatgaacggaaatggaaaaggaggcggaaaatggcacaagaaaaacgaaaaagctaaaattaaatataaaaaaagataattacccaattaaaattccattttttcaaattgaaaagccattgaaaaggcggcggataaacaattggtgcagccggttgggtgttttgttaatggatgatcgacgaagtgagaaagggacggatcagagcggaaggaacactttctttcccgcttttccttgctaaattggtttgtcttggggcg

SEQ ID NO: 92926 - DNA, 552 bp, Heterodera glycines
gaatagcccaattaacagtgaatataatctaataaacaacggatataacccatacagaaatggatattacagtgtatacaatccaactaacaactataacacacacaataatggatacaacccctacaataatgaatataacggtggatacaatccaatgaacaacggatataaccaatacagtaatggatacaacccctacatcaatgaatataacggtggatacaatccaatgaacaacgcatataaccaggacagtaatggctacaacccctacagtaatggatacctgaacaacaacggatacaatcaaaacagcaacgattgcttcaccgcgtcaatggtacaggaccaaagagcatgcaacgcaatgcaaggacaatgctcaaacccgttgatcgcccaaacatgtcgccaaacgtgctgcaacatgcaattcgcgagtggtgttgcttttcctcaattcggcggctgatgatcaaatttatttatgttatttggtatttatttcgagcaaaaaagcatttaaattacataattactacttaaaaa

SEQ ID NO: 92927 - DNA, 513 bp, Heterodera glycines
agttgaaaaaatgactatctttgcttaaaccgtgactaaaaatttattaaaaatggatacagactctgcatgcatacaaattactccaaacctatttgaatcaacaaaaaatctatttgaaggggcctaaacggagctgaacttgttttcaaggacgaatgtcctttattgcttcgatacacccttttcatcaatggggcttttcgcgtcgcttcacactttcaccggctgtttgggagcggcacattaaattgctagcacagaaaacatcttcaaggatctttttaaacatccaaaaattcatctagctttcagaataacctaaagacaaaaatgcttgtctcaaatttggtaacgaacaacaacagataaagacgggaatattctctccgatatttacccattggtcactgttcctttgcttataaccaaaggagccgtacccgggaattcctgaaatttgtgacgaaattattgcacatgtcagtgcccaattacaacatcgtcttaaca

SEQ ID NO: 92928 - DNA, 615 bp, Heterodera glycines
catgcttagttaatattagatcactttacaacaaaattgatgaaatagctttaaatttggtaaataaaaatatagacatttttctgttaactgaaacatggacaaaggaggaaaacccaatcctctttagcccatggatacttgaaaactataactttgttttatgtcataggaaatcacaaattatggaaggattgaaagcacaaatgccaatggaaattttgtaaacattttggagaatgtgccacgttttggcacgggcgatgtggtcggatgtggactgaattgggcaactcgtcaagtgtttttcacgattaatgggcaacgcttgagtttgtgtttattatgccaatttacataaactggctaattgcctaataaagacaacaccaatttgtacgttgacgatggcacggcggacctttacccgaccgtgtcaatgctcagccacagagcagcggtcgaggccaactttggtcccaacttccgatacgatttgtccaagaaattttgagactttggaaatgaattaattgcttatccaaatgttgaaaattaattaaaaattcattttttgattaatcacaaaaatgcgtcgtcattcatgcccactga

SEQ ID NO: 92929 - DNA, 378 bp, Heterodera glycines
ttttcaaagcattattgacagtttgtacacagaagggacttctcgaggcgaatcgtgaatcgcccatcagtcagcctactctcaattttttgatcgaaaataaaaaggacccaatgtcaatggtcaacatttactgctcggttttgggtgatcccaattttgagttttttggctttcatcttgttagtcaggccaagcaaatttctttttatcactgaattgagaggtcggcccgtttatggcttttgcgcagcgtcaaaaaaggaggccaaaaaggcctgtgcattacgacttctcgacattttgatgacataagaacgactcgaatgtgttaatgtgtccggacggaaagtgaggaaaatgccgccaaaaccaatt

SEQ ID NO: 92930 - DNA, 600 bp, Heterodera glycines
aatgagggattgaagccatgataatcccagcatttttagcttttggggcctacgcgttaaaaaacatgtttttaagtccctatttgcttttttgggctgccccaggtttgtccggttgttggcgctagagctcctcgagagtcaaaattccgagactcgagaccgaggtttctagagcatccctaattggcggattggcggcaatctttttggggacggtccaattttaatggaatccaaaaatcccatggaaatatgtcaaggcaaaatcaccaaagagcagctccgttttgggtacgaagcattgggccgcattgagcgccacgtgcaaaaagggactttcggcagagactttgtggaggcaatgaatgagtgaggaaaagcaaagaaaatgggggggggggaaaccccacgaaaatccaaaaaaaaccaaaatgggcctaacagttgatcctccgccgttatgtttacccgggttatttagtgcccctctctttcagttattacacgcgcattccgcacagttttgggatgcgaacgccgccgccaattaaatcgccggaggaattgaagcgggaaaacgaactgttggaaatgcta

SEQ ID NO: 92931 - DNA, 638 bp, Heterodera glycines
caccgatcggctgaccttttccacctcggccaatcattatgccatggccgagaatgaggacttttaccaacagcagcagcagattaaaaagcatcaaactgcggcaccaccgatgagcagaagcaatgtggcatttctggctgcaagcaactgcacaaagaatttggtttggtctgccttggacaaagatccccgcttgttcatgtggcgcgactcgcagcttcaaaagacgctgaacagtgccaatattttgccggtcagcgagtcattgtccagcatggacaatttctctgccaatttccaatcctccgccgacgatggcattggcacccagcaaaatgccttttccattactgcgttggaagtgatggacttgagtaattgcggcactgataaagaaagatggaggaacgaaaagggcgacgagggggaggaagaggagcaattattggttggcacaagcaacggagtggtgctaattgtacgcggaattgagatgtctccgatcagcgcttttcgtcccttttgctccgttcagcggatcatttgctgtcctccgccatttggccaatcgtccagcagctgtcgcattctccaaaaggagctgcttcattcgtcaaccaaaaaagcgcccttgt

SEQ ID NO: 92932 - DNA, 612 bp, Heterodera glycines
ctaaaattgcagagagatcaattaacagacaggaaatccaatacaaaccatccattatgagtggaattgtgcgggattggatcttcctaggcacagtgtagcccgaacgttcgatgttcttagccagcagctcttcaaagccagcttccttccagttgctgacgcacaaaatcaacagtgtgctgttaccagaaaaaaaaacaaaaaaggcacacttactctaaggtctgttgacattctccactgttggtccccgttatttccacatcatcgtcgtcctcacgaatgtccaagtatttgtcttttaccttcaaatcatcgccaaaaatgtcctcgatggtgcgagtggttgggatgtaagactcagcacgtgcacgctcttcttcggctagaattatgaattgagcccaattgattgatgaatacaaaacatactggaaaattttgcacggtcatccccagaagaaaatgtgcctcctctaccgccgcgctcacccgcgccgaacgaaaacgagccacctcgaccgccgcgctcacccgcgccgaacgaaaacgagccacctcgaccgccgcactcacccccgccgaaagaaaacgagccgcctcgaccgc

SEQ ID NO: 92933 - DNA, 504 bp, Heterodera glycines
gaccaaccgacaattggtcgccattgttatgttggcaatttcgaatctgtgcagcactgtggtggtcagttgcataggaccaatttacccgggcgaagctaaacgaagagggtcacttttgaattcacatgcaaaaagctaacaattacggggcttcagaatgtcagaggctcaaatcgggttggtcttcggtttgttccaattggtgatgttcatttctgcacctcttcttggcaaatacgtaaacatttttttttgatttttttgccattttactaattgaaaacaaaattcagatgcatgtgattggctctaaatggatgtgcatcgctggccttcagatagccagtttggctgcaattgcatttgggtacgttgtttcttgaattcagcagaatatctttagttgggggttctgttttgcagttgggttccttcctaatagtcatcattgtttaaaattttgaactgcttcaacttcctaagccttatccatgctgaatg

SEQ ID NO: 92934 - DNA, 510 bp, Heterodera glycines
ttttctaaaaaaaagaaagattttccctcaaattttttaaaaatgttctaaacatagtggtactattttcaattaactcataatgactgtgatgtgctaattataaacgtttctaaactaagtaatttatgaacattttgctaatttgttaaaaattaccttatttatccccccccccctttttttgctaattatgccatttgcttttccttctcttttcaaaacccacccgagtgaagtgcactttgttgatgattgtgcagaagcgttctccgctgttttggccattttccgccgttttgcctctgctgcagacggcgaacagttcgatgaacaaacgttccctcatgtgccgtgccaaggcgcttatctcggcactgagattgcacatttcttagaaaatgaaaattcaattccaaattttttaaacaaacaaataaataaattaatgaattaactcacggtcatcccaaaaaataatgcccattaatccggcaaattcctcatcag

SEQ ID NO: 92935 - DNA, 612 bp, Heterodera glycines
attttatggaaaattttatgaactttttatcatccaacaaaattaaatcagtatttgtagtccaacattgggatggccttgttgaaaaatatcaacatttctgcggttttcggctttaatctcgaacgtcgataatcataaacatccctcgccactttgaaagtctgttcgctcggcacgcttgttgcaggggctgacaaatacttcatcgccaattttgataacattggaagttttggtccatgcttcttccaccattcaaacgggtcagaaaatggcaaaattttgttaaaattttcgtcaacttcagtgaatgccttaatttctgattgggttggaattaactttttcttacctttcgcatgtttgctgcagaatcggttacaaaagcaaacactcgtccgtcgtttattttccaactgtccaataatttacggacattgcacgcaatcgcattgccagaatgttggccggaaaaatggtgaacagcgagtacaaaattcttttgcacccaattttttgtgacgccgtgaccagtcaagcttaattattttttgaaataccgcttcttgaagcctaaaattaccttaaaaaattgtttgatggacctgc

SEQ ID NO: 92936 - DNA, 597 bp, Heterodera glycines
cgcatctgttgatggccgagtccgtgcctccgtttggcggtgtgtccgcttttccctttccccttgcttttcatttgcttttcctcttgcttaaggttcgcccctcctccatcggcacggcgcccttttttcccaaattgtatccgatggccccgatcggcttggccgtgttgtgctttttgtctacgactttaagtaattgacttccgttccgtccgtttttgccttctcccccttcccccctcttcttaagccgtcactcccttctcaaagtgttccaccgtttgtccgttgttcccttttccgtccttttgctcgccatttaccgaattccgtccaccaaaaaactccacgcaatggcaattcttccgaacgaatatttgtatttggcgacggaggaaaaagtgctgcaaatattccttaaatacggtcaattagcttaattaaaactcctcaggtctcccaattccgtcttggtcagtgcgctttgtacggctccgattgcgtccgttgtgcgcgtgacccgtactgctcgtggtccatcgctcgtcggcagtgtttccccacagtacggaggcagcaaagaatcggactgat

SEQ ID NO: 92937 - DNA, 616 bp, Heterodera glycines
agtgcaggttcagcccttttcgttcacacccggccaacggattatcacttcaatttcactgactgtcgattttcaaaagaaaccatcgaatccatccgaaccattggactcagatgcaatggcccgtgaatttctcatgcaattcgccaacatggtgttcaccgttacccaggaacttgtcttggagtatgtgcagcagaagcggagtaccggcggaggcgagaaagcgacggcgatgaacgcgacgacgtacacactgaaattggtggtgaaacggatggaaggcgccaatctgaactcgtcgccggaggagatttcgatcggtccgctcagtccgaatgccgtcgttatttttgatcggcccgaaaattcacagatcaatttgatcggtcgtagtaaaggaaagtccactcatcgttcgctgataaaccccgactgggacttccaacagatgggcattggcgggttggacaaggaattctcttccatttttcgacgcgccttcgcttctcgcgtttttccgcccgaattcatcgaacaattggcgatgaagcatgtccgtggcattcttctctacggacccccggggacgggcaaaacgctaatcgcgcgacag

SEQ ID NO: 92938 - DNA, 633 bp, Heterodera glycines
ggcatttattgtctcaattagttaatgaataatgaaaatgatgtggcggttgacgaccgaccacagaccgccacttttgttcattttgcttaaattgggcagcaaatcatttgtgaattgtggaaattttttttttttggagggggatgacataatgacaataattggacaattaaattaatgagaagtgtgtgctttgtttctacaacaaattgctgacaaatgagcgtgcaaaaagtgcaaaaataaatatttaaattgaaaataatgcaaattcagccaaatttatagtagggaaaaacagcatttcctgaatgatattatgtacaatgagtgcggagctgtgggggacatgttttgtaaatttcggaaatttttcatttttttatcataaaaaaatttggggttaagcgggagaccggcggggctgatcaaatcgggattctttagtcagcgtcttaaaacttgcagaatcggggtaaaattttgcgcaaacaaacaatggtacacactgaatctaacttttagggatttattaatttttaatccggctgaaaacgctaaaaaaaaagtgggttggaatcagggacgggcgaaacccggcttagcactcaaagtcgaagcttgaaacga

SEQ ID NO: 92939 - DNA, 464 bp, Heterodera glycines
ggcggacgtctcgctgtcctccgtccattggggcggccgatacttctaaatgccgtaccaaatgactttccacgaccacgcgctcgaaagggggcaaccactgttcgtctatgggattccccgccggcgatttccccgtttcactgatcaccaacagtttggaggagctgttcataatgaatgcactgcttcgacaagcaaattgtgggccaaaatgcccaaacggacaaataatggggagccgaataaagtgaaggaggccctttcccgttcataaagggctaggggttcaacttgatcattctgaacaaaccattggaactccaaatttccatcaatggcactcccttctgttcatttttccaccgcaccatcgatgcccacaaagactacacaaaggtacgcattaacgctgaggtggaattgaccgggcatggaaagtgagtctgtgctgggaaagtgtt

SEQ ID NO: 92940 - DNA, 601 bp, Heterodera glycines
gcactttgtgcatatttggaagggcaatgtccgacggaacagggcgaagtgtcactgatggaagacgagaaactgtccatggtgattcagaagagaagggaatacaatcggagtcaatcgtcctcagcaataactgccaaaattggcgaaagtgccgtgaaaatgggcgaagaacaaaaagtcgtgggaacggagaggacggaacgacaaacgccggaactgcgacaacaaaaagcgacaaatggcaatcgaagcggcgcaaaagcaatgaaaacgacgaaaatggggggaaatggcggacgaacgcaaacgaaaaaacaaagacaacggaagtaattgccaacgagaaaaacgaagcgaaaacggcggaggaacagcaacagaagacacccactattataatgagcaaaagtgttgtacaactgatcagcaaaacgacggaagaagcggaggaggaaaagccaaaagaacggagtcattcggcgatggacggttgtgacacgaatcggacagtctcaacgcttgtcctaccgcctgtttcgcccacccgcaccgttattttgtccggcagcagtttcgacaccgtccgattgaatttctc

SEQ ID NO: 92941 - DNA, 439 bp, Heterodera glycines
cgcttttctccgccgccgtgccaatgtccgccgctgcttccgctggccaaacgcaccgatggggcggaatggccgcaccgcaccgcagccgaccgccgctgcgctttgaccgcacctttcttgaggagcgcgacaatcagttgaagctcatccaaatggtaagtgatcggagtgaccacttccgatccccgataattattgacacgctttttatgccgaaaaaagactaataattgaaaatgtgtccgatcaaccgataataaacatggcaaaattccaaaacttcgagaaaagcaataccaaacccacaaatggaattttgtcaaaatgtcaatttatcttcagctgtgcggtctggtcgcccttctgctgacagtccaatgctggccaaatccgcttttccccttctgtttgggccgtgtcgtcgacttctttcagt

SEQ ID NO: 92942 - DNA, 561 bp, Heterodera glycines
cgccgtctgcgaccggtcgccacaatcgccgccagtcgtggcgacggcgtcgatcaccgatgtgccattgtcgacgctgtgcgacgacagacgaatcgccgatgccgctgaacagtcaaacagcagcgatcggcgagcggtcaccgatggctgctgttgttgccgctgccgcggagatccgtcgatcagtgccgggaaagcggtgcgcggggagtccaatggcacagccgtgccgacgtacgcctcgtacatggacacaccggcgctgctggggacgtttgctgcaaaagcagggaatgagtggagctgtggaaggagttttaccgtatggctatcgtatcgacattaaaaatgcgttaccgtgtggtaccggtttctctctctaacagcaattttagtcctaccgtattctaccgtgtttccttaaccgttacttattagggaagaagagctaccgtacccgccaatttataccgtaactatcacgtcgtaaacgagaaattgcaaaaacaatcccttgaatagcaaatttaaaataatcaagattaaatttagtccaag

SEQ ID NO: 92943 - DNA, 516 bp, Heterodera glycines
tttgccccattcggcgacaaaaccgcacattccgccgtctgatcgcgaagaaaaataatcccaaatgaaattccaaagtccaaaaggaagaaataaaaaataaataatttaaaaaataaaaaaagggcaaaaattattctgaaaattcaatggacgaataaattttaaaaaagaaaagaaaaggacacactttaaaatcaaagcaaacaaaggggaaaagcagcacactttattctgaagagattgtgctcaattagcacaaattgttataagtgcaaacggaagaagacaaaattcacgtaatttaaatgaaaaattaaaaaatataattatataattatataaattgtaaaaaaattattgaattaatgtaataaaacaaccaattagattgttaatttatcagcgtgcgaagacttaagcaaataaattgccaataaaataatgccaataaaaaaagtgttggattaatttgggaggcgacgattagcgaatgaaagaaagaaagagtgggtg

SEQ ID NO: 92944 - DNA, 596 bp, Heterodera glycines
aagaaatatagcaatgggaaaatatgacccggaggaaggttatgattcgaatctcaccgacttgaaactgttcgaagcgggcgaaccttttgaaatgcaaattaaattgttgaaaaggccttcggaggacaacctgcccatgacagaaattctttcttcaatttctttgagtctgacaatgacagtgattgtgagcacgccgaaaggaaccagccaaaccaactacacattggacagtgaaagctaccgagacatgaattacataacagtgcgtggtgacttggaactgttcgcggaaccttcattgctgaacgatataacacatcccattcttcccgtgcttattttgcatcggtatcgcctttactggtaccggtagttcattttttcgctaccgtaaccctaaaaaccaatgacgagaacacgggaaaaaaaatggcttttgaagtgttccctttgctcagtgttggcgattccattctgatcgagggaaaactgaaagacaacgcaaccattttcaaaatcaatttgttccaccgatgtgaacgagaaaaacccatacgccagtgatttggttctgcaaattttgttcaact

SEQ ID NO: 92945 - DNA, 567 bp, Heterodera glycines
tgtctgtctgtttagtgctctctccaaattggcttctatttccatattgattaacaaccctccatattgcctcgggcgtagtaagcctactccctcaaggaatagtgtttgatgtcgagaggaaaagaaaaagagtgatggcgccgatgggtgtgcttttccctcccgctgtggctttatgtgagtgactaaaagatcagttgaaccccaacaagcagcttcttcttcttcctctcctcgttctgctttgctgtctcttccctcatcaattgggccggcggttaaagcaatggtagccaataaatgaagcatttttgccatcgggggacattcaacgaaaagaagaagcggaggaatggacaaattgtcgtcccaaaatgtatttagagagcaaatgagcatcacattacaaacaattccatctaatatgtatccaaatttaaatcgactatttaagggatctctctatttttcccgaactccgaattcctaaatacctgcaaaaaactacaaaaaaaaatttttagatactgttgcttctacctcctatgttttcggctcgaaaaa

SEQ ID NO: 92946 - DNA, 551 bp, Heterodera glycines
atttggtcgaacaaatgcttgaggtcatagcagtcggaacaaatactcgaaaaagagcaggatgggtcgccatacgaaatgcttttccgattaagaacgagaaatatcaagcaaatcggctccttttctggacaaaataccggcaagaactttgaaaagggaagtcgcaaaccgaggaaaaaccaataattcgagaaatgatgacgagaggaaggaggaggagcaattctgatctctgaaaaaccgttgttttacaatcgcatcgacaagcgcaccttttgcttcgacaaaagtgcaacagaacggcgtggacagcaatcattctccggctgcaaaacagtcatctgcctcttctcccgttgcatccacaaaaacttttcgacggcggactgcctttgaaacttcggaagcaatgcgtgaaattttcggtgcatattctcctttctcatcacagaaaaaagagaattccggagaatttaatcggaaaaaaatggaattggaaaatggaaggacgatgaacggaactcagcaaaacaataaaacagcgattc

SEQ ID NO: 92947 - DNA, 544 bp, Heterodera glycines
agaaatgccaatcattcaccagcagaagaagcaggaagtggtggacagtgatgacgaaagcacaacctccttctcgtcctcatattcgtcctcctccagctcttcgagttcaacagagtgccaaagccctctgttgaaattgggcggccgcacgctgttcaacaagccgacaatttgcagaaagggaacgccaattagcgccaatggcaccgcttttgccgatcagcaaaacaaaatgtgggtccgagttgatcaggacaagtgcagttttattggacaaaagtttgaacgagcgcaagcggcaattccaaaacgcgaaaaaatattgctgttgtcttccgagaaatgtcgccaaaaaaattgaggaggtctttgtcatttacgggaaggtcatgaacgaggtgaaggcgcaattactggccaaattggacagcacacgtgaagagcaagtgcggttgaacgacaaagtggcgaaggaagtgtcgttttttgagtggacgatcaaggaacaaaaagccaaattcgaattggggaacagcgaaga

SEQ ID NO: 92948 - DNA, 221 bp, Heterodera glycines
  unsure (1)..(221): unsure at all n locations
ggaaacctcgagccgatgccatttgtccgcaaatggggttcagcggttgatggcgaaaatggcgcagaggcctcgcaaccagttatttcagacgagcgattcgaaaatgatgctgcgaaaatggcttcgtcggccaaacatcgaaatcgctctcattcgaaatcgccttccanaagacncagaaagcgtttggcgcgttcacctgagaagaaanaacacaa

SEQ ID NO: 92949 - DNA, 419 bp, Heterodera glycines
cttgggtccagaaaaaagtccaagcgttcacgtgttgtcagcagcatttcgcaagcatccaccataccaacaacaacaacaaccacaacgattgtagcaacggcagcggcggatgtcacaaccgcatccaacttcatttcttcatccggacactcgtcgttgtacaactacaccaacattaataacaacaacagcatcatcaagttgaatggtgccgaactgaatggtcattgtggcaccggcgtttgtgcgtcagtagcaacaaccatctgcaacaccaccaccaccaggaaacggacaacaaccacaacagtagtaatgaatgtgcactgttgcgtgagaatgctcaacgccttagtgagatcacacagctgcacaaggagcgtcaaactttggaactgtcgcttgacaagacgaag

SEQ ID NO: 92950 - DNA, 528 bp, Heterodera glycines
  unsure (1)..(528): unsure at all n locations
gattatatgccgtacgatcaggacatcgtgcgggaggctcagcccgcgcgactgcccaccgccacttccttctcatcgtattcccccgcggaacaagagacgtacaagccacactcaccatgggtggaccagagcagcaaataccgtaacgagtacactgttggtgagccgcccgttgcccctgccgcttacactgccttttttgatgatatggttgccaccggccccttcgccagctcgctctactcgacttcgcgtctgctggagcggtcccgttctcgcacccgagaacgccgccaagcactccgttctcaaagccaagcgcgcaactatttccgatttgcctcccaataccccgccccgttgcgcacccgcgattactccaccccgccctcctcttacatcacgcgaacaccgaccgctggcanttcatttgtttccgtccttgacaactacggagccaagcagnacgacttggctcgcagncagncgcttgaccgaagctccgtgtacaacagcaacttggca

SEQ ID NO: 92951 - DNA, 193 bp, Heterodera glycines
tatccatttggtgtgcaccgtttccaaccaacagcggcaagaattggcacgcgaattcaaaatattgtacgtggaaaatttgttttttaaactgaacaatgcactctctggcgactttgaggaactgaatttggctttgttggaaccgccagatgtttacgatgcgcagcacatgcaccgggcgatgtccggt

SEQ ID NO: 92952 - DNA, 529 bp, Heterodera glycines
  unsure (1)..(529): unsure at all n locations
agcctttgaagtttttgtgcacattatgtatttccggtttctctccaaagactaattagttgtcattaggcaaaggcatttgtacatacgccaaaattcccctgctgctgttaatcaccgtctccgccttttctctttttattggtgattttgattttcagctgcaaatcaaaagcaagcagcagtaaaatagactacaccagaacatcagaattgattttattttaatattttaccgaataattttcttaagaccacgtaattctgagtgggaattgttcgtcgcacatgcaacaaaatgaatgctttccgcttaatcggtccgatttcccctttttgtttgtatctttctatttcaaatttagctgatctttcccacctttttgcaattcttattttgctgtggaagatatggaaaacaccttcttgtgccggactcagcggaaagtctcagntgctttttgctttggtgttcacctggcggtnacttggacatcctttcactttatttccatttacaaccacgtta

SEQ ID NO: 92953 - DNA, 554 bp, Heterodera glycines
gttcttgtctttcattccatcgttcaaatacaatcaaacaaactgaattcctacacaaacaccataatttttccctctcaaaaaattggtcaagctggatccgcaacaactgtctcaacagcaggttggcgagtcgcaacagctgcagactgctgttagcggtgcccaacaacagctttccatgccgactcagcccaatcaattgctgtcccaacagcaacagcctcagatggcatccatagaacagcaagcggtgctgaacatttttgaagcattgaccgtcaatgattcgggaatgcctcccacttatgtgcctgctggccttctcggggggagcggtataggcggccccagtgggtcccaatttccacttgggtctgtgcatggcggacctccatttgcacaacctccgatacagtatcccgaacatttctatatgcaacaaatgatgcaatctgccacaacgccggtcctttcgaccggaggcggaggtttgggcaatacgcagtttctttatgagcgccaaagtgcgttggggagtggcacgatgggaa

SEQ ID NO: 92954 - DNA, 598 bp, Heterodera glycines
aattaaatacattttatttataaaattttataatatattttttatttaaaaagaaagaacagtgaatggaggaggaatttggcacatcatcttactgtaggcgtacgataccctcgtaatttgggcccaatcggtcgctgctccctttgctccctaatgaattctcttttcccttccttttgctttttctttcccttcctttttcactgtttgtttcccattttgtcattgtcagtcgctttggccaaataattttctctctccgcttaagcaaaaacatgtttttttcccagcatttggccgaacgcattcggcggatggtccaccaaatccatgctcaaatttgcatattttggccaaatgccctcaaatttgtcccaatcattcttttccttttcgccctttgcttcttcttcccttcgcttctctttcttttttctttccctttcgttctctcctcagcaaattttgtcaatgtgcgcttttccttccttccgctttttctgttcttaacaccgaaaaagtaatcaaattttgaaacaaattgcaatttgaatgactgacgccattcttcgccttacgcatgagcacagtttaa

SEQ ID NO: 92955 - DNA, 615 bp, Heterodera glycines
ctcacatctgggagccctgcatattgtagtaagactggtcccccctttttgaaaaaaaacaaaaattttaatgccattaaaacatgttctaggaagttttagggccaaaaaatggaataaaattccaaaaaacaattttaggagttaactgatgcgctgagcagaatcaatattttcaaatgttgaaattttgagttttccggatgttctaattcgggttcgggattcgaaatttgccaaaagggaggccggattcgtactcagcgcctcaaacaccattagcaacatgttattagaattttcagaaaagatttaaaaaaaaaacttttttcgggactaataatctttcggaagaacgacactcgcgttgcaaattgaaaaaatgtcgaaatttgccgggggaaaattggggagtcgccgattcagtgaaaaagtgcacataaatggacttccatggaaaattgaagcacaaataagaaaaaagacggaaggaactgatgagaaatgtttgggctttttcttatggtgcgaagcacttgaaagtacaattttaattaatattaaataaaaaaaaaatccattaatttttaataataataggaggatcattgaacc

SEQ ID NO: 92956 - DNA, 380 bp, Heterodera glycines
aatcttgcgaaaatgattgttaacattaataatataattttttttatagattcttaacatttctagttctttatacttcaattaatctttattttttaaaaaatgattatttcataattttataaaagaatacaaattattaatcaacatttttagcgacttaaattaattttcagatgtttttaaataaatctgggtgattaaaaaaattgcttattttttatttactgactgattgtccactgacggattgtccacttaccgacggattgtccactgacggattgaccactgacggattgccactgacggattgtccgggagcctaaataaggttttaataaaattattattttaattgataatttatttttccacca

SEQ ID NO: 92957 - DNA, 634 bp, Heterodera glycines
gggagcaatcagtggcaaataaatcttgatcaaaccctgctgaccaatctaacaagcttagggaaataccatttcgcctaattttgggaatttttcttttaaaaaacgtttcaaactttgaaaggcatgggataaaaagattttggcctccaaaaacgttttttcaaggattttaaagtaaaaactttgcccgggaaaaattttaaaaattcttttgcattttttatttgtaaattgatgaaatttatttaaatccccccttcgcccgtcagtcccccgcttggccaaatatttgagcatcacttcgtccagcgagacgcgaatgctgcgcaacgcacttttcccgcccctctcgtgccatgccgcatttgccaacgatgtgcaaacacttgaggtaaatgataaacaaaacaaaacaaatattatgccaaaatttgctattttgtgccagaatttgcgcctcagcggtgccaatttgtccggcggtgactacaacatgcgcaccccactccatgtggcggtatgaacattttttacaattaaatagattttttaatttaaatattttattttaatttaattttatgcatccgccggcaatgaggcggcagtggaatatttgttgaagcatggc

SEQ ID NO: 92958 - DNA, 229 bp, Heterodera glycines
tcgcattgtgaatgtgagcagcagtgtccatctccatgccgattcggtctatccggaggtggtggagtcgtgctctcgatttgggataatcgcgacatacgctcggtcgaatctagacaatgttatgcatgttgttgccctcaccaaacgcatcctaaccaatgacagcgggtcaaaagtcatgtcaaacgcatgccatcctggtagagtcaacgccgaagtcgttcgg

SEQ ID NO: 92959 - DNA, 320 bp, Heterodera glycines
  unsure (1)..(320): unsure at all n locations
attaaattaaaagtacggtagcaaatgatggaaaatatactgtagagaattaaattaaaagtacggtagcaaatgatggaaaatatactgtagagaattaaattaaaagtacggtagcaaatgatggaaaatatactgtanagaattaaattaaaagtacggtagcaaatgatggaaaatatactgtagagaattaaattannaaaacngaagnaaatgaaggaanaagatgcnatagccaatagtgtttataggtatggcatacctcaaaccccacatgaaaaaagtatggaattaatttttacaaaattgcaaatgat

SEQ ID NO: 92960 - DNA, 547 bp, Heterodera glycines
cttggtctgaatttaaccgccgcagacactgctatttttctcgattgggacttcaatccgcagaacgacaaacaagcggctgcacgatgccaccgcatcgggcaggacaaacctgttaaaatcattcgtctcgtggcaaaacatacggtggaggagctgataaagcagagagccgcaaagaagctgaagctgtccgagaatgtcttgggaaccgacgaaaaggaaggcccttcactaatgtttgacctgtccaaactgttgctagaggggctcaccgacctggagaaagagcagaagaagcacacacagtttcacattctgaccgacaaacagcttgaagagcggttgggtcgaaccgaccaaaacggacattggcaaataaagggcgacgacaaagaaaacattgaggatgagcaaatagaagatgaagcggagggaagaacgctgtacatgttcgaggggttatatttccacgaatttgccattacctaccaacgacgatggaaactacttacgaccgggtacgagcaccagcacacgtgtcgaa

SEQ ID NO: 92961 - DNA, 630 bp, Heterodera glycines
attttaattttttccttaatttcttccgtaaatggcggcctggaagtagtgtcagtctcagcagacacggaggagtgcattgttgaccatggggggacgaaatgcctattccacagtgtcacctcccttactcttttacctattggccaaagggtggaattggttttccataccccccatacagtacccatgggcagtctatccttcgtcctaaaagggttggccctccggtgcatcagagaaacccgcagttggacccggtcataccgactcaacatatcctcaatgctgcgttgtcctgcagcagggtcctggcgtgcttattttacagattgtttgtggcacctctttccccctacccctatgagctgtacaagtgcccggtttggcaattccaattgagactcgggattattttgcagcttaatgggtccacaaaagccgaagaaataactatgtctccaggggttacccaccattggccgttggctaagttgtctgtcacctttacccccagcggtttgccacccttaccaattttgggaagcgattttattgctaaccgttcacatgcgggattggtccccgaatggcactcccacctccactgtgattctgaatttgcgggca

SEQ ID NO: 92962 - DNA, 348 bp, Heterodera glycines
  unsure (1)..(348): unsure at all n locations
cgaaagtggctggacagaggtttttatacactacacacgggggggctctcgggggcactgctggcacacatcatcactgcccgcttgatgttgttaagacgcgactgcagagcctcaatggggacgaaatgcgactgcaagtgcagatggaacgactgggagcggggacagcgtccacaaagtcgaccagctcancaccaacggaagcgtcgagcagcacagcaacagcccaccgntttgcgcggtgtcttcgtctgctccaccaatctgtcattttccgctcttttcactccgtgtggcgggaggggcgccttcgcgcgctctacaaaggccttggcccaaatttgg

SEQ ID NO: 92963 - DNA, 298 bp, Heterodera glycines
gaaaatccatgtcagctacgccctgacagataagttcacaatgactttgatctctgaggtcctttctcgaccttagtgtggctaacgtcaggccgtgccagtttgcttgtctttgttttccattatcacaggtgtgtttattacgactgcgaccgaattgcaattcgatggcttcggcctttgcttctcattactttcgaagagaattcttgcttttttgaatgttcttgccaaaaaggtgctcaatgagacgccaatgcatccgatcaatttggtctctctgaactcccaattgggt

SEQ ID NO: 92964 - DNA, 162 bp, Heterodera glycines
agcgaacgcaaaaacaccgtccagcgccaagcacaactcatgctcaaagtccgactgatcatgcattttctcgtacagtctgtgatcagattattcaaaattggaattttttaaaatttaattgctttttggaaaatcattttaattacttttcaaaaaaaa

SEQ ID NO: 92965 - DNA, 388 bp, Heterodera glycines
  unsure (1)..(388): unsure at all n locations
tttttcgcctttagaccgcttcaaaggctttccaccgctgcgtggacatcgacccgtcccatttcgaggctttgaataacctcggcgcttcctattttcttatgggggagaggcagcgtgccgaaaaaatatttttagaagctcaaaagttaaatcgtcaaaattcgcacgttttggaaaatttacacataattgaagcagaagcaaaagcgaagaaagaagcggaaaaactggccaaaaatcaagaagtaatagcgaagaaaggaggcgatagctccaatttgggctaggacgacaatgaaaaagatgatcatcatttgttgagacgcattgattgtattgttgaaaaaataagtccaaggatgccanaaaaaaaaaaaaaaaaaaa

SEQ ID NO: 92966 - DNA, 232 bp, Heterodera glycines
gttgacattactaagccaaggagacgaagattctcaatctcttaaaagaaaacgtttgatctaagtgcttttgtgtgttgtgtataactcttttagactagtgtgcttattgttcccttcttgatgcgtgatttttttttttgggtgtgtgtgtttattgtttaatgagcttggttaataaaatgaaaatcgaaaccagattgatttactaaaaaaaaaaaaaaaaaaaaaa

SEQ ID NO: 92967 - DNA, 612 bp, Heterodera glycines
attttgttacggttattattcaagtcgcccctaaaactcggttgtcggcggtacgcttcattaattgctcaatttgtgccctggtaacctatccattattaattttcgttacattctccccaactttccgacagccctttccatgggcattctcgaatggtccgtctcagcgcgggactcttttctctacttggccttctgtctgagcatcccttcggcggtgctttacctcgccgaaatcgtcaacattctgcggcacaaacaattccacaagtccttctacgcgctgtccatcatccgtgccgttccgacttcaaaaatgatcggcggattggcttttttcctcaccggttacaccttccaggccaacaatttggcaaccgctttcatccttctcaaccggttgaccgcaattgcgtggccaattaaacacgaacagttttggcgtaagtttcgcccgatggttgcgcttgtggtgttttctgtttacctatttgcttttattgggagatgttcaacgcgcacggactgctcgcgttggacagcgccaactcaacgcaacacaatttcttcctctatgagacagatgatttttacttcttatgcgaacac

SEQ ID NO: 92968 - DNA, 342 bp, Heterodera glycines
aaacggccgggcaagagcgaacgatgacacatcacaccaaaacacaagcaaaaattgaaccttttccctttttcttcatatgagaatcagatgaagatgggggaggggtcttagaaaatatttgcgggcatgtgtaatgactattttccttctttcattagtagatgaacatcgtttttaatgttacgccgacaccaattccccacactcacaaagacgtgttaaatttatttcgaaagtatttatcaatcccatcgttcctaccaactctgtgttgtgttcaactgtataaataaagccgactgagctctataaacacaagaatcagaccgatcctgatca

SEQ ID NO: 92969 - DNA, 652 bp, Heterodera glycines
gtccaattaagctgcccattgctcctctcctctctttcctccttcgccacttgcacagcgactcggcaattcccgtcgcgggcggaagcaattaggccaacccatcgccgctttcattagcatcgcaccgcttaagtcagtcagtcacaaaccgacaaaagaaacggcaaaattctctcgcacattattcagaaaagtcgaggctctgccaaacctccgaacagcgaaaaattcaatcggaaagtgagtctcgaggaaagggagtcgagaggggacgagcaaaaggtacggcacggcaaaacaccacggcacacgccggtcgatgagcgacgaactaaacattgacggcgcctttgcgatgaacatgggcatgcccgcgggcgcgacggaagtgcccgagggggtcgtgcagctgaatgtcggcgggacttgttttctgaccacaattgacacgctgaaaagggacagcggagcactgctgtcccagttgttgacgttggaagggttggagaagaacagcaaagtggccaagcgaatgagcaacggcaccattttcatcgacagagacggcgaactgttcgcctatgtcctggattacctgcgcaccggcaaattgcttctgccggagaattttcgcgagttggcacgcctt

SEQ ID NO: 92970 - DNA, 493 bp, Heterodera glycines
cttaagctcttttcaccatactttcttccaaaatgttgtccgcacagcggctgatcagcttgtccaaacccgagcgtgtgttgcccggccatttgttcccgctgaacaacaaccgtggcctcttggacttggaggatgtgtacgccgccactgttttcgccgattcgtcggtggacggcagcgacaaagaggcaaaagtggtttcgcccggctctgacggtacacagacaatggaaggagcaaaggggcaggaaattgttggcttcggactgttccacaaatgcacgcccaatcagttttactgctctttgttgtccgtatcgaagcacattgaaccgttgttcgtcaacgtggaaagagtggccgaactgaaaaagtcagaaacggaaaaggaggaaaatgccaacaaagggacgggacggcacattttgttgaggctcaccgatgtgcaccaatcgttgcccaatctctcctccctcccccaatatttttc

SEQ ID NO: 92971 - DNA, 571 bp, Heterodera glycines
atcagtccatttcggacccgaccacggagctgactgaggaggacattttccgcatgaaatcgatgtccattgaacagaacgggtggaaaaacggcccttgtgccagcgaattgcaatccgccgtctcgcaggtcgactcggcctccaattacatcgccgatgatggggaacagcaaagtgacgagcaacaacaaacggaggacgagggatcggaagaagaggggaacgcagccgaagaggcggaggaggacgaggaggaagaggaagaagagggccaggccgggccaacatccttcgaagcgatggcacgcagtttggtgcgccgatactacgtggactccaaggtgtatctctgcgatggctatgcatttgggcgaaaccgtgccaaaagcccggttctcaacagagacacggtgaccgttttgaactatcccttcgagccggtcactattccgccgggcatcgattcggacgaatttcgacgagcattcagcgcagcgcaattgtatttggttggaacggcacatttcagcaaggaaagctgccgtgatgtgatgcaaacggtgctgga

SEQ ID NO: 92972 - DNA, 367 bp, Heterodera glycines
cggtgccctgcagctgttcaatagggaaattttgcagcgcgaggaggacgccaattggctcatgcccatcctttacgtgctgtgcagcgacttgcgactcattgcgcgaattgctgacaagcgcggctgtgtgctgtggggcgttcaccaccagcggaagtctgccgactcgcaaacggcgaccttttacgaagaggccgccgcctcaattatggacagttaccgcatttgtgtggaggagcgatcggacactaccacagagaaagtgtccgtcctcagtctgaccaaccaattgtttcgcatttattttgtgatcaaccaggtgcatctgctgaaaccgcttatacacatcattgaccacaccggc

SEQ ID NO: 92973 - DNA, 672 bp, Heterodera glycines
atgacactttgtttttaaaaaaaccttcaatggagtgggcggaatgacaccggtgccaatgctgagaaagcatccaacgttcacggcattgaggaaaattctgaaaaaacgaaaaaaaaatttaaaaaatttattttgctgttgttattggtgttttaccttgtacttgttgaagctgttccaaaattggatttcctggagcagttccaatgacgggttgttcgcaataatgcctgacaaaaatgagtgagggttatggacagaaaaaacacatattctaatgggatggaatttcattaaaatcaaccaaaaatttcaaaaaacagaaattcatcatttaaattacgaaaaaccgcttttttcttgtcaccaaatgcattttaattgtccaccgattaatacaacaacaacaatcaaagcaccactgttcacccacctccatcaatgtatttgttgtccacactggcaaaataggtaggtgctgaaaatttttcgcgaatttattaaaaaaaaattttttttacccgccgatgaacgcctcaacactttccacagcaacaaatcgtcgggcgtccggtagccgagctcctcattctcctcgtcatttgtcggcagtttgtagttgcgcatcagctccagctgaaccgggaagaactcggcccgcgtggtggt

SEQ ID NO: 92974 - DNA, 552 bp, Heterodera glycines
gtattaggtacatttttttatttatccactttttattggtcccttccttctcacacttcttcctctgacttaacatatcactcttttcgccgtttccttctgccgatggatttggtcgcttcgtctctgcattatgttggcagtctttttgacatggtcgatttggttgtgatcggtgcgctcgctgtcttcgccattgcctattatgtcagaagtcagtcgctgtccgcgcacaacaaaatcaaattctcggagagcacgccgacgctgcgcaacggcggcacgctgcaggacagcggcaggacggaccgttcctttttgggccgcatgaaatcggaggaccggcagattttgattttgttcggctcccaaacgggcaccgccgaggaattggccggccgcatggccaaggatttgtgccgatacggcaaaaagccgttgctgatggacccggaagagattgaagtggacgatttgccgaaaattgttgaactgtccgacccggtgctgctgctgttcgtcaccacttatggcgagggcgaccctacggac

SEQ ID NO: 92975 - DNA, 574 bp, Heterodera glycines
gtttttttttggaaatttttgctcaccaaatgcaataaattcaaagccccacacacaatcaccaccagaatcatcataatcaccataatcccaacaaccaccggttcatccatccgacataccgtatcgtccgcgccgaatgacgtcaccgacgacattcaacggggcacgggtttttgccaaactgtccggcaacagcaaccaacaacagcaggccattgagcacaaaatggcggaacttcgagcagcatacgcaatacaaccagcacagacgccgacggtggcaaaaagtggtgccaattccacccaaaataaatcgtcggcaccaccacctcgtcgacctggacgaacctcattgccaactccgtcactaggcgacatgcttgaactaccacaattgagctctcgcagttgtgtaccgtcgagaagagcaagcacagtgactgcctgtttttcaccagccccatccctaatggatttggcatcgtctgccggacttttgtcgctgtcgccaagcgatttggtcttcgagtcgtccgtgctcggcattgcctattatgactttgtgttgtcg

SEQ ID NO: 92976 - DNA, 616 bp, Heterodera glycines
ggtccaccaaaatagatttatttatggcacttccgggttccgctgtaaagctgtccttttaagccccgacgttcgtcgtaccgctttttacgcggccattaaagcacgttctctgtcaaagactgtcggtctgatgatcaccggttcgcacaatccaatttctgacaatggcattgaattggtggatcccgacagacgaatgcttccgtttgaatgcgaaattgagctgacgaacattgtcaatgccactgatgacgaattcgagcgcatcgaaaaagaaatgatggcgaagacaagcgacgccaccggcggacgacgagcggcggtatttgtggggacggacacgcggccctccagcccggacttactcggcacggccgttgagtaaatcagccgcgtgaatgagattcacgaggagcaataccacaattgcacaacgactcatctgcatttgattgtccgttctgtcaacagagatgcccctcatacttctccatgctctgttttagcccaatatcgcagtgctattgccacatcgcttgtaccagtcccagagtccgattgttcccgctactccatacaacttttcgtcgattgtgccaatggcgtcggcgcc

SEQ ID NO: 92977 - DNA, 479 bp, Heterodera glycines
atttgatgcgagaaaaaaagcgattgttaaaatttgctgaatatttgggacattgttcacgagaagcgacagattacggaaagtgtgtggcaacgaacgcggagagaattcggaaaggcgactgttcgactgagttcgaccgactcatcgcctgtttaaagaagaggcaagtgcgtctgtaaatcgctgctccgatgaaagtcaaacggcttaagcgtgccgctcacattttgactttttaccgttacaatttccattttcttcccccattttccgtccttctcgacggaactttttgccaagcggcgcttcagtcgaaaataaatcttcgagaacaaatgctaaaatatttggcgcaatccgtggaaatggtcgtcacgaaatgcgttttgaatgagctgcatcagttgggaaaaccactccacggcgccttggtcatctgcgaacaatttcgaattgccttttgcccccacaaaccg

SEQ ID NO: 92978 - DNA, 595 bp, Heterodera glycines
ccctttcgcatcggtcgcttcggctgttccatcattgagccccatctcgcggtgaatgtgctggcaaatgcgcagcttttcgcctcctttgccggtcggttggagtgcagtcgcttccgttcgccccgcgccgttttcctttcctcgtgcactgcgcatgccggcgaactgtcactacttttggagaacgaagaaaagttttggtgccgtcgcatcaacgactataaatcgtacgccgactcaaaattgttgctcggcatttacgtcaaacatttgagccatgttttaaaaattcgacagagtaaaatcgccgttgtcagtgtccatcccggcgttgtgcctggcaaattgtaccgaaatgttttttggcccttccgattattcatcaacggatttttgagaccatttttgaggtcgccgctgttggccgcgactcgcgtgttggacgtcgctttctccgacgatctctgtgagggtgcctattacgaggacagtcgcgtcaccgcgttaaaatgtgccgacgacccggaattcgtttggtcagtgggcacttccgtcagggacatgatcgtggacagcaacgcgaactccttca

SEQ ID NO: 92979 - DNA, 597 bp, Heterodera glycines
ggtttcagtgaattgtttttgccaatgggtacgttggaggacaacaccggtgccaccagcgcaatctttgggaattctacggggccaaacggtgatgaaactgtgcgaaaattctgcgaccgtaaaatttcctctgtgcgtttccttcatgaccattctgagtattcctcccgtttcgtcaccggcacttggtgttcccctgcgggttccggtggaaatgtgacactttggacggtccaacaacagcgcgacgaacagagtcgggaaggcggaagacggattgttcagaatggacggattgagctgcccaattgcgatgtcggcgacatttgcgtggtaaatgctcaacaatttgtcgtctcaacaacagcgggagacgtgcaaattgtggaaagtcctttggcatcaaatggagcgaatttggcggacggaattgcgaaaatatcgtcggtagccaaatatccgcgagtgcataaatttgcttcttcaaccgcactttgtctgctggacgaagaaatattttctggcagtgattctggtcaaatcattcgcattcgcccggacagccaatcttcacagtcgactcgggcatttgcg

SEQ ID NO: 92980 - DNA, 590 bp, Heterodera glycines
tattaattaattaactaattaattatccgtaatgcattttccgccgaccattcataacgcccaaattcgccacggtccgctgaagccgccgaatatgagccgaagcccaacacagccggacacaagccttggcaaggtgtacttggagtgtgtggccagcttttcggagccgacaaaggccaaatggctattcggagagagcgaactgagcaaaacggacggacggtttgagttcagccaggaacagcaggacacgaacagggacaagttcatctgcgagatcaaaaatttggacaaatcgctgaccggagtctacaagttggtgttgatcagtgcggaaggccgtgagaacatcgccacgttcaatctgcccctggtgggcatcgaaaaatgcaattggactaatgtggccgcttctctgacaatggacccaatggtcgtgcgagaagtgccactccaacctctggtcccgatcagataaagcgcaagaatggcggaactcgaaccgatcgatcgacggaaaaaatcaatcaaatcgatcgatcgttccccggtgatttaaaaaataatcctctcaaatgtttcctttt

SEQ ID NO: 92981 - DNA, 190 bp, Heterodera glycines
gagaataatgtgatggatataacgcaattgagccaaattggaacggaattttggacgttttgaatttgcattacccaaaaagtggcgtttttaagtgatgccttttatacattaaaatatatttgttttacatatttatgaattaaacccttcgagaataaagcgcaaacaaaaaaaaaaaaaaaaaaaa

SEQ ID NO: 92982 - DNA, 476 bp, Heterodera glycines
tgattaacgtagcctcgctagaatttaatctaaaaaacttttgtaaaaaagcatttaacaacgtcgcaagcattgtagttttaataggttctaccactatccctttttgaaccttgaaactacgttaatgtccataaaaaaaaaaatccacaaaaaaaaaaagtagtgcaaccttgcttaaaagaggaattacattgctataatttaattttttaccgttgattgataaaaactctcctcattagaactattatttaaatagttcaagtttctaaaaaaaactgaaaatttttagaaacaataacattttcccttccgggaaaaagttttctctcgtaaaaggctgatcactaggagcttccagaaactctattctataaattaattataaaatatattccaaatctcctatatttcacttatgtgaaaggacctcgggtcttaatctacacgaagcccgtagcgtaccatggcat

SEQ ID NO: 92983 - DNA, 607 bp, Heterodera glycines
gccacgcgtcccctccgtttcgatcggcccgcgcctcagccgcagcgagtccatccgttgtcactgattcaaatggtcactgctgcgaaaatcgtcgacgaacagaagcgagccaaagaacgaacgcagacgccactagtttatcggatggatccgaagttgctcatccgagaggccaccttcaacaaaatggcacagaaacaagcggcggccaaatatttggcgaccaaaaagcgtcgggagaaggacgagcagagggagcgcgagttcgtccgccgtgcggtgacgccgcccgactttggccaaatggacgccgacgcaatggtcaaactgtcggactttatgcctgccgtgccggcccaatttgaccgctcttttcgctacgagacgctcactgctccggtcaaagttccctcggatggagtgtactcatcggacgacattctcatcatcggtgctcagatggaactcgcgaacaaaacaatgacggcaaagtgacggactgctgaaggaaggacagacatttaagagactgaaaatttgccttaatttgttcaatttttatttttcattgactcattcactctatctgaactgtggacaaatc

SEQ ID NO: 92984 - DNA, 596 bp, Heterodera glycines
attataatcagaaaattaaaacatcgaatccattgtacggacgtggatattttatcgagcagaaggaatacagtaattctaacggttgcggatttcgtaaggcgaatagaccgcttgttccgagtaatgcggccgacattgagagttgggagccaaaggtaatgagcacccaagaaattagcaaattgactgctcgttgcgtgggtgtcactgatgcgtttatcaaacttgacaattacgtggacagtgtgaagaagtacaacccgtcgaatcatgatttgcttcggatgcaacgaatgcagcaccagtcaaagacattgacggaagacccggacaaatacgccgaacttattgtccaatgtgttgcaaatccaaacaagtttaatgggactcgccactgtttggagcttgtcattggcagacgagcacttgaggaatttattagtcgcaacgaatggacggaggaaagactgaaggactacgacattaatgcaaattggaagttcgagcccaatgagttgactgtcccgccgattcccatttacaccgggtcactttcttctgcttgatatatttgaccggttaatgtgactatt

SEQ ID NO: 92985 - DNA, 621 bp, Heterodera glycines
aataaagcgaagtgccatcaccgctcggcaatactgtagcgcaacagtcgctcggcacaactactgtatcgagggattcctaccgtatccaaataaacactttccaatcaatggctgatcggcaacaacaacaacaacaacaaccatatcttatcaacccaattaacaacagatacagcaggtcaatcgccgatttggtaccactgggcctcaatggcacagctttgcccatccgcgcatttgaaagaggccaagccgactcgcccgagagaagtaccatttctacaacattgtcgacaatgcaaggtgaaaacagtccgccgaccttccttggcggcgcggaagtgccacctccgatgggcacgagtttgctccggcaacggcttggctccgcatcggtggcacttaggggctctgctgattggaggcgatgcactttgcagtcagaagctgagcgatcattaggctcaagccgtgccgcgaccaccttcttgggcagtccaccagaagcagcagcaacagattttggacaaaccgtcaccaagacatttggccaaaatggaggaatggacaatgttggacaaagtgtcgaccagcaatttggacgaagaaagtttttcg

SEQ ID NO: 92986 - DNA, 548 bp, Heterodera glycines
cttctccatttccaatgcctttggcctccaaaagcgtcgcttttcttccgtccttttcttcctcactttgctccgcttttttgctccttcaatttctcctccctttctgtgcgtcggctgatttcgacctgagcacaaagtcgggcagcaaagtctgtgtcggtgaaatctgcgccgattcgtctccttttcattattatgagtgctgtggacagatttacaatgagtgctgtttgcgccttcagacttggctcattgccgtgcttttggtggtcgccatttgcgcgatcgcttcttttctgatcggtctgatcaaatgcatttgctgctgtaatggcaatcgttgagaagtgaacgaacaaagcgcaaattttaacaaattacgcattgaatgttccattttatcgatgtttaaattgtcttttgtgtttaagtgttagtttaatttaaacttttcaatgctcataaattgtatgaagacaagaataattaaatatattatgtttaagctttcattaattccccgactgaaaaaatccctatagctt

SEQ ID NO: 92987 - DNA, 594 bp, Heterodera glycines
aaaatttgttttgtcaaaatgtcgtcaaaacccgaaactttggtggagcggatgaagcatttgttgagctcgggcgatgacgcggacgttctctttttggtgggggaaggagagggaaaggagcatgtgcccgcgcacagagcgattctgaattcggcttcggacgtttttgaagcgatgttccgttttgacaccacaaaaaatgcgactgacaatgaatcagcgggtggagaagcgaagggtcccgtagaagtcactgacatcgatgcgcatgtgttcaaagtgatgctcaacttcatttatgcggatgatttgagtgaattgaatggagacaacgcaatggcagtgctttacacggccaaaaagtataatcttaatgcattggccaaagcgtgtttgaatgttcccatttccgagctcggcaatgtgtttctcgcttatgaccaatctcgccttctcagcgaaaaagatttctctcgtcgctgcttggattacattgaccaaaatgcgggaatcgctgatccaatcggatgcctttttggaagtgaacaaaatttgctgtatgaaattctcgaacgtgaccagttgaaaatc

SEQ ID NO: 92988 - DNA, 638 bp, Heterodera glycines
cacgctgtcgtgtgatccacgaatttaatgcgggccgttggccatatataatcgcatcggaatgcaacgacatctttgacggggacaacgagcaggagcaaaatggggaacaagaaacagcgaaaaacggagatgaagcaaaagaacagcaaggagacacgaccaaacagcaaaagattcgcaaacgaaaagaattgaaaaagaagagcaaacggcggcagttggacaaagagtcaggcattggccgtggaatcgattttcattcggtttcgaacgtgatcaatttcgattttccgctctcaactgatatgtatgtccatcgagtgggcagaacggcacggggatttaacaaaggcacagcaatttcttttgcttcccaggaagagttgaacctttttgaggtggttcgaacggagatcaatgaacgaatgggccaggcggttatccaaccttatgaagtgcgtatgaaagactttgaaagtttccaacttcgagcaagggatgttatagcggcgtgcacaaagacggtaatccgtgaaacgcgaatggctgagataagggcggaactgctcaagtcgaaacgattggacgcatattttgagaagaacccccgggagaagcgtgctctggagcaggac

SEQ ID NO: 92989 - DNA, 533 bp, Heterodera glycines
cctcgtgccgaattcggcacgaggccatgctgtcctggcagccaacatgttgtttcgatgatgaaagatcacaccggcacattctccgcttcgatgccaaagtcttcgctttgtctgagtgccgaaagagtcgccgctgcggtggaaaaccaactgaaaacaatttggtgccctggcaatggtggtcaaacactcatcaacgagatcaacgcagctcaatcatcatctgatgagtgtgctcgctctctcggcttcatccgtgccatgttcgaaattgccgcttccgccgcttcccatgccggtgccaacgccgaattggccaatttggctgtccagttccgagaacaagttggcacaattgacaccaactgtgctgcgctgggcattcatgttgggcaaatcagcttgggcactcccaaaggagaccatccgcaagtgcatgactctgagagtgtgcttagtaaccctggcaccagcgggtctcacaagcgcatttaagtgcattgcgacgattccgatgatgtcatcatttg

SEQ ID NO: 92990 - DNA, 548 bp, Heterodera glycines
tcatggtcggtttcgcgcccctcacgtcccgcggctcgcaacaataccgtgccctcacggtccccgagctcacgcagcaaatgtttgacgccaagaacatgatggccgcctcggacccgcgtcacggtcggtacctcacggtcgctgccatgttccgtggccgcatgtccatgaaggaggttgacgagcagatgctcaatgtccaaaacaagaactcgtcctactttgtcgagtggatccccaacaacgtcaagaccgccgtgtgcgatattccgcccaagggtcttaagatgtcggtcaccttcttgggcaactcgaccgccatccaggagctgttcaagcgcatctcggaccagttcacggccatgttccgtcgcaaggctttcttgcactggtacacgggcgagggtatggacgagatggagttcaccgaggccgagtccaacatgaacgatcttgtgtccgagtaccagcagtaccaggatgccacggctgacgacgagggcgagctcgacgaggaggaaggtgagggcgaggccgaggctgcc

SEQ ID NO: 92991 - DNA, 601 bp, Heterodera glycines
aggttttgaccgggcggcgatggtgaaggacatgaacatgttctagtggttgaacggcaattgctatcgcacaagtcattacccttacgcggaagagagagcgtactgggcggaccggcggggaattgcggtcattacggaagtgccggccgttggaatttggaagctctactcctcggcattgctgaaactgcgcggggaaatgatcgcggaaatggtcagccgcgaccgaaaccatccttccgtcataatgtggtcactgtcaaatgagccgaaaatgcccgccgactcgacaccttacaaatatttcaagaatttggtcactttgaccaaacgattggacgccacgaggccggtcaccgctgtttttggccacgcgtctgcggccgttaaagtggcgtcacttttggacgtcatttgtgtcaacgaatattttggttggtacagaaacattggcatgttgggactgatccgcgaccaattgctcgatcaatttccaaaatggcgtcacaattacaccaaaccggtgattttgagtgagtacggcgccgaagcaattaccggctttaatgatcagccgagcgtgcccttttccgaacgt

SEQ ID NO: 92992 - DNA, 594 bp, Heterodera glycines
gaggtttacttatatttacccgccaactgaaaatggacaacggctggtctccagaggagttcggcaactgtgattggggcggtaacaaccggacggaggagttcggcaactgcgattggggagacaacaaccggacggaggaattcggcaactgcgattggggcaacaacaacaacaaccggtcggaggaattcggcaatcgcaattgtggcaacaacaaccggacggaggaattcggcaaccgcaattgtggcaacaacaaccgatcggagggattcggcaaccgcaattgtggcaacaacaaccgatcggagggattcggcaaccgcaattggggcaacaacaaccggacggaggaattcggcaaccgcaattggggcaacaacaaccggacggaggaattcggcaaccgcaattctgggaatggcactgcccagcgacgggatgccaatggcagaaacaacggcggcggaccgtttcgggtgccgtcgccacccccgcagcaggtgccggtgccaccaccggtcactccgcttgacttttgttgccccggcactgagccttcgccgcctgttcgatcgaatatcgtttacg

SEQ ID NO: 92993 - DNA, 641 bp, Heterodera glycines
caagtttgagcgaaatggacaacacaaataataaattcattttgttgaagaatggggcaaaattattctatgcttctgaagaatgcgtacgtcaggaagcgaaaaactttgtgggtggaattgtcggtttgaatgggccttcggatttggaggagggcatttatgagggtggcctcaaaatttgggagtgtacggtcgacttgtgcaattttctactcagcaattatcagacaatgagcggaattgacattttggagttgggctgtggcgccgctttgccttcgattttggcgctgtcaatgggcgccgattcgatttgtgttcaggatttcaatacttttgtcgtcgaatgtttcaccaaaaggaatttcaaattgaatggccataaaattgacggtggaaaatgcgcttttataaacggacgatggggcggagaaattttggggaaaattgggcagaaaaagttcggtctgataatcacttgcgaaaccatttacaacgaggcgaattacgcgtcgcttcacgaaacaatggacgcccttttggccgacgatgggaaaattcttttggctgccaaatcgcattatttcggcgtcggcggaagtgttttggcattcgttgaattcgtccgctcgcgagga

SEQ ID NO: 92994 - DNA, 90 bp, Heterodera glycines
gtccaattaagttgggatggaattttccaatttctacgcctattatgacaatttggctgcgctaatcgaccaacaaacgtgggaagcagc

SEQ ID NO: 92995 - DNA, 520 bp, Heterodera glycines
gccaactcagcaccgacggggcgctgacggacggcgcttacgcggccaaatgtgcgcggattgggcgcgaatgtggggacaaattggtggccggattcatctgtcagcagcggtgcagcggagagagcaacgacgcaacagaacagcaacaatttttgcattggacacccggcgtcaatctcagcggcgccccgggcgacggactcggccaacgctggcgtacgcccgcggaagcggtggcgcgtgacgcgtgcgacattgtggtggtcggccgtggcatcaccggcgcggcggacgtcggcgcggaggcgaaacgctacgcgcgcgtcgcttgggacgcgttgcgcgcggcccgcgcgtggaccgactgatcaatcaataatttacctaaaatgccattgatcaaaccgatcattttggaaaatttgtcactcatcgatggtttctgttgtttttttgttctgtttcttacatatgcctttttatttaatttaatttatgttcgtttttgttttgtttg

SEQ ID NO: 92996 - DNA, 576 bp, Heterodera glycines
gtctgccagacattgtctgatttgtcagattttcttgacaaatttgacgggcgcgacaaaacgatcaggtccctccatttcgcccttgttttgatcgccaatcgctttcgcgatcggaggaaaagcgaccgactgatggcattcgctaagcaattcagtcagacccggttaatttgtcggctcttctcccaaccgtccctcctcctctccgtcctccgaatccctcgtgcttttcgtctttctcgtgatcgcgtggattgtgctttggcttcatcagtcagtgtgctttatctgttctgcggatggaatgaactgatcagtttgctcgccgagtcgggcttcgtcggtcgtgcgaaggcgaacattttaaagtgtcacgggaatgcgttacacttttgggtgttggcattggcattttgcatcgttcgatgtctccgccaaattgcgcttcgagggatgccaaaggcaaatgcattagcacggcatcagcacaatgacaggcaatggcttcgctcaattcatttctctcattggcttttccgccgattttgtagccgctgtcaatttgttgccccg

SEQ ID NO: 92997 - DNA, 659 bp, Heterodera glycines
tccaaataagccatttatttgacttccagttcagcaattacattctttgttcttcttcaattttcgcaatggccaaatattgtttaaaaaagcaaagcaaacggttgacttgtaagaagaagttcaaaattcagcgcaaagttcgggaacactcgcgaaaacttaagaaaatgtccaaagaatccgagcggaaaaagaagacggaaaagcaaatttccgtgcccagcaaatgtccattcaaagaggaaattttgatggaggcggagcagaaacggacggaggcaaaggagatggaacaggagcgcaaggcacgacagaaagcggccaaaaaggccggcggcggcgtcgtcaaaaaacagtccaaaaaattggcgacgaccaatccgttgtcgtccattgaggcgctggcgaagcgagtggccaaagacgaagacaattacaatgccaaccaatttttggtggattcgcttccggaagtgccgggcgcgacgacagaaaacaatgacacaaaatccggtgcccgtgccaatgccaaatcggtgcgttcatttgcggccgaagttcgacggaccatcgaaaatgcggacattgtcattgaggtgttggatgcgcgtgaccccctcggcagtcgcagtgcacaaattgaaacattggtgctg

SEQ ID NO: 92998 - DNA, 648 bp, Heterodera glycines
gaaaaagtgcccaattttctgtactctgccaatgtcttccgctccaccctcaccagcccaattgttggcacacaaagtggcgtcgaaaatcatcgaaacggagagcgttaacgggataactgacgcggaaatgatggcattgttgaaatacggaacagagctgctcgagaaggagccggcacgtgtgccattggaggccccctgctacatttttggcgacatccacggcaatttgcctggctttttactattctttaccaaagccaacgttgagtcccgtctgctccaactgcattcacccaagtgcaatttgctggtgctcggagactttgtggaccgcggcctttacagtctcgaagtggcctctttgctcatctcattcaaactgctgttttgcgacaaaatttttgttgttaggggaaatcacgagatagaatcaactaattttgagtatgggttcaaagaagaagtcgatgcaaagcggccagaccaagccgaacaaatttacaacgcatggaattgtttgttcgccaaactgccactgtgcgcggtcatttccaacacctttctgtgcatgcacggcggtttgccacgacctggcggatgggactttatgatgggaagcgcatttgtgaaaccggccgacga

SEQ ID NO: 92999 - DNA, 476 bp, Heterodera glycines
gacgataattgatcgatcacatttcatttttcacgtgtatttaatgttcgccatttcaagcgaagtatcttcagtctctccggaataaagccacttatcccagtgtgtccatcaaaggcgggatagaatccctgggcttgatcatcccatggggcccttccttcgggagtttatgagttccctcccaatgttccccatctgccctcccaaattgcccactcccaacgccagcacgtccaccgcgcacggccgcgctactggtagcaccggatggttctgcaatttgtagacttttcatcggcctgggcggacaaaggaacaatggaacggaggtgagtcaaagagggagactaaggaggcgcctgctgagagaggaaaaagcgcttcggcggtataaaaggcccacgggggaggactcaaaaaaataccccaaaaaggaatgccccgaaaatagggaaggaaataaataccccaaa

SEQ ID NO: 93000 - DNA, 667 bp, Heterodera glycines
tgaacaatccgccgcaattgaacaacgccaccgggcggtcatccaacgctggcagcaattattagcaaattcgctggaacgacgtcgcaaattgacggaggcccaggcgcacttcaaacaaattgaggacctgtatctgacgttcgccaagaaagcgtccgccttcaactcggggcttgagaatgcggaagaggatctgacggacccggcccgatgcaattcattggaggaaattcgggcccttcgcgaggcgcacaccgaattccaaaagtcgttggttggcgccgaggacgacttccgccagttgcaggagttggaccgtcagatcaagtcgtacaatggtggggccaacccatacacgtggttcaccatcgaggcactgtcagagacttggcaaaatttgcaagagataatcaaagagcgcgagttggagctgcaaaaggagcacaggcgccaggaggacaacgacaaactgagacgagaatttgcacgacaggccaatgaattccaccaatggttggcggacacacgtggcgaaatgatggaagcaagcggatcattgggagcacaattggaaacaatccggcgcaatgggcaggacatcaaagcacagcgggccaagctgaagaaagtggaagattggggcgcactgctggaggagcatctg

SEQ ID NO: 93001 - DNA, 279 bp, Heterodera glycines
tggcgccgagacttcggcacgcccaccaccgcctgcagaagaattgtgcgcggatgacgtcaaagtggcatttattgaggcgaatttcatgccggactgtgaacgcgcgtgccggtactatgaagactttgcggacgtcgcttttgaaactatgtttttcggaaagaccgacgaggaaagagtcaccaaattgtctttttaggctttttcatctgttttgactttttcgaatttactcgacaaacaatctcaacacaagcagaaaaaaaaaacaaaatg

SEQ ID NO: 93002 - DNA, 132 bp, Heterodera glycines
aattgtatgtttattttatccttcaaattgttatatatattatgcttctagtgactcggaatcagactgaaaaattctggaattattctcaagatattagcttgtttgattaaaattttccgattttagttt

SEQ ID NO: 93003 - DNA, 600 bp, Heterodera glycines
  unsure (1)..(600): unsure at all n locations
cgcaaatgggaatttgtagatggcttggacgaaaggaagaagtttctttgtttgataatgggcttcgaatcgaatcaagcctcaaaattcttaccgatgacaagtggcaaaatcgttatgttgtttgccagaggcgctgcttgtccgaggctcctttgctaggtattttcaaaaatggaggttgtcgtgaaagaggcgaacatttggaacttttctatttgcagaattacatcggatacgaatatggttttaaattcaaacgctcgaataagacgctcgccatcttgatacaaggccaaactttgatcttctcatttagcaatgtcgagagcatggtgttttggaaggagtggttgaaggacgtttgtgggcgaagtgccatgtattttgtcaagtgccataccattccaaaggacaattccgtcatcaaattaaactctcgaagtgcacgaattcacatcactcgctacgccctcgtcattgtccaggaagtgccgccgaaacagcgattgtatctcaacttggaagatttgtccgatgttgaatgcgttcaaaatcgctttgcgtttcgcgcattgacctacccctggtcnacaccgc

SEQ ID NO: 93004 - DNA, 467 bp, Heterodera glycines
aattaatctcattaaaagaataattctttaatttgaaataaatcagttttgttttcagttttttgttcaaagagcaccgctttgacgagccgttggacggcgcgcactttcaatggacagccatttacgacgacgacagcccattttttggccatgggtttggtgactgtgtatggtttaggtgttaggaccttgagaaggagaacatgttcaaatcggactacgtgcgaccagcgggaattaagcccaggggccgacccaaacaacaaatgccaaatttattgctgtaacaatgccaattctgtagtaacagtacaccaccgtctgctcgtacttttccgttttggggatctgctgatcggcgcccttattcggacaaattcatttttacggtggccatttttgtcgcactcgttgccagttggcactgaatgattgacagaaaagaagcaattgttgtgatgata

SEQ ID NO: 93005 - DNA, 535 bp, Heterodera glycines
gtgattctgacggaggacgacgtcaaattctacatggtctgagatcattttggcgctggagcacctccactcgctgggcattgtctaccgcgatttgaagcctgaaaacatcctgttcgattcggacggccacatcaatctgaccgactttgggctgagcaaggagtcgttggacgtccccggacaggtcacctacagtttctgcggcaccgtggagtacatggcacccgaggtggtcaaccgtcggggccattccgtcgccgccgactggtggagcttgggtgtgctcatgtacgaaatgctgacgggccacctgccgttccagggcaaagatcgtcatgacacgatgaacctgattcttcgtgcaaagctgcccatgcccgtctatttgtccggcgacgcgcagtcgctgctccgcgcgctgttcaaacgcaacccggcaaatcggttgggcggcggtgcgcagggggcggccgcgctccgtgaccaccgcttcttcgcctccgtcaactggcagcggttggcccagcgccag

SEQ ID NO: 93006 - DNA, 617 bp, Heterodera glycines
ttttttcgttaattatgcgccgtcgtccgtttctttcgcttttcattttattcctttctctgcgctttacgccaattttggcacacactgacaatgaaaatgccgaagaagcagagaacagcaacaaagttgagcccgaaaggccaaaaagtgacggagaaggggaaatatccaaagacccctcgggcggttttggcactgacattgagtgggtgccgtgggatcaagcagtttcggtggcgcttgacttgaatcggccaatttttctgctcattcacaaaacgtggtgcggtgcatgcgatgcgctcaaaaagagttttgccacttctccaaaacggaaggaactgttggagctgagcaagcagttcgtgatggtgaacacggaggacgaggaggagccggaggaggaggagtacgcgccggacggacggtacatcccgagactgttcattctgaataaacatggcaaacgccttccggtggataataagaagaactatccgagtaacgtggcctacttcccgcaggtgccggatgtgatcagagcgatgaaagagggcacggaagagtttgagaaagagcagaaggggacagagagaacggaagaaggagagaat

SEQ ID NO: 93007 - DNA, 98 bp, Heterodera glycines
atttgaacgatatgccaggccttggatgaattattgtacattattgtgaactttgggttggtggtgctgattccttgttaaatttatggataaaacga

SEQ ID NO: 93008 - DNA, 382 bp, Heterodera glycines
ccagatcggcaaatatcgttcatatcgtgactatactgctgcggtggacacaggcacggagctgatcggtggaccagttcatctgatgcaaatgatcattgctgccacaaatgctgattactgcgaggaggacaacctgtacactgttccatgtgaccaacgacccaaattggcctcaattgtgctgaaagttaatgggaaagacattgtggtgccagcggaggaatatataattgatttgaatctgccggatggaaaatgtgcccttgggctgtttggccaatatggcgtcggattcacgacggattgggtccttggcgctcttttcctgaacgcatattgcacaatgttcgactacgacaagggccaggtgagcttctcg

SEQ ID NO: 93009 - DNA, 459 bp, Heterodera glycines
  unsure (1)..(459): unsure at all n locations
caggagttattgcgacgtcgcaattcaccggtggacccgagggatcgattcggctcaattgcggcgaaaaaggtgcacatgccgcagacggaacgcatttattacggctttcagccggacgtttggaacgaaggcgcccaaattgaacggctgctgcatgagcgacagaatgcgtttatggcggacgatgaacgcgtggaggacgaattcgctgagggacgcgttccacagattgtagagccagcgcaagggacatgtccgggactgaagaagcacgcgcgaatccaacgaaaacggagggagtggcgcacactgatgaaagcggagagaaagcgcaaggcggtggcgactgacccgggctgcgtttaagcgaggagatgcttcaccttcgccgatttcattttctcaaatttttaattttgtgtaaaataaatatcttgtttttaaaaaaaaaanaaa

SEQ ID NO: 93010 - DNA, 564 bp, Heterodera glycines
gaaatgaggtcggatccgactcagtcgaggaggtacaagcacaatacagcagcagcagcgaacggcttcaccaccgcgggtgtttttgtcggccaccgcacgcggcgccagtggcgctttctgctgctgctttccgtgcttttctccgtcactttcatcttcggcttttgggctttccaatcggatgagtggtccagcttctcgcctccttaccacaagttggagcagttagcctcagcaccatggaacaacacaacatcaacgacaacggcggaaggaacaaaagaaccaaatggaaaagaggagggactttctgctgaaaaggcaaaaacgaatcgtgccgaaaatgcaactgaaaatgtgccaaatgtctcctcgactttcgcggttccctcgcggcattccgtccccgatttgccacctgcgtgcgctgaccacccgccgggactgatcggtcccattccggtgtggatggacgggccgggattcgagacggagttcctaattgaattcaaaaacatccgtctcaaatgtcgggcggagttcgccaattcgtgtccggaa

SEQ ID NO: 93011 - DNA, 547 bp, Heterodera glycines
ggaatattacttttgttaagacgttgctatgggtttcaacggcatgcatctgggaaattattgtatgttagggcggtaggtattgctgaaacggtagctagttgggtgttctattcttatgcacctgtttatgctgcgctgctttatgatttggcacgctacagtagtttaccgctttcttaccttaaggcaaattatgatccatctgttttttatttgatagaaatgttattgcgtatagacaaacagatacaactaagagaccttccgtcagttataaatgattgccgcagtttcggattaagagaattaatactttctataatttatattaaactagctgaacgggtttatgatttaaatcacgctataggttataccagtctagaaacagttaaacatatggttcaagaaactttgtctacctatgtggaactagcggaaagattacagagccctgaaattaagaatttattaacatatgtagcgaaaaaagcgttggaaaatgggcgtaaaaaatagcaatgctaccatttcataatcgaca

SEQ ID NO: 93012 - DNA, 521 bp, Heterodera glycines
gcctgaagaaaatgccggatgagccgctgatcaccgaacgaatcaacgaaattctggaaagtgccgaagcaacgcgaggatcccaacagccgtggccgccgcgggtgcgtttgaaagtgatttactcgggacgatggttggacattccgccaattaacggaagaaaatgggggccaaatcattttgccggcaaagtggcgaacgcagcggaaatgatcgttgtccgtgctgttcacccggagaagaaggcgaagaatgtgaacgacgaacagctccaaaacattttgggaagtcgtacggacgacatttgcagcgtggacgaaatggtgggcaagtactacacccaatgtgacttcaaaagtcgtctgagtgttctgtccgaaataacgatgggaaaacagctgcaggaatattccaacaccgaggcgaccactcaattcaaattcacggcagcggacaaagcactgagcgatagcatccgaacacaaatcgacgcgatgacagccaaagtgaagggaatg

SEQ ID NO: 93013 - DNA, 132 bp, Heterodera glycines
gcactttttgtgttgtatattttcccaacctcttttttcattttgttttttttttttgctactttttcaaattgtctccattccttttattgtataaatttattctaattaaaaaaaaaaaaaaaaaaaaaa

SEQ ID NO: 93014 - DNA, 310 bp, Heterodera glycines
gtgttggacaaagtgtgccgcacctcagcggtgaagcaggtgttacgccgccaatttgccaatgccaatgttcaaattgtgaagcggggccgagggacagttgcgctgaagaaactttaaaacaaattcgagcagcatacaacttctaacatggacatggctttaatcccacaaaaaaaatttacttaaatctcaaaactttttcctcctatatgctgattgattttaatccctgttttaacataatgttttaaatggattaagtaattggtaaataaagacgacgacacccccaataaaactttattac

SEQ ID NO: 93015 - DNA, 412 bp, Heterodera glycines
tcttcctgcaatgctacccccgcaaaccactccactctatttaatgtctatccatttgattcagaattcctgacgagactttggcggggccgatttccacacaaaatcccgactgatcgtacttgtgcttacgaaattgactctttataataaggaggacttgtaacggtacaatcgttacgcgatgcaccgatccatgacatatataatgctaaaacaacgatatgctctccgacaacagcaaccataagtctccctctacactcaagcgctgtccatcatgtcctgggtgtacatcgggtcaatcaacttcgacatctgcgaggagcacctgcgccaagtgtctgcaccgaacgggcccatcaaactgatcaacatgtgccgggatccgcccaccgacaatcacaaggct

SEQ ID NO: 93016 - DNA, 486 bp, Heterodera glycines
cctcgtgccgaattcggcactaggagaagatgaattgattccatgtctatacattatgtttaattcttataaattgtcaaaacttggcattgccatcgattccatgtcgtacatttttcaaaatctcaacggcatgcaggaatttgttggcatttctccacaatccgccaaaaacagctaagattttgtcatgcttgaaaattttctgtacaacaccaacccgctcattttgcatggcaatgggccgtccaagtcgcaactgaacgtgctggagaattacttgactcgtggcaaaatttatcaagtctttgaagtgagtgtgttccaacaaagttggaaaaatgttgaggacattacattcgtacccgaagaacacatgggcaattctacaaaaaattgtgaataatatgataagcaataatcgtgggtgaatacacatttttaatttggtgcaatttttaattaataaatttgtgtaattggcaa

SEQ ID NO: 93017 - DNA, 584 bp, Heterodera glycines
ccaccttcgtacacttttccattaacatcgttttttttgtgccgttcatttcgggcattcttccgcttatccctttcatcagctcatccgccgcttcatttggcgtcacctccaaacaatcgccgctgctcaatttgggaggggcagtgaataacgccaaagaattgccggtgttggcaggtgctatggttatgctcagtttgtttcagttggccgctgcctttagtcttctcctttatggctgtcgaacattcgggcgcacaatgcgacacgtcgagaacattcagcgagggattaacgccctccaatcacaacaaaaccccgggggcgaaattggggagcaagaaaaagacgccggaggggaaatgaggcgaaagctgtgaagaaaccgatgaatttctccataaattaataagacttacaattagtctaaaaaatcgcaatttttcgcatcattttgttcattttcccattttttaacttattttcctttccttgccactcacgcaaattgacagcgaaggactgtaaaagtcatttgaatttagttggcataatgaaatgaagtgaatagcagtgaaaaa

SEQ ID NO: 93018 - DNA, 409 bp, Heterodera glycines
accagagccaattgtcattcgtggagtggggcacctaaccatgtgtggccttaactcacatttttcaacggaaattcctagagctctgacaggaaaagtggcaccggaagagtttgacgacactttgcaacgtgcgaattacgatcttcataggaatgagagcagaaacttgcgctgggtgatctgcggagtgctgttttgctgctgcaccttccggatttcagtatggtcggtggtatgtctgaacggaacgactattgccgctctcgagaaaactctggaccatgataaccaactagtgtactacaagctcagcttgcattggaagatggccaggatgcccgatgacccgatcaatcgcctgacataatatgtgcttctgcttgaaacgctgtcacgaattccgctt

SEQ ID NO: 93019 - DNA, 294 bp, Heterodera glycines
gacaatcaaaatccgggtgtccaatccgaactattcgacgtcgacagaacgccgtttcggcgcttggattggcggctccattgtctcttcactgggcaccttccaacaattgtggatctcaaagggcgaatacgaggagaccggaaagtccattgtggaacgcaaatgcccatgacggtcaaccgacactaaataatttgcttcctttcccggccgatttaattttttcatttttatttattttggttggttaaaataaatggctagcttatcaaaaaaaaaaaaaaaaaaaaa

SEQ ID NO: 93020 - DNA, 637 bp, Heterodera glycines
ttgagctcaattctctaataaaaacgaattttcccctaataatattgaagaattgaaatgtgttgctcggataaatggacctgttgttgctgttgccatgtgactaaaggtgcgcatgttcttgcctggttctgcctggccattggcatccttatggtgccagttttatggttctttttagctgcttcacttttcttgtttttcattggacttctgtgggttctaccgtacttcaccggaataccgataattttgggcgaattgcgcggaaagcgaacccatcgaatgtatttgccattcctgatcgtttttggaatcggcctcgttttcatgatattttatggaggagctgatatatttgtgaaaatgaatgaaaatgtaccgaacaactcaaccaacgcatcagcagttgaacataatcgcaccataaaaaaagctgacaccgaactgagcaaaaccacacttcacacaattaaaattggttcctatttcttttcttggtttctcacattggctctgaatgtttggctttattcaattgttcttcgtgcctacttttttatgaagcgccaaaatcaaaatatgaatggcgcagaacgaaaccaaaaatttgaaaacattgcactttgattactca

SEQ ID NO: 93021 - DNA, 623 bp, Heterodera glycines
gttattcaattttctattgaaataattaaatgccgaagccagaagctttggtggatcgtatgaagctgttgttgagcacaggcgaagacgcggatgtccattttttggtgggggacgaaaaagacaaaaagctcctgaaagcacacaaaattgttctgaagtcggcttccgacgttttcgaggcgatgtttcgttttgattcgcaaaatgcaaaaaacgccgctggggaggccccttcttcttctgccgaattgttcagtgctgtggaggtccctgacgtcgacgccggtgcatttgaggcgatgttgcgattcatttacgagggcaatttgagcgaattgaatggagaaaatgccatggcattgctttacgcggccaaaaaatatgacatcggcggactggtcagggcgtgtgtgaacattcacattcccaacctgcgcaatgtgttcctcgcgtttgcacaagctcgctttctccaagaaaatgacttttcccagcagtgtttaaattacattgactcaaatgcggactctctgatcagatcggacgccttcttgcaaattgatcagaatctgctgactgagattttggagcgcgatcagctgaaaattgagcacgaaatt

SEQ ID NO: 93022 - DNA, 638 bp, Heterodera glycines
tttgagcccgacatctcggctgtggtaacaggcgatgagacgtcttctctaccgatcaatcgattccgcccagttatgtacacggagggcgagctggacaaaactgaccttggccaaccaccatcgaggctctgctcgaatacctctaattccgtcggttcagcaggcgatagaattgccaaacttgtcgtggacagtgcagttactggtggttgaacatcccgcaggagcacatgatgccctggttgggctggttgcagcgtcagttccttcaatctccgtgccgacgaacttcgcctggcaattgtcaaggagccaaggctgatccaatttggcgccggttccaattcaggcgacaaaatttcgcagagtctcgttatttggccaccaattgctgttgctccgttttcgtcgttcctcattttcgccatcgtcgtcgacggcattgttgttttgtccgttatttcgtgccgccttcgcaacggttggagcaaaacaacaatcaaccgcaacagaacaacacgagcagaaacaaaaagaagcgcaacaagtacaacaacaacaacaaccgttgaaaatgcgaaattgcgcatgggcaacaatcggcggacggcacggctggcccacgctaacgacaa

SEQ ID NO: 93023 - DNA, 637 bp, Heterodera glycines
tttgagtgttcgtcaataaacatttatttattgatcgtcttccttaaaccctcggaccgaacaattggcgcagtcacaaaaatttggactttgctcacatcttcgggccagttttcccgagttggtcgacctgttgcccattcaattgtccttctccgccctgtactttctcatttggttggccgcaattttgggcaatgcttccgtcctttatgtggttagcttaaaacaggtccaattgtcatcggtgcgttcggtgttcatctgcagtttggccgcatccgacattctcatgtcgttcacttcattgccgatcaccgccatttcaatctttacacgtgattgggttttcccttctccattttgcaaattgatgggcattttccaaggcggcacagtttttgtgtccagcttcacactgaccgcaattgctgttgaccgttacattctcatcaaacacccgacaaaacagaaaattgaatttcgcaccgcaatttgcattgttattggcgtttggacattgggttacgcttgtgccttgccggttggccttttctcatcaacacaagaatatccaccattttgcggcacattttgtgaagaaaattggccagacacggaagaacagacggggaga

SEQ ID NO: 93024 - DNA, 479 bp, Heterodera glycines
atgttttcattaattttcttttttatttttgctacaatttctcacttaaatggaaatgatgatgaactttgggacataaatttaagctgcaaacctctttattaagagtttagcagccaagtactcggatttggttagatgtgctgtggaaaacaattctccatcccaagtctgcacaaaatgtgttcgacagtatatcaacttcagcgaacaacattatcagagtctgcacctggcaaatactacttcattggacaaccgaacatgcacaacagtcatttacaacagttatcggatcagttacgcacagaaaatgaacagcgcactgagtgaaagcatatgggaagcatcaaattgtcatgattgccttcgcatcgattggaattttgaacatggtaattccacctttgagttcgacaataaaacggtgcaattcaaaaattacttgtggcaatggcgaaattgcgttgtccaacaga

SEQ ID NO: 93025 - DNA, 79 bp, Heterodera glycines
tagcgctcttaggctccaatagaacggaagtgtccacaatagaactgttccatgggtaaaaaataaaataaaaaaaaaa

SEQ ID NO: 93026 - DNA, 58 bp, Heterodera glycines; identical to SEQ ID NO: 76953

SEQ ID NO: 93027 - DNA, 516 bp, Heterodera glycines
tgtattcgcggagatggcaaaaatagctctgacaatgtgcaattttgtgagccaaactacatggagcacaaaagggcacaacaaaggaaaacaaaacaattgaaaatgacaggtgctgcacaccgctgaacggtcctgtcagtgatgaagaacggaagagaagggcaggtaatcggatgacggacccttcgattgaatttgcctctgcgacgcctctccgtcatcttcctcatgttgttgctgctgctgaccatcttcgacgtgattattcgtcctgcctccgtcgtcgctgccatttacaacacattcgttctcatcttcatggctgtcgacgtcatcgtcctccgacacacagttccccgcctcgtccgaactaacagccgctgccgactttcgtacaccgttgtaaagaccggcacagcttccgccacttgtcgtcgacgcgttgcttcccgtgcgcgatgccttttcctggaacaaatttgcgattgttgttaatgtataaaacgttttggc

SEQ ID NO: 93028 - DNA, 565 bp, Heterodera glycines
acggtggactgatggacagcgcatttgaatatgtgcgagacaacaacgggttggacacggaggagtcgtacccgtacgaggccgtaacgggcaaatgccaattcaaaaatgagaccgtgggcggcactgtcgttagcttcaaagacttgaaggaaggcgacgaagagcagctgaagattgccgtcgccacaattgggcccatttccgttgcgctcgatgccagcaatttgtccttccaattttacaaaaccggcgtttattacgagcggtggtgcagcaaccgatacttggaccacggcgttctcctcgtcggctacggtaccgacgaaacgcacggtgactattggctggtgaagaacagttggggcccgcattggggagagaacggttacattcgaattgcgcgcaacaaacaaaaccattgtggcattgcgacgatggcatcataccccgtggtctgagaaagtgtgggaatgaatgggacgagaagggatcagaagaagaagcaggcagaccaaatagaagcaattcacaatcattatcattgttatgctttttggtaata

SEQ ID NO: 93029 - DNA, 306 bp, Heterodera glycines
  unsure (1)..(306): unsure at all n locations
cccacttgtccggcacagtttggcaccgaaagggaattacgtgcccatctcaaggcaaatttggtcatctgcggtttttgcggcaagcactactgctccgagacgcactttcagtcccatcggtgccctctgttttaaaagtgccatttgatgtaaaacacaatgaattggagatgatccttctgttttattttacgggattgtttcacttttcatttcttatttccaaacaatttttcttaatttgtaaattctttattatttatattaattttcacctttanaaaaaaaaaaaaaaaaaaaaaa

SEQ ID NO: 93030 - DNA, 286 bp, Heterodera glycines
gttaatgtaacgacgaattcaaatcaaatttctgtttacgctgcttcgaaatttcgcgttgacataaatgtctcaactcgtgacgagtcgcatttgaataacaaatacgaaattctcatggaaataaatacaacagatggaggaaagcagacaattttgcttgattcaaaagcattggtatttttacatgatcaattggatgcgctgactcggacttttcccaaatgttatgtttgtgttgatgaaaaaaaataaacaattttaaaaaaaaaaaaaaaaaaaaaaa

SEQ ID NO: 93031 - DNA, 597 bp, Heterodera glycines
taatttgaaaaaatgtcatcatccatcgcttcgccagatacatttttgcgttcagaaactgatcaaacaccagcagcatcagcagcagaagaagtgggcaaatacgaagtgttcagttggcacggaaatttgagtgatcaattgtcagctgaactgttcgtcactgatcagcagctgctgaaggaatgccgagaaaaacttgcgaagtccgaattgaaggaaacgaaattgctgtggaataacggtgaactgaatgctgaaaatagggctctcaaagcagagttggaaaagcagaaactgatgacggaacacattgaattgaaggcaaaagtcttcaatatggagcaggaaaagcagcaatttgagaaaaaatacgtttctgtggatgtgttcaattcattggcggaacgcatcaaacaattggaatatcagcagcaggagaagagagaggaggacagaaatgtttctgttggccaattgttggagaaatttttggcaggggaaaagcagcaaaaacagcagaaaaaggacaacgctcagcagagattggatggaaaatgttctgtggtggacaaaaacaatgtcgcgggaacttca

SEQ ID NO: 93032 - DNA, 475 bp, Heterodera glycines
gtccatttaagccaaaaccatattttttgtcttccatataatttcatttctatggtttgtttgtcgcgtcctcttcaaattgttgtgaaaaaaggcggtgaaacggtttggaaggaagtttccttcaacaaattgccaaaagaccaacaaaatgcgaatctgagcagaatgcccatttatttcctcgttttgcccttttgtgcggcatcttttggttattatgcgatggctcagtaccaattcaatcccgagtcttgggttgcaatccaaatcggcaaagtcactgacattctattcccgtcacaatcgaccaaaagtccgaatccgataatttcattgaagaacaatgcactgacgaattataaggaattcattgaaacagaaagggccatgcgaagaccgacggaagaagtgcaaatggagacgaaaacggaggaacaaatgagaaaggaagcggaggaattgtgggaacagc

SEQ ID NO: 93033 - DNA, 616 bp, Heterodera glycines
  unsure (1)..(616): unsure at all n locations
caggaactcgtggccacggtattacacaccagtccttcgggaatgctgccggcaactaattcgccgcgtggtcgtactccgattgatgctgaacgacgtcactgctgaaatgccacacggagcaacacttctctgcggaaagaaacggaccaagcggaatgcggaccgctgataccagaataaagaacttgtgtgcgaatnataaacgcacaatggcaaacgtgaccgctcgtcagaaggtgactcgactttgaccaaagggccacagcaacggaaccgccaaaggcggcaggaaaacgctttctctctgcccttttgccgggaaagaaaaaggtacgacttggcctttcaatttcggagcctccactaaattttgacatcgaaccgtccaagaatgactttgaacccacggaaatcaaaaggggagaaaatgccaaaggaggacaaattgcggaccatcaacagaattttggggagaggaaccgattatgcgatggcatttcggacggaagtcgcaaaagtcggccgaattttgcaggggcacttcaaaatgtccgtgaaaaattgaacgttcgtccgtcgtccaattcccaccgctcctccgccttttctcctc

SEQ ID NO: 93034 - DNA, 256 bp, Heterodera glycines
cacgtgtcgctgatctgagcagcaagcagcagcagcagcagcgagtggacgaatttagtgctgggcaaaacagtggaatggcacaaaacgatggaaataatgccaacgaattaatggacaatttaaagctagcagccaatgtatttaaaaaagtgccgattatatttatccgtatttattttttgactgttatgccattgtatatatatgtatgatcataaagtttaaagcaaaaaaaaaaaaaaaaaaaaaaaaa

SEQ ID NO: 93035 - DNA, 626 bp, Heterodera glycines
gaaagttcgtcgacaatgaatattcctccgaaatcgttcaatttggctccgattgctgagcaggaagggtgtgatctcgaccggtccgtgtcctcgtcgtctttcactaatcatcaacagattgggcaagcgcgaagatcccatcccaggggtatgccaaggatgattcggctgagacggaagcggcgggatgatcctttcggcacgctaattcaatcgaccaagaaaatgcgacttaacgaccagtggaattcttcggaggggcaagcctctggcgtagaagggactacgacaattgcgaaaaactttgcaatgattggggagagagcgccgagtggaagccataacattagcaaaatggatggtgtgctgttcacggaagacgaggaagacgaattgttgttttattatggcggacaggacgaggaggacgactcagacgcggacggatacgacgacgaatcggactcaaacgcggaagaatactacaaaaatgactacccggacgaagagaacggcaaatttatcagtttcgcggacggagtgcgcaccaacgaatatgaaaacgactcgacaagtggggacgacaatttcgatcattacggtgacgaagcaacaaaatatgg

SEQ ID NO: 93036 - DNA, 480 bp, Heterodera glycines
tccaattaagaaaatccataagcaaaaaattctataattaacaacttccgacagtaaaacaattgatcgcaattgcaatttctaaatggcttcgaaagccgatattactcagctgcctacgacatcgtccactgtccaatcgcctgctgcgcttccctccgccgagggtagtgtcaatccacgtcatgcttcgccttcctcacaaacgagattcgccgccaggaacaccaacaaattaaataaatccaataatggcgccaattcatcgcggcgacctcatcaacttgaaaatcaaaacacatccgagtcactggcattgtccgcgttcgtacagtcatcgtcatgttctgcgaatgaccaagataacaatttggatggtaggaacagcctgcatgaaaattacgacaactacgactctccatcagttggagcacctggaaatcgaatactaagcgaaaccaatctgtacattagaggact

SEQ ID NO: 93037 - DNA, 351 bp, Heterodera glycines
ggagaaaccatccgaaaaagcccccgagtgatttgccatatattcgagtcggaagagtcggcattcattgcgcagtccattggccaagcatttcaagtggcatacgtggaatttttgagggccaacggaatcgaagacccaaattatttgcgagacattgactatcaggaagtgctaaactcacaagaattactgggcgaagaattggaaatgttggccaggaaagagacgcaaaaagatgtggtggtgtcgaaaaagtcgggggagacgctgggaattgtcgtggtcgaatcgggctgggggtcgatgctgccgaccgtggttatcgccaacatgtcgccaggggggagc

SEQ ID NO: 93038 - DNA, 614 bp, Heterodera glycines
gtccaaataagaaacaaaaaaacaattaattaccgccaattgcccattggaagaaatgttcagctcttccaatttgtctgctctctttttggcctcctccgttttggccgtgcttataattggcattaaaatggacggaccgacggaggcaaaaggcgccgcccctccaaacgccgcggggccaatgggacttttgcttttattgaatggcaaacaatcggcggctaatgaaaagggaaaagcgccctctggcgaaagtaagccaaatccggggcagaagccgagcggagaacggcgaaagagggacgttttggggcacgccggcggatacgtcggaggatgggaccatcccattgactcgacacttgattgggcaaagagtcagtggaatgatgccaattggctcgccgatgttgtcaacagaaacggatgggaaaacaccggcactccaaccggcggacgatgaatcagtgaattgtgccgaccaaggaatgaaagacggcatttttgtttgggaatttaattgactttcgggatcaaacacactttcctttttagttgcctatttattctaaattagcgttttttctgttcattttctacgcataaatttg

SEQ ID NO: 93039 - DNA, 340 bp, Heterodera glycines
gtcattgcataaccgattgaaagacattcacatcaaattggacagaactcgacgaggcgaagacaggtatctccatctgctcacagaataacacgcggcaatcacaagtgagagggaattgctttcctcctttgaacaattggaagccaatgaacgcgatgcctttaatttgctctcgagtaaagatgacattaaccacgaacgctaaagggaacgagatgaacgtacgaagtactggacggtgaccggctctatggtcggcgctttcctcggtatcttcggcacgacaattgccaacgaactgaggatgagacgcgttctggaaatgattcctagtggc

SEQ ID NO: 93040 - DNA, 627 bp, Heterodera glycines
gaacaaagtgatggcaaaacgaaagaggttttgtacatcgccggaggcaccaccggccacgtttataacatggacatttggcgcctcgagcggccacttgggcaaccgcgaatcccatggatttgcaccccactgcacagagatgggcttgaaattggtcgttatcggctggagatggctgcacatggccaaaagctgtacactttcggtggcggagcacccgaattttgtgctgaatttgacgaaattctcgctttcgacctcagcaccaatcgtttcggaaagattcgagctcttcccgacccgaagtacggagttcccatcggccggaaatgccatgcgttggtgcaaaaggggaatttggcgtatttaattgggggatgtcgcgacgcagaaacacaacaaaatcaaaatcgaagccatcagctgatagccgacgtttggaagttcgacatgaacaccgcccaatgggtccgaatgcgcaacaacttggcgaaggcggtgtttttccattcggctgcccttacctccgacgactgtttgtttgtgtttggcggttgcaccgacgaactctccgaacgccgctgcaattccctgcagcaaatgtggctccaaccgccctctctc

SEQ ID NO: 93041 - DNA, 187 bp, Heterodera glycines
gtcagataaaacaagcgaaaatgtccaaatttgttccactatttttgtttctgttctcggcacttttgctcatttttctgtgcccgccgacctcggcccagggccgtcccccgccgagtaagtcaggccggccaactcagcacggacgagtgacaacggacggggaagataaagacggcactgccga

SEQ ID NO: 93042 - DNA, 589 bp, Heterodera glycines
ttggaggagagtttgggcgaagcgaagttggaccaattggaaagatgcaaatcgtgcaactttgccatcattatcgaggtctctgctgaagagcaccgcgtcttcgcctgtctgaagtgccatgccgaacattgccgtctctgtgggaaaccgtgggacgaatttcacttgggaaagccgtgcaacgaagtggagacggagaaggagcaaatgaagcgctattttgaaaacagactttccgaggcggtcatccaccggtgtcggcgttgttcacttcccttcgtcaaacaaatgggttgtaatcggatgtactgccgttgcggggccacccaatgctacgtttgccgggcacacaacatccaatacaaccatttttgccagcattatcggaacccgggccaagtaaagtgcaaacagtgcactttgccatgtttgctgtgggagagggaaagccacgcgacgaaacgggcgattgacggagtgttgcgcgaggccgagcaaatgggcattgcccttgaccctttggagtgaattccttttgctgatgcattggcttttgccttttctgcctgatcaaaccggttgtttt

SEQ ID NO: 93043 - DNA, 453 bp, Heterodera glycines
  unsure (1)..(453): unsure at all n locations
tacaaggaagagatgcttatatttcaagatatggtcatcgacgtgccttacaccgagttgaaccactcggccttttgggtggaattcatcgttcgtcaccaggaagttccccacgcccgctcgggtgcggacgacctgaatattttccagtacttcctcgttgatgtgatccttttcctagtcggcctctcactgctcgtcctttaccttttcattcttttgctcaaattattcttccgtctgatcatctttttgatcaaatggcctttttccgccggttggggcgctaacaaagagaaaaaagggacaaaacacgcaatggctaagaagagagactgatcgacataagcaaattcacttaaaaccgagctgctgactgatttaactggccgtttttgctgagccaatttttaaataaatttttagtttccnnnnaaaaaaaaaaaaaaaaaa

SEQ ID NO: 93044 - DNA, 329 bp, Heterodera glycines
gaacagcgcgagtacatctgcgacaaatatgccgattatgtgctgccacttgaggaggccgactggtacgggttggagctgaacacggcgtgccgaaaactgcaggacctcgaggacaacacgagggcacagccgatgaaatacgcatttgagaaggaattgatggcacaattgcaaagggaggcggcggcggacggcaccgaaaagcaaagacagcccaccaaacttgttggatgaggacaattaagaattacgccctgcaattgtgtgtatttttttaaattgaaattaaatttttgtttggttaaaaaaaaaaaaaaaaaaaaaaa

SEQ ID NO: 93045 - DNA, 494 bp, Heterodera glycines
ctgaaatttaatctatcatttgccatttgctgtaaaaaattgaatttttacaaaaaaagcgatggcagaagtgaaaaaggagcccatttttacggaagtgaagaaggagccaatttttgcagcggagacgccagcagccgagccgagaagggacagcgccgtgtcaacaatgccacccgactttgacgacgtcaccgcagtgattgagggcgttttgcgcgagacgcgggaccgtttccaggcgatggccgaccaaatcattcaccgcattgacgagatgacccagcgggtggacagcctggagaagaacatcaccgaaatgatggcctccgactcggcgctcgtggcgagcaccagcggaacagtggacgaggacaaccaatgatggacgacggagacaaaaaaaaaatggaacatttacaacagcaacaacacaaccaaaaatgatttgtatatgttatgtgtgttgagagagaagattttaaaagtggaaa

SEQ ID NO: 93046 - DNA, 181 bp, Heterodera glycines
ctgtttttgaactgccccaagagtaccaattcaaggaggaaatggtcccacgataaatccatcacatttttggcatttaatacaatttttttacgtaataaccaaatcctttggtttctatcgaaattttctgtaaatgtgtaaaaaaatggcataaaaatacatagggaaaaaaaaaaaa

SEQ ID NO: 93047 - DNA, 482 bp, Heterodera glycines
attcattttgtttcttggaacaccttatttttcaatcaatcgccttaaatgatctcctgtcgtcgttcggtcagcaaatgtttgctgccacaaattacgaatcggttgacttccaattttggccatcttcagccgtgctgctcatcccaaaaggtgccaatgtgtgcgtccgcttccaatcgttcttccgtgcgtctttcagccattttcccacgaatgctttcgtcttccgttggtgacaaatcacatgagcggccccaaatgtaccaacttgaacacattcagaaacggttggaatatacggtcccgctgatgttcaacgcacgtctcgactacactttctacaccaaagatgtctttgtggacaatcaaattctcgggagtcaactcagaagcttggaagggtttatgcatcacatttctctgatcactgtcgccgctcaattttgttgcacgcatatcgaaacgcaaattttgaacat

SEQ ID NO: 93048 - DNA, 289 bp, Heterodera glycines
actctcgcctcgacatgaccgcgcggctccatgaccaccaccactgaaaaaggaacgaactccggaaccacagccacgccaactttgtgttcgagatctaacatgaaatatcaccgaagcgcgcttgaaggaaatcttcgctctgtttggggctctaatctcctgtgaattgccaatgtaccgtgtgcatgtgcatctgctccggctatactgctatgagtagtatgaacaggctgaagatgccgataaagctctgaaacatatgcacggaggacaaattgacggactg

SEQ ID NO: 93049 - DNA, 634 bp, Heterodera glycines
agatgtttcgttttttattgcaattttttgcctttttaagcgtaacaattgcacaaaattttgagactggtgataattcgactgttcacggctgctcaaatcattgctcgtacggcgaccgcgacttgggatgttggaataggagtctgttgttctttgagaaaatactccttggacagatgagaaattacgttgctgttcaaatgaatgtcgatcagtggcgccgtcgcaatgtgcggccatacaaagaggaatttgaggaagccaaacgtcattcaatccacacaatgattgcccaaaagcatattggcgatgatgtggtgaacaaccgaactattgaaactgtggtcggtgcactcgtcgacttggccgccttgcaaagcaaccattccctggtcaaatggatgccccatttccaatgtcccatcccttgtgaacaccgctacaccgtttggcgaaatttattcattttgtcatctgtgctcaatgtgtgcctttttattgccattttgccgttagttaaacgtatgcacaacagcgattccacggagtctctaatccaacgcggatgaattgatttctttttattcacttccaatttgtataaaccttggccatagctgaagtgtgaaat

SEQ ID NO: 93050 - DNA, 535 bp, Heterodera glycines
cctcgtgccgaattcggcacgagggctccgttcccgaaatgttatgtctgttccggcaaaggagaggtgattgtacacgtcaatttaaatgaaatgttgctcacaactttccgtcaaaatgttttggtcggtgctttgaacatgttgaagcctgacgtgatggatctctgccaaaaccaccgaattttgctctccagtgaagaaggcgaaaccgactccattttggaccgttctcttggcttattgggagttttgaacggcacgcaattggagtgcgatgactatgcccagcaattgaacttcaagctgatccttttcaacgacaacacactgacgggcgaacagttcaaaaaagtcgaagatcaggcgacgaaaggggcgaaaagcatttctgacgacaaacagaaaagagaaaacgaaatagacgaggaggaaggagtgccagtgaaaaaggcgaagattctctgcgaaacctgaatgggctttacatttcttgaaatgtccatcgctattattattattgttttattattat

SEQ ID NO: 93051 - DNA, 481 bp, Heterodera glycines
gttcgcgtccgctttgccccctcgcccacgggcagcctccacctcggcggcctgcgcaccgccctctacaactacctgctgtctcgctcccagctcgcgcaaggcagcggcaagttcatcctgcgcatcgaggacacggaccaatcgcgcctcgtcccaggtgcctcccagcagctcgtccgcgacctcgaatgggcccgtctcccctttgacgaaggccccggcaaacctagccccgtcggtccctttgtccagtcgcaccgcctccaactgtatcgcaagtatgcgcatcagctcgtcgccgatggtcatgcgtacaagtgttactgctcgccgcgcaaaccgccatcctctcttgccgctacacccaatgcaacgggctacgacggcacctgccgcgacctgtcgcaaaagcagctcgaatggcatgccggccagccgtttgtgatccgcttccggtcacctcgctcgggcctcaaca

SEQ ID NO: 93052 - DNA, 537 bp, Heterodera glycines
taatggacgtggtaagtagtgaaagtgatttggtggccacgtggcaagtgccaatgagtgacaaaatgcacaaaattgaattcgaacacggcacaacgacgggaaaacgaattttgcgggtggacggaaaggaaatcctacgacacgaatggatgttcaaattggtgggcagggaaatgttcgaattgaacggcgttcgctgtgcgattaacatcgatgccgcgggaatattcgcctacgaatattcgctgaccgttggcggaaaagcattcgaaaaattccgggaacaacagaaaaaagcactacaggtttggcacgtgcgaatgggcgagagggaaatcagagtttgtttggagaaagacaccatggacgtgtgggtgaacggctccaaagtgaacacgacgggcgaatttgcagacgaaggcaccaaaacgcacttagaattggccacggggagttcggcatacattttgtcggagagcagcggtaaccgccacatcggaatggtccaccgtttgttcgtcaacgacagtttgg

SEQ ID NO: 93053 - DNA, 556 bp, Heterodera glycines
ctcagcttcccaaatcccgccgttccatttcagtccgtccttcaattacaaaatgcctttctgtgccgagttcgcccctttcctttggcactttttttgccggtgccctcttcaccaaattgtcctttctgcccttttcgtcctttgccacttttctttcgcttcttcttctttccacatttcgccttccaaaatggcaccccttccggcagaattcttcggaccgatgggtcgacgaccgtccaaacattcgtttcgacgccatcaccgaatgaaagtgtcaagagattattggctttttgatgacaatttaaagcgacgcgaaatatgcgaaggtcgacgactcagtccgttggtacaaaatgcgctggtggggcttttgctgggcgaagaggcggctgaaatgccaaatgattctgtcgatttattgcgaacgacggcacttcccctacgaatggcacagaatgatccgctcaatgctgctgactaaccaacgaataatcagtgccacggggcgaacgaaagcgaaatgagcggatattttggcgaaataatg

SEQ ID NO: 93054 - DNA, 542 bp, Heterodera glycines
atgaaatggttgtccaccaatcgttgtccgtcaccccaacactttccgccgacggcaccgttttggtgccattggatcagcaacaaacgcagcggcatttggctttccaccaccaccgccattttggccccacttctccgtcttccgccatggcaccgtcttcctcctctgccgccgccgccatgacaccactcggcgtcattttggtgtccaaggacgagtcggccgagcgcgtgctgttcatgtacccatttgagcgccgtgtgtcgccgcactctgcccatattaacaacagggaaaagtgctatgagcacaaggacacagtggtgccaatgattggcaaagaagtgccaaagttgggcggcggtggtatggcggacgacgtgcggtgccaatcagctgcaattgacaggggtgatcagcaacaacaacatctcggcgacagcattgcgttggatggcacttcgattggtttttccgtcaaaatgttggcccctttgctcgtcgccaaaggctccaatggaaatgggacgccttttgag

SEQ ID NO: 93055 - DNA, 271 bp, Heterodera glycines
gcctcgtccaaatttcctacgcaattggagtggccgagcccctttcggtgatggtcacccatttcggcacttcccccttcaaggacaacgaccttctcaaaatcgtcgagacaaacttcgaccttcgccctggggcaataattagacaacttggcttaacgcgtccgatttaccaaaggacggcggagaatggacactttggcaacgacgaattcccatgggaaaagccaaaaacattggcccttccgaagaatctgcacgaaactctgag

SEQ ID NO: 93056 - DNA, 448 bp, Heterodera glycines
cttttttgcactcgacgaaggactgcctactcttctcaaagggcttttcactttcctctaccagcaaatcaaagaaagtcgtgtgatcgccccgcgggacgggcgaatgtttggactggacgaatttaagagtctttacgtggacgaagacaagagaattgagaagaaatggcgcttttctctggtcaacattcaggacccattagaactttcgcataatgtcgcggctaatgttggcaagcaaagtttggcgtcactccgatggaaagtcatgtatggaattgcaatgttaaagcgttcgcccaatgattttcgtccgcttttccgtttgaacgaccctgaacaactgaaagaggagagacgggcggaaaaggcacaaaaccaagcgatcagacagcagcaaaaccatggaggacgcccgggccgaagaaagggggaaaaaatggag

SEQ ID NO: 93057 - DNA, 337 bp, Heterodera glycines
caacatgaatgacgaactcatccttccgctcaacgattccattgctatcacaattgatcacctgaccgccaccacacacatcacaattgcgcccgatgtgaacacggactctgagacattcaactaagtcggcattgacatcaccggcatgtcgcggtttcgaaacatttttcagcaaattcgtgaatactccaacaaaaagcaacaactgaagggcgaccatgcttcaaatggttgccacaccaacattgactcaagcacaaattttccgaactcagagagactcacttcatccgccacctattttgccgccattgcgtttggacttggcaaaatt

SEQ ID NO: 93058 - DNA, 374 bp, Heterodera glycines
agaaaatgctctttttcccaattgccactgttttgctcggtgtcttcgttggctcccttcaggggaaacccaccgaacaaaatgccgaaattaagccggcagcacccctcgaggcaactcgcaacgaaatcaaagacacgccgcaacgcacagagaacaaagaaatttcgcgcagcgaaatcaacgaaatcaaagagattccgcgcaacgaattcaaaacggcgccaatcactgagagccgtgaaagaccgttcattaaaagcgaaatcatccgcgacatcagctccgcaatgaacttcttgaacgagcaaatccgggagtactcggaacgaaccaaggacagacaggaggaattcaagggcatcattgaggcc

SEQ ID NO: 93059 - DNA, 226 bp, Heterodera glycines
attctccatcattgaagactcgcagcgcatgggcgattggatccgccacattcacgaacgtactggcctcactgaatggcagctgatgcgcgttctgaatgcgcttgatcagctaatattggcgcgaatcattaacgaggtcgtgtccacaaagaatacgtacattcagtccagattggagggcgacgacacactgacaggtggcactttttactcagatcctcac

SEQ ID NO: 93060 - DNA, 580 bp, Heterodera glycines
atacagcgtctaaccagtcaccctcggcattttgatcgctacggctattgactatacatccacatatcgacaccgtcacccgtcaccactggttccaaacgccacactcgcgccttggtgctgctctccagttcccgaccctctttgacccttctggcccgcgtgctcttcgccgacctcattcatcctccccccagcgcgtttttgtcgtaccggccaacaagaaagcccaaaaaaccacttactgcgcacacctctttgccaactatctcctcaacttttgttgtccaacatggcatcccaaggtttgtctccggacgtcctcgccgcggaaagtcgcaaggcgcaagccaaatatggcaatatcacccccaagaaaggcctcctcgcgaagagcctcaaaggtcaggaacgcaagtactttgattccggcgactatgccatgtccaaagctggaaaagctggccccgatacaacggttggatctgctcatcccacccccgaaatgattccgcattctcatcccccgaccgtctctgcgtcaacatctcccgcaaaggaaagctccctgctcaaaaag

SEQ ID NO: 93061 - DNA, 531 bp, Heterodera glycines
cttcgcccgtttcttcacggattcctgtcaatgtttcgtcgctcactgcgcgttcagcgcgtcaccgccaattcagtacccttcaaaaaagtgacatcgaagccattcagcaacaacagaagaagcaatcgctgcgaccggtgctgtcatcgtcaaagtcaacggcggggcacaggcacaaaattatgcaaaacagcgaacggaaagtcggcgcaatgagacggaagagcatcgttggggagcaaaaggacgaggagagcgcaggctcaagcaaaggaagcggaaggaaaaagggacgattcagcaatttggcccgtaagctcaacattcggaggaagccaagcattggccttcactccaaacgcctctctccggcgctcgcgccacagccaacgcctcgcgcattgcaaagcaaagttaacgaattggtcgagcagaacaaattgctgacaggcatcaacgaagcgcatgtgctgactttccaagaattggccgcaaaaattaagcaattggagatggaaatgtctgatc

SEQ ID NO: 93062 - DNA, 542 bp, Heterodera glycines
gaaatgaacgaactttccacgctcgcttggtacccggctgccgaatttttggaatttgaacgaatcaacaaagcgtattcgttcaacgtcccagccttttctgtggacacttcgacaacggatgggccgaagtacacacaaattatgaacgcactgtcggaacaattgcaacagcacgtggccaaggcgaatttgctgatttctctcaacgagaaaatcccgcaattcgatgttgaagttgaggaaatgatgcgcattgcaattggccgtacgcaattgctgctgaacaaacggatgaagcaatttcgggaacatttgagccgtcatttgaaaccaattcctggccaaaaagtgaccaaattgaacgatttgcacgctctttgggtgcttatcgacatgcaattggatgacatccgatccattttcaactccatcgagcagttccgtcttcgctgttgggctgtcgctgaaccaaaggccgccgcgactgccgcttctggcaattaattaatcctcagtctttcatcatcatcgcatatttt

SEQ ID NO: 93063 - DNA, 557 bp, Heterodera glycines
atttgcttggcattcgcttctcccgttttcgtgtctttttggctgttctttttttcgccggaatggccattccgggatggacaaatatacgggaacaacttgaaatccagggggagtacaacaatcctgagcaggagagactgtttcattggatagacaaaaacaccagaaaagatgcggtgtttgctggaacaatggcattgatggctaatgtgaagctgtccaccctccgccccatcttcaaccaccctcattatgaaagtgaagaagtccggaatagaactttgctggtttattcgctttacagtaggaaatccctcaccgaagtgtaccattcgctgcgttcttcgaacattcatttttacgtgtttcagccgcaacaatgcatagagaaacacccaaaaaacggatgttcgtatttggaaatgtgggatgagcatgacgcgtccaacaaaggtcgaccatcattatgccatcacatttggaaggcgggaaagaatggtcaacaaatggcaccgtttcggcctgtctattggtcgtcaacttacgttgtgttg

SEQ ID NO: 93064 - DNA, 230 bp, Heterodera glycines
gaagcagcagaagattgacaaaaaggcagcgccaacgaagacgaaggcggccaagcaggtgaaagcgccgaaacaattcgtgggcggaaagcgctgattttgtgacgaaaagatgggatgtgcttgtgtgaattcggggcgggaattttgtttttgttcgagttctttgtcctcctcatttttgttgttgaaaattaaaaaaaccacccaaaaaaaacaaaaaaaaaaaa

SEQ ID NO: 93065 - DNA, 266 bp, Heterodera glycines
gtccatttaagggttctgttcaccgacgtcatgcaaaattcaatacgagatttgagtgaaattgaccccgcttggttgcagcacattgccccgcattattacgaatttggatcaaatttgcccgatgggagcagaagaaaagcagcggaagaggagagcaattttgcggagggacgattagcaaatctcaattaatttatcaatttgtataaatgcattttgagaaaatataaattatctgataaaaaaacaaaaagaaaaaagaa

SEQ ID NO: 93066 - DNA, 421 bp, Heterodera glycines
agctttttcccattttcctcaaaatgttccgtttgcaatcttttcaaactgttggcaaacactttcgacaggcaatggcaatgcaacaaattgcgaaacgctcaatttccgcttccgccgtgcgtcagtccgctttgcgtgaccctttcttccgcgaccccatcgacctttggctgtacgaccccttgcgtcccatgcgtcggatgctccgccgtgcgtccgatcccttcgcgatgctcgaccatttcttcgacgaccggtgggtccctcatgtccgcgacaacgcggccaaattgggcatcgatgagaagggcaatttcacgtactctgtggacacttccggatatcgcccggaggagctgaacgtcagcatcgaaggggacgaagttgtgatccaaggggagcacaaggagacggtgga

SEQ ID NO: 93067 - DNA, 310 bp, Heterodera glycines
caaaagctttggggaaatgcccaatttgcagcgccttcctcttaatatacaatacgactttttcaatgcggacaacaatgtgtaagaatttgactacacacaactacgcagtgctgccgatcgctctgaagaaacggcttttctgtctaatgccgatgccaatgatacggtcgccgtttgttccgccaaccaaggttcggcccatccgcgggtgatcgatctgccgaagacggaccagggactcggcttcaacgtcatgggcggcaaggatcaaaactcgcccatttacgtttctccgattatccccggg

SEQ ID NO: 93068 - DNA, 579 bp, Heterodera glycines
atcgaaccggacatgaacgcccgaaaacttccattgccaccaattcgagagggccaacgaatcattgccaatttgtggcacaacaaactgaacaacttctacttggtgcacagttacgtgcttgcggagaagttcaagcagccaggggaacgcgatgaccactaccagttgcccgttcgactccaactcggcacttcgtccgcaagtgccactccgagcacgtcatctgcaagcgaaacgaccagccagtttctcgtcaaagtgaacaattccatcttcaaggacttctattcgtgtgaacaacttggctttgctcttatttctgatccgagacgactgcttcgcaatgcgacgcatctcgaacatctcgatgggtttcccgtttggatttcagccgtgccggatgaatttcgtctcgctcgcttcgccatcatggcactggcctatccaaccaagaactattctcgactcgaaagatccggacggcatccggatattcatggccatggcattttgattgtgtcgtccactgggattgtcttcagcaaggaccacccgcaaactcgcatccgccttctg

SEQ ID NO: 93069 - DNA, 334 bp, Heterodera glycines
ccgctcttggtgagtatgtgttcttcgtgttcaccacagtgtccgttctgtgcattgtatttgcggtgaaattcatgccggaaacaaagaacaaaagcctggaggacattcaagcggaaattgatcgacgccgaggcatcaccaattagccaaagcaatgccaaacggaacggtgacttagaatgttgcacccaataaaacgtgaaatagggatttaattatttatgtgtataccaataagacgtactgcgatttaattatttaagtgtacaccaacaaaacgtgaaattgtgatttaattatttatgtgtacaccaataaacggtgaaactgc

SEQ ID NO: 93070 - DNA, 481 bp, Heterodera glycines
caagtttgagatcattcttccggcactgaccttgacgttcagttccccccacacattgccaaaggcagtgaattcattttccgtttgactgtcgtcgaattgctcaacgttcccaaggagtacacggacgtgttttgtcagttcaattttctccatcggcacgacgaagcattttcaacagagccagtcaaagggattgcgaagggcgaacatcgcacgttaccgtacaattatgtacaggtggcataattagcaaacgcattgccctatcaatggaccatttgcaatgattgcctaattgttccaattgcccttttgaggagttcaaagcggtggtcaactcggcattcatccattacctgcagcactttcccatcattttcaatgttcacatactttataccattttcttttgtttcttttcgcgattttctccaaaattatttttcactatcataataaaataaacgattaattaata

SEQ ID NO: 93071 - DNA, 462 bp, Heterodera glycines
taaaattcaccaaaaatgcagcttttcctaagaaatctcgtcgggaaaacaattgtcgtcgagactgatcagcagttcggcactgtccgatcgatcaaagaacaaatcgagcaaattgaaggcatcccaacggatgatcagattttgatttttgctggacacattctgcacgatgaccagcagttggccagcaattgttcttcttcttctgctggcgatttgtcctctggcagttccattcatttgtctcttcggcttaatggcggcggttcgtacgatcgatgcgacccaaaattggtgcaattggccaaaagttttcgatgggataagctgatttgcagaaattgttatgctcgacttcccctgcgtgcgtcaaattgccgaaaatgtggttcatccgatcttcgaaaacggaaaacaatgttgtcaaagcctttataaatggaaattttttattgttga

SEQ ID NO: 93072 - DNA, 91 bp, Heterodera glycines
attattttgtcttcgaaaatttaattgcccaaaatatgactgctatgaaagtgtccatcattctgctcattcttggcattgtgctcctttc

SEQ ID NO: 93073 - DNA, 422 bp, Heterodera glycines
ttgagctttgtcgcttttccctcgcctcctcttaagccatttttgaagcggaaggtccccggcgtaatggaccatctcatcaccacgccggcccatcaccacgtttcgccattggtccgttctcgttctcgctctgagactcgtgccggcacttttgtcggttaccgtcggacacgatccgcctctttcacttcgaatagtgcgggcggtttcaccctgcccagttacggctatggcggcggatttatggcccgatcgttgagcagatcaaattcgtccttgtcactgttcggccgtggtctccattcgtccgccctcgacagaacgccgccctttcacaacatcgccgtccaacggccgacgccccattacacggacaaatatccttttgtccgctacagttacggcaacattgagacggg

SEQ ID NO: 93074 - DNA, 479 bp, Heterodera glycines
caagtttgaggaattattcaattttgaaaatgattgcccttccattgtttgctgttgtcctctgtcttggcctcccattccaatcgatcgccctgttgagttgcaaagtcggcatgtacaccacttatgctgctcatattgacaaacaagagtgctcttctgcggatgaacaatattgcattgcgtacggctgtaagaaagaccaatacgatgtttccatcgtgtggaaatgctcggtgaatgccaattgcgatcagttcaatgccggcggcaaagccgacggtggcggcgccattaacgcctccgtgtgcgaatgcaaaattggggaaaagggtgccaattttgacaatgcaaaattcacatttccgattgcggaggcgaaaacaatggaaattccgtccggccgcagcagccgtgaaaatgcgggcattttttgggcaatgatggcaattgcattggcgtttttgtgccttatttga

SEQ ID NO: 93075 - DNA, 294 bp, Heterodera glycines
gctaaatcagccgaatttattgctcacggttggttgcgttgcgacattcaaagagacactgtaaccggaagtgaacaagttttgtatcactgggggcctcgatcagaaacggtcgtcagcaaaaaaagaatgctcgaatctttctgtgacatctacggaacaaatccgaacaattttccaaaccatgcgaaagttgcaggacttcgagggaaatgaactcgaatacatgaattgaagaatgatctctttggttattaaatttattgaaattttctttggctattaatttactga

SEQ ID NO: 93076 - DNA, 585 bp, Heterodera glycines
gacaacgggaaaaaactgtcgggtttggtcgaattaggctatcggaagagagtgctgcagcggttgggttacgcgactgaggaggacaccatcacggaaaagggccgtgttgcgtgtgaattgagttcggccgacgaattgctgctcacagaaatgattttcactggcgctttcactgatctttcgccggccgatgccgcggctttgctttcgtgtttcgtttttcaagagagagcaccgattggcaaactaagcgattcactaagtgaacatttgcgcactatgcagggcatggcaaagaaaatagcaaaaatctcgattgagtgcaaattggaactggacgaggaaaagtacgtggagtcgttctgtcccgcgatgatgaccgttgtctccaagtggtgttcgggcgccacattcgccgaaattctagaaacgtccgatatattcgagggcagtataatcagatgcatgcgacgtcttgaagaattactgcaagaaatggtgaacgcagcccggtccatgggtgaccggccactggaacaaaagtttgagcaggcccgatctctgcttaagagggacatcgtt

SEQ ID NO: 93077 - DNA, 247 bp, Heterodera glycines
atcgatgcattttgggatcaagggacgagaaatcaacgtccaatgtttcttcagcattggctattaccagtgatcacggcatatgatagctgacagattccgggtacgctcaacaatgaccgcctatgcacttactctccagacaataaacggccgtaaaaagggtggagacattccattcagcaatgaggagcttgacggactcatcgcacacggcacagctttttgtttgccagaccgattgtta

SEQ ID NO: 93078 - DNA, 593 bp, Heterodera glycines
acgaggatttaatacaggttaagctttcgactcacgttcatttaatgacaatggattaccttgccgagctgatccaagaaaaaggcaccgttgctgcctttcacaattacttcaaacatgttgaccgcctcatcgatcttgagatagctcgtgtccgtgcacaactcttccatttcaacacagacgaagatttgcccaagatgcccgagcttgatcaggaagacatcgtcacgctgcatgagaaggtttacgtgccgaaaaaggagcatcccgagttcaacttcgtcggccgtattctcggacctcgtggcatgaccgctaggcagttggaacacgagactggttgcaagataatggatcgtggtcgtggatcattgcgtgatgctgctaaggaggaaatgaatcgtggaaagccgagtggggagcacttggaagacgatcttcatattctatcccatgtgaggacaatgaaaaaagtgcgcgctccaactcgaacaaccgtggataaagtgaagaaatgctcgtcccatcgcgtggacggatcaatagtttaagggcaaccactggtggaactgaacatcttaacgggaact

SEQ ID NO: 93079 - DNA, 136 bp, Heterodera glycines
cacaaatttaaattatttgctgaatctaccgaatggtaaaaaaagagcgaagaaagattaaactctttttttcgttttttttaaatatttttaattttatgtttttttttactctaaaaatttccataaaattcgc

SEQ ID NO: 93080 - DNA, 396 bp, Heterodera glycines
gccaactcacagcactgaaagggatcggcgaaatgggaggtcagagagtggaactgaacacgggagacgacagcgaggaacaagagcaacgagcgatactccggcgattgtacagcaaatacgggtcgaacgcgagggatttgcttcaacgagtggagaatttgctgttgttagccgaagatggaatatcggcaaaaaagacggtgaacgaacccaatgatagcggaaaaagccaaaaaatgaagagaaggcaagcggaggaggacaaagggctgatcagaaaatatttggagcaactcatggacagcgagacgggaagaaataaaaccaaataaaagacaataatgtacataattatagattgtatgaaaatatctatttataaatttagagtta

SEQ ID NO: 93081 - DNA, 425 bp, Heterodera glycines
acgaggtaagtagcaaaaaatgtcatatttttccgctgacgctgatgcatctgagcttattactgcccaacgacgggacgatgagcaaattcagtgggtctatgacagaatgtccgattgcgtattgcgactttttggggagcggatttggatcggttaccatcgttggcttccatcgctggccgctttcatttatctgtcggcgaccaatttgcgtgagaagcagtccgttggtgaggaatacgtcggactcgtccaaattggctccgatcgtcgctttccttcgcttttaaaccgactccttttcgtctttttcgaagtcatttctcgtgctccgttgctcagttttctgttgcttcaacaacatccgcttatcctccaaatgcattcactttttcatcccgtcggaatcgaccaaattcatt

SEQ ID NO: 93082 - DNA, 452 bp, Heterodera glycines
gtagtaggatgattctgcccgcgttttattcctttacctttggccttacttcatgcacttcggctacatttcgcgatgaggacgattcgtggaattggatcgcagcaagtgccatttgcggactcgcccatgccactataagaaataacataccgcaaggatttgctttggctgctatcggctctttgttgggcgtctcctttcaagctgttcgaatcagtcacaacggctttggaatggtccacaaccgaatgactcaaggctttcttccgtttactggcccattggactggaagcatattccaacggatgccgttgatgtgttcttcgaatttggcgcagaatcattcacttttaggcattttttgcccaaagcttaaaaagaccaagtcaagttcattgactgtatttgtatggatttaggaaatggtacaataaagtttaatgtattt

SEQ ID NO: 93083 - DNA, 576 bp, Heterodera glycines
gtattgatcgcggcatccattttcaccaaatcgggcaaagcacttgtgacacgccaatatgtggcagacatgaccagagcacggttggaaggacttttgaacgcttttcccaagcttatcacttcggataaagctcagcgccaacatactttcgttgagacaaattctgtacgatatgtctatcagccgatggacaacatttacatggttttgatcaccacgaaagcatctaatattttggaggacctggagacgcttcgtctgttttcccgagtgatacccgagtattgccgttccaatgatgagtccgaaatcactgacaaggcattcgatttgattttcgcttttgacgaaattgtcgtgcttggttatcgcgaaagtgtcaacttggcacaaatacgaactttcactgagatggactcgcatgaggagcgtgtgttcaatcaaattcaaattgctcaacaacgcgcagcccatacactgatgaaagagaaggagaaggagataaagcggcaggaaaaactgaagaagcatttgaagggcggaattggaggtacggctgcatccgccacgggg

SEQ ID NO: 93084 - DNA, 524 bp, Heterodera glycines
gtcaggtaaaaatggtgcaagtgataataggcaacaaataattttaaatagctgattttaggctttgtttcgaccggacaattatcttaaccggcttaacatggccgagaaaaatcgctcagaaatggtggacatcatggctgcaattgctttttgcaaccatatgtcaacggatgcctttctattggctgctcggttgtgcgatgtgtttatgacaaaaaaaacacagacaatgacaaggaagaaggcacacaaattgtcggttgcggctattaacatagggagcaaattcgatgtgagtttcatggacactttctattactataaatggagaaaatgttaaaaagcaaataattttaggaccgctattctccatcattggagtcaacctttacaaaaatatggcggacgaaattggaaaaatttacgcaaatggaattgtatgagatggagtttgaaatattggaaacgctggggtatgacacatatgccccaagtgcaaatcattttcttgtccatttctt

SEQ ID NO: 93085 - DNA, 417 bp, Heterodera glycines
aaaatacaggttctgaaaagtctgccattgtacggtgctttccatacaaaaatgatggaaaaagcggcctcaaaagttgccgaatgtttgggaagcattgaactgcgcgagccacgcgtgaatgtctactcaaatttcaccggcaaatgccacacacgtcgtttgacacaaatgcgcacggacattgctcggcaggtgaacaaccccgtcaagtgggagcagatcatgcagattctgttcaacaaacgcaaagacgaagaattcccttcgtattttgaggttggccccggccgcgaattgggcacaattttgcaccaaattggcaaaaaagcttcaagaacatatgtgaactatcccgcctaatttgttatttttctgttgttacattggctatttgagaaaataaaaatgaaaatt

SEQ ID NO: 93086 - DNA, 377 bp, Heterodera glycines
acgaggcttttatttatttcaaattgtattcattaccattcaaattttactttttacataaaaattttgtatcccttttcttttcgatagaattttctaacttttaaatcccataaaatatttgttcaacagaatatttatatatgtatcacaaaataaactaccagaatgaacagctgtgtttttggcttttacatttgattacattaattaccgttaattacgtcattgtatcataaaactgtcattggccttgccaccgttgtcctaattgagggcaactctgtgtttgatgagttttacttatgtacaattttgatttctcgtctaaatttgaattacttattttaatgatcagcacttttttcccataaatt

SEQ ID NO: 93087 - DNA, 476 bp, Heterodera glycines
tggaggagtcgccgctcgaagctcaaaagcgtgaggaaatcctccgcatgtaccaatcgtgcaaggaggcgctgcgcatcatcagcgacgtgaacatggccacgatggccaccgatttgccccctccggtggtgtcaccggcgaacgatttccgcaacaattcctcgccagtgccacggcccgccccggcgcctcctggccaaattccgacaaatcggccagctcctcagcctccgatgggtgcccgtccgattggcatggtggccggggcacagccaataatgccaatccaaaaccgaccgctccccgggccgccgggacaagcgccaatgcctccgatacatgccaacgatttgaacaaaccgcgaattccggagagaccgcaaataccaagcagacccttttgactgtgctgaagggaattcactaatttctaactaatgagtgtgttttctgttttaatgccaatttcggaa

SEQ ID NO: 93088 - DNA, 241 bp, Heterodera glycines
atttcgagtgcccaacgcgattgccttaatccgtttgcctgcgcctggaaagacttatatttcacacaaactttgccgttatctgaattggattggcatcaaaactatggcattcaatgtgggggagtaccgtctccactcatgccatttcttccagccatgagcatctgaattctttaacccaaataatcaaattgggacaccgatcacagaccattgcgcaaaattggccatggaggac

SEQ ID NO: 93089 - DNA, 596 bp, Heterodera glycines
tcagatctgaggacattttgccgaggaaaaaaagaccattgtccgccacttctcattttgacgatgcgccagcgccaaaacggcagacactgcaagcaagtgaacccgacaataaaatgacgcggacggatcaaaagcagacagggaaagggccgcaaaatgtcatcaaactcagactggccaaacagaacttccgattgctgcaacaaaatcgagagcaagacaaaaaggcggatcagagagacaatatggacagcagcacatcttccggcatgagcgaaagtgccaatacgccgagggcaccgtcgtcaaatttggcggaagagccaactcaacattcagatggaaagctgtcttcgggtcaaagtgccgtcgccacttttgctccccgttttgaaaacggaaaaaatttgtccgtggatcattttgcaagccgcgctcgtgaacttaaaaaaagtggaaataatgagagggataaggtgcatcagattctgctttacttcgaatccgtcgctttttacataatgacagcgtcttcactcaactcaaagcccgaaaaaatgcactcatcattgactgacgtagtcaatttttta

SEQ ID NO: 93090 - DNA, 210 bp, Heterodera glycines
cgaaacgacctagcaccgccatatgcgcaccgtgttgctgatgtgctctaagcgcgccttgttctcctcatattgacgatcaaagtcacgtttgtgctcgttgagcaactgttctgcactgagtcgatcagattcggattggcttaattttaagaaaaaaataaataaaataatattattaataaaaaattaaaattatttggaaatgca

SEQ ID NO: 93091 - DNA, 588 bp, Heterodera glycines
tgcccattgggcatcgaagaggtgaagccgcgttctctgcgctttacttggtcaatgaagacgacttcgtcacttgcaccggacgaaataatgaaagaaatacgaaaagtactcgacagcaatggatgcgaatatgagcaaagggagaggtatttgttactttgtgcacacggcgacccaagcaaagactcattgatacaatgggagatggaggtttgcaaattgccaagactttccctcaatggagtgaggtttaaacggatttctggctcttcgatcgggttcaagaacattgcttctaaaatcgctcaggagcttaacctctgacggttttgtgaaatcggatgctgcctccaaaccatttattgaactttgtcttcgatgttgtggattctgtttctcaaataactaattattgctaacattttcttctgcatgcttttgctctgttcgtgcttctctctctattcgtttgttttatcttttgccactatcgcttttttggtcggtcggtaaccaattttcttcagtttctcagcgacaatattcttattgttcgtgagtatttaaagataatttaactttcat

SEQ ID NO: 93092 - DNA, 454 bp, Heterodera glycines
cctatttaactgaactaaaccgcatcacaatgtctgaagtctacggttttctcgacaggttcacaaaaagaataacgcgacgcagaggcaccactcccgcagcttcgggatttggagcggacagttcgatggatggtggcggtgtttcgaaggtgtgcatcggcctgtgcctctgcattctgattctcgtgattctgttcgctattctccttttggttgttgcgcttacgcctgaaagtttccaaggcgttgctgtgctgggaggcctcgcgagtatattcggaaattaaatcgaaatgcgatgttcttcaatctctatgttgttgtcccataaggcataagcctaattacttaattctcgagttccctctattgaataccgtacatttgcttttgtttttattttgttgttaatttcactccgattgtgagtaataaatgcggttcccggtga

SEQ ID NO: 93093 - DNA, 56 bp, Heterodera glycines
attcattaggaggagcattagcagccatcgcagcagccaaatgtgtcgcacttgga

SEQ ID NO: 93094 - DNA, 175 bp, Heterodera glycines
aatgaataatcataattgtaatgctgttggaggagtaaaggcggaagaaccgccggtgcaacaactacaccaacagctttttgcctcgagttcacatgacatgcaaatggcagcctcaacatcaacagttggtgaagaagcagcagcagagaatgtgcaccacaccaatcagaaa

SEQ ID NO: 93095 - DNA, 163 bp, Heterodera glycines
ttttatgcgtggtactatgccgctccgacggactttttattatcttggccggggaaaaatacatttgcctgaggaagtgaaggtctttccaattgctttccacaatttcccaaacgtggcccacgaaagggccaaagaattcccattttggcactgggcccaa

SEQ ID NO: 93096 - DNA, 337 bp, Heterodera glycines
ttatgtgcatttggatattatggacggccatttcgtgccgaatttgacggtcggacctccgctcattgaatgtctgaggaataaattgggaaatgacgcggagttggacgtgcacatgatggtgtccaacccctccgaatggctcgaccctctgcacatagcaggcatccatcacttcactttccgttgggaggcactcggagacgacgaagctgtggacacactcatcgtccgagtccaatcctggggaatacgatgtggactgtccatcataccaatgacgccgctggacaaactgatgaaattctgcgaatttatcgacacatcactcctaatg

SEQ ID NO: 93097 - DNA, 351 bp, Heterodera glycines
gttctcctctgcccatccgtcagtgtccccagctgatcgcttggcctcccgttccgatcgccaatcattcttcccgttcggctggtgaccaattccaaattcatccgcagtcgtccgctttggagtcaacgcgtgaagcaacaacagcagcgactacaatcgcctcagcgatcgcttgtccctccggcgtgggacaacaaaaagtgccgttgtgccttttaccccacgggcatttgctgtcctttcctttggcatcacttcaaagtaccgccaggcatttgcttttttcacaacggacgcacttccgacgccaatcactgcccaaaggcgcgacgattagcgactgcagca

SEQ ID NO: 93098 - DNA, 506 bp, Heterodera glycines
ggtgttcatagcaaccagcaatacgttgtgagccgactgcgcacgctttgccaaaacattgcacttgaagaattcaaatgggacggtggaggcgaacagacagtgcgcgatgagagcgactcatttgaccgcttcatcacttggggtccgcaattaccgaccgacactgagctcatttggcatttgttttgcacttatttggactttcacatttcgccttcctccgatggcgtctctgaactcagcaaaccattttccaatgtgtttttcgttaattcgtctgatggaaagttcccattggctctgatgcatgccaccattcaaccgacaaaacagcaaattgtgccggatgaattggctgatgagaaatatttcattcgtttggcttccgctcgtccgccaactttcgaaattgtcgttgatggcggagaaaccgttattttaccttgtaaaaatcagccgcaaaatttttggtatgtgctcattttgttccttgcccatgttac

SEQ ID NO: 93099 - DNA, 267 bp, Heterodera glycines
  unsure (1)..(267): unsure at all n locations
atggcatccgagaaggatctgtttccgttgccaaattggatcgcgcgtcctccaaagggttcccatttggacgtgctcaaaggggaaaagctgattcagaaattgctggttgatgagaaggggttttattacttcggacggaatccgtcggactgcgattttctctctgaacacgcctcctgttctcgggtccatgctanttctcctctacccaaaccagtgaaacgctttgccctcgtctatttgcaaagcaaccatgggactttt

SEQ ID NO: 93100 - DNA, 532 bp, Heterodera glycines
aaattccattcccttccattagctttgcttttgcttttccttcttcaaaatgccttctctcgacgaacgtttcaatgctgcggttgaaattgtgcagaaattgccaaaagaaggcccccttcaaacatcgaatgaccaaaaactgaaattctattcactgttcaaacaggcgacaatcggcaacgtgaacaccagcagaccgggcatgttcagtctggtggaaaaagcaaaatgggatgcatggaaatcggtggagggaatgagcgctgaggaggccaaggagaaatacattgagacacttttggaaaaatttgacgatgctgggactcaggtggacatttcggattggctgtccaaaattgacccgtcaatcagaaccaatttggcgctgctcggcaaaaacctttgagccgaaaaatcattggacgaatgtgtggcaccacaaacagagaatggcgttgtctttaagacaaaacgatcaaatgttgtcaaaattaattaattattcaagaaatatttcatgtgtaaaaaa

SEQ ID NO: 93101 - DNA, 324 bp, Heterodera glycines
ttgctggccgaatttcagaacacccgtttcattgcggcagcgattttgggggcaacgaatgccgaaaaaacaaaggacggcgggcgggagaaggaaggagtggtcagttttgagaggtccaagcacagtgttccgcgcaacatgtggtacaaaaagttggccaaacgtacaaaagccaaacaccaacaataagaaataattgattattgcgattcaatgggagtgctgttgcgacttttaaattgtcattttgtactgttgtttttgttgtttgttcataaaatgccaagaaagaaaaaaaaaaaaatcaataaagctaatttt

SEQ ID NO: 93102 - DNA, 581 bp, Heterodera glycines
gaagaacatcatgttatgtttggtgccaaaccaaaccaacattggttggttagagttgcacttttggacgccgtcacatttcttgcacccgccattcatgacgacgacttggaaagatttgtccaaattgacattgacgatgtgttcattggtgccattggcagtcgaatggttgcggatgacgtggactatttgtccattttgcagggcaaactgcgcgaacacattgccgactttcatttcacgcttggcttttctggcaatttttttcgtcatggtgacccggcagaaattcaaggagacgaaatccttgcaatgcgaacaaattccactgattcccgcacatgtggcgtcacaaccatccgccagaattttctgcggattatctgcttgcattgatgacacaaaatcgtgtgtttgctgagaatgttggcatttctgccaatctgagctatgccgtttcgccacaacattctggggtttatccgatctatcagcctctgtacgatgcctggtccaaaatttggtcgatccaagtcacttctaccgaagaatacccacatctgaagccagcaagcgga

SEQ ID NO: 93103 - DNA, 537 bp, Heterodera glycines
aaattctctccgttccttctccgtcgtcctcagttcctcctcctcctctcctcccaatttctccccttcttttccctcatcatccgttttctgctgcttctcatattccctggcgtcgcgcagtgcgcgcgtggccgccgcctgcgcgtccaacgcgagcgcgtcttggagaaaagtgcacagctgcgggaggaagggcagcagcagaccgagcgaagtggcgaccacctcgcgcaacgtttccgcaatggccctcagccgacgctcatccgccggctgcgcattgagaacggatttgatctgttcctgttggaaaatgatagaggaaacgagctgcttgctccgcacagagattgccaattaacgccatttctgtgtgctgccccaacgaccaaccaaatattcgttgtttacgcggtcgccaatgaacgtgcgcagcgtgtgcagtgcttggtttgtgttcagcgattgcatgtggcaatggtaggcgcgagtggcgagtgccaattgtcgcttcagctcaatgtcttctgacta

SEQ ID NO: 93104 - DNA, 148 bp, Heterodera glycines
  unsure (1)..(148): unsure at all n locations
ggcgccgncgaagccccgggacaaccccngcaacgccaccagccgcgccaaacgncaaccgcccggacacngccagcgcgcgggccccaaacagccaagcaggcccccggggccgcccggcccggccggaccgccnggacagcccgga

SEQ ID NO: 93105 - DNA, 562 bp, Heterodera glycines
acaaactatgttctcccgcctcctcacctcgacatcctctgccgccgtcgccgccgccgctcggccatccatcggcaccctgctcccgctgcctggctccgctgttgttgccccccccatcctctcgctgtcgcaaaagcgctgggccaccaaacgctctggaggatccaccaaaaatggccgcgactcgcactccaagcgcctgggcctgaaaaattactgcggccaatccgtgatcccaggcaacatcctcgtgcgccagcgcggcaccgaattccacgcgggccccaatgtcggcatgggccgcgaccacacactgtacgccctgacgcccggccatgtccactttttcaaggcgtacaaggtgaaagtgcttgctggcgggaagcgcacgctggccaaggagtaccagtatgtgcaggtgattaacagggacacgcacgctgcggcatttgataaggagtcgggcaagttggatttggccaaggcggtgttggagtcggatagtgtgcgcaagtcgctcgagcgtgcgagggacatcaagttgccgccggtccccgcc

SEQ ID NO: 93106 - DNA, 460 bp, Heterodera glycines
taaacctccccgagaaatgattttttcagaccgacaggctggacaaacacatggagaccatgctttcccgcataaaactgccacactctattcccagcccaatggaaccgaaataaacagaaaaatcgccggagagtcggatcccaattcgcgcaaaccatactcccactgcgagaagaactcacctgccattcataacatcaatcaaactgacccccttgtccttaaaagaaaaaagacacacggagaaactcaacatcacagtgtatcgcaattgctcacgttgatccatggactgcaccatcacccgaaggtcaatgtcattggtgcaacaaatcgtcccaattcctttgacccggctcttcgtccctttgggcgtttcgatcgcgagattgacattggtattcctgacgcaattgggcgtttggacattcaacgcattcacactacgaacatgaaa

SEQ ID NO: 93107 - DNA, 91 bp, Heterodera glycines; identical to SEQ ID NO: 65787

SEQ ID NO: 93108 - DNA, 487 bp, Heterodera glycines
gccccctttcaaaggcgacgacgggcccgaaccgatgggcgacagaattccgcccgcaaacggtgcagataaagagccggtgacaagtcgggcgtccgaagtcgaagcgcacgcgaaccaactgcgcgcggtggcggagcaagagcagaaacggcaagcggatcaacaggcgacaaattccgccatcgccgcccctgcggaacgcgacgcggcgaccgcgtcagcgactgccgcgcagtcgccggacgccgccgcctccaccgctcagcagtcgcagaaggagcggcggacgcggcgctccaaactttgtacagtaatgtgatcggtggttagtcaccgccggggccggcgagcgacggtgcgcacggttacggtattggtgcaacagcgacgcggcccgataccgtaaccttgaaagtgatttgtatagatcataccgtgtatatttttgttacgtgtgtttgttatataaaatatattttttaaa

SEQ ID NO: 93109 - DNA, 634 bp, Heterodera glycines
gtttgagatgtttttattgcataaatttttgccaaatttgttaacaaaatgccactatcaacaatttgcttcgtatcatttttcaaaatctttgttcaaattggtccaatttaatttgtccgacattggtgaagggattgcggaggtgcaagtcaaagaatggcacgtgaaagaaggcgattcgattgctgaatttgatgagctttgttcagttcagagtgacaaagcgtcagttacaatcaccagccgatacaatggaaaaatcaaaaaaatgtattaccaacccgacgaaattgccaaagttggccttccattggttgacattgaaattgccgaactttcttcagaagaagaaaaggaagcaccaacaaatgttttgccaactgtaaaaactgacgctccgtcttcgcttttgtctcaatctccaaaagtaatcgcatcgccggccgttcgtcgcctcatccgcgagtatggcataaatacggtcggactgaccgggtcgggcagagacggacggattctgaaggaggacattctgaagttggcatacgtaccgccgcccacctcttttggaaagtcacccgactccgtcaccgcttttcattcgcgcgataagccgtccggtgtcgaaatt

SEQ ID NO: 93110 - DNA, 540 bp, Heterodera glycines
aagccagccatgcttagcaactttttttgcggcgaaattaaaaagttacctgttccgactgccgccagtctgattctgctccttgtccttctttccgtcattgcattagttgtcatcgtcacactgggagtgcttttctacaaaaaatataaacagacgcgccgcacaaaggctgtctcttcaaacaaaagtgaaactccggaagtgccttcggacttggctgacgaagcggcggagtcttcggactctgatgaaggccgtggtggagtttcgacggcccctcccgacatggaatcagtagtggctgacgaagcggcggagtttttggactttgatgagggccgtggtggagtttcgacggcccctcccgacttggaatcaggacgcaaataatgccataatggaatttaggcagtcaatattgtattgttgtatatatcaagtggaagtggaaactatctataactgtctgtgactgttcatagcatcataattctgactgtatcgcccgaataaaatgctttttcattctaaaaaaaa

SEQ ID NO: 93111 - DNA, 630 bp, Heterodera glycines
gtccaattaagttgttgtttaaaacaattgtctgcaattttttgtgcgtaaaatggacactgccaattcgccgtcagtcagtgatcaacagctgaaaagcattggggagcaaaagcgcattgcacagcttgaacacaaaattgcgtccgtcagcaaacagttggacgagaagggcacaaagctcaaggaaacgttggagcagaacgcgtcgttgaaagacagaattggcacactcgagcaagaaaaattggaagtctcgcttctcattgaaacattgacaaagagtcgggacagactgcttcaggaaaagacggacctccgaaatgagctgcttggcctcgagaagcgcaaagatcagctcgaattgcaagtggccaagttgaacagcgaaaaacaccgccatttggaagacatcagtgaactgcgccaaaagtgtgacgaattgtggggtgaacggaccgagttgcagagccaaattgacgacttccaaagtgacaaggcactaattgtgtatgacaaagagcagtggaaacgcgagaaggacattctgttggccagcaagcaatggtacattgacgaaattgcggaccgggagaagaaaatcaacgaactcatccaggcgaagtccga

SEQ ID NO: 93112 - DNA, 476 bp, Heterodera glycines
gcggtgctccttttcctcaatttcaaagtgttcggctgtccatgcctccgcttctcttcccctccccgagtcgtccttttcttttcgttcatcggtcactttctccatctttgcggcggaatttctgttttttgcttacttcaaatattggaaagccttgcattaattgtccttctgatgttcagtcgcgtcacttttcgctggatattcggcgaatgtctgccaaatctgagaagggattgtgggccaaatttgaggagaaaaagaggcgaaaatacgctgaaacgggttccatgaaaaagcaaaagggctcaaaaccgacggtgaacattttcgatggaatgaatttgagacatttggccatcgcattggactgcgatttcgacgcactttgtctccgattgctggacattgtatccgatttcaaattggacagcattctttccgatccaaatgcgccactcgaccgtcttttg

SEQ ID NO: 93113 - DNA, 511 bp, Heterodera glycines
cggagaaggagccgtacttgcgcgatgatcttatcaaaaggccactccaattattgacggtagacgagttggtggatgttttgcgagaccaacgtgccagaaacatcacagtcattcagttgagtgatgatgagagcaacaactcaaaaccgtttgttatcatttgttcgccgtttaacgcccggcatggcaaagcgttgatgatcattttacgtgcatttttgaagcgcaattttatcattaaaaatcttcaagttgaggtgcccgaacgccatgccgtcccaccgcgttggaacgtgctcaacatggccggcaccattgtgcatattttggatgaggaactgaggctgaggtacgatctcgagtcgttgttcttggggttggactgtgacgaggagggcaattccagtgccgcgtcgtggcaagttgaattccgattgccggcctcaaagctgatcaaaatgccttcacaacttggcctactctcatgagcatcactttccttctaaaa

SEQ ID NO: 93114 - DNA, 349 bp, Heterodera glycines
ggaaaattttggaaatagcggacaaagagaaaatttcaggccttttgcgcattgtcgagtcttttatcattgattccgaatgcatccacccaattaggaagcttgaatatgcagcagaatatcggatgagccgactcgctgacacagtgcttcgattatttcctactcaaattgaccggctcgattcattattcttatatttagcagaaaatggagagacattggccgatgttcacttggatgtacttaaaatgcttgacattcatgattcatacattgttatgtaaaacaaattcttgctcttgacaagattttatctcttataaaaaaaaaaaaaaaaaaaaaaaaa

SEQ ID NO: 93115 - DNA, 429 bp, Heterodera glycines
ggacgcgtctgcccccgacggcggcacctcaaaaagtggaactgttgaacatcgaggactacaagaaggaccggacaatgataaccgccattctctacgaggaggaccacacagttggcaatgccctcaaacacatcatttgccaaatgcccgacgtcgagttttgcggttacaacgtgccccatccgttggaggacaaaatcctcgtccgtatccatactgtcttaaggggtggccgcgggggatgtgctgctgcgtgggctggaagatttggcacgcatttttgacaccatcgagcgcaaattcaaagcggcacatcgtgcggcccatttcggtgtcagtgatcgaatggaggaggacagaaacgaatacgaggaagaggaggaggagatgaccatttgaacatgggcaaacgacgcaaatgccatc

SEQ ID NO: 93116 - DNA, 498 bp, Heterodera glycines
gaaaaaatgtgcaaagagagtgaagagcccttcaaatttattcccgtctgctgctacgaagatgcgcaggcgattcgtgcagttgcattccatcccagtggggggtatttcgctataggcactaactcgagaaatttgttaatatgccgatatcagtcttacgaacgtcgaacatcgcttaatgatgatttcctccatggatttgttcctcctccaactattctaatgagcagaagcaaacatcaccgcgggtctgtgtattgtgcagcatttaatcagactggcaatttgctcgcgactggctcaaatgacaaaaccattaaactgatggccatgcagattgacccaaacggatgtcgaattggcgttgaaatggacctgcaacaagtgcatgatggcaccgtaagagacctccttttcatggaagatcggacttctgcctgtaatagttcttcctgcagcacgctcatttcgggtggggccggaggttgtcgtctt

SEQ ID NO: 93117 - DNA, 196 bp, Heterodera glycines
tgacaatcgcgccggacctgacccacacaattacgcgcttcccgccggcctgatcacgagaaggactgaactcacgaactgaaccgaaggatggttgaactgcctgaacgatgcgcgttgagaaatcggatcatctgattttttgtatgtaaaccccatttcacatgatgaactctctcaaactgtaaaaaaaaaa

SEQ ID NO: 93118 - DNA, 599 bp, Heterodera glycines
ctttattattctgctttgttaaggaaaaacgtcgcatgagccctatgatgccaaatttacttcgatgaagtacttcatttcaaggaaacttgtttttcctctagttcatcagtggacttccgcatatttaatcacgcttcattctactttttctgaaaattaaaaaaaaaaaaaccaacaaaaaattgacaactttccttaaaaatgaatgtagcagaggagaagttttggcagcgttcggatgttcatgcggctgttagtcctaattctgtaattttgtaaattttgtgtagataattatagttatttttccccgtctctgggtttcatgccaaacatctccatcgccgcaacgtttccagccttttctcccatctcctcacgtgtgcttcaaccggagtttcaaccgactttcatatcatctattcgttgaacgtttatcctagcgaagcaactggattgaattacagcaaccggaatcgcatgaatatacccacgaacaagtgctgttgaatttttgccacatcgattttgcctaaaaatagactgtcaaatgaaaaaaatatgatacctaaacgtcaataaacgtatcctgaaga

SEQ ID NO: 93119 - DNA, 307 bp, Heterodera glycines
gagaaggagtcaagacagaacgaaacgggaatgttggtagttttcgagcagatgaaagtgatcacagcgatgatgaggcgacgtggaacggaaattcgactcagcagttgtgaattctgtgacggtgttgttattgagagatcaaagacaggatgataaatatgatatttatttttgttacagaaacgcgggctctagtgcactttatgagtccaatcaattgaaaatactcggtttttatacaataactttgtacatgttcgaacaaaccctatctttttggtaaaaaaaaaaaaaaaaaaaaaaa

SEQ ID NO: 93120 - DNA, 147 bp, Heterodera glycines
ctgtgagccagcttttggccgataatttggtgcagggattggctgcaatgcttgatgtttctgctttccagtaaatgaattgtgttgatgaccagagactgtttaattgtatctgtttatgcattatatgattcataaaatgtgtcc

SEQ ID NO: 93121 - DNA, 540 bp, Heterodera glycines
caattgtctttttggtctgttgcaatgcaatgccaaatttcccgtgctgcccgggaagtcagcaagtggttgctgtgatgtccaattacattggcactttcactagtgaggacaaatctacagtatgctcaaccgcaaaaaatactgtggatggaataaaaagtgaactgtcctctcgcggcggatgcccaagcggaggagaagcacaaattgtgaacgaaatcgaccgacagctgactaacattgcgaaaatgaagatcaattatgaggacgggtgcccgtacaatttgggctttgctcgtgccatgttcgacttggccgctgctgctgctggccatgcgggcaacggcacagaatggcaaacaatgaaaggacaatttgagcaggaaagccaagcaatcaaagcaattggccaagaaatgaacattgaagttactgatgtgcattttggacatccaagcaaaggattttccgcgcaccaaaatgtgccaagtccaagccatgtgattgccaaccctggccaacagagttcggttggcc

SEQ ID NO: 93122 - DNA, 645 bp, Heterodera glycines
cctcgagccgcattcccactttttgaaatggttgactccaacagtgaggaagctgctaacaaaccgtcgttgcaaaagcatctctttgcttcgcatggtcaatacgtcaaattgaatgtcggaggctctcttttccttaccacggttgacacgttgacaaagtacaactccatgttgaaagcgatgttttccgggcgaatggaggttcgtcgtgacacggacggctatgtgctgatcgaccgatgtggcaaacattttgggctcattttgaactttttgcgcgaggggacgctgccgttgcccgactgtcggacggaagtgctcgaaattctcattgaggccaaatactatctgctgcaggaattggtggacctttgctattcgtcccttaaagcccttcatcatgaccaactcgtgtccacgcttggcatttgccgtgtccctgtagttgtgtccaaaaagcaagttgaacaaattgtgcagagttgtgctggaaagccggtcatcgagctgttgatgaaccgtcaaaacaacaaatactcctacaatgcgtcgtccgacgaaaacttcttgcgcaaccaggaactgttcgacaaactgatccttcgcttcaacaaccgcgggctcttcatcaaaaatattggc

SEQ ID NO: 93123 - DNA, 181 bp, Heterodera glycines
atttttgaatttttatgatggccaaactggtggttgaacaggcaattgatgcgagcgagaagtttttgatccggaatgtatcaatatctttttagaagaaatttggtgaaaaaatatttaggttgtcactggaaaaagtgtcgaactttgaattcaatgaacccattctgaaaaaattgcg

SEQ ID NO: 93124 - DNA, 568 bp, Heterodera glycines
aacaaatggaagaagcatttgcgaaggcgcggtcagaggagaaacagtgcggcatttgtatggagcaaattgtggagaagggactgcgctttggcattctgcagaactgcacgcactgcttctgcttggattgcatccgaaagtggcgccgccaaacggatgaggaaatcaaaacgaaaacagtgcggtcgtgtcccgaatgtcgtgtccattccgattacgtcatcccgtccaaagtttggattgacctcaagtcagacaaggacaaattggtttcagtcttcaagcgtaacacgaaaaagattgcttgcaaatacgtcgtcaatggcgacgtggacaaatgcccattcggtaacaaatgcttctacaaacaccaactgcccgacggttccatcgtcgaaggcaaatcgccgacgcaattgcgcaagaaccgtcgcaacgatgccatcatgttcagtctgtacgactttttgccctccgattcggattgggaggacgactttttcaacgataacagcgatttgttcgattgattcgcctgctttttgtgttatttaaataatttgat

SEQ ID NO: 93125 - DNA, 397 bp, Heterodera glycines
cgcatttggcatatgcttttgttcccccatcgccacccgcgcttccgtgagaattggcgctccttcctcggcctccagcgcaacagtcgccgctctctttggcgtcacattttactgccctcctcccacgccacgccctattcactgaacgcggcctcggcctttgacgaggagcagcagcgactggtgacagttaaaactgacattggaaacggacacagcacaacacagcaacaggaagggacgccgctgattgccgactctccccaaagttcgaccgaaacgaataattccgccgatgacaacattttaatgatttgatgattattacccttgtcctttcctcatcgattccttcattttaaaaaaaaaaaaaaaaaaaaaaaaaaaaaaaaaa

SEQ ID NO: 93126 - DNA, 505 bp, Heterodera glycines
gcccgatcaaagaaagcgaaatgatcaaaaaaagtgccgtcattccttcccttttgctatgcgccattttggtcgcccaatttattgagcaggccaatgcttactgttgcaaagtgtccgattggccaattggccatccgccgaactgcaacatttttggctgcaactgccactgtctccattgtgtgaacgtgattgagaagggttgttgcattgcgcaaaagacggggctgaccgatggctgctcagaaacgcgcctcaaacgccacgcgctgccgcaacagccgaagcgggcggaggccaaagaggtgtttcagcaagcggacactgacggagacggggcactgagcatggacgaagcggtcaactttttggtgtctaaatggaacatgacggaaggtgagctgaccaaccccgacaaacgccattggttcaccgaaattgacgtgaaccgaaacgaaaaattggagcccgaagagatagacgaagcaatgacaaagtgaga

SEQ ID NO: 93127 - DNA, 184 bp, Heterodera glycines
  unsure (1)..(184): unsure at all n locations
gtttcgtctgtcctttctccttatgttgtccattttcctcacttccgtgcattgtattaagccttggctcgggcgtatatatttatttggatgagtcgacgccattccgccaaacttccctttgatgcttttttgtgaaatcggtaaaggtcgcttcngtaaaaaaaaaaaaaaaaaaaaaaaa

SEQ ID NO: 93128 - DNA, 654 bp, Heterodera glycines
ctcgtgtttgagtgtgacacctgtataaaggctctgaatttcacggattttaacgaggccgaagaatttaaagttgcaatggaaaaaaggagagaatccaatcaaaaaagtcagcaaggaaggcggggttctgcaggaacggcagttatacaaaaccaacggaaatctccagctcacccaagccataaaaaaacaactgcaccttgctttccgccgtcacaccttcaagatggcattcagtccagtcattatcatcatcaacatcccgtcggtggcatcacaagcatgggggtcatgccgcacttcggtctccatcatttatccacaaagaaaacgaccaaaaaagacagagatggcaaaaagcgaaaggttaccaaggaggacattggaatccctacagattttgtacataaagcacacattgggtgggacgggaacacatattccgcctcatctgtcggagacgcaatggatgaaaaatttttgaatatgtgccagaagatcaacgaagatcccagcaaaatggaccgagaagaacttgggtttgcgctggaattttatgcgaagaatgaaagcaaatacccaaacgaaaatattggaggcttttcacaaaacacaccgttttttgcacaaaatccaacattggctactcgg

SEQ ID NO: 93129 - DNA, 561 bp, Heterodera glycines
ataatgctctctttaaaaaaatcacaatttctcattttattgctcttcaattgttttgtgttaagagtctttgcttatgatggcgtagaagatcaaatttttatcagactcaataacaccgatgtccaatgtgttcgaatgttgaatggtacacattcaattggatgtcagtcgagtcgcaatgggaatgttggcgtcctgactgaaattgtccatgcaaaagacgtacaaaatgcgattggcattttaccattggggctatccaacataatcgctgttattcaactcacaaatattaatgatgctttaatcggaatccttcgttcacacgcgcaagttgttgggattctgttgatacatcgtgggaaagataagcctaaagagttttctgaggatggctcatgtccaaatcgtcagttcacattttattccaatgagaaaactatcgaaagttgccatggatggaaccaaaagaacgcgattcactcggatgggcttaagtttatcgacttcaacaaacctcttcgtcttgtcaccagcaacgaagagatcgacttaatc

SEQ ID NO: 93130 - DNA, 448 bp, Heterodera glycines
tttctcacatgatggagacaacatcgacattttggtcttcaaccacttaaatatgcgtggacactcccatgtcattttcattgagataaataccagtcgccactgccctccgttcctgcttggcttccccttctaccacgagccgatgcgcttccaattctccaaggaggactctgatgtgatctccagagcgacagggacttttgtctaccgtcccattaagaacatcaccgtgtcgaatgataagacaacacttgccgagggtccgaacatggaaatcaaaacgtccggtctatatggacaacttcgttcgaccgcaccgaccatcagtattttggtcatcaccaatttacctccggaatgtacggaggaaatgttacgcgttgttttccaacctttgcccggccttcgcgacattctccaagtgtccaaccgtacagacattgcc

SEQ ID NO: 93131 - DNA, 610 bp, Heterodera glycines
ccattaacaacagcagatggcaattgggtgcccaacgaaggcaatgttagccgtctcagcagtcaaatgagttttagcgccgatggcttaatgacaccgcttggcacgttggacacgcaagagaccggcgaggccacgctggacaccgcccgttccatggtcgtcacgcctggcggcacttcggacaattactgctcctcggcagcggagttggagcagtacgcggaagacggcggcgatgactgtggcgatggggacaacgatggcggggacagtgttattgtgcatcgacggtgcagcagtgggctgagcactgaaattgtcaacgacgcaatggcaaatgccattcggaatgtttcgcgcgccagcaaagcttcggctacaacagcagaaggacaacaaccggcgactggagatgaacagccgaaaatgcggcacgggcgcgaatttcaattggaattggacaaacgcgtgtcagcgcatcggctttcttctggctcctcctcgtccgcgtcgggtgcagcagcgggacgcgacgtgcacgtgcggacgccactgaacgacccgcggtcaccgtttaagccattggcttacacatcttttgagccgg

SEQ ID NO: 93132 - DNA, 639 bp, Heterodera glycines
gtttttagaccagtctcagagtcagtaactgaatattaaaaatgaaagtggaaaagattaagacaaggagaggcaagaaatttcttgaggacagagcaccgaaattggtcgaaaatgacaaagtgacactttttgtgaagggaaagaaatgttcagtgatgctcaacaaaatacttggcgaactttaccaactgaagaagccattggccaatcgactgcaacggttaaattggcccttttttaatgattttctcacaaatttgacgcttctttatttgtcttcgggtccagcacaaagaaacggccgaattcattgctttttggcagaatgtacgaccatcaaatgttggatatggtcgaattgcaagtggagaattttgtctctagcgacgaatttaaacaagtcaaaagcgtaactttggggtcgaagccatgcatcattttgcaaggtcacctttttgagtctaacggaatacttcaacggattggcaatttaatggtggatttgtttcgtggccccaaagtggagtacttacggcttcaaggcaccgaattgataatttcattgacagcagtttccgaagagcggattaaattcagagtttacagagcatccctaaagaaggacatggaatctgc

SEQ ID NO: 93133 - DNA, 629 bp, Heterodera glycines
gggaaagggaggaaaaggacaaggaaaagcggatggaagtggaagtcgaagtttcgaccgacggaatgtttgtgcgtgccaaaaacgcggtccgttacccaatcccaaactcaatggacagccccgagctgagagtgtattttgtcggaaatgaccaaagcaacggcaaattatgtcagttgaagtcgcagattgaattcagagggaccagcaaattcgctgttcctcccaccactccgatcactcccatcgaccgatcatcgcaaatccttcccccaattattcggatcgaccacaaatggccgtacagtcgaaaacgacccaaaatcccgcgtcgcagcacaatggcggcccaacgccttctcacgcccgcccattacgcctctcccagcaactccgcccaaccgttcattcagcggaagtcgcaactgctaaaccccgtccatttcggagaaaagagcccagcagaatccatggagacgagcacaacggcgacttacattgacataattagagaccgacaactttacgaggaagtgcaacggtcgaaaaccaacgaactgaactcgcgctggtccaccaccttcttcgtatttatgctgttggtcgcctttctgatcgcaacttcc

SEQ ID NO: 93134 - DNA, 649 bp, Heterodera glycines
attaataattgctaatccaaattagctaattaatttgttgttttccttcccttttaaaatgccacccccaattggctcaattatttccaaatggactttctctgaggccctttcggtgttttcactccctttccccgaactcatttttcgtgcccaaaatgtccatcagcagcatcacaatccaagccgagttcaaatcagtacgttgttgagcataaaaacgggcgcgtgtccggagaactgttcttactgtccgcagtcgggctaccataagacggggctgaagaaggagccgttgatggaagtggaacaggtgttggaagccgctaaaagagcaaaggccagcggcgcgacacgattttgtatgggggcggcatggaggggcccgaaggaccgcgacttggacaaagtgtgcgaaatggtggccaaagtcaaacaattgggtggccttgaaacatgcgcgactttgggactgctcaaaaacgagggacaggcgcaaagactgaagaaagcgggattggacttttacaaccacaacatcgactgctccaaggacttttaccacaaaatcattacaacgcgccgctttgatgaccgaatttcgaccattgagaaaattcgttcggccggcatcaaagtttgctgcgga

SEQ ID NO: 93135 - DNA, 537 bp, Heterodera glycines
aataattataattaccgcctctcccttcacaatttttcagctctttaaaagcaattattttcgttttgccatgcgcactaattattctttattgtgtgacggttattgctctcgcccagcgacgcctttccccccaaattttgtcctttcgaccgctcttttcgtcctcgtttttgtccttgtgattacaaatataatcactctctttttgcttctgacaaaacgtcatcttcgaattggcttcaatgggcacttttcatttgcccccaccgacgacgaaaacggcgaaggattcgaaactatcggcggaggggccaacgacgcacagaacccttttttgaaggaaaaccgatgacagacgaacaatcaatggggaggaaacaaacgaccgttaaaatggtgtccttatataaaattgttaaactaaaaaacagaaaatctcacgagtcgtttaaaatattcctactgattagcaaattatgcggagagatggtttaaaaatattatttatttcaatgaataaaataatggaaaatt

SEQ ID NO: 93136 - DNA, 397 bp, Heterodera glycines
cgaattaatcgaatcccggtggatcaatgggtatcacaaaattatcgaacataacagcgcccagataaagtgccgaatgcgaattggggattatttaccggacagtctgccggaaagcaaattgccagtgctcttttatctttctgggttgaaatgcaccgaggaaaattttgtcgtcggaagcgccatgcagcgattcgcatccggtcgagaaatcattgtggtcaatcccgacacgagcccccgaggcgttgtcactggagacggtgaggaccccagttttggtgctgcagcaggattttatttggacgcgacggaaacataatgggcacggaattatcgaatgtattcctacatggtggaagaactcgtaccactcgtgctcacgactttttca

SEQ ID NO: 93137 - DNA, 223 bp, Heterodera glycines
cgaatgtttctccgtttgggagccgctgcgacttcgccaggaagggactatcatcaactttgtcaacggattggatttggctactcccggcctttgtatgccaacctttaacttccgtgatgacttcctgtccgaaatttactggctactgtgccattacccgggtgggattcgcgaggagaacagtgggaatgtgtcgctgttcctctcaatgtcggcgacg

SEQ ID NO: 93138 - DNA, 480 bp, Heterodera glycines
gacaaattgagagagcgccgtttggcgcccatttctgtggcgcagggccatcaaatggcaagggaaatcaaagcgaccaaatatttggagtgttccgcactcacacagatcggccttaagcaggttttcgacgaagcaatccgtgccgttttgtgcccagtccaagtcaagccaaagaagtcttgcgccattctctgaacagttcgcgtccaacctaaagcgaggaacgagagtctccagtcaacaccaactaaacgacgtcatcaacgcatttaatctttaattattttctaattgcacccatcgcttaattaacacatccaatcccttaatgttgcccccttctgatcgttcactgttttggtgctttccatcgatcccttctgtggtttttgtcatcgattgattgttttttttgtgcttaattttcattttgccactaaatccgtctacttcatcctctcccatttccaaatttgc

SEQ ID NO: 93139 - DNA, 501 bp, Heterodera glycines
cccgaatattttttttaattaaaaattttaaatactatttgtgttcgcttgtatgccaaattctgcttcaacaccgatggaagagtttgaggaaatggtcgctgttcttcagcttgatggcgtccttgactttgacgcggtgcgaagagcagtcagttctggtgcaatccgagtgcgcgaatgtgacgcggaaacgcccatggttcagattggatctcatttgtattctggacaatggtcacaaacgttaggcactgatatgcttttatgtccttcttcaatgtcggattaccatcaccatgaaggccatcagaggttggaattggtcgctgtgtcagacactcgtctctgtgcgcaaaaagttcttttagcaactgacgaaagtccgactaatggcaatggcactcggaatgaacaaagcacttcaaatagttcaaaggcataaagacaaagcatttgagcacttccagtttttttaaataaatattcacatatttggta

SEQ ID NO: 93140 - DNA, 287 bp, Heterodera glycines
caaacagcagcagcgacgcacctgctgcatttggccgtgcattcgcgctttgctggagggccaacaccaacagcaaaaacagccaaacccgcaactgcaggtcctaccgatgggaatgcagcaaatccaaggaagtggaggaatgtgatccttcagcagatggaagaaattcatccctatttgctttacacattgtaaaacagatcagctatttattattttataataatttaaaccgaataaaacgaaaatccgcgaaaaaaaaaaaaaaaaaaaaaaaaaaaaaa

SEQ ID NO: 93141 - DNA, 481 bp, Heterodera glycines
cttaaatatgtcagaggcaagcagcagcaacgccccccataatgccaatgccaacaacagcagcaatgccaccaacggcggaagcagagatcggatgaaccaatcgcaaatttggaagtgcttcgagaaaatgcccgactatgaggcggcaaagtgtcgcttgtgcacttcgatgctttcctttaaaagggcgtcgacgaaaggactttgggaccatttgaagtgcaaacaccggtcggaatacgacatgctgaagcaaaactttgaattgctcactccgtcgaattcggacgcatttaaagcgccaaaaataaagaaaagaaaaatggagccgaaaagcgatgtctgtgtggacagcgacaattcgttggtctcgggaatgggcacgcctcagacggaagtgatccgagtgggcggactcgcgaacgaaggccgaacggaggcgcaactgaacggcgccggagggggcggcggcgcaaat

SEQ ID NO: 93142 - DNA, 560 bp, Heterodera glycines
ccactaattaactctccaaattgaccaatttccaaatgcgttgggtgctcaatctcgacggagggccgcgacgggtgaaccatgcggcgttggcaattggcgacaaaatttattcgttcggcggttacgccgccagcgatcctttggacagccaaagcgatttcatcgacattcacatgctcaacaccttttcctatcgttgggagcatttgccggtgttcgcccctttggcattttcccgtgaaacgacggcgaaattcccgtcaaaaccgcgcagtgcgaccatttcggcgcccggcatcagtgactttgtggagagtgttccgtccaccagtgccgccggcgaccgcgactttccaccggccgacgtccgacggcgtcgtgcccgatcactcacggaaatgcatccgttggcacttattcgttcggctaaccctccgctggaggacgaccagcagcagcagctgatggccaacaacatcgtgcacagacggcgcagcacaccgaaccgatgcgaagcgttgcgcttccgttcgtcccgcgttcggccggcaattgac

SEQ ID NO: 93143 - DNA, 550 bp, Heterodera glycines
cacacatcagatgaactccaatttgatatcaacaagttcagtgatgcaaaaaagcatttctcacgccccacgagagccatcaataaaggaggagccgatgggcggtgactcggcaaaggatgacgacaacggcagcgacaaattctggtcgatggcaacgaagacgacgtcgcaacatggggaagcgccagcaattccaacgatgaccaaaaaaagaacgtccattgaattgtgcgaagcaacacaaattggacacagggaagaacttggccaattggtttctccaaaaccagcgaccgatcgtacagcaccgaccgccgatttcatcagaatgggcctccatcaaagtccatcgatgccgccaatggtgatgaaggcactagcggcaaacgacaatgatttcacaatttcttcaactgcttctgatgaggcagcaacaacaacggaaggcaaactgacaaagtccgcaaccggtgcacacatttccgccgacccaacactctctcatatcgtcgacattggcgcacaaacgtcaacagccgtacaaaat

SEQ ID NO: 93144 - DNA, 638 bp, Heterodera glycines
caattggaggagagagaaatgcacacggaagggacagaaggacgaataacaattgggacgaagcgaaaaccatcgaaaacgacgctaatgggcacgacggataacagcgaatggttgggtggcaatcacatcgaagagggaagcgaagaagcgatgtcaaggacatcacaacgggggagaatgagcacaaaagcaccaccaccgacagcagcaacgccaagttggagcagtacacgatggaaaagcggaggggaaacaaacgacgcaaaagagaacaaaaaagcacatgagacaagccgaactgcagcgacagaacggacggaaggcaatgttaacttccgactgctcgcaatcgccggaatcattgcggtgttgtttattatggttggaattggaagcatttgtacgggacggtacgtgcgaaagagtcgtcaactccacggcaaatacaggcccgccgcgtacgaattgcagaccactcgccccccgcctttgaccagctcttccatgactttcgcgccttccaatcgcatggccaattccaatgaattgcagcagaatcggcatttcgagtttggccaaatccatcaaataccgccgccagttcattgtcctcatcagctcacaatgaatgggaa

SEQ ID NO: 93145 - DNA, 143 bp, Heterodera glycines
ctgaattgttttttttttattaattcattgtttttcgtttcggcactttctgcccatttgaccaatgatttctgcccttccttttcctcactaatttgtccttttcgcctttcctcacatggcaattcgattaaattttggtg

SEQ ID NO: 93146 - DNA, 171 bp, Heterodera glycines
aacaaatgtctcatcgcaattctcggaacatttaacacatttttgagtagaatttgctgaagaactttgccataatggcgaatgaccaaaaagcgtaaatttttcagtcgcgaaagagacaaaaaggcagccaaaatgtcaatattataagcggaatatccgaggtcttga

SEQ ID NO: 93147 - DNA, 462 bp, Heterodera glycines
caaaaaatactgcaacggcggaggaccaacagcagatcaaccgatttgcacgtcttcataaagcttactcggcagccaaagaaaaacttatatcgttggacaacgatgtcaacaatttgaatgacgcttccgatgaaattctgctgatggacgacgaggcggcggccgattcgattccctttctcgtcgggtcggtgttcgtccatttcgaccaggacacagtgaacggtcggttggaactgctgaaagtttccactcaggcggagatggacgcattgcgttcacaagtcggaaccatggagagggagttgggcgaactgcgggcagtgctttacgcaaaattcggcgacaacattcacctggagacagaggaggacgaggagagcggcgatgcgacgagaaggaacgggagatagtgcatgaaagaggaagggcagagagagagagaaaggaaaagaaaaa

SEQ ID NO: 93148 - DNA, 635 bp, Heterodera glycines
gtctattcttcaccatttgttcgaatttaaaaatgtcaaacaacgaaaatgaaaatgtgatgaatggagaagccgtgggaggggtggaaatcaaagtggaagccaatgaagaagtgaacacggaatcgcaggaggacggagaggaggcgaaaattccccagttcagcaaagagcaaatggaacgttcggtgatgtgctgcacaaacgaaggcgaaattgtcaatgcgccttggcatttgatggcacagtcaaagacattcatgcaaatgtgggaaagtctcgacatggaagaaaaaacgcaagaagattttacggatttcgtttttccgctcaatgacatcaccagcgactgttttcagcagattctcgcttggatgcgcgaacatcacaaccttcccgagccaattgtcaaggaggacccggtgacgcaggaacgcatttggttcaaattcaccgattgggagcgccaattcttcgacgtcgactttgaaagggtcaaggagtactttttggcttccaactttttggacattcgttcattgtacctctactgtgcccaggaatgcgctcgttgcataatggacaaatcggcagaagaaattcgggagatgctttgtctggaggatgatttgacc

SEQ ID NO: 93149 - DNA, 437 bp, Heterodera glycines
tacgtcgactgcgttcgaatatttcacaatttcattttctccaaatcctgtgaaaattgcattaccatgtggaagttcggcaatctctccgagggcatttcggggaagggcactctcggctgtgccgaaacatacgctgcgcacaccgccgtaatggagatgccgcgcacggaaatgtggttcatcaaaatggccgtggatccgtcccgcagatttctcgtctgcggcagcgaggagtgttgaattgcgcatttggcgattggacacagagaaactaccgaaccgaaagagtgatttttgtttggtcgcgccgaccaaagaattgaggaaatgcattcggcaggtggcgttcagtccggacggaagggttatgctctctgttggcgatggtggcgttgtgtcgcggtacaatttacaggaaaaggaggagacggatt

SEQ ID NO: 93150 - DNA, 533 bp, Heterodera glycines
ggttattaatattcaaaatggctatggccgcaagaggtggacgagggggaaaattgcctcccgaggtcaatcgcattttattcattaaaaatctgccttataaaatcacggctgaagaaatgtacgatatttttggcaaatttggtgcaatacggcaaatacgaattgggaatacgcctgagtcacgtggtaccgcatttgttgtttacgaggacgtttttgatgcgaagaatgcctgtgatcacctcagtgggtttaacgtgtcgaaccgatatttggttgttctctactaccaagcgacgaaggcatggaaacggatggacacggacaaggctcgcgtaaaattggaggaagtgaaggaccgctacggattgggcggagacattgagaaggaaaaggagaaaatgggcatttacacgcccaaacacacgcccggagtgagcacgccgcgacacaaacactgacaataaggcgtggacaccgaatttttattttttttaaaagttaacatgaattataccaaaaaaatacca

SEQ ID NO: 93151 - DNA, 579 bp, Heterodera glycines
ccatttcgctgttcctcgcctcgcccactccgatgctaaacgcactgacaaacgcaacagccggttttgtccgagaccatcccgatttgccggtgtctaacacaacagaaactcttaccgccattgtttacatctgtcggcatatgttggaacgcaaggaattttacgaccgtctttcgggtgacgaacgcaactttttccttcgtgtgatggtcagtgcgttgattcttttcgaccacatcgactcggccggggcattttgtcgccattcacaagtcgacgtgcggggagttgtcgaagtggtcaagcagaagggcacggagcaacaggctaatcagctaatggatgttttacgttatacctcaaaacatttgaacgatttggagacaccgaagtcaatgcgtgcgttgtttaacgaaagggtggagagaaacatctgaccaaacggaatgagaaaagtaagcaaaattctgtgaggagccgaataatcagtgatttttttttatacctataagccctcctttctaccttcgtttacctaacaaataagaagaatcaattctttcataataattatac

SEQ ID NO: 93152 - DNA, 616 bp, Heterodera glycines
ccaagtttgagcatttttatccacgatgatcagtagcagcaaattttgcacaaactttgatcagctttttaaccatttgcgtttattgtgttcaaatgacgccggtgcagcgcattacggcaccgaactgatgccaattatcaaagaaaatccctttttcggtgctttatgttcagtgatggcggaagagaagcaaaaaataagggcaatgacagccgaaatttcgtgtgcagcaatggcattggcattttcgttagactcgccaacggacgatgcgaaggacaaaaattgtgcggttgaccaaacattgagcgaatgcaaaaaatattatttggaggaaaacgaattggatggagaaacaaaggacaaaatgaagcagactttggaagaacatgaacaatttgggcaactgattgagcagaactccgtcgcctgtctccacacttcacgccgtctgttcgctgtccatgcccaacttcgtcccgtcacccttggcgatgtgcaacagtttggcattgtgctcaaactgagcacaaagaaatggcaaaacgaactgaaagatgcggtgtgcagccaattgttgctgatcaaatcacgcgcagggcaaaaaaaaaag

SEQ ID NO: 93153 - DNA, 538 bp, Heterodera glycines
attaaataaatgtcttctgaaatcgaaaacatcgtccccaatggcgcaatagatgaccatcagaaagaaatgaacaaattttcatggacattgaacgatttcgaaattgggaagccattgggaaagggcaaattcggcactgtttatttggcgcgggagcgagaaacgaaatatttaacggcactgaaagtgctgttcaagaaggacatggacaagcacggagtatcacatcagatgaagcgcgagatcgaaatccaataccatttgagacaccctaacattcttcgtctttacggctatttctacgatgaagaccgcgtttacctttcgctcgaattcgcctcgcgtggctccgtctttcaacttcttcgcaagagcaatgcttttcggtgccttactccgcccgtttgatttatcagcttgcggacgcattaatttactgccattcgaggaatgttattcatcgggacattaagccggaaaatctgctgattaatactaacggagacctgaaaatcgcagactttggctggtcagt

SEQ ID NO: 93154 - DNA, 582 bp, Heterodera glycines
ttactctccgtgtcgtcccaaatgtcctccggccaatccttatctctgctggtgttctctgttttcctcgccatcctttgctcattttgctcctcttttcccctccaacaaatgccctcccaaagtcggccaatgtttggaaaaattggcacttcggcacaaattgtggctaatgtgctgcccgaactgcaaatggtcgaaccttttccatttgatcaaatcagtgacaattcgcaacaattgaaaagcgaatgggacggaaacggaaggggcggagaagtccaaacgcagcgattgcaattctcatcctttccgcactttcttttcccagtggaagtgaaaagacaaatggacgacacaaaacggggaagcctcggcccacgtccgttgagtttcggaagacggtgaacgaagcgaaaagtggagaaaggagaagcgaatgcatgaggaaagacgacgaacgggcaaatggcaacaaaagagccaatttggcacttgcaaatgaatgtcatttcgaatggtccactgttattaatatttttgtacaatcaaatcggactaaatgaatgtgttttgttggaa

SEQ ID NO: 93155 - DNA, 633 bp, Heterodera glycines
atattattgtcagagaaaattttttaattagagggcaataaagaataattttattaaaagtaacttaaaagttaattgaacaaaatttttggttaattatatttaagaaaatatcgacaaagttgcaacaaatttttccagggttttgaatggatttttaaatttcaaaaaacaaaacaaaaaatagtggaaaatttttgaatttttccattcttagaaggtgtatttaaaaaaaatattcgacaaatccttcggtggtggatttttggttttgtagaattttgtgatgaattttcgaaaagtgcgaaaaaatgctaaaacttctgatatgtttatataaatattttaaaaagaggcccaaaatattttttattttttaaatcatgccaaaattcttttctcaattcgtcgtcattgaccatcaatgagtcagggcctgaatgtcgaagcaagggatctctgaaatgattttttgagtgctaaaatttcaattttaaattccgtttgaatttacttccaactgctgtacatatataagtcaacatcaaaagtctaaatttttaattaggtattaaatggaatataaaaatttaaatgatttttaatttaaattgtttttaattgaatttttaa

SEQ ID NO: 93156 - DNA, 364 bp, Heterodera glycines
caagtttgagaaaatttattttgttgaagcatttgatcatgcagcagcacacgtacacggaacagcctcaacgccagaattaccaatactacccaaatccgcctcccccggtggtgtacgaacgtcgttacgtggaaagggacagcggcccgcgctgtgtgccgtgctgctgctgcattccgtgcattccgatccctttgtgcttcgactgcggctgctgaacaccggcggagaagcaaaacgaatgttttgggaaatgcgcgaaaatggaaacgcttttattacaactcatcactcaattaattacataattaattgtcattaatgcaaatttacatttgcgaataaattttttcggatccaa

SEQ ID NO: 93157 - DNA, 450 bp, Heterodera glycines
  unsure (1)..(450): unsure at all n locations
attacataataactaatagcttcataagaaataacaaattgatttacaaaattcaatcacttggaatgaaaaggtttgttggcatttcttccgccgtttttctctgtcacttctttttgccgtacgattgttggatcagtagtgggaaaaagacgggtcgcattatgccaatgccttgtggctactgtaatgcttgctggcacctaccgtttccactttgtacgcgtcgtgtttggcgatgatcgcatcgaaaccgctgaaaaggtcgttcagaaaagcgaccacttggatgggcgttgaagtggaggaaatgcgcgtgaaactgaacaaaaaggggtgggggattatttgggatttaaaacattaaaaaataattattttttaaattttaaatttaagatttgagtataaaatacccccttanaannnnaannnnnnnnaaaaanaaaa

SEQ ID NO: 93158 - DNA, 387 bp, Heterodera glycines
cttttttttgcgtttttttcacaaaaaattccattaaaaatgcaacaaaatcgtgaaaatatactcgtggatgagagaatcaaatcttacgtagcatatgaattcctacgtattatcatcgtgccctgcatgtgagctacgcaggaattctgattctctgacccaagaaatagaaaagtcactgctctgaattgttaagggagcagatgcacattttatataaattttattacctaccataataaaaaatttattttagattacttagtttgcgaaatgtcaatttttgggtgtgttggtgaaatgtccgaatttggattagccggcgaaatgtccatacacacctttctcattgtaatttttttgccatactgttaaacgaaaaaa

SEQ ID NO: 93159 - DNA, 277 bp, Heterodera glycines
actcaacgggttctgctgttgttgctgctaggacgggttgctaaacaaattcggggtcgattcgcctcctcttttagagtcctcgcctcgctttgttccatcggttgctccttctcccctattccgtccccgggcaaaaatcgcccttttatcagctccaaattgcttctgtagaattcagtcacgaattgcgacatgtgtacagtgccctcaatttgtattggcgtaatttgcggagtatcgccgggctaatataaaaaaaaaaaaaaaaaaaaaa

SEQ ID NO: 93160 - DNA, 565 bp, Heterodera glycines
acctaatgcgtttatttgttctgccgctgttcaccgagacaattctgcgtcaccgatcagcgattgattatccgctgaatttggattttacccttctataaaatccaatcaatcgcttcgttttcccaaccaccaaatctcatatttttggtttaaatcaattcagctgataattccattttttacacttttttgtttttattttccaatgacgattattaaaacgtttctgtctgtttgtgcgctgttgtgtttcttcaaatgtaattcttatgctgacgaaaatgaagtgagacaaatgtcagcagtaaatgaccaattccaactcggtccaagggctatgaatatacagtttactccctcaccatttgctaatgggatcatattcattcgtaattaatctattgacgtctcgccaattttggcctgcatagcaaattgccgaaagcgacacttgctagtgccgagtcgagacttctgctaccggaaagtgtgccggacaataactgcagcttatgaggacgcgtcagggcaccagcattaaaaacggagaaaaagaaatgct

SEQ ID NO: 93161 - DNA, 605 bp, Heterodera glycines
  unsure (1)..(605): unsure at all n locations
ctcgttttcagcacgtggccgggactcggtgtcctacagattttgcggaagtgccctccaatttgatggagtgtttcttcaacgacccacgagtactccaaaaaatttggcgagattcgtcgggccgggcgccaaccgatgaaaagacggagcttttggaaggcattgccaactcgcggagagtgttcgacgccctgcacacgacgcgacaagccctttatgcgctgttcgacttggaattgcacggcgaacgcgcggcagagatagcggagggacggatgagcacgacggaactgttcggccatctccaaagcaaggcgttgcccgggctgaaaaacggggaccaaatcgcataccatcacagaatcgcccatttgttcacttatggcgccaaatattattcctatttggtcgctcgggcgggcgcttctctgatttatgagcgacttttcgccgacgatcccctttcgggacgcaatggtctcanatgggcaaaggtgcaatcccacggcggtgagcacccgtccgatgtgctgatggccatggcattggactcgccggaagggaaggcgccgaccgccgccgaattggtcgccgcattggac

SEQ ID NO: 93162 - DNA, 597 bp, Heterodera glycines
atgaattccaactttgttagtgatatgtctaccaactacaacaacagcaaccaacaacagtcagtttcaatccgttcatatcagaaccaaatgcagtccgttcctgtgcctattcaacattccgaggaaagccaatttaatgggtcgcaaggaccgcagacaattgaacccaatggcaatataaaaaatggttttctccaagagaatgatgtgaccttacagagacagcaacagcaaatggccgtcagttctccctctgtgagttcaactgtagattgtaatgctggattgggcaatggacaaaatggcatgcggtacggtttttttgctggctcgcaacagtcggatccgtcaagttttcttttgcaacagacaacagtcgaagaaggtgttagcaacggcgacatttgccataatgcgcagcgacatcagctgcaattttctacgatgaacggccaaaatggcggaatgtgttttccatcgaatttgccatcagcaatgtcgatgttagcaaatgctcctcaaagacgaacatttttattcaattcggacatggcaaacaccgctgctaaatctatgcagcagcatttaaccgaa

SEQ ID NO: 93163 - DNA, 549 bp, Heterodera glycines
  unsure (1)..(549): unsure at all n locations
atttgtcccttccaataaaaatggtcttccgttgcccggtcaaaaatgccatcgacgatggcccatcgtccgccgttgtccgtctgttccgccaacggtttgacaactgcgacccgcaatggctgatcagatgcccgggccgagtgaatctgatcggcgagcacatcgactacagcgactactccgtgctgccgatggctattgagcacagcacatgggtcgctgttggaccatcgccggaacggacggtgcaattggtcaacgaagaagaagaaaaataccctcccttcactttggccatttccgattcgttttccggcgcttcctccaatggcgccgtgcccaaatggcaccactattttttggcgggttggcgcggcattttggagagtttagcccaacgggagggtgtcaacacagagacagaagccttacaaagagccaaaggaatgncgtgcggtggtggccagtcgaattccgccaagtgccggactgagcagctcttcggcattggtctgtgccgcggcattggccacgctttgtgtgcaa

SEQ ID NO: 93164 - DNA, 133 bp, Heterodera glycines
aattgaaccattaattagccccaccatatcacatactgatctgtcagatttcgctaatgagtgccccaaacttatggccgctggtgcggattatttgcatttgcatattatggacggccattttcggccgaat

SEQ ID NO: 93165 - DNA, 241 bp, Heterodera glycines
  unsure (1)..(241): unsure at all n locations
aattgtcgaaccggaagagcaaaattcaccgcaaaagaaggagtacatctcgagacttcgcatgccaacaatcttcactcgccgcaacacgcgaaaggacaccgaaaagaaatgaacgtcttccacagacaacgcgctcatcgcatttttgtacgaagaagcgatgaagaattctaacatttaactcatcttacacaaacatataaatatatacacacnaaaaaaaaaaaaaaaaaaaaaa

SEQ ID NO: 93166 - DNA, 640 bp, Heterodera glycines
actccgtactgaatcggcatgggccaaccaaagtcccagccccccctcttacattccggtgccagggaccggattgactgatgacctcagtttctgggaacgcacttacaatttggtggcccatcttcgccagctgtacatccatcagcacattattctccgaagggtcgacaaactctttcagaagcatttccctggaaaattgcctgattcgtttaccctggagcggaatgcctccatcaactttgtgaataacccgcccattttcgatttcgcccgtccatacatgccacgggtaaattttgtcggcggattgcactgcaaaaaccaaaccaaatggacaatggacagaaaattgctacaatttgtcaatgcttcttccgatcagaaaggctttattttaattagtggtggattttctgcccaatggtcacacgccccagcggaagtgatcgagaatttggatggtgccattcgcgagttgccagacattctctttgtctggcagttcaatggaccaccgttaagggacactccgaataacctttttgcggctgaatggcttccccagcaggaattgctcgctcatcctaaatgccgcgcccatttgtcccacgggggagtgaacagtgtcatcgaa

SEQ ID NO: 93167 - DNA, 586 bp, Heterodera glycines
atattagatactttttatccattttcacataaatactctcttacttcaaaatgtggaaaaatccgaaaaaagccaagaaggaatggaaagaaatctctctctgcggcgactgttggctgtcagtgttccaatttatcggcccctatgaactcgggttgaaatttgcgttgctcagtgatcgatttgaccatttggtggacgagcatttcaagacgaaaaagtgggcgatgggtttcctggaaattcgtctctcctcaaggggaaaacgcgcggtgattgtcaacaattttggcgacggacagcgcagtttttatccaattccacaaaagccattgcccagcaatatcgtcggatttgaaagcattcgtataagttacgtcgaccaacacgtcgtccaatttctccaccgcattcgccgccttttcgactccgtcccgacaaacctttacattgcgaccgccgctttggccgaaactgtctaccgcctgaagcacttcgtccgcagttgcgaggcgattcgccaacacattttgccgctgctccgtgccaatgtccgcgccctgtttttgtcctctcccattttcga

SEQ ID NO: 93168 - DNA, 65 bp, Heterodera glycines; identical to SEQ ID NO: 57115

SEQ ID NO: 93169 - DNA, 451 bp, Heterodera glycines
ctgtgcgaatgtcgcgggagagtatatcgtcttcaccgaacaacatgatcgcagtctgcacctggcaaatactaatggattgcatcgcctagagtgcacgacttggcatttacaacagtatatcctcctcatgtacgcacaggatatgaacagcgtactgattgaaagcatgtgggacgaatctaattgtggtgattgccttcccatcgatcggaattgggaacgtggtaattccacctttgacttcgacgctagaacgtcgcaatttgaacagtgcttgcggcaatggccagatcgcgttgttcgacataatgaaagctcgatttgtcaaggctgccgataaccatacgacacacttctcgtatgttattgcgacatattttccgatgcccacactgtgtactgtatagacgtggacagcgagatgaatgacacgatgaaattgtggcaa

SEQ ID NO: 93170 - DNA, 78 bp, Heterodera glycines
gtcacaccctatatctttctctacatagtgatcgtattaactcatagggctatgttctatttggcgaaaaaaaaaaaa

SEQ ID NO: 93171 - DNA, 143 bp, Heterodera glycines
ctcaagccctcagtttaacacgccatgcctccgtttctctcgtcgctcgccatcgtggtatcgacgattgccttggctatagggactgctcaagcagctcctgccgacgagcctaccgcccgcgcgtccccacttctcacaac

SEQ ID NO: 93172 - DNA, 430 bp, Heterodera glycines
ggcaaaatcctcccccactgacatccgaggccaacttggcctgctccgccggatccacttttgtttcggaaaacccggtcctaactgtacacaatgccttccataatgatggctcccttttcaactggcaatgactattagcggtctcgcggccttgcgcactggaaaacatcccgttgctgtctactttggcaatccactgcttggccataagaatacgttgcccttgtttttccaaagggaccaatttttgcacatcctccgcttccaatttttctgctccctataaatacacccgaggggttggatagttgagaaaaacacatttgtaaaaggccttccccttcggaaactccgcttcacccgcaccgattttcagctgtttcaacgactgcaccccaactgcttgaatttcttcccgtgcactcat

SEQ ID NO: 93173 - DNA, 250 bp, Heterodera glycines
cggcacttcgtacagtaggacatgccgacgaaactaccggatgctttgcccatcaaattcacactgagatggccatgatgatgccaaattggatgttcgaaattgcatcaaagctgcaaatcaaaagcattgaaaagaaaaatagaggaaattcctgagaaaacatttccataaaaacattatttttttatggctgtcgcatgtgctgaataaatcgctgtgttttacaaaaaaaaagaaaaacaataac

SEQ ID NO: 93174 - DNA, 397 bp, Heterodera glycines
ggaattttaaagaaaataaaaagcgaaaattaatggccaccaccagcggagaaggagcttgccaagaatgcccgtgcagtgcttaccgcgaggatggcattgcggacgaaaatgaccgatgctggtactgttggtgtggccatctgttgcaagtccacggcgaagccggataaacactttccctgacattttgccaaacagcacatgaacacctgtggagaaaagggccacaaattaatatttatttgttattaattagcatttattttattgggacattccattgattattgaatatttttttgtttcttgaattttattttttgcattttatttaatgaaagcgttggtttttaaataaattatttttcatctatagagccgaaagaaacaaaaa

SEQ ID NO: 93175 - DNA, 624 bp, Heterodera glycines
gaggcatcaccagcagaagcggtcgcaccaacaagcggccgccgtcactttggcggacattcgctggatggaaccgatggccgcgactgaaagtgccgctacttcttcaacaccggcaaagcggctgttgacacgactcggcacaaccagagtgggccgctacgttcaacagttggccatcgattacgcagcttccttccgcgacatcgtcgttggaatgcgtcagcgaccgctgcgagccgtcgcttgcggcgccgccttggcttcgcttgtgttcactttaaaatccaatccggacgaaattgcgctgcgcgcgcgtttggctcagttgcgtcagcaaatggtgctcatcccggcgtccattcacagcactcgtgccgacgaacggctcgagcagtacaccgtcctgttgaatgggaatcggcttgaactcgtcgactttttgctcttctctgtgctcgttgagcgtccgtttgacaaaaagaatgaattttacgctgcccacgacaaaacattgcgtggatggccgtggaccgagctgtggcggaacgcgtgggacatcggcgcgctcggccgtttctgggccttggagcggtcctttgacaattgcgacgttcgccacga

SEQ ID NO: 93176 - DNA, 630 bp, Heterodera glycines
gtcggctgctgtccctggcgaagtttactcattggatcaatttgtgcccgaattgagcgaagttcatttgcgcgagcttcaagaggaagcgatgcaatttttccgtcaaaacgaaagtgtgcaaaaattggtcaatttgggcatatcttccgtcgttgccaaacgccttggaaatcctttgcgctatggaaatccgtcccgccgttgttttttgtcccttaaaatcgttgcacttgccaaactgacgcagaccattcacaaagtcaatgttaaagaaattcggaagctttcggtgaaggaagtcgaatcattaagttttataccaccgaaaatgctttgtcatatccgcgaggaatttttatcaattccgcaaaaccaaaaaggaagggttttctacgaactttcagcagagaaaaggagtcgcattttggccgaattgctttgtcttttgctgcttttcgacgatcccgaattcactttgccaatttctccgattgtacaggatttttatgtgtcggaaaatgtgttgaaaaatctgctcgttgcgatgggatgcgtagtgagcgtcgccagtgaaacgcaggcactttcccttaacacgattcggatcgctcgtcttgttggtcctcc

SEQ ID NO: 93177 - DNA, 539 bp, Heterodera glycines
cgccgccgttcgtcaagttcttcgagttctggaagctcttccagtactggttctagctcatcaggttcatcttcgtcctcttccaccactgcttctcgttcaccttccccaaagaaacaaagagcagctgctcgtccttctgctcgtgacgatcgtactacacgtcgttctccaagaaggtcgcgttctccccatcgtgtccaaccgaaaacagagaaaagcactgtcagctctcgcctcgtcatgaacgcgcggctccatcaccaccaccagtgaaaagggaacgtactccggaaccaccgccacgccgactttgtgttcgaaatctaagcagaaatatcacaaaagcgcacatggaggaaatcttcgctctgtttggggctctaaagtcctgtgagttgccaatggaccgtgtgcatgtgcatttgccccggggatacggctatgtggagtatgaaaaggcggaggatgcggagaaggctctgaaacatatggacggaggtcaaattgacggactggaaattcagtgcgaaatgact

SEQ ID NO: 93178 - DNA, 599 bp, Heterodera glycines
gtttcactgccgatccctcaaaacggcctaaaccgacggagttgctgaaccattcgttcatgcgaaacaaatgcaacgaaacgaaagcgagaataaacattggagttgagccaaaaggcgaagtccaatggaattccaaacggagaagcctccgacttgacatgatggcagtgcacagttactacggacagctgaaggagcgcgatttgatgtttgccattctgaacgcgatcaaattggtccgagagggcaccattccgccgattttcatcgaaaaactctctgccgttgtccatgacaaatttgtggcggtcgacgcttcgttggcgttccaacagagcgaagaatggagccgcgacgtgctgaacatttcgaatgccagcccatccccggaggggacaaaacgacttacactcagggaacacaaaacaccgcactgttcaggggaacagatcaacacgggccacaacaacagcagattcccacgggaagaaagggaataccaacgttgtgagatggtgttcttcgtcaaccgaaattggtcaagggaacaccgacaacttttcgttgcttaccaattcgcccgttggttttcccgc

SEQ ID NO: 93179 - DNA, 567 bp, Heterodera glycines
gaaaaaggtgcaacagaacgccacatggatgagtcaacagatggatttgacgaagacgagcaacaacggagagaccatattgaaaagctacgcaagcagcgagaggaacacgcgatcaaattagacgcggtactgaaccgatcgggacttagcacgaaaatgcaggaactgatgggcaaatttgtactcgtcgaacaattttatatgacgcaatctgtgaggaaagccattgacatggacagcatcgaggagggcgcgctgaccagcactctgttggacgacgtctttttcattgtccgcaaaagtattcgccgttctatcagttcgtcgtcggttgactgtgtctgtgcaatgcttaataatggcgcaacgcttttggagacggatttcctcaaatacattagtgcgcctattaagtccggctatccgtccacgggttggagtgccgaaagtgcttatcaaacagcacaaaatgtgatgcaaggaaaaggcgaagttgtcgggggtttggaaaagcaacggagtgctttcataacagcactgaacaacttgcgatcatcaattgat

SEQ ID NO: 93180 - DNA, 436 bp, Heterodera glycines
cataaacacaagtctgttgatgtcaagttctactgtctgtgccggttccagccaggcgacgccttcaacatgtattggactaccaatccagaccgccggtttggcccatcttcccaaaaggctcaaaaatggtctgatgtgctcggcccattccgttgtccgcacgacgaccatctgacaaacatcattaatgatgacgacctctggtaaccgatgccaccaggcaatgtccctgagtgagtgcaccagaactagggcacggagcccgttgtcttggaacgtccgtccaattggttccacttcgtcatccccgacgaatgcgatgggagcgttaataataacccttttttctccaacgccatcccaggggcgcctttcctcaacaggaatttgtgaaatgccctttctctcatccttcgattcttcctccttgtgt

SEQ ID NO: 93181 - DNA, 628 bp, Heterodera glycines
cgagcttcccattcatttgacggatgaagctcactggtgggtgtctactaatataccgcctcgcaaatactacttctcaatgcctcttcaaattgtcatcattgcagagctgctcgtcctttctggtctcttctcgggtctcaaccttgggctgatgtcacttactccacaaaagttgactctcatcaaaaattccggttcaccaaaagagcggaagaatgctcagaccatcctgccaatgcgcaagtccggcaaccggttgctgtgctcgttgctcatcagaaatgtttgcatcaactctgccatctcaattctcttcgacgatttgaccagtggcaccgctgcattgatcatttcatcgaccggcattgttgttttcggcgaaatcatcccgcaggcgctgtgtgtgaagaagggcttggctgcgggtgcctgtaccatatgggtcactcggttctgcatgatgctcactcttattggatcctacccgatcagcctcattttggacaagctgttgggtgaacaagtcgagtcatatgatcgcaagcgcctcatcgagctcatcaaactgaacacgaagaatgcggcgcaagcggatgagctgaagattgcgattgacgccttcgag

SEQ ID NO: 93182 - DNA, 405 bp, Heterodera glycines
  unsure (1)..(405): unsure at all n locations
cattgttcccgtaccatagccgttcattgttcccataccgtagccgttcattgttcccataccgtagccgttcattgttcccataccgtagccgttcattccgtagggcattgttcccgtaccatagccgttcattgttcccataccgtagccgttcattgttcccataccgtagccgttcattgttcccataccgtagccgttctttttgtagggcattgttcccataccatatccgttcattccggtgccgataccgtatccgttcggtatgttcccgtaaggcgatgttcctcccgtaccgtaacctccatacggatttgtgttgctgctgctgctcccttgctgacctttttaaaaaaatatttttgcattannaacaaaaaaaaaaaaaaaaaaaaaaaa

SEQ ID NO: 93183 - DNA, 530 bp, Heterodera glycines
gaccttctttgcagtccagtgaatagctcatcaaaagctgaggtctcgcgcgcatccaactcgtccagcgtttgtagcatttcctttttaatcaggtcgaatttcacttcacgcatccctattttggacgcagtgcgctcaaaatcgactgcggcattcaaagacctttccgcctttcccgtgacttttagttgtaacgcttttaatttttctgcgttggtccagccttcggtgccaatttcgaattttcgaaagaatgctcgaattcggtccgagccctctcttccgttgatgtcgggcagcttatccaagataagaattgcttcgagtcgattatagtcgaatgggaagcgctttgttgcatttcggtggcttccctttggttttggcattggttgggtggtgctttttcagcgttgaaccatggcggtggcatccatgggtaggacccataccaaggaggaggaggggggtaagcccttgagtccccttcaaaattcggtctctgtctgaactgttgttctctatgg

SEQ ID NO: 93184 - DNA, 565 bp, Heterodera glycines
gtccaataaaggtccattttatgccgtcgtcccttaattactgtccattgtccttcccatttttgtgtgcttttatttgttgtttttttctctgctgttgttccaccgccgatgggcaacaacaacaacaacaaccgcacatggcactgttggtggaaaacaatggcacaacgccaaactcattggcaacgacgccatttcaagacacaaacaaaaacaatctatccgaagttgccaatcctgcgcttggctggctcttttttctgagcagtttcgccgcttcaccacctgcggttgtcgagaatggcacttcggcacgcatcctttcgtcaaatgccgttgcatcggcaaacaaaaacagcgtaaagccaccgccgttagatttttcgctgatcaaactgcgtaaggctggcattttggacccacccaccggtttggagctgtacttgctggcaatgctgttggttgcactttgctccatcctcttcactttggcattgttgtgctgctgctgttgttgctgctgtggacggcacaaaccgaagtgccgtcaatgctatcagca

SEQ ID NO: 93185 - DNA, 589 bp, Heterodera glycines
ctaattgagcctaatgatgatcgaaacactcatttccatggtgcgctatttgtcagcgcgaaaggacgatgatttttctgatcggatgaattatttgtacacaccgaacatccttttggcattttcggtgctgatcagtttcaaacaatttgggggcaggcccctcgagtgtatgttccccaacaaatttcccggcagttgggaacagtacgcagaaaatttctgttggtctgaagacacttattatttaccacccgaagttcacgtggcacaaattcaagaatcagagaggtattcgtccggccgtaagctttcttattaccaatgggtgccctttttcctcctttttcaagctgcttgtttccgtttcccaagtttgctttggaaggcaataaatctgagttccgggctccgagtgcacgacgtggtcaccaaggcattggactcgcagaacatggaagagagcaaccgccaacggacccttcagattttggccaatcatttggccagagcactcagtttccaaactcaaattttgagacggcatctgatcgtacaccaaacattccgttttctgaatgtgacttgc

SEQ ID NO: 93186 - DNA, 416 bp, Heterodera glycines
  unsure (1)..(416): unsure at all n locations
ctcagtcggaggcgcggcagcgaatcgccaacaaaggcaaaaagtgtaaatgaaaaagaatattcccgaataataaataatgcaggacagttttggaggagtgttaccaaagtgtcaggacaaagtgtcgacaaagggacaaatggacgaaagacaaagcgcagaaagggattggtcgagaggccgaattggacctgccgaaagtcggtcttcgagcgcaagtcacctgcccacggcaatcggacagaacgccaaaaaagtcgctgaaaatgtcccttcggccgctaaaaaagcgggcatttcgtggctgggccgtctccgtcggaaggagggacaaaagacaaacgaatgactcaaatggccccgcttttgtctttttattgaaatgagagaataaaatgcaaatgttnnaaaaa

SEQ ID NO: 93187 - DNA, 600 bp, Heterodera glycines
gtccacaaccctttcctggaccattctcgtcgctcctccgccttcgcccacttccgtcccctccctacgcccagcgctggcttcaaattatacgacatcgacggaaggggcgaaggcgtcgttctgccgcaggcggcggagcgtattttgatgcatagcgcagttcaacggcgtgtcgcggggcacagcgaaatgttcaggagagagtgcgaatgggaaaggcacttccgcaagaggaagtgccggctgatcaactgcacggaggacgtgttcgaacaggtccagcagatgaacatcgactcggtggaaaggtctgcacagcaaaaggtcgaaccaatggacccgcgtttggccgcaaagtccgttttggagagcatcgcgcgtccgttgcggaagtatctccgcttcatcggccaagaggcgttcttccgccacgacgattcgcttgcgcatttgcagcggtgtttggccttcggcttctccgcacgcacctttctccagcgctttttctcctcctcaacgcctcttcaagaagtcctttccgagtccaaatggtccgttctgtgcgactcgcgcgtgtccggccccctgcggcacggc

SEQ ID NO: 93188 - DNA, 569 bp, Heterodera glycines
tttaaaaatgtgcagttcgtccggctgctcgctcagtgacacttccgggtccaaataggagctgatctcggcttgtcctccgctgatcacttgcagacagcagtctccgctctgcaaatgcaaaatctgtgcgcggtttgctctgtcctgtcagcggacgtgtcgcttcttccgttcggccatccctgagttcttgcacccgaacataagtctcctctcggcaaatctccacctctttgctcccatcaatgctttgctcctcttcgatctgttccaattcttccatgttcatctcttctccgtccaattcttcgaccgtcgcgtgtccttccaacatttgttctgactcttccgccatttggacaaacattggagaaggacttttctttgcaatgggagaagtctcttccgtcgcaacgggcttttcctcatcctccacgatggctttcagctccgtctcttccgccggcttctgctgctcttcttcgctacacacactttcggcactttctccggacgaagaagtcgatgaaacggaccgactacgatgagagggcgaaactgcgcga

SEQ ID NO: 93189 - DNA, 304 bp, Heterodera glycines
acaatagttgatgtacgatccgttgttgaacactgcacgtcatttgggtggtcagggggcggaccaacaacaacaagagctcacccaatacctttcatacacgtcgggccacctgaagtattattttgcggtggacaaccattatgtgcgaccaaagttgggcatcattctgttccccctctttcatcggcatggggccaacaaatgagagggggatgcgcccgtgttgccctgtcatgatgtgaatgctcgggacctgtacatttcgatgatggagtatattgcctatgtgctggtgactggt

SEQ ID NO: 93190 - DNA, 355 bp, Heterodera glycines
ccctgctctccaacggacgaattcccctctttgctggcgttctgatcaccatggtggacacgttcacttttctgctgatcgatcgctacggctttcgcaaattggagttcattttcgccgttctgatcagcacaatggccatcacttttggctttgaatttgtcgtcgtcaaaccggacggatgggatttgatggccggcactctgttgccctattgtccgggctgtggacgtcaagaattcctgcttgtgtttgagtggggttcactacgttccccatccctgatgatctatttactgtttttttcaaaaaattttccaagaaaatcatgaaaatttaaaaaaaacaaacagca

SEQ ID NO: 93191 - DNA, 606 bp, Heterodera glycines
gcacatcatgaatcatgatgagccgccagacggcggccgggatgcctggctggttgtacttgcttcgttcttggctcatttcgtcgtctttggtattcaatactcgtttggtgtctatcaaagcttctttgtcaacaacgacttcaaatcctcgtctcccgcatccgtttcgctcatcggaaccgtcggatttgccgccatcttttgcgtcggcatcgtctctggcaagctcgccgaagcatacggctacaggcgcacaatctttgccggaaccatcctcatcacctctgggctcgtcctcgcctccttttcgtcgacgctatggcagctcattctcactcagggcctcatggtcgggcttggaagttcgctcgtatattacccaagcgtcagcgttccctcgcagtggtggaaacgtcggcggtcgtttgcgaccggtatcgctgtcgctggatccgggctcgggtcgctcaccattacggccgtcacggatgccatgttgcggacagccggattgaggtggacgctgcttgcgacggcgctcatgagtgcgacgctgctgctaattgcgctcgtctttctcaagacacggattccacggccccc

SEQ ID NO: 93192 - DNA, 370 bp, Heterodera glycines
gctgattggcgagtctgatcaggcccgtggctatttcatcatcaacggaatgaatgcccaagggctgtcctttggcggcggattgggcgatttgttggcccaatgggtgctccagggtcggccgccggtcaccacacaatcagtggtggacacgctggacgagtctcgctttttgccgttgcatgcccacccacagtatgtgtttctacggatgcccgaggtggccagtaacatttataagaattttactgcttcccatcaatgccacagcgtccgaaatttgcgcacattcgccatccatcgccaccttcaagaagcgggcgctgtctttgcatataatatgggctatgaacgaacaattcggtacgat

SEQ ID NO: 93193 - DNA, 343 bp, Heterodera glycines
ctctaccactgatgacgacactgctgcttttgcttggctatctgagaaaatatttacgacggcacgtggatgggactattacggacccgagggggcgtacggagcattggctgggcatgacgcaactcgtgggctgggcacgatggatgtccagccaatcaaagaccaatttgatgaccacggcggaattgacccatccgatttggaagaaacgacagagtggcaacagagcttgtcattgtaatacccgttcccccgtcgacttttggctccaggagagcaaaacaccgagtatgacactgttgcagacaaccgtgagggatatttgacagcgggtgactcg

SEQ ID NO: 93194 - DNA, 351 bp, Heterodera glycines
  unsure (1)..(351): unsure at all n locations
aacagatcagccttctgtcaatgcatttcggcgctgagcaggtgaacagacgcatctacggcttcaaggccgactttttcgcaaccattgccaattcgttggcgactgaatgcgtctttttggacggtgcgtcgcattcgcaacggatgccatcgaagcgtgggccgaactcgtggaaatgatgttcagcagtgtccgcgatggctattacgcggaggtgcgtcgaaggcgccggtgcagcggcggcgcctccggagagaccaaaagtggccaaaatgaaaagatcataaaatgaaacacatttttttcactttgttgttgattaagagaaaacgaaatttttcanaaaaa

SEQ ID NO: 93195 - DNA, 577 bp, Heterodera glycines
caagctcaccaacgacgaaatcctgcgctacggccgccaactcatcctgcccagcctcggcatccacggccaaacctccctcaagaactcgagcgccctcattgtgggcacgggcggtttgggcgcaccctcgtccatgtaccttgccgccgccggcatcagtactctgggcctggttgacttggacgtggtcgacaccaccaacttgcaccgacaagtggttcacgctgaagaggcccaggacttgcccaaggtcacgagcgcgcggtagtcgctgcaacggctcaattcgcacgtcaagtacgtcgagcacaattgcttgatctcggccgcgaatgcgttggaaattgtcgccccgtacgatattgtgttggattgctcggataatgtggccacgaggtacttgctcaacgatgcatgcgtgctgctgggaaagccactggtttccggatctgcgttgaggctcgagggtcagctgactatttacaaccacgccaacggtccatgctaccggtgcctatttccaacgcccccaccggacgaaaccgtcaccaattgctcggacggaggtgtcatg

SEQ ID NO: 93196 - DNA, 503 bp, Heterodera glycines
gtccaattaagattataaagcaatggaaaacgaggaggagcctcagcttcatattgacgtgttgcttaacgttgcagaaaagctaattttctcgcctgacaatgactttcgtcttgatttgagagacccaaacgccgacatcgtcaattttatgttcgctgggcccgcctgtcgttggtcctttttctcgcagtttcggaagctcacccaagtcagtgtcaactcggccgaactccaactgtacgcgccgaagccgattcagggcattcgcggcactctttccaacaacaaagagttcttccaagggcccttcgtcgtcaccgatcagttcttttacacccttttctgtcgtggcattctccgacccaccgtcgtggacactttcttcatcttcggcaatgacgtcgtcaccttcgacagcgttccgtcttcttcggcctccataatgatgaacgattggagggaacaattggaggacggagaagaaacggaagagggagaga

SEQ ID NO: 93197 - DNA, 605 bp, Heterodera glycines
gttgccagtccgcaggagcgcaattggcgtggcattgcaacagcgcttctcgtcatcgtcgcaatgtgttccatcattgcacttgccgtgcttgtgcttacgccccctcttttggacgctgaccaaccgcagaagcgcgtcactttggccgatgtgctgactcatcgctttctgaactcggtggagtcgttggaatggttggacagtcggcgactgctcgtcaaagaggcggagagtgtccgcgtgttggaactgaacgaaggggcggagaacggaggcccaattgggtggacatggaaaacgttgcctggcgatttgtttcgctttggtaagcccagttccgtgtccctttcgcccgggggccgtttcatcattttgaactacgcgccaagcaaacggtcgccaaagagcacctatcgtatctacgacaccgagaaacagattttcgaaaatgttgggcctaaacagagtggggatgagaatgtgcgcgttttggcgtggagtcccaacggcgaccatttcgcttatgtgcatgagaatgacgtgttcttccagcggagtccgtccgcttcgctgagcgttcagttgaccaatgaatcgagtgc

SEQ ID NO: 93198 - DNA, 524 bp, Heterodera glycines
ggtcgcgcactaatgccgccattgggcactcgctcatccataaactcttgagcgaaaggttgaaaattgggacttcactgtgttctctgcgtgtccggatggattgaggaccgggaggacagcgcatttcggcaccatttggccacctatgagcaaggagcgagcagtacacgggagaacaaatacttggaggaattgggccgcagcattcattgactttttcgtctcctttgttttttcctacgccattcaacgttcgctgatggaaacaatgttggccagcctcgtgtccgccatcgcatggcctttggtgctgcttggttcctcctgtgtcattgacaacccgtaaaatatttgcactcgacgtgctcgtcaggtgggtgaacatctcgctgaagtattgctaactcgacagcactgtcgacgtccgattcactctgatcgatttttccgaagtgttcaaatgatcacctctgatcggcttttggcttggcgcccgcgtgttttaatttttataattctta

SEQ ID NO: 93199 - DNA, 285 bp, Heterodera glycines
gttcttctcgcttggaaattgtcgtggattattttttccaattttatggcgaagcttttcagttgtgggctgtcgtcatgctcagtcacattgcttatgtcctcaccaatgattatttttgtggaattgaaaatgaagaattgtgagaaaaacaaagcaaaacattagaaatttataaataatcaccgatatgattttggtctattaaaaattttcatttttttgtctaattattaattgtttaaagataaattaggacttccgaaaaaagaaaaaataaaaaaa

SEQ ID NO: 93200 - DNA, 449 bp, Heterodera glycines
agattatgaaaagtgatttatattcacaaattgatagaaaatttgaagaatcttctacttcgaatgaagggtcagataatgagctcgtagctgatgataatgcttctcttaattctatgtatatgaagcttgatttcctggaccgggttaaagccgagatcatcttcaattcactttctgtcgacaaagagccaaaacgaagtacaacgagacgattgatgagtttggatggcacaattatcactgcaaaattttcttccgatgatcagaaatcattgatacgaagcgccaataattttttcgacatgtgccaactgagcaaaagttgcatcgatatggcgcgaaattatgcctacaaatctcccaaaatgaagacagttcaaattccgacgaaaaagaaacataacaaataaaatttttatgaaaaaaaaaaaaaaaaaaaaaaaaaa

SEQ ID NO: 93201 - DNA, 319 bp, Heterodera glycines
gaacactgcgctgccgtcacagggaacgatagtcactgcaggggatgatcgaattacaacaacctttgcaacatgtgcgattatctgtgcataggacacacccctctccttcgagtattgctccactttgcgctaggaggacattcacgacgattagcgctattttgccgaactgcacccatgtgttcaacctgtggacatccttttggctcgcgttttgggctatggcgacgcgcacacttcttatttgctcacgatcgctgaagctgaattgggagtagtgattggccggagccaaaaccgcgagcggcttctaccg

SEQ ID NO: 93202 - DNA, 596 bp, Heterodera glycines
cagaaggcacaaattgaaattcgctgccacacttgaaagaatattttagacattaattgaaaattacaaaatactcacccctctcctttgaaaacaatccgatactcctgctccttctcgaacacgacaagccgaatttgtccaacaccgtgctcattgatgatcaaacgctgcagatgaccaacgtcctccaacgtgtacaagtccttgtccaccgcaattccagcacgtgtcagcagaaccacagcttctggcccatgttggtgttgtcgtgcggcatacgcatcgaaagcgtcgcgtccaccaccgttcggctgtctcgtctcacggtcacggagccccaggaggacggcacgcgccagacaatggcggtcatttggattgactacgcgcactagggactgcacggtgttagaaacactgtgctcagtgtcaaagtcacaagcacctaaattcattagaaaaatcaatattaaatgcagagtacaacctccacgctgagcatcagcacgaacggattcaaggggccatacagcaagaactttggttactgtagttccggcaagaagttcgattccagctgccgactgttcgtt

SEQ ID NO: 93203 - DNA, 554 bp, Heterodera glycines
aaagttgctcgtccaacgccaacttcgctctcccacgaggcgtacgaaccgcaactgatggcctgagtggacatttaccggaccaaatgcaatgccaggcatggcgcaacggcaaaatcggcggtgccgacggttgacgaactgttcagggcacagcttggtcatttctacgctcagattgatggcattgtgtttgaagattttgtcaggtccgccgtcctcggtcagcttttacgcctccatctgtcttctgctcgttggccatgcgttgcatgggcaccgactggcccttctccgccgtttgggccccgcttggctaggccgagtccgcgaacagttggccgactgccgagccatggacgaggcggacaaagcggcacaatagcagcagaaacagggccaaaaaaggcacaaaaacgggacggacatgccgaggacgacgatgggatgagtgcggaattgagacgacaaatgacttaatcggtggagcaacaacagctgttccgaatgaacatgttcgccttccaacttgacgaggcggccgatgtgttcag

SEQ ID NO: 93204 - DNA, 239 bp, Heterodera glycines
  unsure (1)..(239): unsure at all n locations
gatgaattgatcggagaagtgctcaacttaattcacgcagaaagcccggaacagtgaccgtcttgatgcttttaaatgcacttacgagaaaaaaaacaattccgcattttggtctcacttattatgctcattttatcctctcaccaacatatgacactgtccaatgcttcttttttttgcatttataaacggtgagttggatcagaccgggtcnaaaaaaaaaaaaaaaaaaaaaaaaa

SEQ ID NO: 93205 - DNA, 499 bp, Heterodera glycines
ctgtaatcctaactaaatacatcaaatatatttggtcaaaaatgtacgcgacggcgcatttagcgccccaattactcattcgccttttgtcattttgtctttgcgcaacggtggcttctgcctttgtgtacggtagtagaggtggtggcgcatatggtgacggactaagaggatacggtggtgccgtatacggtagcggtggacactacggcgactgggatgaggacggtccctaccgaccgcccgtctaccgtagaccgatgtacaaaccagtgcccggcccgctgtacggctacaataagcgtcccccagtatatggcggtggcagtggcaacaattactactacccggcacccgcaccaaaaccgccaactccgtgcccaccggcggaaaagccaagtacggtagtaccaacatcatcgctagcaccaccatcgacgcaacaaagcacccaaactgcaactcatacgagcacgacggcacaaacatctccgaagac

SEQ ID NO: 93206 - DNA, 540 bp, Heterodera glycines
tgttccctgtgctgttccttctgtcccacttctaagaattcgacctccactcgtgtgatgtacgctttgatgttgttggtcggcactctcacctcctgcgtgatgctctccgaatgggtccaaaaaatgttggccaagggcggatggttctgttcggcgacgggcagtgcgggcattcccgtgtgtgacatggtcacggggtaccaagcagtttaccgcatttgcatgggcatgacctccttcttcctcctgttcatgttgctaatgctcggtgtcaagtcgagtcgtgacggccgtgccccgattcaaaatggcttttggtttttcaaatatttgcttctcggattgctcattttcggctttttctatctgagggacggcggatgggcgactccgatgatgtggattggaatgcttggcgctttcatattcattctcatccaactggttattatcgtcgattttgcgcatggattggccgaaaattgggtgagcacttacgaggagaatgagtcgcgctggtgctttgccggaatgatc

SEQ ID NO: 93207 - DNA, 292 bp, Heterodera glycines
cacaatctttgtactgttggccatatctatctgcaaaaaagatccctggatcaacatcacctatctttgccaccccatcatgaatacctatctctgcttgtgacgatccatggaaagagagtgaagcatgaaacttaagacccactttcttaacaatctcagctactgccaagtagccaaaccattcatatgtccccgcagcttctttctcgacaactccccaaaagataggtaactcagtgacttctacaccaggtagcgttcaagctttaagcccagctgtaatagcttt

SEQ ID NO: 93208 - DNA, 401 bp, Heterodera glycines
ggtctcgtcatcatctttctccctgcctactgccctttctttaacccgatcgaattcttgtttggcatgatcaaggatcgcatgaagcgccaactcagcggcactcagatgaccaacaagaacctcctcaagcacgttgccaccgtcatggaccccttccgcaagtacgacttccggccgctgtttacgaaatgcgggtacggcattccaggggcatttgaccctggttgtggcttccccgattcgctgctcgaaaaacatgccgagaccatggtggcgagggatgatgatggtacggatagtcaaggcgagggcgtcgatttcgaggtggaggagtaggtgcatgtaattgtgtacacgggcatacgtttctttgcacatactcgatttgtagattgaaa

SEQ ID NO: 93209 - DNA, 588 bp, Heterodera glycines
tacttgaacgccggcgcgggcgtcgcacacatgcccaaggttggccagccgcagctcttggacacgtatgccgagcaccggttctggcgattcatgctgacggcgcccatggccacgcaccagtcgctcaaggtcgagtacatggtggatgggtgcgggtcggcgacattcaatgtgccgagcaagaatgagcagttcaagtgggcctttatgacctgcaacggcttctcgtccgacgtcaaaccccgtgtccaagctcaacactcgggcattgaccccatgtggaccgacattttgcgtgagcacgcgcaaaaggaattccacggaatggtggtcggtggcgatacggtttacatggacgacatctggaccgtgcccgccgtcaaggaatggctcgacatgcggggcgacaaggcgaccaaagtgtcggccccctggacggccaagatgaactcacagacccacaagttctactttgaccgctacatggcgcatttcacgctcaacgggtttgcgcaaggattggcggcgatgccgtacttgtgcgtgtgggatgaccacgacatctttgacggtttccgctcgtac

SEQ ID NO: 93210 - DNA, 409 bp, Heterodera glycines
gcgccgccgccgctgccgcgacaccgccgtcgtttcaacgacgacattccgcagcagaaactgttcagcgattttggccataccgcggccgccttcgttcgtcgccgagtgcagcagcaaaaaatggtggtggagacgcaggaacagctgaatattgaccaccatccatccgcgtttcaccgtgtcggctcggccactgttgcgccacaaccgcccgctgctgtggtggagactaacgtcgttgccggaacgatgccgacagctcatatgaatcagcacaaccaacttggcacgggcactgcggcacaacagcaccagtacattttggccatgctccaacaggtgatgatttttctatggttattaactaaatttacttttgtttatttgttattttttatttttggaa

SEQ ID NO: 93211 - DNA, 552 bp, Heterodera glycines
ccaagtttgagatggccgttttgactgtctgataatcgacgcgtgcggcgccaaaagcccccctccgggccaaaaataccctttaatttgtccctttgagggcttcgtcaatcccgaaacgattgtggacaaaatgtacaaaatgcttcgagcggacggaactctgatcatcaacactttcgttgtgccaaacggcgaaaatgaatccaaagtttccgaagtgcggcaatttctgttggaattgtttagacaccattttggggggcactgttattacatcggacttcattttagtaataagcttttggtctgtaatttggcactgtcctccgccgaaccgatgacggagaaactcttcgaccatcggatgaacaaattgcccaaatggcttcagggggaattaaggacagaaatgagcattgaaaatgaagtgtggagaaggcccaagtccgaaatttgagttcgaatttattttttcgagattcaattccataaatttcttctcgtgtctttaatatccaatctttttgttgtaaaaaatatacaaatccg

SEQ ID NO: 93212 - DNA, 349 bp, Heterodera glycines
cgaagctgcgtgcgagaatgaaccaaagcatgagtgggcaaagctttttgtcccgctcgtcctccctgcaccactccgtccaacagcagcttaacagtgcccaaaatgccaatgccatcgccactcgtccgtccgcttcttcttcctcctcaaatttcacctccatttgggaagaacggagttcgccagcccaatgtcttcaaacaccgggaaacgagaaaagaataaaaaagaaacgaaaggacaaaacgacggcacttcggctgggggcgaagaaatcggcggacaacgatgcccgaggggacggagaagggatgggcgtggcggaaagcatcgtcctttgctgaga

SEQ ID NO: 93213 - DNA, 257 bp, Heterodera glycines
gttttacgaaccgcccctccaaccgccttcacaatttctttcaacgaatcttcgcccgcgactgttttgccgcccccctccgaccctttgtgtgaatctattgatgattcacgtgaattttccctgcaagaagcggcccgtcaggcacccaccgtttttcttcttatggcaacgcgtcggagtgtgccgccacgtccaatgccggagaaaggcgagcggataggtgccaccgactcggggtcggaagccggcgaccc

SEQ ID NO: 93214 - DNA, 567 bp, Heterodera glycines
gcagcctctgcgtaaagcgtagcgcctctgccacttgcaccaccgacccaacactttaccaaaccaagcatgacctcctactccgacaagggccccaagccggacgttggcaagtaccacggctttgaccacgttaccctgtgggtcggcaacgcaaagcaggctgccatgtggtacaccttgaccatgggcttcgaacccattgcctaccgcggcctcgaaacgggccaccgcgacgttgtctcacacgttgtccgccaagacaagatcaccctggtcctgcagtcgccactcaacccgaacggcgtcaaggcaatgaacgagcacatggcgcaccacggcgacggcgtcaaggacattgccttcgacgtggacgatgtgcgcgccatcttcaaggcggccgttgcccgcggcgccaaggtggtgcgcgagccctgggaggagacggacgccaacggcactgtggtcatggccaccatccaggcctacaacgataccgagcacacgtttgtcgagcgcaagaactacaaggggagtgttttttgccgcattttcgctgcccccgca

SEQ ID NO: 93215 - DNA, 243 bp, Heterodera glycines
gcatgtgcttaaaaggagccgccgaaggaagcgatcaccgattccaacgaagagtcacccaaaaaagagaccaagtccactgattgatattgagacaaattaatactcattcatattggaagacgattaatgtttagaccaaattattttggagttgattgatattgggacagtttttcattgttggccaattggtgttggaacaattctttgtaatgggtctaatccatgttaaatattgac

SEQ ID NO: 93216 - DNA, 226 bp, Heterodera glycines
gtgccgaacaattcttcaatgggtcggtccttaccatcgcgccttcttttgtgacgacgactccatcagattgccttacaaaagcagcaccgttcccgattggctgcttctggtctatgctttgggtgtgccaccattcgttttcgcttttggagagttcatttgtttgtccaaaccgcccgctttggccattcgtcaacgtctaaatgactttgagtttggggag

SEQ ID NO: 93217 - DNA, 368 bp, Heterodera glycines
gaactagtctcgagttttttttttttttttttttttttttttttgccattaattattattattattcaaattgaaatttgagtgattgcaaatggaaatattaattacattgagatgggatggacaataaataatttaaaaataatttaaagtcattcagtcaatcgaatggtcaatttggctttggttgttctccttctcctccgcgtctgtttttatgccgcgggcgcggcggaagggcggtctttttaaggaacggtcatttggtgcgcgagacggacgagggcgtccacatttcgcgctttgcgcgcggacgacgcgagtttgttggcgcggtcggcgttacggtactgattggtgccaaggtc

SEQ ID NO: 93218 - DNA, 488 bp, Heterodera glycines
gcttaagaacaaaatacagtaaaatgaataatgaaaatgtcaataatgccatggttaatgacacccgcgtaaatgtaaatgacaactgtcagaatccaaatgatacccgtgtccatgtcaatgacactcggtcggtttttgcctcaattaacccgttgaagcgtcgcgttagcttccgcgacattccgaacattcgtgagtttgagcagccttcttcttcctctactgcaccttctcctttgccttctttgtttttggacacaactcataccatttttaaatcgttgatggtggcgcaaacaccgaccaaactgctgaaggttgatgaggtggccaagtatgggtcgctggacgaacaactggacgtaactcatgtcatacaacacactccgtttcataatcggcaccaaagcccgttgctgcttgatgacctgacgaagcaacatgcctcatcacttttgtttggctctcaggataattacggactt

SEQ ID NO: 93219 - DNA, 378 bp, Heterodera glycines
cccgggctgcggttcccagacgagggggacgacccggcgacggacttccgtggcatgggtatgctcgtcctccaccaattggtattcttcgcccagttcgatttggacaattgtcagcgcgtcctttcgttgtccaaccacccgatcattggatttccatttgcaatttgtggcattaccatcacagcgttgtgcaaggaattacttttcgacgatttgctcaaaaaccatttttacaatgccttggaccaaccgtccctaagggaggatttgtgctttcaagtctactgccgcgcgttttctcttttctccgacttttgggtgttcctgcgggcgtcatccgtcatggaattcaatgtggccaaacaacgttttgat

SEQ ID NO: 93220 - DNA, 484 bp, Heterodera glycines
gtccatttaagatttttcttttgattgacatgtcgccttctctctatctgtccccaataattgaagtcattcgttgccaaatctgcgcccattcccaattcgttcacagggatgctcaattggtccctcgtgaccaattgttggcgcatatcgctgcgcacattaactacggaccatcttctgagaagaatgaacgtcttaaacaaatatgccaacgggagtacgaacattgcatttgcattgactttgctgaacgacttggccatttgtctggcgaggacggccatcggcaccatgaacaacagcaggcgaacatgacgttccctgctgcccctcctcctcctcactttgcgtcttccatccccaatctccgttctctctcgtccaattcgtcgtcctgtctccctccgtcttcctttgccgatgctttgccttctctcgcctcgtcttcgtcgtcttccaaatctgtgtcctcttcatccat

SEQ ID NO: 93221 - DNA, 502 bp, Heterodera glycines
gtttgtaatggtgaaagtagcagttccgacgacgaatattacaacaatttttccaaatacaaagcgaaggcagcattggcattacgaagaaatgattgcaaaagtggcaaagagattactaaaaatgggaaaagcacaacgaagaaagtctcttcagaaccatcggatgttgaggttttcacatcttgtccattatctgaacaattaatttcgcgggctgaagtcgatcctgagatttgtgtagttcaatttgcggacacttccgtaaactctgttgttgatcatttagtgactgagacttactcaacgacggaatgcgcctcacctttgcgaaccaatccaacgtttttgaccaatgtttgcagaataaacatttcatccaaaggacaacaaaagattttcttctgtgatttgaatgagcctttgctcaatgtaatcaatgaattcgctgaaaggacgaatgtcgacccgaaacgcgtgaatttgtacacaaaacaataca

SEQ ID NO: 93222 - DNA, 552 bp, Heterodera glycines
aaagttcagaatggaaggcattgccaacgcaacagaactgatccaaagattgaattccatggaagagggcgacgaaatgaaagcggaaattgcgaaactgctccaatcccatgaccaactcacaaaggcacgagcgaaacgggaggcattcggcgaatttaccgaagcagaaattggattcaagccgacttatcggacattggtccgttctggtgcctacgactcactccgtgtcccttcctggtgcgaccgaattctgtgcgaaggtgacatggacgcacttcgcatcacaaaatactcgtcctgtccttccataactttgtctgaccattttcccgtgtcggctcaatttgaattgcactttcaaaaagaaaagcggcaccagctaagcgaaacaatcttcgccttggctcatccgagttgagcacattccaacttgggaggaattcataccgctcgtgtgccgaattgcgattccaaatgacatctgggcagatttgtgttcttatcgtgattggatcggcatttaccacaactcgttgaattcgatta

SEQ ID NO: 93223 - DNA, 184 bp, Heterodera glycines
gcgcaagccgatcgacagggacgaggtgcccatccacccggcgcccttccaattggccatcggcactccgctgcaccgagttcacacgcttctcgcgatgctcggcctcaaccacgcttatgccaccaacagaggccggcgcgtttgctattttgcaaggcgcgagcgccgagccgccctcgct

SEQ ID NO: 93224 - DNA, 249 bp, Heterodera glycines
aggattcttagggctatcgaataatactaataatgtttaatttggatgcttcttgaaaaagttatggtgcactaaatttgcaaaaaaaaaaaattatggtcgtgtgagctgcaatagagccatagttttatggcaatgaaagcattcttttccttttcacagttacattgatcattccgtcatcgcttttcttcgttcaaatcaccaaattttcgacaaaagagacaccaatttatatttgtggatttt

SEQ ID NO: 93225 - DNA, 578 bp, Heterodera glycines
atgtgacttcgtccgctgatttactactcaaaatggaccaaaatcgtcaacagaatcttttcaaaatgcccacgctgcttccaccgaatttgaatcagggcgcactgctcggcctgtcacagggattgctcctccaacagtccgcggtcggagcctcaccactcggtcactctgcgctgaatctctctgtgcccagtgcaattcattctgttttgccaacgactccaccgaatttgccaattatttcgccttcttgctcaattgtttcaaggatgacgccggcaaatccttcatatcccatcgacaaatacaaccggggaccggacgggtgcaatttgttcatctaccatttgccacaagactttgccgacacagatttatattcactttttgctcattttggacaaattctctcgggcaaagtgttcgtcgacaaacaaaccaatttgagcaaatgcttcggctttggtaaatagtccgaagaatcttccgctcaaaatgcaatttctgcaaataatggttccaaattggccccccacggctggaaagtcagggtcaacaaatcggaatccgatccg

SEQ ID NO: 93226 - DNA, 355 bp, Heterodera glycines
atgctaagaatgtggccaacctttgtcttgtcgctgacacttatttcgctgcactgctcaaaaaggcctgcaccaaattcatctcttccaaccacaaatctgtgctgcgaagtcccgaatggaaggagttgaagacgcaccggggatcactcgcgaacgaactgcttgagtctgttctggatcatgcggacggagagagcattttggagatgggaagttcattcgatggtggcaattcggacgcgattgtttcaagcagttcgtttgggaacaacaatttcggctatctcttcccgcgaaacaactcttccacggccatttcggctaacctctcctctctgcctgtgtccacctc

SEQ ID NO: 93227 - DNA, 346 bp, Heterodera glycines
gtttgagagctaaaacatttaaatatgttccgacaacatttcttattgaccacaatgcttttatgtgcacttttgtacccgattattattggagttggcccgccagcatatttggccatttgccaatggaaggattgtgtggatgaaaagccggcccccggtggctctcacacgatgatttgtttgcccgcgactcgcccggcccaatgtccagaagaagcttggaaccaactgaccgaattgaacgagctggagccttgttaaatttccaatttagcatgccatggaaaaatcgcttttttgaaaatgattaatgatatattccgccatttcaacgaataaactc

SEQ ID NO: 93228 - DNA, 502 bp, Heterodera glycines
ggagcaattcaccgcctattcccttctcatggccggaaggcatctcgggtcacgacggtacagcgaatttctgcagctgaacaaattgctcaaggaagaattccccgactttccgtttccgaaattgccacggaaatggccatttcgtcactcggagcagcagttggacagcagaagacgcatgttggagcagtacttggagaaagtgtgcgcagggatagtgattgccgagagtgacactgtgcaggagtttctgatggaggattccggcggtgctttgtcagctccgttcgtcgacatttcattgcgcgtcattgtctgtggcaacactcttgcgttgaacatcaaaaggcacagcgacacgcgcgaagtgttcggcagagtgtgcgaggagctgaaactggggactgacgcggggcatttttgcacattgtttgaagtgatcgaggattcattctcacgtaaattgcaccaccacgagagaccgcaaatacttatagta

SEQ ID NO: 93229 - DNA, 477 bp, Heterodera glycines
attcgtccgtttttgctttttcttccatttttgcttttttctccttccgctgcgttcgttgatgaccccaatttgtgccttcgtctcacatcggcggcccatgacgaaatccaagagttgcccggactcagctttcggccaaacttcaaacattactcgggctttttgaaaacaacgtcaaaaaatctattccattattggtttgtgacctcggagaataagccttgttttgacccattgcttttttggttcaatgggggccccggctgttcatcattgggcggtctgctggacgaattgggcccatatttgatcaacgccgacgggaaaacattacgcaaaagcccatacccttggaacaaaaatgcctccattgtttacatcgagtcgcccgctggcgtcggcttttcccactcagtcgacggattgcctgccccgtcaagcgatgactcagcggctgcagaaaattacgaagcg

SEQ ID NO: 93230 - DNA, 119 bp, Heterodera glycines
aattggcgtcctccgtggggcggactcagtccgactcgtcgaagagttcgctgaggacggtcaattcttcactgctgtccaacagggcggagggaattctcgggaaattaatcggagga

SEQ ID NO: 93231 - DNA, 245 bp, Heterodera glycines
tcaaatctgccaaaatcctacaaaaatgtcttctccttcttcggccgcctctctactcgccatcgtcacaattttctgtttgctgtgcaaatgttgcgtttcggcaccgcatgagtgtgcccacagcctcggcttcgtccgtgccatgttcgtcattgccgcctccgcttcttcccatgtcagcaacaacagcgaatggcaggcattgagtgcccagtttggtcagcaaatcagtgaaattgact

SEQ ID NO: 93232 - DNA, 384 bp, Heterodera glycines
taaaatattcggaggaacggccgggcaattgaaggatttgggaaggaagccaaaggaagacggtggcgagaaaatgaagcaggaaaaagggacgactgaacggacaaatttaaacggaagcaaaacgaagggggcgaaaatggcggacgattttttgaaagtgatgggggacagagacgcggagatgcgattcacttacctaccgctgaaggataaatacgatggtacttttgcccgcgagttgcaactcggggagtttgtcgttttggaggatgattgccccagaacagaaccttcgcttgcccatcagatcgatgtcttttgcgatttttgaatgaaaacattcacctaagtaatgctcgacgaattccgatcattttctga

SEQ ID NO: 93233 - DNA, 248 bp, Heterodera glycines
caccccccagtgaagaaagaggcaatggaaaacgaaatgaggaaatttatgatgaggtggataaaagaaaacgatgctttttcggctttggtctttaattttaatgagctaattaattaagcaatgctttggaattatactataaaatcatctaaatatttgtcccttattccttcgctcctcatttactcattcagtgtaattagtccatttggaattgcatacattctgcatgatgggcttttttc

SEQ ID NO: 93234 - DNA, 397 bp, Heterodera glycines
gcccgggaatttgtcgactttgtgctcaacgagctgaacgtgacgcgactgttggcccagctgaacggggggttttttggcatggacgaacacttttggcagtcgttgagcggcagcgaatcgctggacgcgcccgggggctttccgcacgaatgttttgtgaagggaaatgagtccttcagcaagtacaagtacatcaccagatttgccaaatggtccgattcgtcccctggcaaatgtctgagtgttttttggcgccactccgtctgtgtgttcggcttggaggatttgctgggccccggcagcgaaatggaccgacttccccatctgttcgtgaacaaactcatgccgggcttcgacttctacgctgttctttgctggcaccagcgaatgcggc

SEQ ID NO: 93235 - DNA, 426 bp, Heterodera glycines
  unsure (1)..(426): unsure at all n locations
tggcaattttgatcattggcatattgctgaggacgacgaatgtgccgatgctccatcgcctacagcccgtaaatattgtgaacagctgcagagaaaagccaaactgcaaagagcctccgccgcacaacagcatgagggacacacggagcatcacgcaaactttggcatcgcaatcggatgcccaagtgaattggccatttcactgatcgcattggcaccggcattttttctgcgccaatttcaatgagaagcaaacagaaaaatggtggtgacggaatgtgctgagaaagcgcgggaaaaacaaacaatgactaatttacctaattatggtgttaattaccgactaccaattgttgcctattaccctatcaattaattaatggtaattgacagaaaaaactaccacatagggggnaagaaattaaa

SEQ ID NO: 93236 - DNA, 361 bp, Heterodera glycines
cgtcggatagaccaaagggagtctttcggtttaaaatgcgcgaaatgtgagtgtgcaattgaggagccaatggtctctcaggcttgtttgcaccgcttttgcgctttttgtgcccggggtgccaattgttgtccattttgtggtgtcagcacgcatttcaaaatcgacttaaattttgctttgatcatttctaaagtgaaggctcggggcaaatttttcgtgaaacggagaatcgtctatgttttgtatggcgatggtgctaacatttcgtcttttggcaacggacgactttcgcggatgagcgcaacccaagaaaaggagcgggaacggacagcccatccgagcagtactcgacttgttc

SEQ ID NO: 93237 - DNA, 237 bp, Heterodera glycines
ctgctcttataaccgccgtttcgaacctggcccatcagcaccgccaaaccatcgcgacgcaagcccagacaatcgccagccaacagcagatgatcatggaaaaggaccgttacatcgcgcaatcttttacttggaaggttatatccgccgatttggtgttccattgcccgcgccggcagaacagcagcaggacggcggcggccaatgagagagagaggcctctgacagagtccgact

SEQ ID NO: 93238 - DNA, 410 bp, Heterodera glycines
acgttatgcaatgcacgaagttgggatgaccatcagcggacaaaggtcgcaagacgacgacaaaactctcagtcagtgcaaattcgaagttggcgactttatcgatgttgtgattagtcctcctgaagcaggcggacgcggaaacggcgggccaatgggcggttcctacggagggctgggccgtcgaatgggcggcggtgaccgcggcatgggcatggagcgagaacgcgtctcttcagccgtttgttccggtggtggacgttttagcggcggatttatgcgctgagggacaattgaaaatgatcttttgcaattggatttgtcattgttgagaagcaagcacaaaacgctgttttcatgttcttgaatatctcacgccttctctattatttatgaaaataatgaatttc

SEQ ID NO: 93239 - DNA, 235 bp, Heterodera glycines
ggtgcaccaatatttgagcaaattgcgccaaaaatgctagtgctcgcctaattctaagcctctgccacgcgatcagcatcaaataagcatcatcgacaccgagggcaagcaccaaaaagggcgtaacacaaagcagtgacccttttaattgggaaaatttaaaaaaaaacgacaagattaaaattaccgaaacgaaagccgagccaaaacattccgccaagggctgtgcctgttt

SEQ ID NO: 93240 - DNA, 323 bp, Heterodera glycines
gattccattaacaacaacaatggcactaataatgcctatgctcacaatctttcggggaatgaaccatgtcattctgataaggacaaagcgatgtcgagcagtatgtctcatcctttgactttgtccgaatttgccaggactgtcaataaaaacagaagtgcatatgcacaatgccaggacgaaagtgagccaaaacagacaaaaaaccgacgcggctcattgtttcaacggattgttcaaactgttcggtcgggggtcgactcacaaggaaaagggcgacggcttctgcagggagacggcaggtgccgcacgaacacagcaac

SEQ ID NO: 93241 - DNA, 591 bp, Heterodera glycines
cgaccgggacggatgcgatgttttggtcgccacccccggccgactagaggaatttctcctgaagaatcggatcgaattggattgtctgcagtttttggtgatcgacgagatggacaaattcttttcggactttgaatttctgcgattgtttcacgaattgaacgaaaacaatagacaatgcaaaagcaccgtttggccctttcctacttttttgttcagtgccacttccgattccctcgacggcgacgttccgttccttcgccccgatttcttccgtgtcatcgctgggccggtcaaccaaagtgttgcgcacgtgcgacaacgcatcatttcgactaacattttcatgcgaatccatccacttgagcttatcttgcaaagagaagaaataaacggtgcctgcagaaaaacggtcatttttgtgaacgaatgtcgccgctgtgatcgacttgccattttgctctcctattacggctacaaggagattagcattaacggaaaccgctcacttgggcaacggacgaaggctatggcacaattcgatgacggcacttacgatattttggtgcgcacagatgtgatctctcgtgg

SEQ ID NO: 93242 - DNA, 537 bp, Heterodera glycines
ccaacggcaaaatcggcggtgccaacggtcggcgaactgttcagggcacagcttggccatttctacgctcaaattggtgacattaagtttgaagatccgccgtcttcggtcaatttttacgcctccatctgtctgctgctcgtcggccatgttttacaagggcaccggccgacccttctccgccgggtgggccccgcttggctgggccgagtccgcgaacagttggccgactggcgagctatggacgaggcggacaaagcggcacaacagcagaaacaaagccataaaaatccgcaaaaacgggatgaacacgtcgatgacgacgatggaatgagtgcggaattgagacgacgaatggctcaatcggtggagcaacaacagctgttccgaatgaacatgtttaccttccaacttgacgaggcggaacgacgtgttcaggaggcgttggatggaagcagcgaggaataaaacaacaaatatttctaaaaatgtattttgctttatcagagcaataacaaaatttgtgcataaaccgag

SEQ ID NO: 93243 - DNA, 463 bp, Heterodera glycines
gtcttcgcaaaacatccgatttcgttggacaattcgaccgacattttttactttgaaattactgtcctacaaaagattggagattccatcttaggattcgccgtaaaaccggcacgaacatggattgaatttacttcttctccaatacgcacttatgcatatgaaaacgatggctgtttaaaggctacttttgtaaatggaacttttacttttccacagagaataaatgccaaatattcctacggtgtttgtgatactgtaggaattggcgttatttgtgccaatcgacagatcgttttcaccaaaaatggacaacgtttggattcttccgattttattgttgctccatcgtttgttggccaattgtttccattcgtttctttggttcactccggtgccgaaattgaggcgaattttgggcctaattttcaattcgatttgaccactctttaaataaatattt

SEQ ID NO: 93244 - DNA, 567 bp, Heterodera glycines
gtttgagcaaatttcaaattatgcccgtcgtttttgactcggaatcttcagatgaagaaggcattgatccttttgatgccgcagtcaaatggatgatgcagaatgccaaaaatttatctgctaaggaatttactcaaattgatcagggattggctgacaaaagtgcccggcaacaaaacagctgcgaaaattcgccgaaacggcatggcacaaatggcaccgacaaaacgtctccggctccatggttcgaagcagcgttcaaacgtccttcttggtcagcgattgaagaacaagccgaggcagaagctcttgcggacggcgtccaattgtggtctgatgacctcgatctttggcgcgaactggatctgttgttcgccgaaacggagaaggaggagccggaggaggctgacgacaacattttgcacaaaagcgaggcaaagtgactttggccatcgatgttacagtgaaagaagcaaaaacggaggacaaatcataaacaattaaggagattgaagaaagaaaaactctacctattttgaagtttcaaataaaggttttttctttttc

SEQ ID NO: 93245 - DNA, 216 bp, Heterodera glycines
atttgaaataaagagcaattaaataacatttaataaaatattaaaataaataaaaataaatgcaacgtccaaattgttaaatgattcgagtgagaaaaagacacgattcaagaacctaatacatgcttaaacaaaaaaccactttaggataactttgtgaattgttttataaaatacaaaaaaccaaaaaatttaagaattaaattaagcccaata

SEQ ID NO: 93246 - DNA, 578 bp, Heterodera glycines
catgtcttcctctgcaatgcaaatcgatcccaacccgcgcgccttcctggcctctgcccgccaatcggcccaggcggccggccacgctcaagtcgtggacgcgatcaatcggtttgacgagctgtacgaccgcaagctgtggcaccagctctcggtcgaaatggacaagttcattgccctccagcaggcccaggaatacttgaccaatttttactttcagtttgtgcgcgactttgagtctaagctcaacaagctgtcgctcgttgctggtgttggccaggccgtcgccaagcatttgcccgacaatacctcgcgcatcacctacctgctcgccctcgccgaccgcgtgaaaccaacgccacccaaatcgggcgaagagcacctgcacgtcctcgacatggaatccacgtcggcgcacctgcttgccaccacgcaagctgcctactaccagctgctcgacggccagtatgacacggtcctggcacacatctcggcctcggaaaagcgcctcgacgctcttgatggcgtcgacacgcgcgtgtcatcggctttctaccgcgtggccgccgactactaca

SEQ ID NO: 93247 - DNA, 107 bp, Heterodera glycines
gtcacttcggcaacatcttcacatattttgaatgttatttagcctatctcaatttaggaagcagccatttttaaggaaaacaacgttttttggccaataaatttttt

SEQ ID NO: 93248 - DNA, 569 bp, Heterodera glycines
gtgctaatgatgctgatcaaatttgctttgccgctcctctttgtgcttctccatcccttcgtttgttcggctgccgaggaaaatgccggcgctgccgaaatccctcaacaattttatggcgccttcaaattggaccacagcgacaattgggacgattatttgattgccaaagggtacagtgaccctgagatgcgcaagaaagtggagctgcccaggttcacacgcattttgtaccgtttcccgaacggcacttatcggatgatggtcggcacggggctcgagggcagcaaatgggtgaaggggtccaagaagaacgccgattggcagttcaagcctaacgagccgttcattggcaattattgggacggctccaaacacgaaatcactttcacgtacgacccgaaagagagtcggctgacggaacggcacgtcaaagtggacggcaccggcacgccggaggagttcaactacaaaattgaccaggacaacaacttggaattttacgtgttcttcaaagatgtgaagcttgttcaccattaccatcgtactgattaacaaacagcagcaga

SEQ ID NO: 93249 - DNA, 605 bp, Heterodera glycines
tgagttccatttttaggtcagaaaatgaattcccaattgctttgcatctttctgctggtcatttgcaccgtttccattggcacactgacacaagcaaagccaattccggaagaagctgcggcaaccgaaaccaaagcggacgaaggcaaaaaagaggagccgaaaaaggaagaagccgaagcgaaaaaggaagaagcgacgaaggaggagccgaaaaaggaagaaacaaagaaaggagagggcaaaacggaagaagctaagaaagatgaagccaaaaaggaggagccgaaaacgaagaggccaaaaaggaagaagcaaagcccagtgccccggccgtcttaactgaagctgccgataatgtgaacaaagcggtcgatgacttaagcgttaaacaggcaaaagcattgaaaaacgcggccgaagcaacggcagagaaaacgccggaagaacaggaaaaagcattgaaagaagtggcagaaaaaggaggaaacgaacagctgaagacggctgtcaacaaaattttggaggcaaaagcgaaaaacgacgcggaattggaaagcgaagtgaaaacgaaaacggcaacactttctgaggacagcaaaaag

SEQ ID NO: 93250 - DNA, 338 bp, Heterodera glycines
acaataatgaaccatgaccagctgcagttggtgaacagggaaggctgggccaagctcgctttctacctcgtctcattcttcatctacctgtacggcatgatctacacaatggtgaccacttaactgtgaagagccggacgattttcgcgcccttctcaaacaattttcatttattgcccctaaaaatgtgccagattaataattaatcacaaaacatgttttgttttcgtgtgccagtattttcacctaatatgcatttttttcattaacttttgctgtaatatgacaaaatattggcattaaaaaatttttgattaaaaaaaaaaaaaaaaaaaaaa

SEQ ID NO: 93251 - DNA, 549 bp, Heterodera glycines
ttttttcagcttcattaatttttcttcataagaatatttaaattatatttttgatcattaataggcagagaataaaatagttattttcatatttaaaattttttccaaagaattctaaaaaataaattctataaaaatcatttaatataataattttttgttgttttatttggcttttccacaagtatccgatcaatcttatctgaaaatagatcaatgtgtcctgattattcttatttgtcctgaaacatagatattcaaactcaaaaaacagaaaagccttaattttcaaattgctttgggtttacctttaatatttttccccatcttttctttgtagtcacatttggagtttatttttcacgaatggtcctcctcctcgtgcctggggcattataattttttttcactcattatcggcctctccttcctctgatattgtcacctcattttcctcattaaattccggaagtccttcttcttctgctcttcatgtctcttgtattaattgtggctactaattccttttccatttttgcaatgtccgta

SEQ ID NO: 93252 - DNA, 631 bp, Heterodera glycines
catgttttcatattctccactaagtgctcctttcttcagtaaatcgtttagcagcccttctacaaatgaacaacgcaaaatcgacctcaaatttacggatttatgcgaatattttttcatatcgcatccattttctggacgaaaagaaggaagcgaacataggagggtcatgtattttcatcctgcaaaggaaagcatttctaagcaaattgaatttactggaatgtctgaggctgtcgttaattttaccgatgggttcagcaagtcagactgtgaaagcaacatttcggctcaacacgattttgattatcgatacgtaacttccacaaataccaaagaagttgttttggttgtggagggtggagagtttcttatcggtgcttcgttcaacaaaaagaattgtacggcgaaagattactttttgcatttgcccaccataaattccctgcttttcaatgcttacaatgcctataaacttcattatggatatttttcatatcgtttccgtgcagaatcgaatgaatttaaagaaatattggacagattttttactccttttttgcatttgaatcgagttaataagattccccttgtcgatctcttcaatggaggggatttcctttccattggg

SEQ ID NO: 93253 - DNA, 492 bp, Heterodera glycines
tggggctgtgaaattgccaaaattgagaaaatgatggacccaaagaatgacttttacgacgaaaacgcggacgtggtgactttcaaagcggaagtcagcgcggaagcgccgaagggaatgccctctgttcaaagtgggcacactttggtggtcaacggaaaaacgatttgcgtgaacaaatacattttggctgcccattccgttttcttccgcaaattgttttttggaaagaacgcagagaaaaccccgcgaattcagttggaagggaatgcgaaggccgtgccgaatttcgagcgactgatcgccacgatggcaccaatgaatttggagttggatgatggctgtgtggagagtgtccttctgttggcccaccgttttcagctggactccgttttgaatcgctgcgccgactttttgctgaaaaagagcaaaaagacggccatttgcaaattccgtttggcccaccaatgcgaaatggttgccatgaagaaa

SEQ ID NO: 93254 - DNA, 247 bp, Heterodera glycines
gactcaccgcggagtgatggacgcaattgacatgcgatcggttcgtcgctgttatggggggtccgagcccctgtgtgccccatgccgatccttataattcttccgtgaccaccattttgccaacaatttcctgacacagcatgaggcgaacacagatgatgccgatggactgatccccgacttggacgataatggtgtgtaaatactacgtcccgggctgttcccctacacattgcctggcccctac

SEQ ID NO: 93255 - DNA, 615 bp, Heterodera glycines
gtttgagaaaatatttttttttaaatgtgctacaaaaatgttttattatttattgtaactacagtagcaatttttgagacgtcatttggagctgaaaacaatgcaacacaaccacaaaaaaagcaggaattgacttttgaaaagacgatggaggaaatgatcatctcggcaaaaacgggcaaatttgtgcggcaatgttcttgcgatgaacaggagccatgtctgaaggacattttgacggattttcaagcctgtttcgagacatgctgggaacagaaaaactcgggaaaaattgcccctaagccagaggtgttaaagcaatgctttgagagccgtttgggcctggtcaaccagttcatctcgtgcattaacactaccgcaaaaacctgtttcccgaccaaatcaggcccgcaaattgagtacgtgtctgtacaacgaattgttgccgctggggaacaacgcatggcggcacaagcaagcggctttgagcgcgcaatgggcccagcaaataaaccggtggttcaggctgccgaagaactcgccagctgtatgaaggattgtttcttagacaaggacgctggccaaaaatgtttcggcaaatctgggtgtcaacca

SEQ ID NO: 93256 - DNA, 620 bp, Heterodera glycines
tggacaaagagttgctgaagacagttcgcgagtcccccatccaaggctttcaatgggccaccagagaagggcccctctgtgaagaaccgattcgcaatgtcaagttcaaaatgttggatgctcagatagccaaggagccgctctacagaggcgggggacaaattatcccaacttcccgccgttgcgcatattccgcctttttgatggcaacgcctcgtctgatggagccgtattatttcgtggaagtgatcgcccccgccgattgtgtgacagccatttacactgtgctgtcaaaacgacgtggtcacgtcacgaccgatgcgccgatccccggctcaccgctgtacacaatcaaagcgttcattccggtgatcgattcgttcggtttcgagacggacttgcggacgcacacccaaggacaggcattttgcatgtgtgtgttcagccattggcagattgtgcccggtgatccgctcgacaaaagcattgccattcgtccactcgaattgcaaccggccccccatttggcacgcgagtttatgatcaaaacaaggcgaagaaagggcctctccgaggacgtctctgtgaaccaattcttcgatgacccaatgttggtcgaa

SEQ ID NO: 93257 - DNA, 623 bp, Heterodera glycines
ggaagaaatatgtgttccaaaaatgattcatcagtgcgcatcgacttgaagcggtgtccatgcattcactcattggctcagttggtggatgtgacattgcaatcgctgctttaccaacgacaaatgatccccgagccggcctcaacacttttgcacggctgcacaccggtggcggaccagttcagggacacctaccaaaaagtccaacaaattctgcgcggcactttccgctccgccaatggggacggacgcattcgcgaatttgtgattttggttggtgcgacgccgttttcgcccaaggaaatctaccgggtgcgcgtgccgccgacaatttgccgaccatcggctgcggatcagcagaaaagtgccgaaaaagcggtgccgacatcgccggagagtggccggcggatgatggcaaaagcgttggccaacgaagccgatgatgatgacaatgattacaggcacaaaaatgggagagaggaggacggtgccgaaaatggtggtggcagaggaggcggtactgacttggccagcgcaaaatgtcgctgcggcggcgcgacggtgtgcgacgcgttgaacgcaaaagagaggcgattggttttttcggcggtggcactcagcaa

SEQ ID NO: 93258 - DNA, 600 bp, Heterodera glycines
ttcctccaaatttgttttcgtttgaaatggccccggggagtattccgagctgttgcctcacctccgagcaaaaagacgcactgatcgacgcggtgcgacagcgaccggtcatttgggactgttcattggacgcgtaccaagaagtacagaacagacggacagcgtttgtggaggtggcggaactgttgtcagatgagaagagcaaatacacagggcccgaaatgcaagtcgaatggaagaaactgcgcgacattttcaatcggactctgaaaaaagtggtcgcctcggggggctccgacgcggaggtcacttggcgctattggacaaagctccaattcatcgctgaccatgaacgttcgcatataaccaggaccagaaaatggccaaaaaaggaagagctgtcccctccgcccgtatcttctccgtcctcctcctcctcttcttcggtcgcacgggcgcgaaaacgaatgccaaagcatcgccgttggacggaactttggacaattcgccactttcactggtccaacaactgacggaagccgcacaaagtgcacgggaactgatcaaatccgaagacaacgccaaagaatcggcgccacc

SEQ ID NO: 93259 - DNA, 500 bp, Heterodera glycines
atgaaccgacgtgctgcaataaataatccagaagaagcgcgccagcgaatgaccgatgtgaaaagcacaagtcaaattctgcaagaagctatcagaattctccagcagggcattgaaaatgagacacttccaattgtgccgccaaatcaggcgacgatgttggagccattcgccgaccgaactgtcctcctccacacgactctgaacggcgttaagaatttcgcacggttgtcccattgctttggcaaccgaactgtgatggtcgcttggaaaaccctgttgaatgtgttcgagaaatgcgaggaaacgctgggcgaaagtctgtacgaagtcggaccaatggacggcacttcgaagctcaatgaaatacaagttggcttacaaaagccaattggataaaggaaaaggaagaaaagcgaatggaatcagaaaaatacacattttcacattgtccaactgatatgttttttttgtccttttagaatacaaacaatatttga

SEQ ID NO: 93260 - DNA, 355 bp, Heterodera glycines
ctgacctgacccaccattcaccatcattgatcacggatgattttgagaccaaatttggcattttgatcatcattgacctttttttatttatgtttttgtccgttccatgagccagcaattgttgatcatggatttagcccaatgtatgtgactagtatgactgcttgcatttacataaaatttaaagttatgcagctaattatttactctcacttcccccattaatgaaatgatgtaattaaactataccaggcttgatcaacctgctgatttaaattggtatggatttgaaactttgcattaaacgtcactctgacacatttacattttaggaaaacaagaagaaaaaaaaaaa

SEQ ID NO: 93261 - DNA, 575 bp, Heterodera glycines
gttggccgcccgtctgcaagccgaactgtccatcaacgaaacggcgacgatgacgccgcacacaatggatattgacggcaaaaccggtgccaacgatgaggacggcacttttgctggtgaagcagctgaacaaccatcgttggcggcaccaacaacagcgacaaaagacgcagtttctgctgaccatggcactgccatggctgctgctgtgacaaaaccgaaaaagcacgcactgttgcgcaacataatggtggacaaacggttcgaaagtctgttcatggacccggacatgcaaattgacgaggacagcgaccagtacaaacacttggagccgttgatgaaaaagatggaggcgaagaggcaacgaacaacaacaacaacaaacaacagaaggggaaagaatcggaatcggacggacaaatgaccaaccaatacggacaattggccaatcagtacggacaattggcaaccaaatgataatggaataacaaacaatgaccataaattcaaatgttgaagattattatgattttatgactatgaatttgtcaatttaatgcatggatttctcaaaa

SEQ ID NO: 93262 - DNA, 277 bp, Heterodera glycines
accgatggtggaccacagtgacttggcttttggaatgatgttgcgcaaacattccccacgcctttgataccctccgaagatccactgccatttgtttggtactgacccagcgtaccgcaaagcgaacttcacaactttggacactgatcggccactgattgtgcaattttgagccaatgatccccaaactttgctgatcgcgcgccgattggtggagggatagtgacgcggtgttgacctgagcttgacgtgccctcagctgatcgcactacagggc

SEQ ID NO: 93263 - DNA, 402 bp, Heterodera glycines
  unsure (1)..(402): unsure at all n locations
ccttcgttcaacgcttcctgctccgcttcttcattgttcccgcccacgctggtgaccaccaacaccacgggcggcaacaacaacaataaccggccgtccacctcggcctccacatcgcccacttcgtcctgctcgtccccgttggtgttgttgaacaacagcaacaacaccggtggcgctgccgggggatgccttttgtccgccgggggtggcccacttcattaccaacaacaacagcaccagaaccaacagtatcatcaacagcaacattacttcccgccgtccttgatgctcaacgccaacactttcagtggcagcggcggtggaaacaccggcggtggagttggaggaggtggttgtggctgttgtggttgtacaggtggtggtggtggtgttgntggt

SEQ ID NO: 93264 - DNA, 66 bp, Heterodera glycines
taattttaagtataattgtaatattcaaaaatattcttaggagtaaatcgggcactgataaagcat

SEQ ID NO: 93265 - DNA, 161 bp, Heterodera glycines
ctacaaatccatcccgatcagtcaaatgacggcctcatccgcaggatcaggacagcgtggactccgtctgagcaatttttaattagctgtttcatttcaacctttttaccattcagaaatttgtaatagtatattgcttaaataaagtattttttaaatta

SEQ ID NO: 93266 - DNA, 238 bp, Heterodera glycines
cacccaaacttcggtggaagtggattgtccatcgcgaaagaaccgaatgaacaattgttaggttgatcatgacgattgttattcaaagcaatggggacaaaccaactgcgacaacgttttttgtgattgcttagaaagagcaactaaaagatcatcacgctgcgaaacttatgacggaccacgcttgtgtcatcttgtacacacgtatggcgcgtcggactaccgcgcgtccgtcccc

SEQ ID NO: 93267 - DNA, 566 bp, Heterodera glycines
cttccctcccctacggggacagtccgttgttgaaaagccccgccatttcgccaagcaaatcggccgatgacattgcgagtttacaaaagcaattccatttgccaaaccgacgtttggatggcgcatcaatctttggctccctaaaatccgacaaaactccgccagcgaagcaattggatgttacaaagaattcgacagcggatttgaatgcttcctttttggaccaaagcctcacttataagcctttggttctgctgccatccgtaggctttggcgctgcgttgggacttcaccaatcgccaaaacttaaatcaaaccgaagcgattcaatgctgcgatcgattgcatcagaagacgagaaaaatgttaaatccctcgacatttcagtggtatacgaaagcgttcaacagtcgagattaaacgaaatcgatgactcacatttgtcaagtgatattcaaaatcccccctcgcgactcgagtttcagcgtacccccgaaaagtcgacgcgtagcgaaccttcggcgacttcggcagaaattagcactcacaatcagagccctttatcc

SEQ ID NO: 93268 - DNA, 485 bp, Heterodera glycines
ggcactgtcaagtgcaatttttttgctcagcgtcgcaaaaatcagtgatgaagacagtgaggacagtaacgaagctggttctgccgataatcagcttgcaactgaaattgtggcagagttccttgccaaatttggaacgctggctgcatcaacggcagacgtcggtgcatacatggaacgggtgtctctaagtgcgcatgtctttcttaagttggcttttcctatcggctcaatcattgccagctctctgcaaatttcaacaaaaaaacaatcagatgagtacaaagcattggtaaatctgcgcgactcaatgcaaaaaaatcatgaaagcatcatgaaagcaatttcctttgctcaagaaatgattggaatggaaagcaaattggacgactataccaataatgttcgtattccgattaaaaatctttttgtacacatgcgaaaattttgggacccgtcaactgacaaatcgccagaagctgttg

SEQ ID NO: 93269 - DNA, 544 bp, Heterodera glycines
attttgaatttttgactttgtcggggctggatcagctgattgttttgactggccaaattcgcttttttccctttgatcaatttttttgttttcgaaggtggcgcggagattacacaggcgaaaccgttcaatttgtgttcgtttctcttttaattattattttcatttctgttccttgctaatttcagtgccaccgttgtgcaaaatctcaagagattttgggtgaggtccatcgtttccgtgccaattccgtcctgttcaatgcgttcgtcgttcggcgtttggaacaaagagatgccgacggtgccgccgccaacggacactttcaaaaaggagactttcgagttgtttaaccccggctcggctgctcagctgatcagtgaaatcagtgccttaccatccgaagggcgcccccggaatttcttccctcagcagcccactccacagccccaaccaaatccgaccttctttcgagctaccgaaccgacgccttttgttgttgccacgacgccttccttcttccgacccaatcagcaattccagc

SEQ ID NO: 93270 - DNA, 250 bp, Heterodera glycines
  unsure (1)..(250): unsure at all n locations
cggatacggtggaagggacggatatgagcagagcggatacggcggatatgcgcaacgcggatacggtgaaaaggacggatacgagaagagtggatacggtggaaaggatggataccagaacgagtaccatgattattacaaaaacaatcgctgatcaatgacttatttatcttccgatctttgcagtgattaaagtgtatttttaaataattaataaataatctttatctcnaaaaaaaaaaaaaaatat

SEQ ID NO: 93271 - DNA, 412 bp, Heterodera glycines
gacgcaacttatctttcggaccgcaaactccattttgatgaccgattgcattctccacggcgatttggctaacatactaatgggccaatattgcctctttgggaagggatcgatcattcgaccaccctacaaatatttcaacctaagctttgccgatcttcccgtccattgtggagactacatattcattgacaggggctgtggggaccgtgccccctacttctgtgcattggccgccatgggccataacaccatcgatgtacataactggggggtcaaggacagcagctgtattccgactgacaaagtgctaatgcgctagaccgtctcccccacctcttccctcatcggccgcagcccagacctcgtagcggactattggcctaccacgagtcaatctctgatggccgac

SEQ ID NO: 93272 - DNA, 404 bp, Heterodera glycines
  unsure (1)..(404): unsure at all n locations
tcctcggcgaagcgatcatttcgctgcatccgttgacaaatgctctgatcactctgttccttcttcggccttatcgcgaggcgttgaaacgaatccgtccgccgttcgcccagcgaattccgctgctgctctgttccaactcccagcggagtacgacaacggccaaccgaagcgtatacgacagcacaggaccaacgaccatcgacgacttggctatttttggaggagtggccaattgcgacgacactccgccagtttcattgtgacaaggaaacgctatgccttgccagaaatacgaacaaaagtgccatcatttgttcacatcatttcattaatttgtaaatatgtatattcctttcatcgaaaaaaacaagtttattttanaaaaaaaaaaaaaaaaaaaa

SEQ ID NO: 93273 - DNA, 235 bp, Heterodera glycines
cgatgtgtcactcttcgacctcgacaaaactttctgtattacccacggggagagggaggcccgtcatgggccctatggcagtagaaggtaccttggccccatattgtgcacggtcacctaattgatgccgatcaaaggtaatccgtccggcgctgtagccgcttcgccgtggggttcaagcaccattttgaccatcacttgcgaatccatcagactgatgggggccgtggggtta

SEQ ID NO: 93274 - DNA, 625 bp, Heterodera glycines
caagtttgaggttgttattcgtttgtaacgtggttgttgtacttataattaggaaagaagtctcacaataatgcttcagtatgttccgtggagacaaatcacattcacgggccggctgttcgacgttggtgaaggcagagcgaccacattgctattcttgctcaaatgcttaatttatatggctttggacattgtcatttgggttgcattgacatttgtgagctacaaactgttggtttggactttcttcactccctttgaacgaggtttttattgcaatgatcaaagcatcagagagcccttagtccccaacactgtttcaacgtcccttcttatcgcaatcactttgggcacaccgttcttcttcatttttcttgccgatttgatgcgtactacgaggcctcgcaggaggaatataactcaggtcatcaaccgttccactctcgagtatttgaactactgcatcgctttctggctgatgactttggccattgacgcttttaaatgcttgatcggtcgcattcggcccaactttttgtcaatgtgcaaaccacgggaatggagcgaagtgtgcactgtcacccctgatgcctatgtgaagctcgcccattgtaccgttggatgg

SEQ ID NO: 93275 - DNA, 626 bp, Heterodera glycines
cacagacacaccctcatgcacatgctgctgatctgaagcttacgaccccatccaatcttctcttcacttcaacgcagcacaccaccatgccgtctccctccgccgccttttccgtcgaggacctctcgctgcacgtcctggccgtgctcaacgccagcccgacgggtgccctcgagtccaccgccacgctcacctacccgggcacctccaccgtgatcgactctacggcgctccacggcatccttctgtcgctcgaatccaaggaaatggtcaccttcacggccgtcgagcacgaccgctggacgctgaccgccgagggcgccgaaatcgctgcgtcgggatcccacgaggccaaggtgtttgccgccgtgcctgcgggcgacgagggcatttccattgccgagctcagtgccaaggtcggcgacgccgtggcaaagattggccagggtaaggcgttcaagaacaagtggatcggcaaggcaaagagcggaaacttggtcaagttggtcaagagtattcaggataccacgcaggaggagctcaaggtggtgcaggagactgccgggcataaggatcccaaggtgctcgttgagttgaagaaacgcaagttgtgcgacaaggagaag

SEQ ID NO: 93276 - DNA, 259 bp, Heterodera glycines
tttgatggtcccactaaagcatttttctgttgaggatgaaatcaacccgtggatgaagcggggtactgtagtggactaacggaaagcgatggaccaatggacgcaactcaaaaaggccattgagggggaggagagtcgacaatgctgacggctggaccaagggagcggactgccggacatggtcttctcctgcaacagcggccttttctaccgcaatgagctttacctttcccactttcgccgcgctcaacgactcgga

SEQ ID NO: 93277 - DNA, 430 bp, Heterodera glycines
cggcactgggctcaaggacccacacataatggagcgcagcggcgaagtgcgcgtccaaacgccgtacggacgcccttccgacgcactcattgagggaaatgtggcgggtgttcctggtgtgctgctgtcacgccatggtcgacgtcatcatgacgctcccaccgacataaattatcgggccaacatttgggcgctgaaaaatgccggcgtcaatgacatcgccgccgcgtgcgcttgcggctctctgcaggaagaattggaacccggtgaattgaagctgatcgactcgctcatcgaccggacgacgaagcgcgagcagaccttttacgatggactgccgggtcatccgccgggcatttgccatatgccaatgcatgccgcactcgacgaacgcctgcgacgggcgctgctcgccacggcgacgcgtttg

SEQ ID NO: 93278 - DNA, 592 bp, Heterodera glycines
caaaaatggtcaacgaatattatgaaaaatatgatggactaaatggatttgctgaatttatccggaattgggcctttacctttttctgtttacatgcctttgatgatgacgacacatctgatgaagactaatttcgttaatatttattgtatgctcttggttacaaaccgataaacaaagccatcagggttatttgaacgatttaaaatttgcataacattttcgaaacccaatctcttatagacataaaataaacgaaagtaattacatagtgaccacaaacattggacaacaccgattgaaaccgcgtcttattatagtaaatgtttttaaaattatcggataaatattttttgatcaatctgataggcatctctccatatgagtcaaagaagtaggcaacagcaggagactgtgcccatatcgcacaccaatgagttcccggcatacctgcagggtcctgaatggaaatacgatgagcaaatgaagcaaaaattaagcgtaccaggttaacaatcagactgcacggaaattttgaacaccttggcaacccatctgcgggatatgtgccgctgaagtaccttttcgtcgc

SEQ ID NO: 93279 - DNA, 488 bp, Heterodera glycines
tgcaaaagttctgtgacaacgctcataaagcgcatcaaacaaattccgatgggattgcccggtcctccggttgatggtgtgccacaaagtgccgcccgattttattctgaaaacgcttacattgaactgtcatgcttcattaacaatcagcccaatttgccgcgtgcgactgattttaacgaactcggcctcaactccaatgctgaaaattatgtgccgactcttctccagcgaattaatgccatggttttgaattgcactaaatcgcctgaagcaaccgccgaagtgcttgggcaattgggaattttcctcagcgttaaaaacgaaggagtgaaccgcagtttcaaaatccgttcttcttctgctgccggtggcgaatgatcgaggacaatgcggctcgacgctcggaaattgggataaaatgagcttaatgttgctgatttggaaaatttaaaccaattaatttttggatcaaatttttaactctt

SEQ ID NO: 93280 - DNA, 280 bp, Heterodera glycines
  unsure (1)..(280): unsure at all n locations
ttccttctctctccggactcacaattgtggtgagcttcgtttgtctgatgtcggcagccgagcgaaactcttcggatggatggccgccaaacggatgaacaaattcgtcctcctccgcgactcctatggttcagtgcaaacagtgttctcatttgcgctcttttcgtcgctcaaaaataccaactttttatctgccctttgccttgagggagtggtggcggacagaggcnacgaagggaacgacnnnatgcccancggcgacatacaagtggccggcgac

SEQ ID NO: 93281 - DNA, 457 bp, Heterodera glycines
atccccccacccaccaaccaaccaacgcatcaccagcaaacatgtcttccttcgataaggttgttgtcatcgacggcaagggtcacctcctcggccgcctcgcatccatcgttgccaagcaggccctcaacggccaaaagattgtcattgttcgctgcgaggagctcaacattgccggccccttcttccgcaacaagctccgctaccacgctcaccttccaagcgttgcgttgtcaaccccgcccgtggcgccttccacttccgcgccccctcacgcatcttctacaaggccctccgcggtatgatcccccacaagactgctcgtggtgccgccgctttggcccgcgtcaaggtcttcgagggtgtccccgccccctgggatcgcgtcaagcgcatggttgtgcccgctgccctgcgtgtcctccgcctcaagcccggccgcaagttcacccgcgtc

SEQ ID NO: 93282 - DNA, 337 bp, Heterodera glycines
accctacactactcggaggatgcccgagatttcccccggccaaacactgaacattcatggcaatgtgaacgcgaatgcacaccgatacaaggccaatttgttgagctagtgcaaccaaatggaggcccacatgggctccgcgacgctgcacgttacaggtccgatttttttaggaaaaggcgcgctcaactcatttgctgccggagaatgggggaaggaagagcggcggtcgagggctgtcgccgcgggacagcccttcaacccgcgatagcaaagccaggaagatcgcatccaaagagtgtcccaagagaacaaaatcggggagggcgggcatcga

SEQ ID NO: 93283 - DNA, 469 bp, Heterodera glycines
gtttccaagaacgaggaatttgtccgcgattgatgatatggagtttcgctaggtgcacgtcagagggtattaccttttcgaccgccaatttgtcattcggtggcgctgtcggttggaccccgcaaataccggcacttcgaattcggaaaaatatggggcgtatgtgatcactccgatgagactggagggcacaaacgttacaattatggttaaccgaggatgggttccaaacgagaacgtcgaatccgaactgaagaagggcttgtaaatgcgggagtccaaactaaaggatttgaacgcagtcgtcagaactgctgagaagggctctcctttcgtcgaggacgacccagaagaaggaatttcggccttcgaggatttggaaaaagtggcaaggcaaagcgacgcccgcccaattattggggggatgccgattacgaatccgactgacaaagaatcaccaatcgagggg

SEQ ID NO: 93284 - DNA, 263 bp, Heterodera glycines
cccgggcggcagctcctcagcgggactgccaaagtcattcggtcagtcatccaaatacaaattttgtttttgaagtaataattaatattgaaaagtaaggaaattaaaataaattattaagtgtactgtacataataatttgtcgaccttatcattatatgcatcatttaattaattaatcaccaggggctcctgtatggtttatcacgagaaaagaacggaaggaaatgacaccaccgacaagagggagcagagaaagcacc

SEQ ID NO: 93285 - DNA, 345 bp, Heterodera glycines
cgattggtggcgtcaaaaaaaggacggattgtgattggtctctttggtgaagtcgtgcccaaaacggccaaaaactttttggaattggccaaaggcacccatggctacggttacaaagactcaaaattccatcgcgtaatccggaacttcatgatccaaggtggtgattttatgcgtggtgacgggactggtgggaagaccatttttgagggttaatcatctcacgaccacaatttcaaactgcatcactatggcgccggatggcttaatatggaccaatacagtccctgatacaacggatcccagtttttaatcaaccacaccaatacagccaggctcgatgca

SEQ ID NO: 93286 - DNA, 584 bp, Heterodera glycines
tgttggctatcatcgccacagtcgtcactctgccatctctgtactcggagatgagccaaatgaacagcaaagtgcgcgacggagttgaggccttccgcgtcaacaccgactcggcctggactgacttgatggacgtgcaagtggtcgtgacgccgccgtcgaagccccgtgataaccccttcaactccatcttccgtgccttttttcaactgcccggacactgccagtgcgctggcctccaactgccaagctgtccccctgggccggccggcccgtccggaccgcctggacaggccggacagcctggaggcggagggaggggcggggaggggtggggaagacgtgggcgaaggcgctcgtccgtggcggcgccagaaggtggcagggcaaaggagaccatgctggccctccacggcgcgccggaaggacagagagagcggcggacagaagaagaagaaccgagaccaggccggggaaccgccgatccagggaggcggaagcatggagggagcgtggcgacggaagggggacggccggaagagcggggcgcaggaagggcgtgcggggaggcggggcgggagggg

SEQ ID NO: 93287 - DNA, 643 bp, Heterodera glycines
ctagcaacaaaatggctgtgctcccagtgcgccattgcgtaagcgtcgccacgccaacacaaaatgatgtgccatacaatccgtcgcccaccaccgcgcaaactttggacaccttaggcattggcacgacggtgcagccaccggagccaaaatggcaaaaggccggactccgaattgagctaaactgtgccgacgagcaaatcttcaagagcattgtccaagagatcgtcgatcggttcggctgtttaaactccgcctatgactacgccatgtggcgaaaagcgtttgggcccaacaatttcggcatgttcttcgccctggacgaagaccgagtgccgatggcgtccacaagcatggcggtgtacccaaaaattgcacattggagcatgtattacgtgaaggaacgctaccggggacaccaattgggccgtgcgctcactcgacgagccatggaaatggctggggacagactcattttcgggtacggaggtgctggaatgtgcgccaaagaggccgaggaacaccgcccgggccatttcccgaaccggaactttcgccaaacggtggcccaaatgccgatcgggctatctagagcctcgggaactcaagtgcaggcggagggtgggagaacggcaaccccccg

SEQ ID NO: 93288 - DNA, 177 bp, Heterodera glycines
gttcgaaacaattctggcaataatttggcttctccgccaaacggaaccgcaacagcctctaagaatttgttggcataaacactgatgcattttgatgaaatgatttgataataatgattttattccattaaaaagaaattgcagataaaaagcaaaattatgtaaaaaaaaaaaaaa

SEQ ID NO: 93289 - DNA, 363 bp, Heterodera glycines
  unsure (1)..(363): unsure at all n locations
caatacaacgacatccaagcgaccgagattgagtccaactgggacgaggttgtcgactcgttcgatgacatgaacctccgccaggagcttctccgcggcatctacgcctacggtttcgagcgcccctcggccattcaggctcgtgccatcatgcccgtcatcaagggccacgacgtcattgcccaggcccagtccggtaccggcaagacggccacgtttgccatttccatcctgcaaaagattttttttgcagctcaagcaaactcaggccctcatcctggccccgacccgcgagttggcccagcagattcaaaaggttgtgctcgctttgggngatgtcatgggcattgactgccacgcgtg

SEQ ID NO: 93290 - DNA, 243 bp, Heterodera glycines
taaagtataaatggtgcaaatcagccaatcccaaatcaaaaaaccctccgtctttcaccatgctttcccaacaattcacctttggctttgtcccctccctcttaattggcctttccctttgcattttcttccccgccggaggcaatggcaaatgcatcgccagtgacggcaactcgccaaatatttcttcggcacaaccattggaactcggaggttgcgtgaactttcgctgtcccgacaatt

SEQ ID NO: 93291 - DNA, 362 bp, Heterodera glycines
aaagtccattcagcagaatggtggtcccaaccgtgtcacattcattctgcgaaaaggtgcaattttcttcactgggatggttgttggaacagtcgttgtttttaaggcatttaagccaacgcgtcccttcgacgaagcggcagaacgtggcaaaagggagctgttggagaaatacacggaggagtacaacgcgttgcaggaagagctgaggcaggcggaagagcagcatttttttttgagggatgtcgaagaggcggaagcgagaaaggcttattctatgacaataataatgatcaatttgggtggaagggttgtaaatcctctgaagtaggatcacattgctaattaaacattttgaattt

SEQ ID NO: 93292 - DNA, 485 bp, Heterodera glycines
catatttttttgctggcaatgagcaggaacttcgccgctcttctccgtgtaacgtgtgaccggaagatggcacgtcgggccaacaaacagctgaaaagggtgtgcaagaaggcgcatgcgcaacacaaaaatatcgaaacggtcatccaacagcagttcgatgatcaggcaaaattggaaaagcgacgggagaagcggcgaagacagcgcaaacggaagcgaatggaacaacaggaaaaggaaggggactacaaaaaggaaggaaatggaagagaagaggaggagcaaacagaggacgaagcggacccatttgacgatgagaattacaccgtcaaacagtttgaggaggaggctgaacggatgcgcaaaaagcggatgggaaccgaattggatgaggacgagcgcgaaattacgcatttggaagcaaaactgaggaagaaagggcgcaagaagggcaagaaagagttggaggaggacggagatga

SEQ ID NO: 93293 - DNA, 214 bp, Heterodera glycines
  unsure (1)..(214): unsure at all n locations
cgttcttgcgttcgtcttactaaagatgaattgcgttatgcggtttatcgtctgatcgggtccaacgagcgtttgagagccgacactgaacggatggagcgtacaaacgcacttctttttcaaatatatgcacgcctttcagctggaccgcccaatttggaaccgcagaatcttctttantttggtgctaatcagccgaatcttcctgttgctg

SEQ ID NO: 93294 - DNA, 544 bp, Heterodera glycines
ggcagttcagcagatggaagaactgaggacgaaaaacaccaaagccactcgtgcccactttgccgacaccaatgcccttcggagtaaaatccaagaattggaacactcgctgaaaattgccatgaatgaacttagtgccagatcaacccaagcgaatgtccagcagcagaatgacatggaacgatcatttcgctcggggatgaacagaacgcagtcaatgagcgtcacattcgtttcgcgtcctggttctgcgatgtctcaccaggaaactttgtccaatttggactctgccggaatgaacgacgatgaaaggctgaaagaattgcgcgagcggaaccggcgttatcctccgcacatgcgctcgtattatttgccggagtctgctcatctgaagaacagcgagacggatttgaatgttatgccgtgagagggaataattggcaaaatctttatcaatggaatgacccaattcgcttttttgaactcattattttttctgtgatctgaatattgatttgattgctttaattagaattatcatctc

SEQ ID NO: 93295 - DNA, 209 bp, Heterodera glycines
ggacggtcaattttgtatcgctggacgtccaaaacaaagaccggatgggctttttgttgagattagcggacaatgcaaatgggtttaatctcgcaaatgttgaagatttccggaaagttgtaatgaatgattttagttgaaattgtttgctcttaaagataaaattatttttaactcgaaaaaagcagagagaaacaaatttatatttt

SEQ ID NO: 93296 - DNA, 176 bp, Heterodera glycines
acgaaacgaaatgaaacgaaacatctgtttgccccagcccctctcaacggatgccaatgcaaaaaaatgccaattttccgttccttctgctcctcctccgccattctcttaactgttctcgatgtttttctgttcactgcacaattcgccaattcgtcggcaccggcggacgattc

SEQ ID NO: 93297 - DNA, 402 bp, Heterodera glycines
aatgtgatcatttggggcaatcactcgagcactctgttccccgatattcgacatgccaaaattgccaaaggtggttccgaaactttggcctatgatgcggtcaaagacaccgcgtggattcaggaccaattcatcaagaccgtacaaaagcgtggcgctgtgatcatcgaaaagcgcaaattgtccagcgcaatgtccgcatcaaaagccgcgtgtgaccacatgcgcgattggttttttgtcactccgtccgacggtcgttgggtgtccatggctgtgtttttttacggctctcacggcatccccgagggattggtgttttccttcccccgcaccatcgatgcacaaaaaaagtggagagttggggaggggctctacctcgacgactttgccaaggggagg

SEQ ID NO: 93298 - DNA, 117 bp, Heterodera glycines
cgctgtccctggaggagttgaagcgtgtgcctgaacagttaatgcgtgccgctggcatcaaaccgctgcctgaatgatcaaaaaaaagcctaaattttaatgtttaattttaaaaaa

SEQ ID NO: 93299 - DNA, 395 bp, Heterodera glycines
atttcttatcacaaataatttatcactttaaaaattcactgctaatcgatttctaatcaatgctaaactctctgatcaagtaatcactgatttctacccaaagaaatgctgatttttctaattggcaaaaaaagtcggtatgtgttcggcatgccatttcggcacccacaagcatacgaccaaaaagagttggacatggtgcaggcattttcggcaaaaatcatggacttttggggacgttttgcgcgcactggtgaacccatcgagttctggcccaagtacaacaggatcacgcgaaagtcgctggtgctcagcgatgagattgcgcgcgggaacagtcatcgcatttatgtggacgtgcacggcaaactgtgccgtctgttggaagaggcgca

SEQ ID NO: 93300 - DNA, 387 bp, Heterodera glycines
gttgtccactggaaaaacggccattcctcatcatctgaagacggaaaaacacaagaaagcagcgaaagctgcaaattccgcaaggcaattacggcattcatgccaagcaaatcggcaccaacgaatttggaccgtcaaacagcagcagcggaaggtgcttgggcatatcacattctttgtgccatgcgcaaagctttaaatcggccgattgtgtctcagatttgttgtcaaaaatttttcctgattcaaaaattgcggcaaattacggatcaaaacaaaataaatgcgcagcaattattacaagagtacttgctccgcattctgtctccattacgttgcacgaaatgactgggcttccattttcactttcgattgactcctcaaatc

SEQ ID NO: 93301 - DNA, 527 bp, Heterodera glycines
atttgcaacaacaaagaaaagctttcattattctcatcagcaaaaaatgagtcagcagccaaacgcaccccctccctacgacgacgctcagaaatacccggcctatcccaacccaaatgttccaactgaacaaggtgccgcctatcagccaaacatgaacaacccccagcatgccccgccacaaccgtcgccgggcgccgcgccggccggcaacaccaccaccacttacgtgtacatggcggacgggggacagccccactgggggcctcggccgcaaaatgtcttttgctcgaactgtcgccaacaggtgctgaccaaagtcaaatactccgccggtctgctcacttggctgttgttcggcggttgtcttctgttcggctgttggttgggctgctgtttgcttccgttttgcatggacgactgtcaggactgtgagcattactgcaccaactgcaaggcgtacatgggccaatacaaacgtctctgataaatggttttgactcgtcgttcgtcctgacaacttccac

SEQ ID NO: 93302 - DNA, 653 bp, Heterodera glycines
aagaacgaggatttattggaatgattgggggcgaagaccttttcacaaattcagacgaggagctcgatgaacaaaaatcgccagaaacgaaggaatgcgaacaatctcggcttgttatttcgccggcttccgattcatttagcactgccgccgaattttccaacaacgaaccgtctcataatcagtttcccgaggctccgttgactccttcctcttcccaatctcctcatcagcatttagacaaattgtcatctattctcattgatggctctattcaaatttttatccgagcctatgaaaagcgaggcgaaggcatcaatgcttacattgtctacaagattgagacaatggcatcaaaaattccgggttacataaaaaatcgttttgaagtatggcgacgtttcagcgattttttgggccttcgtgcaaagttggccgagaaataccaacagttgggcgtcattgtgccatacgcacccgaaaaaagcattacatcgcttactaaaacgaagctgaatgccggtgaagaacacagtgacttggctaacaaacgttctcgtctcttggaacggtttctgcgccgtttggctgctcatccgcgtttgggttccgattgcgaagtgcgggactttctcctcttgtaaggggacttg

SEQ ID NO: 93303 - DNA, 283 bp, Heterodera glycines
ctatctctcaaaacatgcttctgagtttatggatggtcctttgatccacaaggcgtatattattccgttcactttcgacataaaacaggcttcttttggagccatcaaaaaaggaaattacgttggaatggcacttccaatcaggaaatacattaactggaagtctgtttttttgtttctgccatgggttgttcagataaaactgttggaagaagtccaaacgaatggcggagactgggaacacgcactcaagaatttggtgccagagagaggtttggagaac

SEQ ID NO: 93304 - DNA, 268 bp, Heterodera glycines
caaatgagttcggacggtcggccgtccaaaagttcgcgaatggcacaggcacaagaggcggtggcacgcgtaaaagctccggacggcgaattgcagcccagcactgagatagacctgttcatttcaaccgagaagataatggtgttgaacaccgaccttcagagaatctcctattatttacgttcgccaggacattctcatggaccattccctacgctccatctcttacatcgccgacattggcgatttggttgttctgatggcccgt

SEQ ID NO: 93305 - DNA, 236 bp, Heterodera glycines
ttacccaaaaacgaggccgtgaccatggaccacaccaccagcactctccgcatttcacacccaagccagccaagatgccccaagtgatcaacctcaagaacttgccgccggacgagctgtccatctacaacaagctctacccctgcaaggtcgcgctgctcaccctgaaaaagggccagtccttctcgctcccggaactggccgatatctcagacaaggtctcttcacttgccgag

SEQ ID NO: 93306 - DNA, 526 bp, Heterodera glycines
attatttattccctcctggatatggcatagatttctggatgagcgcgcccaacttcagtccttcgaggatttcttctacaggaacaaacggaattcggataacacgacggaggagcagcgctcgtgttaattggctgaccgaactcaccacgcgcgattctgctgcagttacaagcacccaaacttcagaggatttttctgaaatcagcaaacatttaggcgctcgttgaggacgaagacaatattatattgattcaagcaaaacgagaaaaagaagcccacgaacgcgcgttggcttttgtcaagaatcagttattgaactcgcggaaagacgactggctccatcaaccaatcgaagaattgcttggctacgcaccgaaatactaacggaatggcgaagcaatgctttgttactgttggcagtacgcgttttgacgctttggtcgaatctctgttccgtagcgatgttctcgatgctttaaagaaactgaaagttgaatgtgtgacaattcagaatggcaatggt

SEQ ID NO: 93307 - DNA, 380 bp, Heterodera glycines
cttcttccgctcgtggcaatgggtcggcgtttaatttgcaaaaagacactgtgataattagcagtcttgcacaaattttgcgttttccgttggaattcgagaggcactcattggagaagggagaacatcccgaaatccgagagggaattgcccatgcgcgacaatggttcgatcgtcgattagaacaaattcgaattgtggagacggaggaaaagggcatcatttgcagggagtacgaggaattttttgcccaactcgagcaggaacatgtcaagaagctgaaatagttggaggaatcgttcttcaaagagttggatgaacagaatcggtctctcgacagtgaagtcaatgcgttggacattgccattccgccgcttggc

SEQ ID NO: 93308 - DNA, 198 bp, Heterodera glycines
caccagcagcaagtttgaagaacaccttcgattaattatgtcgcctctccgttttatcattgcctttcttttggtcgttttgtgcgctttttccgcactgataaccgcgcaagaagagagagttgacaatgaacctgctgctctgcgcgccagacgcggaatgtacggttcgccgtacggcggcggaatgggcggcgg

SEQ ID NO: 93309 - DNA, 322 bp, Heterodera glycines
cactcaagacaatgaaggttcacccgtgacagttcagggcgaaatcagtggtcttgagcctggtcttcacggcttccatgtccatgcctacggcgatttgtccaaccggtgcacttcccccggcccgcatttcaatccaacaaacttttttctcggcggaccgcaggatcaaatcctacatgtcggtgatttgcgcaatgtccatgctgggtcggacggaattgccaagctgacattttctgaccatttgattacagctgtgcgtgccgagcaccttgtgcggcatcccctggtcttggcgcagtcgcaggagcatttgggg

SEQ ID NO: 93310 - DNA, 431 bp, Heterodera glycines
gcaacagcaacaacagcaggatcgctgaagcggacaatggcagcagtttcgacatggacaccgacggggcgcgccaatgggacgaaaatgaggacgacgacatggacgacgatgagctgatccggaggcaggacatgctgctggacaccgagcccgtcaaccaccacgaggtccattgtccctactttccgggcgacaaattcgagtggtggtacttgtttttgttggagcgcaaaacacgccgactggtcaccatggtgcaaccgtgcaagacgcttgaccaggagaagacgcacctccgttgagacctcagcacactgaacacaactgcgcaccatttcttcagccttggtcatcacatattccggctgaaaaaagcgcaaatttcaatcaaaaaaaaaagtgtaaattaaaatttttattacatttaa

SEQ ID NO: 93311 - DNA, 459 bp, Heterodera glycines
  unsure (1)..(459): unsure at all n locations
taagttttttatccttcctttgaaaattatgttttgcaatttctacagaatttaattgtgtcctcatttggcgtacaatgacaacaggtggcgcaaatgaaccgagattccatgtgctggcccaattggaacatcttcagtcaaaatacacaggcacgggccatgccgacagttctcgctgggattggatcaccaaccagcatcgtgacactttcgcttcaatcattggccatcccgaccatttgagtatgatggccatttgtgagaatgagacgcgtgctcgaacgaagtacaacatgctctgtcggatggttcagccgtgtggtccgcccccggaaaaatcagctttagacgatctttgacagctcacaatcggtcgcgaaaggatcatcatcttttatttgttcaactataaaatgttttcatcgactctttcaaannaanaaaagaaaaaaaaaa

SEQ ID NO: 93312 - DNA, 546 bp, Heterodera glycines
cttaagatggatgattatgcttatctgttcaaagttgtgctggtcggaaatgctggggttgggaagacgtgtttggtcaaaaaatttactcaaggaatttttccgccggggcaaaatgcgaccattggagtggattttatggtcaaaaacgtgaaagtggacggggagaaagtcaaattgcaaatttgggacaccgccggacaggagcgcttccgttccatcactcagtcctattaccgttctgcgcatgccatcgtgctcgtctacgacctctcctcccaaccgaccttcgattgcatcagcgaatggctgctcgaaattgagcaatatgcaaacaaaagggcgttgagaatgttggtagggaacaaattggacagagaagaggagagggaaatcccgacggatgtcgcgcaaagtttcgcctcggccaacgcttttcattttttcgtggagacgagcgcagcaaacgatgccaatgtgaacattctgttccaggaggtggccgagcagttggtcagcaacgagaagaagcaaaatgcaaacgga

SEQ ID NO: 93313 - DNA, 430 bp, Heterodera glycines
gaattcattccgccatttgagcaagagggccatgacagagaggaggaggaggagaacagcaaacggaggagggcactgaaaatctgtttcgatttgccgtccggcgcctacgccactgtggctctgcgcgagttgatgcgcaccgactttggcaaaaaggcgcaaaagcaattggaggaagaaatgatgaggaagagaaggcggaggacggaggaagcagaaggcgaatagggaagaagcgaaaacgagcaaaagaaagacgacaaaacggaaatgtgccaaattaaaacttaaaacatttttttgttgttttgattgtttcctttttcaccacttttacttgttaattttatgttggtattcccgatatgtgtgattgaaagaataagaaaaaaaagttgaaactgcaaaccgagaccaaaatgacaac

SEQ ID NO: 93314 - DNA, 387 bp, Heterodera glycines
ggccatgtcatctttgctcccttctcgtggcaatttcacttttctggttcctttcccttttagctatttctcctcccctgacaatggcactttcgcttttcccacggcaaaatgtgccgaaaatgttacattctccgtttctccaacaacatgacaataataataataataatgtcagaggaccattgggttacagtgatcagcttgaactgttggcacattcgggaagaatggcaaagaaatgtcggcacgactgttcaatcagtgacccaactgccgaaaaatgctggaacgaaactttggcattttatgagcaaacgcttttcggagtgttaagacgtgtcattttggttgaaaccaaccgaattttatggatgaccggccaaa

SEQ ID NO: 93315 - DNA, 581 bp, Heterodera glycines
cacaactgaacacactatcccagcagaagcaagtcacactgaatgtgcaagtgccgaaaacaccgacgcgtctcttctctttgcacactttgccaatgactttcgttggcacagagaatgttcaaaatgctcgtcctcagcagcggtcagcttttcttcatttcggcgagcagtgcaaagccgtgcagaatcagcagctgctctccatggccatggcattcgacaaacactccgacacggaacagtccctcctccaactccctttccatgtcagaggcattctgcacagaccgcgacgaatggacaaactgaaggaatgggtcaaggtgcttctctcgacagaaaatcacttccaactgtctctcgtgtcaacatcaagcctttccccgcacgaaatcgctttttccatcggctgggatttgtcccgcccccaaccgaccattagcgaggctttatcccatatcggattcaaagaatggccaaaggcattcacttctaccgcttcggacattgagcggaaagacaatgaaaacgaagagactgaagaggacgacggacagtgggggactgaagcgacggcg

SEQ ID NO: 93316 - DNA, 321 bp, Heterodera glycines
  unsure (1)..(321): unsure at all n locations
aaaagccaaaatttgtgcggaggcacggcactcaaaatggcggcagacnggaaaaaaacatcaaaaagttgggcacaaaacagcaccaactgcagctgctcactgctgcccgatggaggaggaggagcaacagcaatccatggacaaggagcagcaacaattcgaggcgtcctccaccgcgcactgttctttttcgtcttcgtccagcggcggtcaatccggcgccgccgccgcctccgtgctgctcgtcgacctgtccaatccgatgctgcagcaattctatgtgcagcaacggttgttcttccgacaaatttatgccca

SEQ ID NO: 93317 - DNA, 449 bp, Heterodera glycines
aaaaactattaaatattttacgaagtaataaaatgaattccgctggctttgttctactgctgtggaacattgtcaatttgcttattgtttgtgaaggaaatgtgctaaaagagaaagttgacaagtcttttgcaagtgccgatcttttggttgcgcatgtgaatggacagcagagttcgtggaaggccaaattaaatgccaaatttgccaaaatgacgccggaggagcagcagcaattgatggggtcacgtcggccatttcttgaaccaatcacaaaaagcacaaagcaacaaaacggaaagccacgccttaataaagcggacattccgttgaattttgatgcccgacaacacttttacaaatgtgccgatataattggcaaaatccaagatcagtccgcctgtggcagttgttgggccgtttctgtcccctcagcgatcactgaccga

SEQ ID NO: 93318 - DNA, 655 bp, Heterodera glycines
aaggtttttaataaattccatgtcgacgatttcttccgatcagttggacaaattggaaaatgtatttgaaatccgaaaacatttgaatgcttctgaacaaggacgtttgggcaaggcaattggcctaacagaagagcaagtcaacgaatggttcgaacagcggcgcaatcggtggagagaagaattttcttgtgactatcaagaacagtcgccacaaaatgttaacaaaacggaggcagctgaacaaaaagttgtggcacagaagcaacaaatgttgtcggccgatcagtttgcggtgcagagtgaatgtgccaccgtttgggagccgttgaaccttcgtcaggaatggacaatcagcaactttgccaaagcgttggaattggccactcccggcatttgcatgcgaggcaagaagctctgggacacgtcgatgccctacatttgctggcagttgtgcctttacccgggcggcaagcgcgaggcaaacagtggcaatgtgtcattgttcctcaaaatgtcaacgacacatccagcgcacgagttaaccaccgttcgtgccgagtaccatttcttttttgtggatgagcagggcactgtaaaattcagcaacacgaacaccgccgacttcaatgtgaagccgtccaaaagctcttgg

SEQ ID NO: 93319 - DNA, 475 bp, Heterodera glycines
gatttgcataatcaacaatggaaagaacagcaggaggactatcccttgcatttgattgtcagtcggatgatgtttgtatacggcgattccgacgagcctttgaacatttgccaggaatttatgctcgatttgctttgcaaacaactgaaaatgctcctcgacaaggcccataaactttcgattgaacgacacagcccttctgtcggctttcctgagtttatgttcgcattcaggcgccatccgttgctgatccgaaaactgattggatacatgcggctggttgaccttatgccagcgatgtttcgtgaagaagaacaaaaaattgatgattcagaagacattctgccgttgtcaagttcatcgtctctcaacatccaaaattcattggacgacttaatgaaattgaaaaacacttccaaagtgatcgttgcagtgcgtctcattgatgtgatggaccatcttttggctgacatcg

SEQ ID NO: 93320 - DNA, 91 bp, Heterodera glycines
gacgaacactcatcactagtcatgcccaaaaattgtgtgcataaactgacaattaaaaaaagagaattgtaaaaaaaaaaaaaaaaaaaaa

SEQ ID NO: 93321 - DNA, 562 bp, Heterodera glycines
  unsure (1)..(562): unsure at all n locations
gtcactccataaccaagacgtactaccctgcgcaaaacgacgtaattcacgttttcaacctgtccctttgttcctcattgtcttcgaccttggcctcataccaacttgcatcgcccgtctccaaccaccgcgagggaaccttgtctccatcggcaccaggcctgcccgtaccgccctggccaagccccaccactctgattcagcgatgacaaacatgtcagacaatgcgccagagcccaatgtggactcgatcattgagcggctgcttgaagttaggagtagtaggccaggcaagcaggtcgcgattcccgagcacgaggtcaggtggttgtgcatgaaatcgcgagacatttttgtctcccagcctatcctcttggaactcgaagcacctctcaaaatctgcggcgatatccacggccagtactacgacctactccgccttttcgaatacggcggcttcccaccggaggccaactacttgttcctgggcgactacgttgaccgcggcaagcaatcgctcgaaaccatctgtctgctgctcgcctacaagatcaangtaccc

SEQ ID NO: 93322 - DNA, 430 bp, Heterodera glycines
ggcactgtctctgccgccccgtcttcgtcggcacgcattctctgcttcgaccatatccgtttttgggttggcaatgccaaacaggcggcccattggtattgcgtcaacttcggcttcatccctttcgcctacaggggcctcgagacgggaagtcgaaaaacggtggcatatgcagtgaaacaggacaaaatcttttttgtgttcgagtcggcactgctgcctaacaacggggaaatgagcgcacatttggccaaacatggcgatggtgtcaaggtcagttctccgccgttttctccgtcttcggcttttccccttcccttccactgattaccgcccccccccccaatcaaaggatgttgcgttcgaagtggacaatttggactgggttttggacactgcgcgccgtgcgggcgccgttgtggcggaagaa

SEQ ID NO: 93323 - DNA, 424 bp, Heterodera glycines
gtcgtgccaaccgttggccactgtccgccctcccgggacggccattcggcggtggtcaacggcgactttatgttcattttcggcggatttgaggagagggaacaccgcttcagccaggagacgtacgccttccatttcccgacaagagtgtggaagaaattgaaaacggagggcgaatcgccgcagtacagagacttccacgcggcgtgcgttttgggtatgtaaaatgtatgtttttggcggtcgttctgatgagatgggccagctgcacacttcccacgacgtttactgtgacaaattgcattatttggacctcaaaacgttccaatggcatcgccccgaggtgaaagagccgacgacagcgccgtgcggacggcggtcactgacaatgtggacttatcgggatgcgatttacatttttggc

SEQ ID NO: 93324 - DNA, 526 bp, Heterodera glycines
gaatgttgatgattcttacattatcaacccatgggaattactcaggaaagcaattcaagaaattcagcgaaagaacaattctggtctaagttttgaagaactttaccgaaatgcctatacaatggtattgcataagcacggagacaaattatacgagggactcaaagaagtggttcgagaacaccttcaaacgaaggtccgagagatcgttgttgaggcaataaatggtcgctttctggaagtgctgaaccgcgtttgggctgaccacacaacctcaatggtgatgatcagggacattctgatgtatttggaccgtgtttacgtcgcccaagcagctgttgaacctgttcacccgcttgggttgcggattttccgtgaagaaattgtcgattatccggccataaatgagcatttgaaggcgactctccttgggatgatttcgctagaacgtcagaaggaaatcatcgaatggattgaccttaaaaatgtgtgccaaatgttaattgcgttggggttggacaatcgg

SEQ ID NO: 93325 - DNA, 94 bp, Heterodera glycines; identical to SEQ ID NO: 79778

SEQ ID NO: 93326 - DNA, 473 bp, Heterodera glycines
aaaaaggatgagatcgaagttgagatgaagaagaagcggaccgttcgcccttcacaaacggcaactcgtcgaagacagctggacgagccgacaagacgaaggacaagtgcatcaccgagcaaaattcgagcgtccaatgccaacattgaacgtgcaaagaaggcagcagcagcagcagagtcccgcttctccactccggcaaagatgacaccagcagaaaagtcgcaactacaacgcgagcagcagcagcaaaaaaggaataaagaagccgagaagcagatggaggcgaagctggccattgtgcaacaacatctgcaaaggcaaattgaacgtgagaagaatttggcagtgcgcaacactctgtggaacagagaggccaaaatggaacaacgaatcatacaacggttccgtgcctaccgcgccatggtggacaaagagtttcgcgcagctgtccaccaaggagcaacaattga

SEQ ID NO: 93327 - DNA, 530 bp, Heterodera glycines
atttaaactgggttgtaagccattattttctgatggatttgcctggcatttctggagagcagcaggaaaaaggacagcggttaagcagcagcgcagcaaatgacttcggaaaaacagtcggaggattggaccacacaaaagcagtaatcaccgcacaaccgaagacaaacgaaactccgagcggagaattgaaagagaattcgccaacgaaagggggcgatctcagcgggtgttctgactgtttcctttgctgcgctttctgcgacccgtccgatctgatggaatgttttgcctatttgtgctgctgcggtgcgtttgccgaaaattgttgacgaacagggaatggacagccaatgtccaaaagtggcataataaaaccggtgaaaagcaaaaagacggcaaaggaccaattttctttcgacactttaaatttatttttatatttcacagcctttttccttttttgtaagcaaattccaattgtcaaatatgttcaaattgttttatattaaaggctttaatttttaaaa

SEQ ID NO: 93328 - DNA, 543 bp, Heterodera glycines
aattaattgagtaaatcgatgccaatcttttgactgccttttttcacatgtcccaccatcagcagcattttcctcccgccatgtttaaatccgaccggcgtttgctcagtgcgccgtaccaaagtcgaaatgccgaacgaatgcagcggagaattggccacggaatgggcgaacactcgcgcaaattcacttccaatgggaattccttctgcacttttgaagggttaatggaagtcgccgtggaaatcgaagtgaaagaaacgacggaaaacgaagggacagatgaagcgaatggcacggcaaattcaaagccgaaaatggcacaggaaaagccgaaacggcagcaggggggaggaggaagaccttttgttggtgccatctctctctgccggcgaatttggccaccaccaaaagcatttcgccgcttctccgattaaaacggatgagctgcgccctctcccccaatttcggcactcttttcgccacaattcgccctcctcctcttccgccgccgtcggttctctccgccaattgcttcgcttc

SEQ ID NO: 93329 - DNA, 241 bp, Heterodera glycines
aaaagaaaccggagagaaccgggtgtacactgtgctgttcgccattaccgtgattttctttctgtgaacgatcccctcgcccccggggaccattttcatctccgatcggcatagccaatcgctgccatttcaaatattccgttccgcctcgaatttgttggaaatcaccaaattcgctcttaatttttacttatattgtctcataaacccagacattcggagggtttgcctcagagtgtta

SEQ ID NO: 93330 - DNA, 518 bp, Heterodera glycines
gagaataatggccaaccgtcgggtcgaagaacaaaggcagacgcttacaaaggagcccaaaaaaaaggttttcgagagagactttctgcgaatggcgactctgaccaacgatgtgatgtttctccgtcgcactttggagcgcgacgatctctctgaactgttgttgtgtttgtttgggtcattcacttgcgaaaaagcgtttgagacggccgaacatttggaggcattcgtcgcgaaacattgtccatccattcgcattgaaacggtcggattgggcgctgatgtgaaaaagtttttccattgggatccggcgggtgaccagcctcagaagaatgggttggacagaatggcgaatgggacggcaatcaacgaaacattcgaagaggaaaatgaaagcgaaaactgaacagccgacaagaaagaaacacaaaatcacgatgatcaaaaacttccgatttttgatactgaccttttgtaaatttattgtttttttttgttgatttgaataaaattttcgc

SEQ ID NO: 93331 - DNA, 616 bp, Heterodera glycines
caagtttgaggtaattcttaaatttactttaaaaatcccttttcacttttacatcgttttattttgtttggattttacgatggctgccattcgaaaaacactaaattttgtgagtggaaataaacagaagttgcttgagcttcgtcttctgctcggagacgaatttgagattgctccgttggacattgaccttcccgaactgcaaggtgaccctgcggacataaccaaggcaaagtgtgccaaagcggtggacgccaccggtggcactttgaaagtaatcgttgaggacacggcactctgtttcaacgcattggacggactgccgggcccatacgtcaaatggtttctcgcgaagttaaagccggagggattgcatcggttgttggctggctacaacgacaagtcagcttattctctgtgcactgtggcctattcagagggaaaagacaagcccatccatctttttactgggacaacaaatggacaaattgttgagccgcgagggccgcgcgagttcggatgggacccatgcttccaacccgatggatttccaaaaacatttgcagaaatgaccaaggaagaaaagaatcaaatatcgcacagagcgatcgcatta

SEQ ID NO: 93332 - DNA, 408 bp, Heterodera glycines
actcagcgaaagatcaaaggaattggcgaacatttggccacaatgggcgtttcgtttgagagtcgtccgctttcggttggcgactatctttgggtgttgcagcggacaaattgggagggcaaaagacaggaattggtgttggattatgtggtggagaggaaaaccctcgacgacctccggaggagcatcaaagaaacgcgctatttggagcagaaacagcggctgaaatagtgtgggctaagaaatgttgtttttgtgctggagggagggacgacggccaacgaccggcagttggagcaggcgatggtgtcgagcggcgtggagagcggtttcctcgtccatcggacgccgaatgtgcaggggacggccaaatttctgcaaaatttgacccgatggctcagagaacgt

SEQ ID NO: 93333 - DNA, 577 bp, Heterodera glycines
gagttgcaatgccagtaaaaattttaattttttcaattcttttctgtgtgtgtttgcaaacggtggaacttggttttaatggacaattaaatcaagactcgcaaaataatggccaattaacaagcacggttcaagaagcacaaggaggaacatttggcaaccaaaaccaagctactaataatggtcaatttaaaaatggacaattaattaatggccaatcaacaatcacttcttcgaataatgtgcaattaattagccctgtatcgcaagtgcagcaaggaaccgggtctcttaaaaatgttggcgaagggacaggactatctgttaataggcaacaattaatcagcactggtgcgcaagtgcagcaaggagccggatttcctaattatagccaatttaatgcaggccaagggtctcttaacaatgctggacaagcaacaaagtcttcaattaatgggcaattaattaaccctgctgggcaagttcagcaaagaatcggatcatcaaatgattatcaaccgaataatggtcaactgattaataactctgaccaaggaaaaattaacgggcaagtggg

SEQ ID NO: 93334 - DNA, 452 bp, Heterodera glycines
ggaatgctaccgtaactttctgttaagcgttaccgttacccaccaaacattcaccaaacgacggcgactgcgtccgctttcccaactccgcccgtcagtggcgcagcaatgcctgtgccgggctccggactgagtctacaggtgtccgtgctggccggacaacactcagccgcacatttgcacaatctgagcaccaacgaatggggcggcacttcgacggtggaccatccaagtcagtattggccccaatgaccgaacgaagggacaaatagcgaacggagaaagcgaaccgaccgatccatggacaaatcacaaatcaacagttgtttaccaaagattttcaaaaggtcatcgattcattcacaagcgtattgtgcttttcatatcaataaaatttgaaaatatattaatttaaatgtgttaaaaaaaaaaaaaaaaaaaaaaaaaaaaaa

SEQ ID NO: 93335 - DNA, 653 bp, Heterodera glycines
gtttgagctgtgctgacaaaattaaacaagcaatgaaatacacacatgcgatcactattcgaatgccttcttctttaaaattcgacgacaaaaaggcaaagtccaaaattgattttccgcttgcacttagacaacaccaggacttgacagagactctcactgaggcgggcattgaagtgattgagctcgcaactgctgaaactgaaccgacaattccatcgctttttgcggatgatttggctattgtgataaatggcaccgctcttttgactcgacctaaaagtaacaacaacaaaaagacgcccgttgtcagcagaaccaatgaatttgtctctgtgcttaattctttgacctggcaagtcgtagaagcgcctttgcaaattcacggccgttctgtggtgctcgaagggtctgatgttgtttttaccgaaaaggaaatttttgttggaattcgcaaaaacggaacaaatacagaaggggcattgattgtcgcgaaaacgttcgccgattattccgtaattccaatttcaatcgctggcactttgccgttaaaggcgcatatttccgtggcaacaaatgaaattctttcggttggaagagataaagattcgcaagccatattgagtgcattgaaagggatgccacgttccgct

SEQ ID NO: 93336 - DNA, 334 bp, Heterodera glycines
gtgccgaagagcactctaatcgtgcatggactggctagtggcgatcgacacgtgggagtaccgagggcacaccaaatgcatcacggaggaccaaaagtacttatgcgcgagacatgtgccaaaagtgaacaagggtgaactaaagcaggacgcctgggtgtcgcaagtgcgtgccgccatccgtcaggtggaccagccgcggctgaagaatttgttgcgctccgtccaatgccacaccaatctcccgcgcaaggaggcccaatatgtcgtctttttgcaaaattcgatgcgcattcgggaccgcgcgttgtggggggacgcgtggaatggagtc

SEQ ID NO: 93337 - DNA, 627 bp, Heterodera glycines
cttctgtccactctgacttggcgcatttgacctgctccacccctccaacgccactcaaccgcagcacccgcccactcactactcgccatcatgggtttgtccatctccaagctcctgtcttctctctttgggaagcaggaaatgcgtattctcatggttggtctcgatgccgccggtaagaccaccatcttgtacaagctcaagttgggcgaaatcgtgaccaccatccctaccattggtttcaacgttgaaaccgtcgagtacaagaacatttccttcactgtgtgggatgtcggaggtcaggacaagattcgtcccttgtggcgccactacttccaaaacacccaaggtatcatcttcgtggtcgactcgaatgatcgtgagcgtgtcaacgaggcccgcgacgaactgcaacgcatgctcaacgaggacgagttgcgtaacgccatcctgctcgtgtttgccaacaagcaagatttgcccaatgccatgcaagccgccgagatcaccgagaagttgggtctgcaatccattcgccagcgtgagtggtacatttaagcgacctgcgccacgtccggtgatgggttgtacgagggtctcgaatggctgtcgaacacgctcaagaag

SEQ ID NO: 93338 - DNA, 469 bp, Heterodera glycines
gcgcgtggccattctcgactttggggcgcagtacggaaagctcatcgaccgtcgtgtccgcgagtgcaatgtgtgcagtgatttgctcccattcagcacaacaatgaatgaactggtccacaacggatacagtgccgtaatttttatcggaggaccaaattcagtttatgtggacaatgcgcccgtgtacgacccggaactgctcggtggtcgtcttccgctgctcggcatttgctacgggttccaactaatcaacaaacacttcggtggctccgtcagtttgcagccgcggcgggaggatgggcgaactcagatccaagtcagcccaaagtcggaccttttccactcgttgaagccggaccaatttgtgctgctcacccacggggacggagtgacaccgggaaacgtcagccaaaaatgggtttcaaccaattggcttcaccggggaatttgtggcggccatcgaaaa

SEQ ID NO: 93339 - DNA, 545 bp, Heterodera glycines
aaacaacagtactccaagccacaaaaatgcctgcccaaaattttgtcacgaatcagcaacgaaaaaatgattacgcagctgaccaccaaacaatgctgaacacgctgaacccaccgccaaaaacaattaaactgtccgcccgtacattggatgccatcgcgttggcacaccaggaagtaaatgtgccgaaatacagtcgtgcttcattgtcggccggcattgttcacttcggagtcggcaatttccaccgggcgcatcaggctgtttatctcaatgaattgttcaacatgggccaagacttggactgggccatcattggagtggggatgacttcgtcggcaagtgcaaattccaagaagaaatgtatgctggaacatgactttttgacaactgttgtggaacaggatggcatggcacaatcagcacatgtgactggttgcatgattgactatgtcccggccggcaatcccgagctggttgtggccaaactcccgcatccggccctccgaattgtgtcaatgacgatcacggaaagcggcctattt

SEQ ID NO: 93340 - DNA, 546 bp, Heterodera glycines
gcgttcggtgatggttcgctgtttgtcgagaaattcgtggaaagacctcggcatatcgaagtgcaaataattggggaccattacggaaatttggtgcatttgtacgagagggactgttctgtgcagcgacggcatcagaaggtcgttgaactggcaccggcacctgttttggatccggcaatacgtcagcgaatgttggacgatgctttgaaattgacacgccatgttgggtaccaaaacgttggaactgtcgagtttttgctggacactaaggggaatcattacttcatggaagtgaatgcacgtcttcaggtggagcacaccgtcacggaagagatcaccggcgtagatttggtccaatctcaaattcgcattgctgagggaaagtctctcgaggacatcaatcttcgtcaggactcgattcatgtcaatggggcggcaattcagtgccgggttacgacggaggacccgggcacggcgggtttcaccccgacagtgggaggatccgagcgtttccccgtgtcccaagggggggggcagtcgctg

SEQ ID NO: 93341 - DNA, 135 bp, Heterodera glycines
attaactttgaattcgattctttctccattgtcaggctcatttttcctctattcattaaatatttatgttgctttttaagtttggtactaaatatgtgagataaatattgacgaaaaaaaaaaaaaaaaaaaaaa

SEQ ID NO: 93342 - DNA, 137 bp, Heterodera glycines
cccacttctattggatcccactctgcctctttgtctaccaaacattcccttcgcttaaacttaagaagccaaatccgcttatccttattatctatatgtatattgcttctcttccccatgccaaaaaaaaaaaaaaa

SEQ ID NO: 93343 - DNA, 474 bp, Heterodera glycines
gtttctctttgatggatgtcaacgaatttggtcttgctgcaagttcttctctgcttacatgcgaagagattgccgaagtttttctccatcttacggtccgtcctcgtccccaatgtcgtttttcggcacgcggtttccgtgccaattcgcgctcaaaacatattgtgcagcgcttttccgccctctcctccaagcgatgcacgcgccgtgagaacaaaatttgctttaccgccgatcgggacgttctgatcagcggagtggcgatttatggcgccaatcagtcgggcagtcggatgatcaccgacgatagcacggcaaagacaaattgggaacataaaatagccataaagcttgaactcgtggccgatttgtacggctctccgctagaacaattggcatctaacgaactgttgatgagcggcaaattcggcgacccgactccgctggtggcccaattcgctgagccggtgccat

SEQ ID NO: 93344 - DNA, 511 bp, Heterodera glycines
tgagcgcgccactaagactggcttagcggctgaggcccaacaaaaaattcacagcaaatttgacttggaattatcgaaacaaatatttggatggatttctcaagtcactggagaatcttttactgtcagtggcgaagtggaagaatatttgacgaccctcaaagatgggactggtttatgccagctcgaaaatgatctgtcgcccaattcgataaaaaaaataaacaccacgaattatccattcaaacagatggaaaacatttcattctttttgggttttgctgaaaaatatgtgaacaaaagtgaactgttccaaaccgttgatttattcgaaggacaagacccgaattctgtgctcatttgtctggttgcacttgctcaaaaatcggataaatcatttggaaagggggggcttggtcccatagaatgggagggatcgaacaacgaatggacgtgggaggcactgcgtgcccggtactctatccatctgcttgcaaatgggctcaacaaa

SEQ ID NO: 93345 - DNA, 434 bp, Heterodera glycines
tttttggtcaaaagtcggtcgaacacgacgtaccgtactgtgacagtaacaccgccgatgctggaggagtgggaacagaagaacatcgtgcgagcggcggaaagcattcgcgaaaaaatggggggcaaaggatatgccaaattggatgaggaattcatctgaacaaacggaggagaacagacacaccacagacacagtaaaacagaagctagtcaccactgaccgacaattatgtaattggtcaaataataattaattattcgttaatatttaaattatgtatatttttattttggttcatcgctattttaatcttaacatttgcttcattccttcttcctccattaattaatattttgctaaataatttctaattctgacaaacaaatgataaacaaacaattataaaaataaaaagggcgaggaacaaaccc

SEQ ID NO: 93346 - DNA, 282 bp, Heterodera glycines
  unsure (1)..(282): unsure at all n locations
ttgtgttgcttgacgctgcacactctggtgaaaatccgcgcgtcgcgcattttctccgtttcgcagaccaacctttactggcaaaagtcgggctcttatttggcagcgcacactgaacgctaccacaaaatggtgaagaacaaagagggggaggtgaaatatacgggtaataattcgtacttggaaatattcgactgtacagacaaggaatatgcggtacagtccatccaattgcccgaacctttcntcaatttggcatgggagccaaaaggcaacaaattt

SEQ ID NO: 93347 - DNA, 330 bp, Heterodera glycines
gatttatctaaaattttaatgtgtcggccgcccattgaaaatatttctgcaggtcgtcgttattccaaagtgatttggcgaagtttaaaacgacagaggccgtcggccgtgtgttttgacatggactcgacactaattaaagaagaaacattggatgcgtatagcagctttttcggcttggatttgggcggaagtgccatcactgaaaaagccatgggcggacaaattggctttagaaaagcactggcccttcgcttggaaatgcttaaggccaccaaagcccattccgaccattttttgaacaatttccccccacatttagcgattggg

SEQ ID NO: 93348 - DNA, 335 bp, Heterodera glycines
tgaaaatgcaactctctgagctttctgttgcattcgtggccctgttcttgacttctgcgctaattgagatcaccgaagcgaatgcgccaaagcagaacagcggtaccgacaccaacgcggaaaaggaggaaaacgtttgccttttgaaaaaacacgaggggagcggcaatggacacatcagacgatggtggcatgacaaagcggacggcgaatgcaaggcattcttttacaaaggaagaggcgggaacggaaaccgtttcgtttctaaggctctttgcgagagaagatgcaataaatgagcaaaaggaagtgatgaggagcaacacagagaagag

SEQ ID NO: 93349 - DNA, 500 bp, Heterodera glycines
ctgatgctgacaatgatgcggtcaatgaagaaggggaacttatggaatcattggagaacccgcaaggactctcttttttggctcaatcgccgcagttccaacagctccgagacatcgtacgtactgatccatcgatgctgccgcaaatcatccaacaaattgccgccgccaatccgcagttgatggaggcaatcagaaacaaccaaggcgcgtttttgcaaatgctcaacgagggacaaccattgggcggtgggaccgacgctggagccggtggagaagcggcggccggcgttcagcaggaagcggcgcaaagaagggtcagcattccagtgaatgcccaggacagattggcaatcacccggctcgtttcaatgggatttccggaagcgttggtggttgaagcttatttcgcctgcgacaaaaacgaggatttggctgtcaattacatcttggagaggatggatgagtctcagaatgaacgggcgggtgccgggcagcag

SEQ ID NO: 93350 - DNA, 187 bp, Heterodera glycines
ataatccagatttgtttgtcgtgaattttgttaaaaaactgataaaaactatttaaggaatttttcattaactcatttataaaaatggaccgtttagacacaataatttcttctcttctgaactgtcccgcacgtaacttgtgcgaccgcttaaatcacccggatgagatacaaaaaaaaaaaaaaa

SEQ ID NO: 93351 - DNA, 408 bp, Heterodera glycines
gctgcgaccttttcgcggtgaatgtgaacatttgctcgggcagttgctggtcactttctttcgtcgacccgcgccaatcgaagggcgccgaaagtgaagcgaatgccaacggaaatgaaccagcggtggccgtgttcgcccaatgctgccgaatggtcgaagcacaaatgctcaatgttagcattccatgcgaggatgggtcgaaaactgtgcagattccgtccgccacaaattgcagctgtttcgactgttcccgcaagcgccggaggcgataattagaaaaagaggagagaaagaaaggaatgcccagcagaaaaaggccaaatgcttctccttttcgtctgtttgtgtacaatcgtaaaaatggccaaacgatggccataaaatgataaataatgtatatttctc

SEQ ID NO: 93352 - DNA, 519 bp, Heterodera glycines
cttgccaacacaaattaaaaagcatcatgttcaaagctgggctcaaattggcctttttgctcttcgcggcgcttttcccgtcagttcctgcattgagatgcgtgtccagcattgcacttacgtacatcaacaacatgaccggcggagtgatgatcgttgacctgagcaagccggttgaatgtgcgttcggttgtgcacgaggaacctgcagcatgaacttcggcggtgaattgaacagccattttgggcttggaattgtgcgcactctgggcgacgacggcgattacaaattgtggaactcgccgcttgcggttgtgagcggatgtgcggcggcaccgaaaaatgggacgacggcaccgaatgggacggcggcaccgaaaaatgggacgacggcaccgaatgggacggcggcaccgaaaaatgggacgacggcaccgaatgggacggcggcaccgaaaaatgggacggcgacggcattggggggcagcaacattttttttgggaacgcggcgacgatcg

SEQ ID NO: 93353 - DNA, 480 bp, Heterodera glycines
ccgaaatgttctcagcttcgatgactactcacaatatcgcattattaccgtgcttctgcatcgtccgcagggaattaatgagggcgccgttggcttattattgcgcacgatggcagagagatcaaagccagcaaatgcgccgttttcaattttggttcatcaagtaacgggtgggtccattgcgagtaaaaatggccatttgatgcaaggtgaccgggtgttcttcatccaacatcagtcgacagtgaatatgtctgtcgccgaagcacgttctctggtaaaaagcccgtcgccagtaattcatttggtcgtcggtcgcggacgctttttgtgaattaatttgatgattttgaaaacactaattgtcgagaaagaaatctccacacttgcacatttattcttttctctttgattgtatttgttaaattctcatccatttatcttcattgttgatccttacaaatgataagaataacacat

SEQ ID NO: 93354 - DNA, 59 bp, Heterodera glycines; identical to SEQ ID NO: 52422

SEQ ID NO: 93355 - DNA, 298 bp, Heterodera glycines
gactacccatattgtggatatgcttacaatttctgaactttctgaacgttatcccgaccacaaattcatcggagaataaaatgtcttggcaggaaatacttacgaattgactgatgcaccgacatggattattgatccaattgatggtacgacaaattttgcacatcgcatcccattcctcggaatttgtgttggtcttgctatcaacaaatctctctgagctgggatcggtttcgtccaatcactgatgagctatacaccgcaattggagggaaacggcccttcaaaaatggctttc

SEQ ID NO: 93356 - DNA, 345 bp, Heterodera glycines
aaagaacttggtgttgacacaaataaaaaaaaattaaataaattattcgccgcgaatttttctcatcggaattttaatttcgtcgacgcatttcaacagccaaccaattgtctgactctctccgttcccttcgcttcttctcccaatgtcccttttgctgttgtcggccacggccgagcatctgctggtgctgtccgccttcttcttcccgcccgctctgctcattgtgcttttggtcgtcgttttggccacttttggcaaatcgttgggcctccgcgagcgctatgtcagcattttgatccgaatttttgagtggggtgccggtgaaattcagagcaggcgcaa

SEQ ID NO: 93357 - DNA, 451 bp, Heterodera glycines
gtggcctctgtctgggcaaaggtcagtgctttttcgttatgccaacgtgcccttcttctgagtttgtgcctttggcatgacttcgacgcttcgcggattctgcctttcccccgctgatcagcagacgaatcttttctcattttgcagtgaaatggcgacgaacgcatcacagaaaaggaaggagatctatcggtacaaagcgtcgttcaatgtttatgcgatgggatggtcaaccaaattgttttttttcctcaaatttcgcttggccatcggcagcttcatcgatgaataccaccacaaagtgtccattgggcacctgcaccaagaccaaggccaatttggccgtctcgggactttcgaccatgctaacacctcgacaaagcgctgagaagcccccaaccagaagacggctcttcaccactatatagctaccatcggcgactctatgcgc

SEQ ID NO: 93358 - DNA, 360 bp, Heterodera glycines
  unsure (1)..(360): unsure at all n locations
atggtcgtggcgttaataatcctcgtccncactttggctaggcatcactttgcncgttgtttacccnacatttaactataattcaaattttgtttggttttttccccntactttcccttttttttnntttcccttttnttttccnttttctttttttttttttnnnannnnccncnnnnnnnnnnnnnctttttttcccccccccccccccccnnccccntccnnnctnnnnnnncnntnnnncccttntcccnntttttnnncncnnnnnnnnnnnnnnnnccccccccnnnnccccccnncccnnnncccnnnccccccccnncannnnncccncnnntccnnccccccccccccccc

SEQ ID NO: 93359 - DNA, 319 bp, Heterodera glycines
  unsure (1)..(319): unsure at all n locations
cattgttctcgggattgcctcggtgcgctctctgttggctatcatcgccacagtcgtcactctgccatctctgtactcggagatgagccaaatgaacagcaaagtgcgcgatggagttgaggccttccgcgtcaacaccgactcngcctgaactgacttgatggacgcgcaagtggtcttgaccacgccgtccaacccccgtgataaccccctcgactccttttttttttgccaagcgtcaactgtccgcacactgccaacgcgtctttccaccaccctccaccatcatcccccacggtccctctctccccacaccccc

SEQ ID NO: 93360 - DNA, 512 bp, Heterodera glycines
aaatggcttccactcatgaaaaacggacagattctcggcttgtttttgtgccattcgtcaccttcgccgaccctcttttttggaatgagattaaccgactgaaagtggaccattggaaattggacgagtcacttaagccaatttatgccacaacaacttttcagggtgcccagccttctgatgggctcctctccttcgaccaattttccatcgctgccgaaagtggccaaactttgccgcttcaatctgtccaaccgtttgtctctccattccatggcacttttcttttgctaaacacaaaaaaagcattttccgatggttttgatcgaaagaaatttttggaacagtcagctgattcgttatggaaagtcatcgaatcaaagaaatggttgacggaagcgcaactgctcaactcatttctgttaaccgcttgagctgacgtgaagaatttcacatattgtttttggaattgcgtgcccgcacggcttttgccggacaagcttcgtgagaat

SEQ ID NO: 93361 - DNA, 553 bp, Heterodera glycines
gtccaattaagtaaattaaaacaagaatagccaattagtcttaaaatggaactacaaaagaagcgcaatgtctgataatgaggacgaattaacggggattcagcggagacggcgactaacagagggaacggacgagaaaagccgattcagaccccctttaactccgtccaattcgcttttgcttcgctctccgcccgtcattatgatcaccagcccatcgcttcccaacagcagggaagaacatttggcagagcagcaggtgccgtcttccaatgggaacggaacttcctcttccgcctcgtcctctgccggcaccacacgtgtcaatcatccgccgcaaccgttccccgtgccattgcagcggcgccgctcctcctgctcctcctccgtcagctctccgctgggcagtgccgcctttcatccgcgctattccaccccgcggctgtccatcacttcgcttggctctgttgccaaaactttccgcaacattgctgcttttattgtgcctgaggaggagggtgagcgcgagagggcacgcgatcggctgcgtaag

SEQ ID NO: 93362 - DNA, 411 bp, Heterodera glycines
gccaaatgtttgttgcacggtcccagtgttgtgcgcctgttaccacacagtctaaagattagtcgctcttttgcggtcccttggaggcaatttttcgacaaattaaaagcggacagaatcaatgcgcaagtgaagcataagccgttggacgatgaccacaagcggtacgcggacgacgaatggcattggatgccgacgggcgaaagcgacattcaaaaccaagcaaccgtcacatttctctcgcgtatattgaagaaagagaaattggttgccatcaaaacgatcagcaaattcggctttcgtacccatgaaaatgcctatttgcttggtccaattgcggtctttccgaggaccgttctgtcctggcgtgtgccaatgccggccgacataacgcccgagtcgctggagttg

SEQ ID NO: 93363 - DNA, 593 bp, Heterodera glycines
ctaaaatgcaagagactcacattgttctcgggattgcctcggtgtgctctctgttggctatcatcgccacagtcgtcactctgccatctctgtactcggagatgagccaaatgaacagcaaagtgcgcgatggagttgaggccttccgcgtcaacaccgactcggcctggactgacttgatggacgtgcaagtggtcgtgacgccgccgtcgaagccccgtgataaccccttcaactccatctttttttttaaacgtcacctgcccggacactgccagtgcgctgtgttccaacaaccaaccagtgcccccggggccgcacccaaacaacccgaataacctggacacccctaaacccccccacccacacgaccgaccccccccatgccctctccgaccccccggagtgcccggcacgctcgcgcgcggtctaactccacctccaagcacatcccccaactgtacccgccacacagacgcgtagcgtccgccccctctgtagcgccagaccaacccccccccccgcgcggtaatggttatactcgtatcccaccacctctgccccctcgcgtatcgcccgcggcgcgagcggca

SEQ ID NO: 93364 - DNA, 280 bp, Heterodera glycines
tcgttggaacaaagtgaaacaatggcttttgtgctgaagcgactgatcggttatctggccatttggctgatctgcttcatcaatctcttctctttgcaaaaaatcgccgcccgtttccaagtgattttaacggtgcttaaactgctggtaattgcgctgattattttgacgggactttatcagaacagatcatctttcgcggcagaacggagaatttccgcgacacttttgtttttacaaagacagaagcgtgcgaaattgtgctggcattgtttgccag

SEQ ID NO: 93365 - DNA, 487 bp, Heterodera glycines
gccatctctgtactcggagatgagccaaatgaacagcaaagcgcgcgaccgacttgagggcttccgagaccacagcgactatgactggactgacttgatggacgggcaaccgggaccaacgccgcccgcaaacccccatgatagccccgcccgctgttttttttttgccaaacgccaactgaccgcacgccgacactgccttctcgcccacccagcaaggtgacgccccggagcgcccggccagtggtcatcttaatttcccccgtccccccggtgggatatccgccccccccacccgacgacacacccacccggtcgaagcgccccagacggcccggacaacacccacaccaccacccccgctacgccgcgccacaagagcgaccccgccagttggacccgcgcctgagcaccacgccggccgagaagaaaaaacccacaggcccccaaccccgcccacctggggcgccccgcgagcgccgcccgg

SEQ ID NO: 93366 - DNA, 365 bp, Heterodera glycines
atgagcagccatctccgagtcgccactcaataattgtcctgtaaaagtgctgccgagttttactagcacatttctgcctgatttatcaaatgcgcaagtgttgaagccaaagcccaccaatgttgatcgtcttcctttatcaaatgaagaatttataactccaactcagccaaaaaagcagcaaagtcgtcctttttccccagcaaatggcgtatccaaattgatacttccgagaagccgagtcgcttcaatacgtcgtgagtcggattgcaattcagagaaaggatttggtgaggcggaagcggcacaccaaaaaatggtaaaatcggcacagcaagtcgcgatgggttttgaggatttttgcc

SEQ ID NO: 93367 - DNA, 528 bp, Heterodera glycines
gaagaccaaaagtgaaaaggaccgacacgagcatcgcacaacggaggaacagttgcgaacgcgactgctcaattcggacggacagtgcacggaattgcgccacaaattgcgcgctgtggaacaacaaaatgacaatttggagcggagagaaagaattcacacgcaacagttgatcgatctgagtgaacgctatgaccactgtttggagcgctgtgccatgctcgaggcggggatggccgtgccgcaggcgctgcccttggcggtgaatggcggaggcatcaacggcgtgatggttcagcaaattgactgtgccgacaatcagccaatggacttcgcgtcctccagcgtcaacaatatcgtggacaatccgtcatcgacgacagacacatcgcccgaggggccggcgatgcgcgagagagtgcgacagacactgaacgggagaccgacgcaacgactgatcgagcaaatgctgcgcaaagtggaggctgccgaagctcatttgaacatcagcagcttttcctcttcctc

SEQ ID NO: 93368 - DNA, 524 bp, Heterodera glycines
  unsure (1)..(524): unsure at all n locations
caagtttgagcaaaaagggaaattgtttttttgctttgtttaccaattgttctgatgacaacgcttgatgcgaagatgagcagttcgagctccgttttgcaagacttgctcagagatcacagttccgaaattggcaattggagtgaaattgtcaacaaccatcaggatgagagttcgaaacctgagccatttaccaacattgaccacaacggaccattctacatttttgtgcccaatttaacgcttgactatgccgtggacagtgtgaacatggaagtctacaaaatgtttggtggacataaaaatcttttcgctgtctacgcctatcggttggcgaagaaagtgtcgcaatcattcatgctgatggcacgggacttcgaaagctgtgttcaagtgttgaagatggaggagaagattgtcaatagcagcagcaaagaggttgtccgncttgagtacgtgttgccgtccgtcgccccgccaaaaacgtttcattacaccactgaacaggtggacaaccaattgca

SEQ ID NO: 93369 - DNA, 479 bp, Heterodera glycines
taagatcagagatggcagcggttgatcaacaccagcaacaactcgttgaacgcattaaacagcttgacaccctttcaacaacggcggatgaacaatttgacaattctttaaatgtgccaattggcgatttgtgtcgtttgctgttggccgcgctggcgggcgacgaattggccgcgggggaggcaaaaaaaatctgtcctccctcgtccccttttgccaatgccatcggttcgcttgccgttggctgtctccgggacggcattggcccggacggattggccatggaaattcagcaattaaattccgcctcgactgggaaaggcaatgaaatgcgcaatgcatttttggaggcttataggtccaattttgatcaattgaaaatggcattggccaaatcgaccggtacatttgcctccggtggcagtgcttatccaaaagtggttggcatggactggagcattttgagcgtcattgaatcg

SEQ ID NO: 93370 - DNA, 205 bp, Heterodera glycines
agtcgccgatttgggagagattgaggacgatgcggcgcttaaatcgtcctcaatcgcggctgagcacatcgatcacggtattttcggcaatgtcatccaatcgtcgaaggacgcggcttatttggcccgtcacatcggcctccgagttggcgttcccgaccatgtgcctgccgctactgctaacaagatttgcggctcgggtttt

SEQ ID NO: 93371 - DNA, 430 bp, Heterodera glycines
gcaggggttttttggattttcaaaacaaaaagccccgccccccattctcgttgaggcaataacaattattgttgctcggggaaattctgtcaaaaaaaaaataaaaaattgggagggtgattgggaaaatttgcgtgtccccctcaaaaagatgaaagagggcccagcaaaaaatttggccccgaaaagggttttcaaatttatgaagcaaaaaggtttttttgaaaatcaaggcaaccacctccccgcgcattctttaattatggagcaaacaattttcgaatttgggggtatgaaaaacccccaggggcccgcccccaaaagaaaagaggttctcacttcgatgacgcgggaacacaaaagtgcggattttgcgaggaccgatcctctcgaggatgaaatgaaaaaattgctccagatgatttctcaa

SEQ ID NO: 93372 - DNA, 479 bp, Heterodera glycines
acttgatctcgtcgctggtttccggattattgaccattggtgaccgttttggcggtgctttggacggggccgcgaagagtttcagtgaagcaatggacacgggactgagtgccatgcaatttgtgaatgagcagaagcggctgggcaaactcattccggggattgggcacagagtaaaatcgataaacaacccggacaaaagagtggaaatactgaaagagatagcgaagaacaagaccttcttctagcaggagacgcctctttttgactacgcactcaaagtggagcaaatcacaacttcgaaaaagcccaacttaattttgaacgtcgatggggcaattgcgacaattttcgtggacattcttcgccattcgggaatgttcacgccgcaagaggcgcgggagaccattgagattgggtctctgaatggactgttcgtgctcggccgcagtgtgggattcatcggccattatttggac

SEQ ID NO: 93373 - DNA, 355 bp, Heterodera glycines
gccttgccggacaccgtttcaacgcgttcaaaattacgccgaggaacaggcggagctcaacgacggagtagcgcgcctcacgaatggtggaccgattttgggaggagttgtagttgatctggttttcagtgatctgcgaagatggagaagcgttgcgattgatcggaagggccaacaaatgggtctgaaaggccaaaatatattattctttggaagaaatttttatatatttataaaattaatataaaaaactttgatttgatggaatttcaaaaaaagaacccataaaaagccatggaaataatgatgtttcaacctgagaagagaagtgccgagtgccaacatgaagactgta

SEQ ID NO: 93374 - DNA, 578 bp, Heterodera glycines
gtttgagcgctaaaatgcaagagactcacattgttctcgggattgcctcggtgtgctctctgttggctatcatcgccacagtcgtcactctgccatctctgtactcggagatgagccaaatgaacagcaaagtgcgcgacggagttgaggccttccgcgtcaacaccgactcggcctggactgacttgatggacgtgcaagtggtcgtgacgccgccgtcgaagccccgtgataaccccttcatcctttcttccgtgccaaacgtcaactgcccggacactgtcattgcgctggcctccaacaggcaagctgtccccctgcgcccccccgggccgtcagtattgccgggactgtcctcgaccccccgaaacccccccacacttatccgccgtccggccccccctcgccatcccccccccgcttccccctttccggtggtaccccccggtctgtcccccccgcgtacgcgccacccacaccctatatgtaacgacccgcccccgaccgacgacctccgcgggtcccccgttttgtgtcaggccgccccgccatagcccccccgcgtacaaccccccccc

SEQ ID NO: 93375 - DNA, 280 bp, Heterodera glycines
ttggtattttcattttcctccatttttctccatgccaaccacagcctcttctactcttgacaaacaactaaaagcttgcggaagacttttgctcgattattgccaagcaaatcttatttacaccactgatttggacgaaatttcaaagtcggatttattcaacaatcgtcgactgaatagacatttggatctgtcttgttttccgggagtgttctactttctcgaacttcacaaacacgttgagtgcaacgataaggacaagacccgctgcgacatttat

SEQ ID NO: 93376 - DNA, 283 bp, Heterodera glycines
gttttgaagacaaatatcattcataagacggtttctcgcatggtcaaagtccgtttgtatttggccttcaaatctccgcacaacttgagaggcttggcattcatcacggacccggacgcctattggattgagattttcaatccaaacaacatgtgaaaaacgaacccaaaagattgagaattggattttcccattggcgaagcaatcaatttcgaaaaatcacaatagagcctttttattatttatttttttatttttataatcgaataaatatttatgactt

SEQ ID NO: 93377 - DNA, 279 bp, Heterodera glycines
gagtaaatttaaaatctatgttcatcgctgtacatgccggtgccggctttttcgccgaatctgctgaaaaaaattgctcagaagcgctgaagcatgccgtcgacatcaacaatcgcccaaccgacaatgggaagcaatcggaaattggccttggcggtgacggcattacttactctggggctgctggtgattgtccccttgttgctgctgtcatgtttctggagcgttgcccggcgctcaactgcggtctcggctcaaatctgaccgttgccggctcgg

SEQ ID NO: 93378 - DNA, 91 bp, Heterodera glycines
tcaaaatgcaccataataatcgcatttataagtttataatgaatatcttcaatgtttagtatcacttatcgttgtcctaaactttgactga

SEQ ID NO: 93379 - DNA, 289 bp, Heterodera glycines
ctcctcaacaaatttatcctaaagacataaatattgtataacacaaaacaaataaaagttgatcattacaataatatgggctcaaattcgttctccaactccgcaattcaattagatcgatcagttctcaacaattgattcattcattcacttctgctgttgatcacttgggccgggaatttcgtcgagaagcccatcgtttttgtcatccacaaaaataggacaaatgctaattcgattccattgaccataactagggagtccaattatatgcacatgcatatttttt

SEQ ID NO: 93380 - DNA, 253 bp, Heterodera glycines
atttaaatttcaataatggaccaacttatcagtgggcttctcggaggtggcggcggaggaggagcaaattctggtgataatcagccgcagcagggcggcggaggcagtggcaatcagttggcagatatggccggggaattaatcggaggatttcttggcggtggcgggggaggaagcggcgccttgggaggaggcgcaggcggcggggacattctgtccacgctggtcaacgcggccaaaggctttttttttt

SEQ ID NO: 93381 - DNA, 475 bp, Heterodera glycines
cggatttcaaaatgcaagcgccagattggggcaactacgacaccaacggaaccgactacgactacatctacaacaactcggacgaacgggacaactggaacagcgagcaggccggcgtgttcagacatttagtgacccagctcggcaccactcagactctgcagaatttggcgctgcccaccttcgtgctggaacgacgctctctcctcgaaatgtacgccgacttcttcgctcatcctgatgaactgatcgccggcgcctacgagaatacggctgagaaacgattccttgccgtcctcaaatactacttgaactccttctatcctgcacgcaaaaccgacgccgcgaagaagccgtacaatccgatcctgggcgaagtgttccgttgccgttggaccctgcctgacgtgccgttgtccgcaagccgaaccgccggtggaccgttcccgggctcagcaaccaaccagatgacgtt

SEQ ID NO: 93382 - DNA, 238 bp, Heterodera glycines
gttcaaaatgccaaagtattctctgccctttccttgccgtcatgaatgaactgctcgccatcgtgctcattgtgctgttgtgctgcgcgatgtttttcgcgtggcttttcgccttggcaacttgcccagatcgtttggtcaacctgatcagtggaacaaagtccagttcgtcgcccatttcccgcgccagcgaagacaacggcactcgcaagggctcctcccggtggcgcttcggagg

SEQ ID NO: 93383 - DNA, 254 bp, Heterodera glycines
cacaattttaaatccatggcaacatcggctaaccatcggccaatcttcgaatttattgtcgaattgggcattcgtctccaggccgattcgctgaccgtcgcctttgcctcggtgtattgccatcgcgtgttgcgccaaaaggcttttccgggcgaccaaatttgtccctttacaatggcttccgcctgtgttttggtggccggcaaagtgacgaacgacgcgcgcattaacacgcgcgacgtgatgaacatggc

SEQ ID NO: 93384 - DNA, 471 bp, Heterodera glycines
ccgtgttgagctacgagcccgagctcgccgtgttggccgcgtcggcgtacttgtcggacgtgatttacgcgattcgcgcaagcgaggccgccctcatgaagaagcgcaagggccccgcggtcacaagcaaggccgccaccattttggtggccacaacgtatccggcatggcaagaggagctgcttgacgtgattcgccaagtgtacaaggggacgggcaacgattggaagggtaaagatctcgcggcgctcaaggccgccgggttgctcaagaacaagaaggccatgccgtttgtcaacgagatcaagaagcagttggccatcgtgggtgaggaggcgttcaaccggaccttggcgtttgatgaggagcaggtcgtcagggagaacttgttggtgattcaaaggagggtgggctttgacttgattcgtggtcgagttgacgaccgagccaggggtggagtgatgaggaggg

SEQ ID NO: 93385 - DNA, 651 bp, Heterodera glycines
atttggacggacactctgcaggccggattcatctacggagggttagccgttatcattgtgcgcggcacggcacaagctggcggattgacaaatgttttggcgattaatcagcggacggggcgactttggtccgcatttcgtgtgcacccgtcactgctgcagtacaacaacctgtgggtggcaatgtttggtggcattttgcaatggacgtgcatttacgggctcaatcagatggccatgcaaaggtactgctccatgccgtcccttcgccatgcccgcgtcgtcctctctctgaccatgccggccaacttgctgatccaattgatgatcggctacatcggcctgctaatggccgcttactttgaccagtgcaatccgcttgcgctgggcgaagttgaaacggtggaccaagtgaccattctgatggcttcgcgcattttcgaaggagtgcccgggttgccaggactgtttttggccaccattttcagcgcgactttgtccaccgcaagttccggcatcaattcccttacagctattttatgggaagactttctcaaagtgccgttaaaagatctgtcggatgcccacaaaagttgcgcaatgaaaggcatttcggtctttttcggggctttggccacagtgatggctttt

SEQ ID NO: 93386 - DNA, 605 bp, Heterodera glycines
tgtacgcgcgcgacatctctcccgtccatgtggagtgggcgtacgaaagcggcaccgacgctttgcgaggcgacaccgcaatgttggaacgcgtgaaccgcttgcagatgacgacgccccacaacagccaacaaagccgtgcctcgccgacgcgcacttcgtcggcacagagtgtcaacggcggcgtcgctccctcccgcccatcttcgcccgttgctgctgaaaaaacagtggcgccaaagcgaaagaagcgacggaaggcacagtcaccgaaaattcagctggtcagctacgcgacgagcggaaccagcagcgatgaggacgaagcggagacgagcagcagcaacggaggaggacggagaaacggaggccgaaacggatgagacggacgcggaagaaaggcggaaggggaaggaaatgcagagccaacccatgaccattttctatgtgtatgaagaattgataatgcattttttaattgtccaaaatgtatgcgatctcttgtcctccattgttgatttttttaaagtttagacattgcattttaatcggcatttgattgttgttactgttgagaatttatgcattaaattttttttattgtt

SEQ ID NO: 93387 - DNA, 526 bp, Heterodera glycines
cgcagcgaaaaatttgtttgattcccatctccgcccatggcacaaatcccgccactgcgcacatgtccaatttccgagtggtcccagtggagtcggacaaacacgggaacatcaattacaaggacctctcagcaaagtgtgaaaagcacggggcggagttggcatgtgcgatgatcacttatccgtcaactcatggagtgttcgagtccaacattttggatgtgtgccagaaagtgcatgagtttggaggtcaaatttacttggacggtgccaatttcaatgcccaagtcggcctttgtcggcctggcgattacggaagcgatgtgtcgcacttcaacctccacaaaactttctgcattccccacggggggaggtgggcccggcatgggcccaatcggagtaaaagctcacttggccccctttctgcccggccacccaattgtgccgatcaaaggcaatcgttccggcgctgtggccgcttcgccgtggggttcaagcagcattttgtccatcacttggacataca

SEQ ID NO: 93388 - DNA, 661 bp, Heterodera glycines
ggtacttcttcatcacttcgacatggaacatattcgcactaattgagacgtagctaattatctgtactgctgactccattaagatgccagatgcgctcgaattatgctgatacttgcagacaccgattcattcttccgcgatgcgaatcttctcgatcctacaacgcataccaaaatcgagggaaaggttgattactgcacagatattgctacacatttaagactacgctgagtgcgattgctgtggcaccatttgttttgccgtcagtgctggtccaattacttgtcgtgcaagattctcggcgagggtcgaccttatgtcacttgtcctgaacttcgatgtactattgttgcggatgatgaatttgtgctcaaaaatgtcgacaataaacaagcgttgcgttcctatcacaaattggtcctcaactcttttgtggagtgtaacaccttgattaaatggtgccccgctcccgaatgtggtcgtgctgtcaaagtacctcattcagaaccgcgcaaaattctttgcaaatgtgggtgccttttttgcttcagctgcagccagcaatggcacgagccaataaattgtgaccttctcaagaagtggcagaagaaatgcatcgacgacagtgaaacatcgaattggttgagtgccaacaccaag

SEQ ID NO: 93389 - DNA, 574 bp, Heterodera glycines
caaaaatctcaaataactttcgcgcccgtttcctcttacactcttcggaaacaaaaaagacccatcagtcgttcaactgaagagccgccacccgttcttacaaagggttcagaaaccgaatttgacaactgtgaggagccaccgccgccgttgttggaggcagaaacagcaacagacggagatggatcggagcatgactttgtccagaatggttcgattaaatcagtaagagatctctccgtgattatgacatcagctgcagaaattggtagggcagcggaagacagtgccgccggctgtgaccctccagcggaaccctttattttggagagcaggcatttgccttcatggttccgaaattgccctggatgtcatcccgatcaaaattccgaacttctgtttcgtggacgaatcgctggtgggcctcagtctggccctattgtctcaatcgaatgcgcattttgtggttcccgatttataacagcgattgtcactgggaacggcgaccgacgagggctgaaagtgtagaaaagaagagcacaaaaggctcacaatcagcctgtgatttgactga

SEQ ID NO: 93390 - DNA, 641 bp, Heterodera glycines
cctcgtgccgcggtcaccatgtccaaccgccagcacaccaacgttttggagctgttctttcgccgaccccaccaccttcggcttatccgtccgctggtgtcgtcatctcttccaaagtcccgccattctttcgcagtgttccgcccgcttccccctttgtttgtcccgcacctccttcggttgttctctctcaaccgcccccgatgggctctccactgccccaacgggcgcagctgagccgtgcgcagttgctgagcaggcacagccgagacgtggaggcacgcaaattcgcggtcaaactgtaccacttgcagcggacaatcaaagcacttgtctataaaaatggtgcattagcggacgaattggcacgactcaatcagcgtattaacacagtgacaacggagcgaaagatgttggccaagcgcttgcagcaccacgaaagaaaccgaattcgacgcattcaatcgcagtatcggaaggcaattgcggcagctaacaataagcagcagtcgaatgctgtagaagcgctgttggacgaattcggcggtgaggggagaaatgtcgcacaaccgaagaaaagttgacattataagtaatcggaggatcgagaaaacgcgtgctttcatattcctttttcttaa

SEQ ID NO: 93391 - DNA, 549 bp, Heterodera glycines
tcacatttctcctactatgtcctccactgtccttcaaaatgctctccgcctgttgttcattactctgatcgttttcaactgttgccatggtgcgccgcgcgttaagctcaggaaaccaaccgaggagaagacttcgacaaatgaaattgctggcctcagtgtcaagttatggatcatcattggtgtctcagttttgctcgccctcgttgttgtgtgtgccattgttgtgatttgctgtttgtgccgtttaacgccgtttcggccacgacaacgatgagctttcgacagcagtgtcaagcagttactacaaatcgcggcagggaccaacggattcgagggactggccgccgacctcagcttctgggcatggccatggtcgtggaggacgaagcggtggtggtgcgatcacggcggtgccaagcggaatgatgtccaagatgccaacaatgaagacgaagcagccgttctcatttcgaatgctgatgccgaaaagcttacgctcaattggaccatcacgaccagcgccatcaacagcaacaatggaacgag

SEQ ID NO: 93392 - DNA, 630 bp, Heterodera glycines
agacgttccgtttgctgtacgatgtgaagggacggtttgtcatccaccgaatccaaagtcgtgaaggccagtacaaactgtgcaaggtgaagaagcaggcggtcggtgacaagcaagtggcgtacgacgcgcgcaccattcgctacccgacccacacatcaaggcggacgacaccgtggtgattgacattggcactggcaaagtgacggactacgtgaagtttgatgctggcaacatttgcatgatctgtggtggacacaacattggccgtgtgggcattgtcggacatcgcgagcgtcacccgggttcctttgacattgtgcacatcaaagactctgctggccatggccattcatttgccacacggtgtggaattatttcaccgatctgttcgactattttccgctgactgcgttggtggacggccaaattttctgtcttcacggcggtctgtcgccgtccatcgactcgttggaccacattcgatcattggaacgtcttcgggaagtgccacaatggaggcccaatgtgcgatttgctgtggtccgacccggacgatcgtggcggttggggcatttcgccgcgtggtgccggttacattctgttgaaagggctggatttggtgcgtga

SEQ ID NO: 93393 - DNA, 601 bp, Heterodera glycines
attaattcctgcgtattattgcggctgctgttctctgtccgtgccatcatcaaatcaaatcaacgaaagctgagccatcggaagtgtgcacaaatcgactaccaaacgaaactgggcaccacaaatcaacaaaatcatcatcagcagtaaaagtggtgcagaaggaaacgcatggaccaaatcggcggcactttcagcgaccaaatttggctcgacacattggcgtggattggacgtggcgaggtcggatggcacttggcgctggtcaacgcccgcttcgccgccctggtgaacatgcagctgcagcagaggcggtggtgtttggaggagtttcacatcagtgagcggaagccgaaacggactggcgccgaagtgttgagcttggcaaacaacggctcctacttctcgttgccattggccacctcaccgttgccggacagtgtcgtcggattcaacggcacattcaacatttggtatttggacgcagaagtgatcaatttcctgcaacgatttcggcgcctcttcaacacgtacatctcgctgaagttcaccattccgataacagaatttcgcgcttggcaagccgtggcacgtcacattt

SEQ ID NO: 93394 - DNA, 324 bp, Heterodera glycines
cttttctgtgttcattgcatggttttaatacacacatatttgtagaattcatttcctaatgaccaaaagttgttgtgtctgtctgtccttttctttcttctgactcacggaatttaactgtgacattggtttatatgcttggattgcactttctttttccgtcttaattaatgttaagaattccattttcttttattgtccgttttcttaatttaaaagcttaagcatcttctgacagtgagcactttttgaagtttaagcaatgtctggtcgttaatttaattttcactttctgtccgcttcaataaataaaacaaaatttgc

SEQ ID NO: 93395 - DNA, 477 bp, Heterodera glycines
ccatttttcattgatgttctcctttcacccgatgacaacttcagcagggcatctgagtgaccccgcgggcgctgtcccccgtcgtaaaatggtgccgtctttgggtgccgttgtgccccctcccccggagggttctccctcctcctcctcgtccccgtcgtttgcccatccgaatcagttaatgcaacgcacagacggcacttctcccgtaggaggcgatatgtccacgggcaccttttcccaccttcaacctttttttgccgcgttggcccgaaatttggccaatgtttcgccacaacagcagcagacgaaccaaagccaacggtgtcaagcgccgaactcagtgccatcaaattcaaataataacgtggcactttctccgtcgccttttccctttgcttttcccggcacatttttggcacgacagcaaaatgcgaaggagcagcaaaaacagcagcaaaattcgccaccaattgg

SEQ ID NO: 93396 - DNA, 645 bp, Heterodera glycines
attttattaacatttatgttattttaataccattattgtttgccccagtcattttaaaaaaccatcctcatttagcactcctctcgcaatgtgttcgcctattttgtctcttccgacacctctcagcctgccattttcttccgggaccctcacgttgaggacgatcttcgctacaacggaccattggacaacttggactctgtcaaaaaatggctcactgacaaatgcgtgccattggtgcgcgagatcacttttgataatgcggaggagctcaccgaggagggcattcctttcctcattttatttcgaattccgggcgatttgcaagcggagcgaacattcactgacattgtcacaaccgaattggaagaccaaaaaaatgctgtcaattttctgatggctgatggaaaaaaattcgcccatccgttgcatcatttgggcaaatccgagcgcgacttgccactcatagccatcgactccttccgtcatatgtatttgttccctgacatgaaacagttcggcgtcaaaggtcatcttcgtcagtttgttcttgacatgcattcgggaaaactccatcgtgagttccaccagtggcccgaccccacggaacagcccgcaccgaccaccacccaaccgccggcctca

SEQ ID NO: 93397 - DNA, 458 bp, Heterodera glycines
gccgtagaaaaggaggaggaggagtacggtagcaaacagctgatcccttgtgctccgtacgctcgtctgttgctcttcggcacgccctctgccattcaaagtgcgcaattggctcagctccgtgcgctcgtccccggcgcgcaactggccgtggccaactgtcggcctggcctggacacggacgaagcggtggaggaggaaattgttgccctgggggctagccatctggtatttgtccatggggcagacggagaaacgcgcgacgcgtgggaagcgggcggaccggcgaatttgcgggagaatgtgcgcgtcaacctgttcagcccgtggcttctctccaacatttgtgaccgttttggcattgtgttcatcgaatttgatggggagggcaaaaactgttgcaattcgaatgggaaagtgccgacaaatgctgacgctttacaaatgagtcgctacac

SEQ ID NO: 93398 - DNA, 616 bp, Heterodera glycines
attattattttcggaatggcacccgtcaaaaaaaggaaaaaactttcctcaaccgaccagcgccccatttctgcaactgttacaaatcaacagaaaccgttgggctcatttgtgacatttggaaaacggcgaagtctccgcgtggccatgaaaacgaagagtcgacgttggctgtgcaacgacatttggatggacattttgccactttttcgtcgtcctcaactcggccgcaaattggcacttctttcgccacgtttcaacgcgttggtcgacaaacatttcgacagcaaaaacgaactgacaattttgaaacaaatcagaattgccaggaatggaacaaaacttctgtctgtggttacgaagagcaatccgttgcccaacaaaatccgctttgacaaccttcgaattgagtacattgaccactccgtcatcgaatttcttcgttcaaacaagcaaatttttgcgaaaggcaccaacatggatttatatttggattttgatgatgtgtatgacaacaacggcattgtccagccaatttggagtgtttttgcacgcgaattttggcccatttttgcgccaaacattcgccatttgactgttcccattggccatcaac

SEQ ID NO: 93399 - DNA, 645 bp, Heterodera glycines
attgtcctttcttaccaaagctcgctttctcatgctctgttgccgaagtgaagggcgaacaaggcgaaaggacggtaattgccattaattaccatttaattgtgcccattttttgggtttttgttttacagcgtgaactgggcgaacttcgcgagattggacaacagttggaacaattagccaacattttgcactcacccgaagttcttcctctgggattttatctctgatcattccattcattcattgtctttcttccctctttttcaggacattttgctttccctcgaggcgctgttaagactttgtcagactccggtggttgctgctggcattttgcactatttaaagacgcttttgcttagggaggaccttttggctgagccgagttccctccactttgcgctcattgaccaaattgcgcgtgttcaccccaatttgcactcgagagtgttcaatttgctttgcgatctctacgatcaccagtcgaaccgcaacgaagtggccgaagtagtcatggaaaggcaacggcacgtcgtggagagatttgtgcatttgctgtgctgtgggatggcaatttccgttgtggagaaaatcatcgccatgttcaaagcgggacacatcgacatttcgttggtcaggtat

SEQ ID NO: 93400 - DNA, 586 bp, Heterodera glycines
attttgagcggattggtttatgacggggattcactgctgcgcattggcaatggcatttgtgccagcactttcccaatcgagcggaaaccttcgggaggacacgcggctgacaattccacggtctctgcttttgttacggtggcatttcaccgcgacgacgacattaagcgaagttcggccgaatgtccgctgctttggtttggccacagattggccaccatcgcccaagggcatgcccaattccattccctttggcactttccccttttctcggctcacccaaatcccagcgaatccctgcgggaaacattggacacaatcaatcgactgggccaaaacgaaccacaaaaaagcgacaagacaaagccgagaagcgatcagcaacttttgtcaattgaagaagtactgcaaaaagtggacgcaaaaaaactgagggaaatgcgcgaaaaattcattaaaatgccaatggaagagaaagaaagcggaaaaccatcaaaatgatctgtgtacttaaaacaccggaaaatccaaaacattacgaaaactttaagagtgtacactatcaaagagctatttgtaagagaaa

SEQ ID NO: 93401 - DNA, 447 bp, Heterodera glycines
atttattttaagattcaaaataaaatggtcatcgacggactgcgcgactgtctcctgcaagtactccgcgattatgcgcttcgcgtcggactgttggagcattcgaattccgtcgcttcgtctgacacttttgcgctgtttcagcgacggctgaggccggagcctttcgttgctggcacccatggaatggtcaccgagctgagatgcgagatttgcttcgatccattagtcagtccttccgcctctgccccggtcggagatgttcgtttgttggtcaacggaagtgcggtccacgagaaatgccatggacaaaagcaaatgccaaacgcaaaagcactttacgaggaaaggagaaatgagtgaggcaaagactggagaaaaaagaaaagcgaagaaaacaaatcaaacgggtttattatcagtcatcaccaaacatatcacttatat

SEQ ID NO: 93402 - DNA, 653 bp, Heterodera glycines
aagcgattgaaccaaaagcgattggttggagcacaacaaaaattgggccattgcccgcatcaatcggaaagcggtgcccgaaaatgcatgtgatccgaagacgcaacgtgaacggttggaggaagcaaaacatacggccgagctgaacattgcgtcgttgaagcgttttgaggacatggaattggagcggcggaagcgccatcagaaaccgacaaagcgactcgcgttggacgggccgcgtgtgcgcgagctgtggacacgggacggaaagcatttcatcacatttgtgcccgaaccaccgccagccgagcaatgctttccaaagctgaagccaagggagttccgcgtgtgcgcaatcagtggacagcgcgcgcgttacattgacccggtgacgcggctgccgtacgcggacatggacgcgttccgtgtgttgcgcgagaagtaccgccaattcttggagacggaccatgaccatattcaacagagacagcagcaacaacagcggaagaagtcggcggcaaatgattaaattggtcattatttgatttttttatttaaagaaatgtaccatctttttttattcgattgtcttcgtcgtccattcatttcatttgtttgaattattaaaacattcaatttgaaaaaaaaaaaaa

SEQ ID NO: 93403 - DNA, 611 bp, Heterodera glycines
actttcaacgtccgttggaacttggcgctgatgttgtgatgcattcgttgaccaagtacatcaacgggcacaccgatgtgctgatgggtgctatggtgaccaacaatgaccaacttgatcagcatcttaaatcacagcaaattactgctggtgccgccccgtcaccgtttgacgtctatttggtgatccgtggcatcaaaacgctccatttgcgaatgcgacagcacatggaaaatgcattggcagttgcacgatggcttgaaaaggacccacgagtggaaaaagtgctttatcccgagctcgagtcgcacccgcagcacaaaatccataagaaacagagcagcggaatgtccggcatggtctctttttacatgcgcgccgatgccgacagggcacgcaaattcctcgccaatttgaagctgttcacactcgccgagtcgcttggcggtttcgaatcattggccgagttgccggccgtcatgacgcacgcgtcggtgccagagcaaatgcgcaatctgatcggcatcagcgacaacctgatcagactgtcggtcgggtgcgaggacaagacggacctgatcaatgacttggacatggcattgaacttggca

SEQ ID NO: 93404 - DNA, 238 bp, Heterodera glycines
tcctgcgtgcccacctggagaggttggagcacctggcattcccggccatcctggagcccctggacagcccggtacggacggacagtcctgcccgaagggacctcccggaggccctggacagcctggcaatggcggaaccccaggacatgccggccaacccggacagtctggaaaccctcggatagcaacggaatgtgtcccttatactgtgcacgggaccgaggatggctctttgagg

SEQ ID NO: 93405 - DNA, 651 bp, Heterodera glycines
gtccacttttcgccgcctgccaaattaattttgccatcgacgatacccttacgatctttaacagcactttggagccgattttgcgcaacatttggccaatgatcgcgacaaacgtttgtgccatccaattgtccgccgaagttttccgccgtttgcgacatttcgagccgtcaattctcaacgactgtccatcgcttcgcgttttcaatgcgtattactttggtttcttcacccaatttccatgcgatgacagtgccgcggcatcggatggacaaacggtggccaaatggcttttcactcctcgtccggacgatgtgccaaaggtgttcaaatgctggttgcaatgggatgatgggcatttggcgtcgagcattgaagacttcaaaagggaatttaccaatgcttcatctcccgtcaatttcatcgctgtcattcgctttccgccgacttttgctgactccgttttgctcttcgatctgaccaatggatttacgcatgaacaattgacgttgacatggatgaacgatatcggccgttttctgctgatccgtcgtccaattgtgcgcgacacgaacaaatgggcaaaatgggaaaaggaagcgattggctggcaattttatgatcaatggaatcgaatcgacattcgttctt

SEQ ID NO: 93406 - DNA, 454 bp, Heterodera glycines
cactcatagtgctctcgagagtgcctctgtgcgctctgtggtgtatattatccacacaggccactctgtgatatctgtgcactcagataagacccatgagaacaacaaagcgcgacacagattagaggtcttccgcgtacacacacactcggtgtacagtgactatatagacgcgcaaggggtcgagacccccgcctaaaacccccgagataaccccttaatctatattttctgtgccaaaccaactgtgcccagactgtgacagcgctgtggtctcacacacaaaatgtgtccctgtggctccccgggcccgtggagaccgtgtagacaccccagacactgtaggcaaacgactcctccttgaccgtgcccaaacatcccctgcccactcctgctctgctggcccacaaggtcgcctggcgagactgggatggtggggacagcagggagcccc

SEQ ID NO: 93407 - DNA, 544 bp, Heterodera glycines
taattcggtttccaacggagaatatgccgattgtgatgagatggaattggacgagccgttctctgaatctgaaggggaagactttccacaagcgaagggcgttgagaagccgtgtttggtcatcccccgtggacgcatccgctcgctttccggtacaattccccccgtgggctttgcgccccattggggcgggccgacgatgtgtttgagttgcttccaatttttccaattgcctgagatgatttgcgagttttccactcatctcctcactgagcatcaaatctttatcgatgggatggatataatcgtggacttgaaacgttacattgagtattggcgccagcaattcgccaagcgaaacattgcagagattttcccaaaaatttgtcctaagcccgaagatgatgtattcggtaaagtgggtttctactttttgatggacgaaagtgtgaaagaagattacggattacgccaacgtttggccatgcgtcgtctcgaggaggctttggcatgccaacagcgcgagagagaagactccgtcttc

SEQ ID NO: 93408 - DNA, 500 bp, Heterodera glycines
caagtttgagcttgtaatttgatgtcgttggatggatgcagtttttctggagaaattatccgagggtggccttttgaatggtgagcagttgaacgaactggatactgacgaagtgcgcaaattggtcgaaattcaattccgaaaagacggcgcaactctccgcggtgttgagcatctgatcataagggtggaggcaaaagtgagtcggaacgaactccgtctgctgtttgtcttctatttggaattgcttcgtcaatgtgtcgttcaaaacagcgaaatggacgacttttgttccgatcaaacgacccgccaatttttgcttcagtttcaatttattttgacggaggaaagggcggacgaccggcagcagaattgggtgcagctgctactaggagaaatgatctgcaaaatgttcgtggagatgggcagaacagcggcggcgagcagtgcgtcacccttttgctatgaaattgctaagcagcacatttccgcccttttgg

SEQ ID NO: 93409 - DNA, 615 bp, Heterodera glycines
gattacattcacagagttgggagaacggcacggatgaaccgaaaaggagaagcgatgcttatgcttacgccgtcccaagaaccttttgttgctttgctcaggcaaaggaatgtccccgtcacaaaagtgacagtcgactccaacaaagtgtttgatgttcgtaataaaatcaccaatttgatggttcctttcccatcagtgaagcaatttgctcagcagagtttaatcgcttatgcaaaagctctctatttttcggaattgaaggaagtgtttgatgtgcaaagcattgatttcgatgcactttccaggtcttatgggttggtagttacgcctcggatcagatttctcagaaaaaaaggaattatgacaagaaaatatgtcgaatttgagaagggaacttcgccagaaatggcaaccaaaactgaagaaattttgcttggcaatccgagcggaagcggcggaaaaaatccatttgatattcaatgccaaaacgaaatggaggaggaagaaccatttttgaaggtgtcgcgaagggacgtgttcaattccatcactgaagtcgatatgaaggaagaaattttgtcgagaatttcttcaaagaaaccaatttcgaag

SEQ ID NO: 93410 - DNA, 588 bp, Heterodera glycines
gcgaaattctcacagtgggcgacggggcgacacacggcatgcaagactcatcgtcaaagctcagccattctcgatcagtgcttatcaaattgactacagccgatgtgtaatggccactgttcaaacgaccgctgtgattctaaaggggtttttaaacaaattagtgtaattaggaggataattttagtcatcaccgttattgcatagagactgaatgctgcgttaaaaagcggagacttctcatgtacatatggcgacaaatccaactcattcacatcgaatgtgactgcagcctaatttaaaatttaattaaccacgtacaaaagcggtgaccggcggaaaaccgacctcattttttacgaaggaccctccaaatttttgtgctccgtgtcgccggctgtttgcttttgcacttcggacaatcccaaggtgcttcgagattctgaaacaagaaaacagaaaggcaaaataatcaacctacaaaattcaactgctcactgttaatgaaaaatgcgccccgagacagtccttcagtttcaggcagccaatatttgtcggcaactcgacgctaaattcaaattcaataag

SEQ ID NO: 93411 - DNA, 584 bp, Heterodera glycines
caacagcaacatcaccgtttttctggtgatatttgctttgactggcatttgcaaatttggcactatcgcttcacctgttcacaatgaagaagatgaaataaaaaatgctcagccacgctttgaaattggtgaatcatcaagcaaaatgagtgatgaatcgaaaaacaacagacacagcaaaacccaaaagctgagactgcatcgaccaaattgccactggattatgacttgcagcgtgtggctgcaaaagcggctggcaatgtgtacgcgtggcttccggccgacaaacagcccaaaaagcttgcggacatcaaaccggcggcaccggcggcaccattgccgccagccgattatgacgtggagcgggtggcagaaaaagcggcggaaagcgtttacagttggttgccaaaggagctacagcccgaaatgatgactgaggatgaacgtgttgaatttacagctgaagttttccaggacatttgaaggtcatcgaatcattttttgttcttcaaatgattcagtttagcgaaggatgacattttattttttattcatttttgtaattgttcaacaattttataaga

SEQ ID NO: 93412 - DNA, 612 bp, Heterodera glycines
gtgaagatttccaagtgggcgaagccaaatgaatgttggcgttgttgaaccctttcctcattgaattattgaaattatgttattagtttgcgagttgtccatgaccgattaatcaattgaaacgcattcttccccctcccccaagggcaagtttatttcggatgggctcctccaaagagaacgatggactttccgttgccggccgtgcaaaagcggccaatcgcctcgaagtaactgatgcggccaccagacaaaaactgaaacggcacaatctgagatacactgatctccagctcacccggtcgcttttggttgtcaccacagtgttcattgtcctcaaccttcctaattatgtctatcgcatttccatccaatttttcgttatcagtgaacagatcaacttgagttttgccgcccacgtgctgttgtacacacaccacgccatccttttttacatttacattttcaacagcccacaaatgcgcaaaaggcttattccgacggcacttaaactgttggagtgttactgtttgaagccgcggcacctcaacgatttttcggacaatttgttccaatgaatatttatttatttattttggtccattcatttgt

SEQ ID NO: 93413 - DNA, 646 bp, Heterodera glycines
ctccactcatttttcctccgtcggattgatcaccactgaccgatcagtgccaacgatggaaaatgaaagtcaaggtgcgcatttaatggaccaattggacagtgtcatcccttcgctggtcaatccttccgagtgccaaagtgagaaggatttggcattgtttcggcaacttttccgccaatttttggaggatccgcacaaagtgaattggcaggaaatacaaccaatggcaaaggaaaagcaaatgccatacgaacatttgccgaaggtggagggatcggaggagagaagggcaattttggaacgaattgcggtgataaaactgaacggaggattgggcactacaatgggctgttccgggcccaaatcgctggtccaactgcgtgacggactcacctttttggacttcgccctgcagcagcaccgcattctgttgaactgcgccgacttgcgctcccccgttccgcttctgttgatgaactctttcaacaccgatgcgcaaaccaaagccttcctctgggcacaaaatgccaattctgtcgctgctgtcaaatgcttttgccagtcgaagtgtccccgaatatttgccgattctcttcgtccggtgcccaactcgtgggatgaccgtgccgaagaaggttggtac

SEQ ID NO: 93414 - DNA, 566 bp, Heterodera glycines
aaattgtgcaggaacgcgtattgggaatcatccaatcgtgggcggacgcttttcgcgatgacccggcgctgtcgggcgttgtcgaattgtacgacgaattccgggccaaaggcgtcgaatttccagccaccaacattgacgcaatggcaccaatcgtcacacccaaacagaccgttttcccattggccgacgaccaaagccaacagcaaaatggcaaaagcgtcgttcaaactttcccaaaaccggatcgtcccccgttcgttcccccgcagcaattcgtcggaagtgtcggccccgaacagatggccaaactccgttccgagttggacattgtgcaggtcaatttgacggtgctgcgtgaattggtggcgcaaatgaaaccgacgaacgacggcggcgtcactgaagcgccggaggactttcattttgtcagaggattgcactcgacttgcaaagagatgcaaaagcgcattgtggagctgattccgtccgtctccaacgaggaagtgactttggaacttttgtctgtgaatgacgagctcaacaccaccttcgaaaagtacgac

SEQ ID NO: 93415 - DNA, 432 bp, Heterodera glycines
  unsure (1)..(432): unsure at all n locations
gagaaataatgcaaccatttgtccattggtcgaaatgcatattcaaacgtccattttctaattcttcaaaattattttcgtcgtcattttcaatggggtttaattttgaatttaccgaagaacaaaaacaactccaangcggctggtanaaaaggaaaaaaaaaaaattttttttttttttttttaaaaaaaaaaaaaacccaccccttttttttttttttctccccccccccccccnnnnnnnnannanaaaaaaaaaagggggggggggaagaaaaaaaaaaatattttggtgtgggggggtgaaaaaaaaaaaaaaaaaaaaaaggttgtttatttcccccccccccccccccccccacnttttttttttttttttctctttggccccccccccccccccccccccctttctcttttttttgttgggnn

SEQ ID NO: 93416 - DNA, 629 bp, Heterodera glycines
accacctgtggttacacatcctaccataccgtgcctgcggctcccgctcccccgccaccaccgccgcctccgcctccgcctgcgcccgtctacagccaggtgaggaattttcaaaatttctaatattaattttgaataaaatattttgaatccactaatttctggattatgaactaattacttgagagaatgtggtgggattaagtttttgatgggggatttcagtcttctgagtactaaaaaatgatttttgttttttggctttcatttcttttttttgattaataacatccatgatccccaagattgctgaactacatcaaatttttagccaaaaaaaggcataatttttgtcatatttcattcgttcagtcttcctactcctcctgttccacctgcggaggcagctcctactcctcttacccgtcttcctcttactcctcttatcccgcttcttcctcttcctattcgtcctaccccgcttcttcctcttcctactcctcttaccccgcttcttcctcctcctactcgtcctacccgtcctactcctcctcttcctcctgctccacgtgcggcttgagcggctacagcaacagctggaacaacggtggcagctcgtccaacacgtg

SEQ ID NO: 93417 - DNA, 639 bp, Heterodera glycines
gcctggggcaaatggcttaactgtggccagacatgcttggcacccgactacgtaatggtgaccaacgaaatgaagccgagactggtcgaggaactgaaggcggtgcttgtggaatattacgggacgaatccggagacgagcaaagactacagccgagtcatcaacgaagcccactttgaccgtatttgcgcgttgctgaaaaactctgtcggcattgaaatttgcaaaatgggacagcccaaccgggaggatttgttcattccgccgaccattttggaggtgcaaaccgacgacgcgctgatgcaatccgaaatttttgggcccattcttccgtttctcatcgtccgttcttttgacgaggccattgacattataaagcggggagagaagccattggccgcttatttattcactcgcgacgagcgcaaagtgaacagatgggtcgccgagacgcattcgggctccgtttgtgtcaacgacgtgatgctccaaattacggtggacactttgccatttggcggagttggcgagagcggaaggggcagttaccgggggaagttcggcttcgacgagttcacccaccaaaaggcggtgctgaagcgctgctttttcggcgatggcattgctgctggtcgttac

SEQ ID NO: 93418 - DNA, 436 bp, Heterodera glycines
gtctcatctcagttcactcggaggaaacttccgccaagtgaaggcgtgcttcaccccaaaagagaatctgctcagttccgcgatgcgatgcaccaaaagacagcacgacaacgcctgctcccattcttcagctgatctatttgggccaaaacgatactgccaaacattggaaaaccaagcgatggtggaaatcgatcggatgatcgttcgaatggggctggacaagagcgggtccatgaagaagctggtcagtgcgagcaagaaactgtacggatgtctgaagcaatgcatggctaataaggcgggcaactgcgaaaagcagctgaagtgtggccttctgatgccctcggacagtgccatggtacaaaataccacaagctgtgccctgaacaacgggtttaacaccgcaaccgcacaacagaacggccatctgtgt

SEQ ID NO: 93419 - DNA, 209 bp, Heterodera glycines
tgtttcggctaaatccacggggattgattcaaaatgatcgttgataccctctaggagctgtgctttcgagttggcacccgaccgattaggcaaattgaaaaatttcttatagcgacgaagtgttgtcgcaaaaagctcatcaaatcttatcttaacggttttattgaaaccattccataagtttgaccaattttcctcacaatccgttg

SEQ ID NO: 93420 - DNA, 617 bp, Heterodera glycines
gtgctttttctgtttctccctccaaatcattgtctaatcttttgcttgacgacagtccgtcggatgaaagcgccgatgaacgcgatgatcagactgacttttgtgggcagcgtcagcagattggtgacactcacagtcattcgtcatttgttgccgaagttgtcgattcccttcagggggctttggaggacggttttttgagagagaatgaaaaggcgaaactgagtggggatttgctgaacaaaataaaattggaagtcaatgcctccaaattggcctacaatattcccgcagaagaagtgccgggccttctcttcactgcttttcttagtctccctggcgttgtcgacaaattttcggagttcacaaagatgtacaaccattggcgtggactttggaaaatgttttacagaaccacttttgctcaatcacaaatgctttttgctattgaggagaaagcgtctgattctgaccgcttccgtcgtgttctgccaaaagtgctttactttttgagtcaggaagttaaggcaatggacgatgctttaattgttgattggtactccaatttggaagaaaagtcgcaactgaagaaagaagagaaactggctgaattggtc

SEQ ID NO: 93421 - DNA, 319 bp, Heterodera glycines
aaccccgggcggcgcatggcgtttggcagaggcctcatgtgcccatattttcaatttcccccgcaaatcccggaccgccgatctctcccggggttccgggggtggcgggcttttccgcgtcacccgggtgtcccggccccccgggctgtacaaactaaccgggcaattctgggtggacacgaacacccgggtaccccctgggtccggggggtccccggggatcgacgaatgtctggccctaccctgggattctgccccgggctacggggtggcccaactggtccaaatcatcaactttcccaacagggccacgtggacc

SEQ ID NO: 93422 - DNA, 558 bp, Heterodera glycines
ggtggccatgtaaaaagaattgccgaattttgaggaaaatttgggtgtgcaacgacatttgaatggacattttccctcattttgatcgtcctcaactcggcctcaaaatggcactgctttcgccacgtttcaatgcgttggtggacaaacatttcgatggcataagccaattgacaatttggaacgcaataacaattcacaggatcggaacaaaagcaaaattggttgtagaggagaacaatgccaaatttccactgcccgaccatccgctgcgcaacaaaattcgctttaattaccttcaaatcgagtacattgactattccgtcatcacatttcttcgtgccaatcagaaaatttttgacaaaggcaccgatttgaatttgtttatgccgtactacgaccatgatgacaagaatgtccagccaatttgggatgattttgcccgtgcaatttggcccatttttgcaccaaacattcgccatttgtccttttccgatgcccatgcttttggcaatttgcgtcgccacatttcgccaacaattctcactgatctcaatc

SEQ ID NO: 93423 - DNA, 560 bp, Heterodera glycines
aattctcgggacggacttgaggggacgcgtgccggcaatgatcacaatgcatgcttattcccaactttggatttaccctttttcccatcggcgcggcgtttacccggccgacgtcgaagaattaaaagcggtggcccgtcgtgcagtgacagcactggcggagaaattcggcacaaattaccaatacggcacggggccggagacaatttatgcttacactggcggaagtgcggattgggccaaggaaacggcgaaagtgaagtacacttacactttggagttgaggccgtcctattggtcatggaatggcttcgttcttgacagagcgcaactcattccgacggcacgcgaaacatttgacggcgtttttggtggtgatggaacaagtcgtaagggaaatgaccgagcaaacggtgcccaatccgaacgccgcggttccgttcgtccgccgttccatttcgtctgcccctctttctgctgaccgtccccaaagttcgctctctgccgatgatgttaattcgcgccatgggctccgttgtgtcgtcacgcgtccttcccaa

SEQ ID NO: 93424 - DNA, 612 bp, Heterodera glycines
cttcatcaccagtctttgtcgttgtcgtcttcttcgtcatcatcatcattgtcgagtcgtctcctcccgccgctgttcttcatccatcatcgcgatcactttaataatctccgtcgtcacattttcaccaccgagccgtcccaaaatcggctgatcacatcgatccgccaccgccagatcaccacaatcagcggctatcattctgctgctcagatcactttcttcaacggcagcggcaattttcgtcagcacaaaacagcaaccagcaacaacaaaatgggttcaatcacgcagctgagcagtgtggagcagcacaagtgcgcactgctgcacaccaacggcggtccggcggttgcgcccgcggcaccgttgacgctggagccgttggccggccctgacacgggcatcctggtggcacggattagtgtgccatcaacgcgcaacgcgttctcccgcgcacttgcacaagcgttccgtgacatggtcgaccaattgcgctacggcctcgaaacgcgtgcgttgattttgaccagttctgtgccacaagcattctgttccggcgtcgatttgaaggaaagacgtaaaatgacgtccaacgaagtgaccactttt

SEQ ID NO: 93425 - DNA, 487 bp, Heterodera glycines
  unsure (1)..(487): unsure at all n locations
gcaagagactcacattgttctcgggattgcctcggtgtgctctctgttggctatcatcgccacagtcgtcactctgccatctctgtactcggagatgagccaaatgaacagcaaagtgcgcgacggagttgaggccttccgcgtcaacaccgactcgggctggactgactggatggaagtgcaaggggtcgtgaacccgccgttcaagcccccgggaaacccctttcaatccattttttcgtggcaacgtaaatgggccggaaactgccaggggcttgggctcccaaagccaaattgtccctttgggccccccgggccttcgggaaccctgggaaaccccggaaaccccggggggagagaaaaccccgaaaacctggaaaagttggggaaacccctttttctggggcccgcaaaaaaaactcctcccccctctttcttgggccccccccccccccnnnnnnnnnnnnaaccctctgtgggccccccc

SEQ ID NO: 93426 - DNA, 532 bp, Heterodera glycines
gtccaaccaccattcacagaaacagttcggagagacggcgcagaattaatcgtctttctcgaaagtgttctgcttcagacgataggttttgatctccaggttgagcttcctcatccacttgtccttcatcacatgaattgttacgcgggtggtaactcggcgatttcacgctgtgcctattggttcgcatcggagatgatccggttgaaaagcatccgcatttttgtttcaccacctccttcgtaggttaaccaccttcccggtgcggtacagcattcagactattgcttgcctctctatatttttggtctcgctctggtcagatttagagattcccgactctaatggtgttccgtggtttaaaagcattgaaccggaaatgacaatggatctgctgaacagttaatagcattcagattaaagcgataataacgggccgctctttgagcactcgccgatgagttcacgctgctttaccacgagtgtgggagcagcgaatgtcgcaaggcggtggatttgcttcagcggttaa

SEQ ID NO: 93427 - DNA, 495 bp, Heterodera glycines
gaactagtctcgagttttttttttttttttttttttttttttttacaaatgatttatttgctgtttttttgcataattaaaaagcatttttcggtaaaaaaaatctgacaaagacaaaagtaaaaagcctattgtaataataacaataatttataatcactttcattaaatgttattttattattattattggcatgtcaaattcactgggcaattgaggcgacggacgccgcgccgctggggaaatggtggggcaggcaaattctgtcaagcacatcccgcggaatgtgttctcggagaatggcattttccgcctccaatcgaatcaccgtcgcctccaaatggacaattcgcgcacgtaacagttcaatctcatcacgaactgcgtagatgagatggcttttcacaaggtccattgcctgctcaatttttgagtctatggccaccactccgtcgcccttttgagccgtcggaacagcgccagtcgaggcggaa

SEQ ID NO: 93428 - DNA, 536 bp, Heterodera glycines
tggccaacctttgtatttcacgcgcgaaaatgtgacggagcgatacggagaatacgaaacgcgcaaaattgacttgtgggaaaaatttatgagcacattttccgagaagcagaaattcgaattgaatcggactggatttgtgccgatgcggccggaacagatgcgaatgatttacggggcccagtcgccgttcaatgacacggaagctttgcaccgtttgtcttctctgaatgagacgcaaattcacgagggaatggagagagacatccacaacatcgcgcgtctgaagcagtggcgccttcaataccatccccgcgctgagtttcactcgcgtcggcgccgtgccgtcgttttgtcgccaattgtctcctcgccttttgttctcgccgcccctgggcttagccaagcggtgattctgtcgcccgttgtgttgtcgccggtcattttgacccccgctgtgttcgggccgttcattctttcgccatgggttttcgtgcccgtcgttctctcccctcgggtgctttcgccgtttgtgg

SEQ ID NO: 93429 - DNA, 615 bp, Heterodera glycines
ccaattaagatttgttaaatccccaatttatttgtctaaaattttaaaatgtcgtcggccggttcaacaaatggcctcaaaatgaatgatcaacagcagcagcaggaaagtgtgcccgattctgaggtgattcggcaattgcgtgccaaaattgccgaattggaagcggcgaacctccgaatgagttcgtccactgcgagtttcgatgttttttcgtcgccaaatggggacgatgagaatgattctttcgaaggccaaaatgaacagaacggaggggaacataacgacaaaagaattgaacagttggaaaagatgatgcttcaaatggagattaatcatcagcaattgctgaccgagcacaattcgttgcgcgagaaaatggcccaaatggaaaaggaacagcggaaaatggccggtcgacagcaaaatgacaacacggaactttgtgcagcatttgaggcgctcaaacagaagcagacatccgattcggagcagatgaacactgtccgggaagagattctcgtgaaaattgacgagttggtcgaattgtccatcaataaccttgcttttcgtcataaatttgctgccatggaaaacattgtcggcattttgaaa

SEQ ID NO: 93430 - DNA, 245 bp, Heterodera glycines
gaacaagccaacggtactctgcaattgaccgccaaactcattgacgaaatggcgcactcaaatgggtttctgcccacacactgaccgaagtcatcaaacattgtcggatcggtgatgactgataagagtgccgaaactgtgtgacacgttggctgtgttaattgctaagctggttgagcaaaacatcgtcacatcgaacgttatttcgtttttggcctataaaaattcggatggcaaggagtccg

SEQ ID NO: 93431 - DNA, 509 bp, Heterodera glycines
  unsure (1)..(509): unsure at all n locations
ttactaataaattattcataatgaaaaggccttcttcggttgtcgcttttggtagtcatttatttgtcggctttattctgttgtcgcttttcattggcactttgggcactgagaanaaagagacgaaacctgccgctgctcattctcccgccgatgccaaacatccgccgccagtcgccgcccacgcggccgctgggcgcggccacgccttcgatccgaaacccgcttctccttccccgctggggttgctggtgcttgttcccaggcttattcgcccaatgggggggccgcccacgggggcggaaccaaaaatgggggggggctcccgctttaaaaaatatcggagagggccccacaaggtttttcttggggtggtggggaaaaaaaaaatctcctcccggccccccgaaaaaatcgctccaagggagaaatttttgagggggctcccttggaaaaaatgaacaaaaatggggggggggggcaaaatccaaaaaaaaaaaagggggggc

SEQ ID NO: 93432 - DNA, 653 bp, Heterodera glycines
atttaatgggcaacaaacaaatggccaatgcaaacactgcgacacgcgctttttcgacgcaatcaccgccaacggcaaaaaaagtggcgaatcaccggttaaacagacgccgttccgactttcagcaaaacagcaaaagaagcgcagaacaaacgaagggggatcggcataacaataacattggcaccccatcgaatggaagtggcgatttgccaatgaattcggcggcggaaagggcccggcagcgcagacggtgcagcagcgcggcgttagtcgcagcgcgaaacggcgcaattcaaaggccaaaacgaatgactccgcgccaatgccatttggtaatcaaatcgtggagcaaaaagtcaccaaagaatcgaatggccaaagacatttttgaagcgatttttgtggaagccgaagagttaaaagcgaccttcggaattgagaagggatcgaatggcaaaaggctgagaatggagccaaattttgtggcacatacgaatatgtttgccgacactttggactttgtaattcgcaatttggacgatctttcgttggtcaccgaaaacgcagaacaattgggaagaaggcacgccgcttttccggtggaaggaggattcaaaacagaatattggaacatgttcacggaatgcatt

SEQ ID NO: 93433 - DNA, 545 bp, Heterodera glycines
caaaaatgctttcttcttccgcctgctgtactctgttggccgccctcatttcggcggcgtttttcgccatggcaaacgcacaaacggtgaagcagtgcctgtgctccgaaattcagccctgttccgaaaagtacatgaacacatggaagacatgtatgcagcagtgtaagggccatttttccagcgtgggcggcgacgtggaaaaattgggccactgtttggacagcaaccaggcactgctccagtcgaccatcagatgcacccaatcgcatggggacgagtcgtaagtttgacgagtcgggcaaattaatgcaatgccatgggggctactgtagtcaaaattacggtcggcaattccattctaattagattattttatgccaatgacccgatttaattggaactctttgattaaccaattaacggggttggggaaatcattaaatgccattgggactactgtgatcaaaaatacgatttgaaattccgttccaactggtcattttatgccagtttggtgtcccgatttaattgggactctttac

SEQ ID NO: 93434 - DNA, 280 bp, Heterodera glycines
tgccggagagacttccattgccaatttggacgacttgagaaatgccagtggtgacgtgtcaaccgcggaccttcagctctaattaccctgcgtacaatgcaaaaacatgctccgtgctgttcaaaacgcccaccattgcttcaagaaggaattgaaaaaggtcgaagtctcttcggactacaaaaacgcccttcgcgtgtcggaccgccgattgattaagaattcctacctagttgaaacgttggaactgcataatctgctcattaatgccctccaaact

SEQ ID NO: 93435 - DNA, 308 bp, Heterodera glycines
aaaaatggctcaaatgacacattgttgtgatgccatcccaatgttcgttgagtgaatggggcaatgtgtcattcattggcacgtcacatcacatcaaaaacaaaatggcacggcatcacttgtggccaagaccaaacatcatcaggccaatttggccattgtgtattaaggcttaagtctctaccaaacaaaattactgatggtctgctattgttgaaagaaataaggaagtgaatattcaattcacatgattttgagaagcacttaattagtatgaggtggacgcaaaaaaaataaaaaaataaaaa

SEQ ID NO: 93436 - DNA, 534 bp, Heterodera glycines
gacctcgaaatcactgatgataagtgtttggcagtgcattataaggaaaacgaatacgggcgccgttccgtcttcgctagacattcgctctttccggaatcagctttatctggcattttctactttgaagttttggtcaaatctatgaaacatattgccttcatcgggttgtctgaaaagcagcaccaaatttcgtttgacgaaacaattcattgcggcacggcgatttacgaatatgcaagcggcggttatctttggattagcggatcatcgagaaaatcaaatgccaagtactcttttggtgtcggtgatattgtcggatgcggcgtcaatttggccattcgacaaattttcatcaccaaaaatggacaccttttggcttcttccaaattgttcgttcctcctcctcctgcttcgtcttcttcttcctcttctgtttttgatcttccgttggttccatttgtttcattgttcagctttgatgatagaatcgaggcgaactttgggcccaatttcaaattcgatttttcaatt

SEQ ID NO: 93437 - DNA, 650 bp, Heterodera glycines
ttgaaactgaatctatttacctatctcttgaaatgaatttcctgtccaagcctgccgtcagcaacagcaactccaaagttcatatgcaaactatgacatggaaggaatttaaagcggatgcactgaaatcggacaatgaattggagcgcgaagaagtggaaccactttttgacccgatttacgaaaaggacaccaagcggatgaaggcattgattggcacgttgagcgaggagaagcggcaccgcttcttgcgcacgcggtacgccccggagggcaccaacaaaacgctgacgccgctgatgctggccgccgtattgggcacaggcgaaatggtggaaattttgttggagagtggcgccgacccgaaccaaatgtgcgttcgcaaactcaaagacgcaagaggttctcccatcatgaccattgtaacgcccctttgggttggcgcaaaggatggccacttcgaagtgtgccaggcgttggtcaaacacggggccaacatcgatgtgggcgtgccgaaatttggcctctcaccactgatgtccgcatgtgacagcaatgctcggctggacactgttgatcttcttatcaaaagtggtgccaatgtgaatcatagcgacccaaacggtgacaccgcgttaatgggggcaacg

SEQ ID NO: 93438 - DNA, 362 bp, Heterodera glycines
  unsure (1)..(362): unsure at all n locations
aaacgcctcggaactcacaccaaacaattgcaaagcggaaacggaggagaccaaagcgattgactctttggggacacaaagcttttgcgggcccaaaattccgtctaatgagcttcggtcgccctccaaatagcagagaatgctttcgccgttgaaattgctcttcgccatnccctagccgtaccccgacgccgtctcctcaaattccgtgggccctggcggcgttttcttcccgcccccgggcgattctttcctttcgttggaccccccttttgaggagaatgacccgtactgtccgctcttcatgaacgaccaaaacacttcactgaattcgctgttcggctgatcattcgctgcggcgg

SEQ ID NO: 93439 - DNA, 481 bp, Heterodera glycines
gccaagtgtttcacctggagaagtcgcacgtgaacactgtgctcgaatacgtgcgacacgcggtttcgcaacggaaagttcactttttgtacgaagtgcgcgagcacgggcaaacccacacgacttcggtgcccgttgacgcattcgtttccgaactgaccttttccttggcgggcgaaagggacgacggcgcctttttaagcatttcgatggtggacccgcgaaaccggaccatcgagaaaagtgactacgaacacgagcagggcatcatcgatttgaccaacgtgaagctgatcaggatcaacgaccctttgccggggctgtggcgggtgcggacgagcagtcggctgaagcacactctccgcgtcgttggccatgggaccatcgactttaagtacggcttctcctcacgaccggttccttctgtcgatttggcccacccgcggccaatcgccggacaaatcacttttttggtggtcaa

SEQ ID NO: 93440 - DNA, 667 bp, Heterodera glycines
gtccatttaaggctaaattataattttttctaaatggcacccgtcaaaaaaaagaaaaaattttcctccgccaatcaccgcctcatttctgcaactgaacaacagaaaccgttgggctcatttgtgacatttggaaatcggcgaagtctccgtgtggcaatgaaaacgaagagccgacgttggatttgcaacgacatttggatggacattttgccgctttttcgtcgtcgtcaactcggtctcaaaatgtgtcttctttcaccacgtttcactgcgttggtggacaaacatttcaatggccagagcgaactgacaatctggaaaccaattagaattgacgagaaaggaacaaaagcttcaccctttaccaagaatttgtttcccaaaaaataacaattaaaagaaggatcgacatattgtgaggagatataaagagggggatgagaggaatgtcatagatgagtgaagagaatgtgaaagaaaggaagggttgaccaaaattgacggatataaattgcataaaggggggaggaccggcaaagcgcagacgaaaggaagaggtaaaaaaaggaagggggggggaaaaaacgagaaaggaaggacaaggagggggaaagtaggagaaaaaagaaaaaaaggaaaagaaagggaaaaagaaggaacaaaa

SEQ ID NO: 93441 - DNA, 489 bp, Heterodera glycines
gagaaatgccttcaaattcgacgcctttcgatgagggaaaacaacaaatggcagagaaaaacaaaagcattccgtcgtcgtcgtccatttcgaaatttgcccctttttcttcgtctgctgctgctgaaattccccccgaaattgccgcactttctcaactttcgatcagtgattctccgaaagagccttcggtcgtcgtcgccgccaattggactttgtggcgttacgaatgccgcgatttgccggagcacagatgccaagcgaagccgtgccaattctgcgagcaagtgagcaaattgaaaggggtggccaaagggaaactcagcgaaagcaccgaccgatgggacagttatttgaagcgggaaaagagctacgatgacgagcacattctgatcaaagtgatggaaggcttttcgcccagcaaattggcaaaggacgtgttctttaacaaaaaattgggcgtcgcattattccgtggggacattgagc

SEQ ID NO: 93442 - DNA, 580 bp, Heterodera glycines
actcctgtttcttggagagcaaagcgttggaaagacttctcttatcaccagatgtatgtatgacagctttgacaatacgtaccacgccacaagtgggataaattttctgagcatgactatgtatcttgaggacagaacggtcagacttcaactttgggatactgctgggcaagaacgctttcattcgctcattccgtcgtacattaaggactccacagttgctgatgctgcttacgacattacaaatgcgaattcctttcatctaacggcaggatggattgacgacgtgcgcaccgaacggggcagtgacgtcatcatcatgctcgtgggcaataaaactgatctcgcggacaaaagacaagtttcaacggaagagggcgagcagaaggcgaaggagctgaatgtgatgttcatcgagacatcggcaaaggctggttacaacgtgaagcagcttttccgaccaattgccaacgcacttcccggcattgaggtggaaaaggctgcggtagcccaacaactcgctgacattggccccattaagccccccccgattgtcactgaaaaaggttcctgttggtgc

SEQ ID NO: 93443 - DNA, 625 bp, Heterodera glycines
gtttgagtcagtgctttttcgttatgccaatgtgcccttcttctgagtttgtgcctttggcatgacttcgacgcttcgcggtttctgcctttcccccgctgatcagcagacgaatcttttctcattttgcagtgaaatggcgacgaacgcatcacagaaaaggaaggagatctatcggtacaaagcgtcgttcaatgtttatgcgatgggatggtcaaccaaattggacaatcacctcaaatttctcttggccatcggcagtttcatcgaggaatacaacaacaaagtgtccattgtgcagctgcacgaggaccaaggcgaatttggccatctcggcactttcgaccatccgttcgtccccttcaatttccttttatttcttccgtttagttacccctcgacaaaggtgctgtggatccccgatccaaagtcggcttttcctgatttattagcgaccaccggcgattatttgcgcatttggcgaatcggcggtcacaacggcgcttcgttggaagttcggctggacaataaccgttcgtctgagtattgcgcgcctctcacttcggccgattggaacgaagtggacgtgtcactgattggaacgtccagcattggacccaactgt

SEQ ID NO: 93444 - DNA, 538 bp, Heterodera glycines
gaattacgcaacagaagagtcgggcaaatggatgatgttttttgagaaaggaagcgaattggacgaccattgggacgtggcgaagcgattggacgacgaagggaaattggacggcatcgcgagaatgaaagtgtcaacggcattcgacaacccaagggccagcgacagacagaaagggtgttctcattttctactgtggaccttattcggacagaagcaaagatggtcacaattgggcataatttgctctcccatattccgtacaacgatcacatggcctacaaatgggatttgcaaacccttcaggggactcgcgcgaccggaatgaagaaaaactatttgtactcaattaaaccgtcattaaccgctgctgccgggggaccaaatgttggtgaatcatcgttcacagcaaaagaataaatacgaaaggataacgaaagcgaattttgaagttgatcaatggaaataaaaaggaattcttattaatttttgaaaacctttgaatgttctgattaaatttaattgataacattttttt

SEQ ID NO: 93445 - DNA, 488 bp, Heterodera glycines
agaaagcgatgagggaatataatgcatcaaacgacgaaatggtgctgttctcctattccatcggtttcgcctatattttggtcggcctttgcctttccggtcagattggcgaggctttccttttctttgcccaacgtcctctccaaacttacggctattccgttctgattggcatcgtcggctatttcggcgtcaatgttgtgctcacaatggtcagaacttcgggtgctttggtcaccgttacggtcaccacaatgagaaaggccgttaccattgttttctccttttactttttcgccaaacccttcactttgggctatttgtggggcggtttggtggtccttctggcaatttacctcaatgtgtacacgaaaaacaaaaagcaatttgacgcgaaattggctgagtggtggtcgaatctcgcggagtcaaacaatggccaaaagtttgccgctgagcgtaaattattgttgccggtgtaatttgga

SEQ ID NO: 93446 - DNA, 548 bp, Heterodera glycines
gttcaatgtcttcgtttttcatgcatcaccagcagaagcggtcgcaccaacaagcggccgccgtcactttggcggacattcgctggatggaaccgatggccgcgactgaaagtgccgctacttcaacaccggcaaagcggctgttggcacgactcggcacaaccagagtgggccgctacgttcaacagttggccatcgattacgcagcttccttccgcgacatcgtcgttggaatgcgtcagcgaccgctgcgagtgcgtttaaatatgtttccgactgtcagggtcacggacatgcaattcattcgatcctctaatggccgtcgcttgcggcgccgccttggcttcgcttgtgttcactttaaaatccaatccggacgaaattgcgctgcgcgcgcgtttggctcagttgcgtcagcaaatggtgctcatcccggcgtccattcacagcactcgtgccgacgaacggctcgagcagtacaccgtcctgttgaatgggaatcggcttgaactcgtcgactttttgctcttctctgtgctcgttgagcg

SEQ ID NO: 93447 - DNA, 531 bp, Heterodera glycines
catttaagttttaacaattccctaatattccgttcattaaaaataacacttaaaataataatgagctgtgtgagcggcgtcagtgccacttcaatgcttaggccggtgtccggaaacatgatcgccgctgcccagcaacagcaccgaaagcgccgtcagatggccatccgaaagacggactcaatgaatttggcggaacggcacaacggacgcattttggacctgatttggtgcgagggggacgagcagtcattcagcaagacaattcgttccaaagcttcggtggtcagctgtcacgccaccttcgcaagcggtcacagaagctcatgcgcaagttctaaaaaggactctgccgaaaatttactgatggtcccatcttcgaccactttaattccgtctctgcttgagcaagtgcctgaagaggaggacgaacttttggccaaaatggagcacgacgatgacgacgacgacgaggaggaggaggaggaggacaacgcgacggacgacgtggacgaggagctgctcaggcta

SEQ ID NO: 93448 - DNA, 632 bp, Heterodera glycines
  unsure (1)..(632): unsure at all n locations
attccttctacgaacgctaccctcagcaacaccaccgcgatcaattgcctgacgacattttgccatgggtaattcacaatctggtctccccggcttccctcccggccagggcggcaagaagaaacctgacgacaaggaaaagaagaagtgggagcccccccgtggcgacacgcgtcggcaaaaagaagaagaagaaaggtcccgattccattaacaagctgccgccagtgttcccgacaacccgctgccgcctgaagcttctcaagctcgaacgcattaaggactacctcaacatcgaggaggagttcattaccaatcaagaggccctcaagcctgttcaagaaaaggaaaagctccaggctcagcttgaatcgggcgagacggccgagcctgatgagcggtccaaggtcgacgacttgcgcgggtcccccatggccgttggcactttggatgaaatcattgacgacgaccacgccattgtttcgtccacgtccggccccgagtactacgtgtcgattctcagttttgtcgacaaggatttgcttgagcctgggtgtaccgtgctgacgcatcacaagaacaacagtattgtcngtgttctcggcgacgatgctgatccaaccgtgtccctc

SEQ ID NO: 93449 - DNA, 389 bp, Heterodera glycines
acgccgtcaaatccgactctttggcccgctttctccaactcgaactttgctccgctttgtccaccattttctcgcgaattcatttcccttttgaggagcccgtcgacctcaattcgctacactttccgctccatcaaagtgcccaaataatcaaatgtttgcagttggtaacctccgaaacggtcgccaccacttcccgaagcttttactaccaaccgaaatggccaattgaactcgttttggatgaatttcgcaaacgcttcgactaccatttctacggagaccggcccactaataacgcaacgaaacccgaatggtttttcacccagctttcctactgcgcagagaaccacatcgaatacttcgagcagcacattcagcccattgct

SEQ ID NO: 93450 - DNA, 605 bp, Heterodera glycines
aagcggacgctctcaggacgccgacgacgacaccccaccagacgacaaccatggtcaagttcgcccccacggtcaagctcaacaacgggcaggcgttccccgtcatcggcctgggcacctggaagtccaagcccggcgaagtcgagcaggccgtcaaggacgccattgacgccggctacaggcacatcgacggcgccttcatctacggcaacgaggtcgaggtggggaacggtatccgcgccaagatcgccgagggcgtcatcaagagggaggacatcttcgtgacgagcaagctgtggaacaccttccaccgccccgacctcgtggtcggcgccgtcaagaagtcgctccagaacttcgggctcgactacctggacctgtacctgatccactggcccgtcggctaccaggaggagggcgagctcttccccaggggcgccgacggcaaggtgttctggagcgacgtggactacgtggacacctggaaggagctcgagaaatgcgtccagctgaggctcctcaagggcatcgggctgtccaacttcaactccgagcaggtgactcgcgtgctggacaggtgccacatcaagcccggcgtcaaccaa

SEQ ID NO: 93451 - DNA, 494 bp, Heterodera glycines
gagaagaggagctgatgagccgactgaatctggaagaaaaaaacagagctctatcacacgaactgcgtgaattcggacaacggcatcatgcgttgcaagttcgcagtgatttcgagcaacaggcagcagctcgagaaattacagtcttgagaaaagcagtaggcgacgtacatgacattcaagatcaaaacgactcgttgcttcatcaaaacgactcgttgcttaaaacaaatgaaaaattaaacaaagaaatcgtcatgctcaaaaaatggctgagagtgttgttttggctccttgcagttttgctaccgcccatcgccgtttttattcgtggaatcatgagtggtttacgttgctctgccattggacttcggtgcattaaatgctgcctcctttgtttttgtggctggttcccgggcatttggtatgccttaaacatcgtacgagagcaagaaacaaacgaaagcaatttctccaatcacttctttctcact

SEQ ID NO: 93452 - DNA, 463 bp, Heterodera glycines
ggaattggcgaggcttcttacgcagtgattgcacccacaataatcgccgatttattcgtcggtcaaatgcgcagccgaattttgatgttcttttactttgccatccccgtgggaagtggccttggttatgtgatcggttcttccgccacttcgttggccaaaagtgcgcttggctccgtcgactgtcccttctgttggcagtggggaattcgcgtcactccgttgctcggcttcttctgcataatcactttgctgctttttgtcaaagaaccggtgaggggacaatccgaacaaagtgtggcacaactgatgccaacaaattacgaaaccggaacgatcagtccaagttcaaggcgaacagtggcatcagcagaagcaccgaatgagaacatttggaaggagtattaccatcggatacgcactcacactaaaagttattgcgcagacattggacatttaattg

SEQ ID NO: 93453 - DNA, 310 bp, Heterodera glycines
gtggtgtgacgggctcaagcaggtcgaccctcgcctttactatgctttgatgatcactgtcatcggctcgacctttcccctcatcaacgtgtccatgaacaccattttctctgctgcagttggccctcggctacaggccaagcaacagagcattctgatggtatcgggtgggatgggccaaatgcaggacccactactaatcgggcacctcgtcactttctaccgaccaaaaataatttggatcttggaatgagagccaaacacttttactggaacgatgtgggtggtattctacaagagactggtccca

SEQ ID NO: 93454 - DNA, 359 bp, Heterodera glycines
  unsure (1)..(359): unsure at all n locations
agatgaacgacgctaatggcaaattggaggcggcacagaaacaatttgaggcaattttggccagcttttctcccaccgccgatggcaatgaacaatcgcagcagcagaaggagcagtttttgcgatgggttcgccaacggttgcgccgtgaaaatgcgatgccaacaaaagacacactgcagcacagtgacaaacggcatccaacggatttgtcggtgcgcaagcaacttggacgtatcgcaaaacgcctgcgcgaattgaccccgttggagtactgcttggacatccccgctgctgctgttgctgcttctgttgacnaaaaacancagcagcagcaacaacattgcccgtcaccatca

SEQ ID NO: 93455 - DNA, 500 bp, Heterodera glycines
cgggcatcaccttgacaatgctacactcaattgggcacaaagaggaagatctgaatgcttttggcacatcggtttggcctctgctggtggcaatgaatgcgtctgacggcattggcaaaatgcatttcgaatttccgatcacttttcaacttttgcgccgttccattggcccattcttcgccaagcacggcgcctgtttccccaatttgcgcatgatcagtttcgattttggcattttgttcgaaattccgcccgcggtggatgcgtccgcgttgtcgtcgtcgtcggatgataatgatgatggccaagttttgtgcaaatggctgcatacgccgcgcgcagatggccaaccaaaagtgctcaaaatgaattttgattacaactttccgattgaaaaacttaaaacgctgtttctgagtgccaccattgccgtcagctttatcatttggtttcatttctttgaacatgatgctgattccaatggggaccaatttgagctg

SEQ ID NO: 93456 - DNA, 114 bp, Heterodera glycines; identical to SEQ ID NO: 57986

SEQ ID NO: 93457 - DNA, 211 bp, Heterodera glycines
gaacctacctaccatctcaattgagctgacgccactgactccctccacgttgggctcgttgatcgcgatgtatgactacaaaatcttcgtccagcgcgtcctttggggcatcaactctttttaccagtggggagttgaactcggcaaccatttggccagcatcattcttgacgatcttcagggcggaccgatacacgaggacgattcaggt

SEQ ID NO: 93458 - DNA, 628 bp, Heterodera glycines
cccgcccaggaaagacgcctaccagctcttcgcattccaactgcagctgcgcctactacttcccacaccctttgccttgccgccaaccatgatgtcgtcgtcctccgccgatccttccaccgttccagcgattcctccagtcgacgacgacagcctcactgagcacgaacgcgaggagcgcgaccgccaggcacgcctcaaggaggaagccgagcaagccgcactgccgtacaagtggcgccaaaccttgcaggatgtcaccgtcaccattgatttgcccaagggaaccaaggctcgtgatttgacggtcgtgatggaaaagaagaagctcaaggcgggcctcaagggcaaggaaccgattatggtgggcgagcttcattccgccatcaagctcgacgacagcacctgggtcatcgaatcgggcgagctcatcatccagttggagaaggtcaacaagatggaatggtggaagaacgtgctcacgcatcacccagctatcgatacaaccaagatccagcccgaaaactcgcggctggacgagctcgacggggaaactcggggcctggttgagaagatgatgtacgatcagcggcaaaaaggcatgggcaaacccccgtcggacgagcaa

SEQ ID NO: 93459 - DNA, 501 bp, Heterodera glycines
atttggttgaggaaaatctggaatcaacttccaacgccaattcgttaattgaaccaattattgcatcaccaaatgcacaagggacggtgcctttgccttttcagttctttgagtcattttcaactttctcatggcgcgaaattggcatttctccatggctaataaaacaattgaatgaattcaatttgcgaaggccaacgccagttcaagcgaattgcataccaaagattttggaaggttctgatgtgctcggatgtgccaagacgggcactggaaaaaccttagcattcgctttaccaattctccaacagttagctgtcgacccatatggcatttttgctttgatcctcacccctacccgtgaattggcactccaaattggtgaccaattttccgcttttggccgtcaactcaaactccaatgcagcgttattattggcggacgacaccaaatggcacaggctcaagaattgagtcgacgcccgcacattgtaattgcga

SEQ ID NO: 93460 - DNA, 478 bp, Heterodera glycines
ctccatcaaaatggacatgttcgctctaacaatcagacgaaaactggcggtccaaaaaatgttcctgcgaagcattgccaggggcatagtccgtcgccaaaatgtttccgtgcaaatgacaaatcactgctcaatcggttcattttcgcgcgctttgcctgtgatgatccgtcagtgatccctccgttcttcgcctcttctcagtttggcattgatcgcgcaggtggacccattgttttgccggaccaagttgggttgcttatcgcccgtctccacggcgtcgtcagcaccgccgtcgacgtcgacgtgtccatcccttttgagccgaagggaggaaaagcgcaccaccagcggtttttgcatgaggccgatttgagtcaactgaacgaagcgttagaaagactgcgccaattcgtcgaaatggacccaaattggatggaacagcggttcatcagcagcaaagaagagggggaggaac

SEQ ID NO: 93461 - DNA, 589 bp, Heterodera glycines
tgtgttggttggtgacgattttgtcgtggtcgctattgacgctcgtctgacgggcgatgctgaaattgagatcctgtcgcgctggcgccagaatacgcgcattttgagccacaaaatcataatgacttcttgcggattttacggggatgtgctccaattgaggtgcattctcaagctacctattgacctcttccagttgatctaccaaatgcccatgtctttggaccagtgcggtgacatgttttcccggactctttactcgcgtcgttttttcccctatttcacggggaccattatttgtggaattaccagtgatggccgtggtgacctttacagttacgacccggttgggtgtattgaaacccaattattcgaagcaagtggaaatggtggaagcactctgagtacatttttccagaaccaatgggcttactctacggtcgccccataggagcgtaaaaacatgccaaaaccgactttggagcgggctctttcggttatccccgatgcttttcctgggctgtcctagcgccaaacaaccaccggcgactctcccaaagtgtattgggtacgagcgggtgacgaaaaa

SEQ ID NO: 93462 - DNA, 316 bp, Heterodera glycines
ggaagaagcaaaccaattagcctagaagccgagaacgaaacaaatcaacagaaaaaaggcttgaagcagggacgcaggatgatgtttgccttaattttaacttattacatagagaaaacggcaattttaataaatttcacctctacatttgaaactttttcgcccctatttcgcgaattttttgcccctatttaagtccctaaattggaatttttcgcccctaaaaatccgcaccctaatgatcaatttcatattcaatgtaaaaagctcgttgaattaaacaaaatcatttaaaaaaaaaaaaaaaaaaaaaaaa

SEQ ID NO: 93463 - DNA, 551 bp, Heterodera glycines
gatcacttcattccctaaatgtccttccttcgtgtgatcactttctgctcttctgatcactctgtgctctttgacttctctgagtctaaatcggcctcattgggattgtcggtactcccgttgaagccgcttggcgcgacgatgtcgggtgaatagaatccagccattgacctactgctggcaggtcgtcaacatcttcgaggaggacgattcatcagagatctgatcgacattggcaaatttgcatttgatactggctgcaaactgttccacaccgccatttgcgacttgggcaaaaaacggaagcgtgaggccgtctacggcaaaaatgagccggcgccaaacccggcagcggtgaacgagttcaaagtcctgcagagcacccctattgacgagcttgtggaaaaggtgaagaagcagctgagagaagtggcggagaagcctggcttcaaggatctgagcccggtggaccaggaagacacacttttggatgcaatcagcgcagacgatcagtttatgaaggacctcgtaagagaatctatcgacgattc

SEQ ID NO: 93464 - DNA, 139 bp, Heterodera glycines
gcaagagactcacattgttctcttgattgcctcggtgtgctctctgttggatatcatcgccacggccgtaactctgccatctctgtactcggagatgagccaaatgaacagtaaagtgcactacggagttgaggccttc

SEQ ID NO: 93465 - DNA, 449 bp, Heterodera glycines
atttaatctctttttttaataatgtgtataaaaattcgactattttcgcaattaatcccttttccattcaatgattgacaagtcaatccaaggacaatccctgcgcaaaacggataatgtcctcgcccaattctttggggcattcgaatgccgcgaaatgacctccgtcttcaaaaagggtcatttgggtgaggttgtactgacgagagaccatttcacggggcaaaacaccgcccaaatcgtagggaaaggcggcgtacgccgtgggcacagcgacgtattttctgaaaataatgaaaaaataaaattcaaaaaaaactaatttataagcattcgttggacctgtacagtttttcggtatttgaatcactggcgaagtgttctttgtaatagcgttgcgaggagagaatgtttccattgaaccagtaaattgagacaattgtcaaaag

SEQ ID NO: 93466 - DNA, 515 bp, Heterodera glycines
ttcctatcaaaatcataggacaatggcaagtattgcgatcacacaaattgaccgtttgacggatctcaaccatttgccggttcatcgattgaatccgaacaacaccgaaatatgggataagctgaaagagggaaagttcgctgaggtcaatttgtgggaagagccaatgccgaaaagtggtgaaaaaagtttcgtcacttcgcaagacaacgcgcagacgacgcaacaacagcagcagcagagacacctcaggggaaaaacgccgcaaccgatcaaacggagtatgccggtgcccgtgacgaatgtgttcatgagactgaacgacgatgcatcggtgaaacgacagcaacagaacgggacgggcaaacaacagccaaaagtgaatgtggtggaagtgaagtgagtgatgaacgatggatgctttagtcactgagaacagagctttatttcgatgtctcaccgtgtaatttatttacaaaatatatttatttgacggtgaaaaaaaaaaaaaaaaa

SEQ ID NO: 93467 - DNA, 544 bp, Heterodera glycines
gtctcctcctcgaccaccgctctactctttcttcacttccttctcggcgtgtgcttcgccctcttcccgaaacccttacacctgatacctcgcccaaccacactcgcccacaatggtcagcgcacagacctactcctactttgtcgcatttgcggctgccctcggtggtttccttttcggctatgagattggaatcatcaacagcgttttagagatgaacccgttccgtctctactttggcatgtcgaccgttgttgacggtgccctcgccaagactgccgaagccaccttctacacatcctcgatcgtcacagccttcgtgtttggttgcatccccggcgcgctcatcatcaccctcggtggcgatatccttggacgcaagcgtgccatcttcattggcgccttcctcttcaccttgggcggtctcttgcaagctcttgtccccgctggctcttccattggctcccgcgtcacgttcatctcggctggtcgattctttggcggtgtgggtatcggcatgctctccggctcggtccccttgtac

SEQ ID NO: 93468 - DNA, 413 bp, Heterodera glycines
cgaggaggaggacccgacaatggtggcagccaaatacggactgggggagcgtaacgacgacgaagcggttgaggaggagccactaaactcgggagacgaccaaagtgacgacgaggacttggacacgttgttcgacgcggagaatgtcgttgtttgtcaattcgaaaaggtacaccgagcgcgtaacaaatggcgattcacgctcaaagacggggtgatgcacatccgagggaaggactactgcttccaaaagtgcactggcgaagccgagtggtgagggacaaatgcgactgactttaatgggaggaagctgatctccaaatattcatttaatttattctaattttacacatgtttttgttttttaattgcaacaataaaatctctgaacaaaaaaaaaaaaaaaaagaaaa

SEQ ID NO: 93469 - DNA, 629 bp, Heterodera glycines
agattcccttccgttattcaattgtgattttctgtgaggaaagtctcaaaattgcgaacaaagtgcgtgaattacaacgacagcaccaattgaggcgtatgcggccaatggactacttagaggctgagccttccccctctctctccaacggcactttgccgtcttcctcctcctccgtggcttctcgactttatctgaacggtcggctgaattcgcgccgaaattcgttcagctcagagcccgaattgatgcagttcaatgaccatgactccatcagtacggacttcggaaatgctaccaatcagatgtcaattttggcacaaaagttaaccgaattgcaggaggagaaaatgatgatcagtgaagaaaagtcacggctgaggacagacaacgccgttttgcaggagagagtccatttgcttgaggagcatttgcatgccaccgaacaaaggtgggcagaaaaatgcgaggaggaaaaggccaagtcgcgggaactcgcccatcggatggaacgcgaaaggcaattggaggcggaaagggaggcactgaagcatcaaatgttgtcgaaggaagtgaaacaattggaagtggaaaaggaacgaatgggcggcgaaatgagaaaagcccgg

SEQ ID NO: 93470 - DNA, 521 bp, Heterodera glycines
ccttcgtttatttctctgatttttttttgtcgtcttgcaattttggtggtacaatgtcaaagggcaacaaaaatgtgaaggccgtggccgttttgggattggatgacacggacacggatgccacgatcgacttggaataccacgaccgacttgtggaggcatcgaaggacttcaaaagcgaaaatcaatacaaagaattgctccgtctccgtttcaaattggtcgccactggcgtgctgaagctggagcgttcgttggacggtctgcaaatcccgcctccaatactcgaaaaaattggcgaactgtttgactgtttggactgggctttgtctgccgacgacgaatgaaacaaattgagggatcaaaggccaagccgaaactttggacggatctttcacccacccgtgtcctcccaaaaaaagccatttttaccccgtaatcgaatttttgtattatttttttgaccgaatgatatcacgcgacattcatttatttttgcccaatttatcatcctcccaaat

SEQ ID NO: 93471 - DNA, 526 bp, Heterodera glycines
gtccaattaagttatgatttttcgacaatttttgagacgctttttggtagcgaatcatcgctttgtgccattggagtctttttgggttggacgtctcaactcagttttgcattcgactgtttgtggagttggcccctccaatttttccaccggttttgcaaatcatttggttcaacatcgctttttttcttcacagtccgatggtttgaacgtcttcgaacttggctctgaggatgactttgacaatcgcgttctccaagcccaacagcccgtcatggtccaattctacgccgattggtgcggcccgtgtcagaatttggcgccgagaattgaggccaaagtgaacggacagaacggagaagttttgttggcgaggattaatgtggacagttctctcggttttcttactgcacaattcgatgtgacttcggtgcccaccgttgtgtgtttccataacggagagggcattcaccgctttgagggcgacgtcgatgattcatatttggacgaaataatcgcgcatttg

SEQ ID NO: 93472 - DNA, 191 bp, Heterodera glycines
ttctccaccatcttacggaatttaaagtcggcaatttcacgttcaaaaattatttaaatccgggacttgattttgaacgacgaagacaccggaatatttaatttaatacatactatatatacatccacggctttgccatttcttactttctctcttctaataaggatcatttgctatgctcgtgatcttcc

SEQ ID NO: 93473 - DNA, 581 bp, Heterodera glycines
gtccaattaagttggaaatgtcgccgtctgctgataattcatctgacgatgagcaaattgcctgtgatcccgagatcactttccgaggccgctccgttcgtccattgaaatggctttccgaagtgtcttcttgtcgttaccttcccgagggtgaaatggtcacagtctgtcagatcctcatcagtcggcttgcatatatgccaaacactgtctccgtacaatcccctgctaccatttgcggcgatattcatggacaattttacgacctaatgaaattgtttcaaattggaggtgacattctcgaaaccaattatgtgtttctcggtgactacgttgaccggggctattatagtttggaaacgatctcttacctaatgctgctgctgctaaaatacccggacagaataacacttctccgcgggaatcatgaaactcgtcgagtctcacatcagtacggcttttacgatgagtgccaacaaaagtacggaaattctgtggtttggtcctggtgttgccgcgtcttcgacgtgctggccattgccgctgtcgtggacaatcaaattttctgtgtgcacggagga

SEQ ID NO: 93474 - DNA, 475 bp, Heterodera glycines
gaggagcaggcagtgaacttgagaccagcaaaccttcgactggcgcgtctttggctgagaagcgtctttgcttctccaagcaattcggactaccgcatttgctgcgaatgtttgtccgtttcacggacatgttggcttataccgaatggagcgaacgttctttggaggcgattattcgtcatgcgcaagacttcgtgatgttcctcagtaaaaaccatgccgatttctacgatgttgaaaaggattatatgttggcgccggctgaatatcataagcgtgtttggggcaaccattcttgacgtaaggcgcgacaaattattgggagtcactgatattcactggattttttggctagatcgattgcaattgctctcctctgtttatttattgcttttgtcacttctgttgcaatcatacagactgctcatcattgtcacagtcggttgtcaactgatgttttaaaccactcaaattc

SEQ ID NO: 93475 - DNA, 531 bp, Heterodera glycines
aaattatatatcaatcgatagctctcggtctgtaaaatgcttttttcaccaacatttttgcgctttgtgaatctgaccaatttgccaacaacatcatctctgaaatgtcaccaaattctgaggcattttttggccctcaaatcgaccacaacaatcgcctcagcatccaaagtgccaccattggatgtgttggacagcattgacattgagtcgttaaggcggtgccaattggaatttaacagcggagcaggtggcacagaagcgtcccttttcacggccgaactgttcaacatgtacgccaaatttgctgcacgaaatggctggaaatggacaccacatgaagtaagcaaatgcaacaaaacaaacagtgttggaatcaattcggccattgttttggtggaaggcgactggtgctatgccaaaatgcgttttgagagtggtgtccaccgtgttcaacgagtgccggtcaccgagtcgaaggggcgtatgcacaccagcaccgccagtttggcagtgttgccggagccggaa

SEQ ID NO: 93476 - DNA, 504 bp, Heterodera glycines
aatttgcaaggacaacggtcctatgtggtggttgagaatgtgcaatctgatgaagaacacgaggcgaattcactaaattgcactttaaaagtgagcggctttttacggggagcaccattgagcgtcaacaaattggttcatttgcccggttggggcgatttccaattggcacgcattgaccgcactttggagccatgtccaatgaagacgccgaatgacaagaaccctccgaccggtgatgtcaaattcgctgtgttagcaaaagcagaccccgccaagcgaactccattggattcggaaattgtgccggatccgatggaagccgaacaaacatggccaaatgaaaacgaaatcgaagaaaacaaattcgtcgtgccaaaggtcagcagaaaagtgcccaagggaacctcagaataccaagcgagttggctaattgattctgatggaacggacgaaaatgacgaggaccaaagcgaagaggccgacgaggaggagagagaggac

SEQ ID NO: 93477 - DNA, 288 bp, Heterodera glycines
aacgtatgagattgtcgagaatgaggacggcacaaagacaacaattcacaagagcatagaacggaattttcccataaatgacggaccaacagcggaggatgaggaggaggacaagacggatcagcaacaacagttgctgcacaatcaacagatggacgcatcaatgagtggataaacaagacatatttaatgatcattttctattaaaaaacccattctattgataagtttttggtgactttccgagcatcactttttcggcacgacaaaaaaaaaaaaaaagaaaaa

SEQ ID NO: 93478 - DNA, 535 bp, Heterodera glycines
gttttaatcgccatttacgtgccattctgtcgcttctccatccagtccaaatgtcgctttggtgtgccggatgtattgtatttgtcaatggcactgatcgcactatacccgacttggcattggacccagctccacggcggcttaagtaatgatcatgtccgccaatggttgccctgtcttttcgcactgttcgcgctgcttggcttcgcttttgccttttacgtttctcaaattcccgaacgaattttgccgggcaaattcgatgtgatcggctgctcccaccagtggtggcatttgctaatcctcgccgcgttgacctattcccactggacgggcatccaactgctgatcacttaccatcgcacggcactgatcagacagcagcctctccatacggaccaaatgcttcttcaatctgccgcttcgccttttgtgccagcgctttcgtcgtcgggccgactgggaacgaatctcttaaatcacaccgcgacatcaaccaacggcggatgaccacacaaatcataacggagggcaa

SEQ ID NO: 93479 - DNA, 133 bp, Heterodera glycines
ccttgatctccgcattgcctcggagtgctctctgatggctatcatcgccacagtcatcactctgccatctctgtactcggagatgagccaaatgaacatcaaagtgcgcgacagagctgatgccttccacgta

SEQ ID NO: 93480 - DNA, 515 bp, Heterodera glycines
tattatttaatccatggacattctccagcagtctgattttgcctccgtttcgaaggccgatgagtcctccgtcgtcctccgttgtctcatccgtcagcttactccctttggcccccaaacggcctttcgacaggctcaactcttccaccaatacgtccaaattcttcacaaatgtcagctccgacttcaatccgatccgataatgcccatcagcacagaatttggaatgatcaccagcggagggttggccaacttcgaatgggtcaagccgttcattgactgcacaacgatcgccacttttcccgggttggcactctccgaaatggcctacggcagcacttcgcaagagaagtgccaaacgcgactccaaactttttccggtcctaaagaagggcggcaggcggaagaacagtctctgccgctgccggacgatggcacccacgcggtgttcccttcgaagccgtgccatgttcttgtctgggacgagttgcggcaaatactcaccgatgtgctca

SEQ ID NO: 93481 - DNA, 615 bp, Heterodera glycines
gtccatttaagattaattcatattcattttgtttcttggaacaccttatttttcaatcaatcgccttaaatgatctcctgtcgtcgttcggtcagcaaatgtttgctgccacaaattacgaatcggttgacttccaattttggccatcttcagccgtgctgctcatcccaaaaggtgccaatgtgtgcgtccgcttccaatcgttcttccgtgcgtctttcagccattttcccacgaatgctttcgtcttccgttggtgacaaatcacatgagcggccccaaatgtaccaacttgaacacattcagaaacggttggaatatacggtcccgctgatgttcaacgcacgtctcgactacactttctacaccaaagatgtctttgtggacaatcaaattctcgggagtcaactcagaagcttggaagggtttatgcatcacatttctctgatcactgtcgccgctcaattttgttgcacgcatatcgaaacgcaaattttgaacatttcgcccattttggaggatggcactgttcgccttcgttggcgtatttgttacctcggcttgctgagcatgctgaacttccgcaattttaaccgccagtacagactgaaaaat

SEQ ID NO: 93482 - DNA, 501 bp, Heterodera glycines
ctaaaagaaaggtcagcggtgtatttttcaaagaggtgcccgccattatggcctttccagctaacaaattgcttgtgtggcaacagaatgacatagcccagacttcttgttcaagcaaaccaaacactgatcactttctccaatttgcactcgaagtgtcgccaatcaatgggaataagaccaaaagagttttctatctgaagaggccttacgatgaccctttctccgggtttaaaagtcggctgaggcataagatcagtgagttcctcggagtgcaggacgaattggcagtgcaaccgatttattcgggggaccaatcgccggcggaagcgattgaagacgtcagtctgttcgatttgtttttcaatgccactgatccgtgctcgttgtcagcacttcgaattggcacgacagattacgaaattgtgcgcgattcggcttggctggataatgtcgaaatttccctccttccactggtcggctgtccagttttaccgagct

SEQ ID NO: 93483 - DNA, 413 bp, Heterodera glycines
attctgctatatatttgtgtgactcgaaattcaacagcaaattgtgctaattgccaaaaaatgaacagacgttggatttgcaacgacgtttggatggacattttcccctcttttgaccgtcctcaactcggcctcaaattggcacttctttcgccacgtttcaatgcgttggggacaaacatttcgatggcaaaagcgaattgactatttggagaacgatcgaaattcgcaaggacaaaggaccagaaccgaagctgtctgtacaaatggatgacaaatgtgtgccatttccattgcccgaccgtccgttgcccagcaaaatttgctttaaatggcttcggattgagtaattaaaaaacagttttatggaaataaaagcggctctaaaaaaaaaaaaaaaaaaaaaaaaaaaa

SEQ ID NO: 93484 - DNA, 630 bp, Heterodera glycines
ctcgacccgaccgtcgtcaaccgcatcgccgcgggcgaagtcatccaccggccatcgcacgccttgaaagagctcctcgagaactgcctcgacgccaacgcctcggccatcaccatcacgctcaaggacggcggcctgaccctgctcgagattgcagacaatggtcacggcatccacccgcacgatctgcccattgtatgcctccgcttcaccacgtccaagctgcgctcctttgacgacttgcgcaccgtcgccacgttcgggttccgcggcgaagctctggcctccctctcgcacgttgcccgtgtggccatcgtatcacgcacggccgactcggactgcgcttacgcctcagagtacattgacggcaaacccctcaacgatgcaatcacgccctgcgcccatccaacggtcggcaccaccatttcgatccacgacctgttttataacttacaggcccgccgccgggccatgcgctcgtacaatgaagagcacgccaatgtcgtcgacacgcttgtccggtacgccgtgcactatccgtccgtggccatgacgctgcgcaagcacggtgccggagtgcctgacgtgtccacaagtggtggatcgacgacggatcgtatcgacgtcatc

SEQ ID NO: 93485 - DNA, 450 bp, Heterodera glycines
tgctgttctatccaatttgtctctgtgctgttcctcctctttgctccaaatccaacgacattttgtgactgcctccattttgcgaaaatgtccttcgtccactaagcaatttgcaaatgcacaccgttgcatcagcaggacacggactctcttcatgttcattcatgacaatgagatggagcaatgggccgagaaaatgatcgaccataaattgaaagaaaacggcttggacagtgcagacgtttgtttttccgatttggtccattggtggtattcgaatgtgtacgaatccactttgaatgtgcacggtcttcggcttctcgtcaaaattgcattggacaaagaacagagtcgacagtttgtcaggaaacggagtgctattgcggaactttgggattatgtcaaagacacgatgcctgccagcgatttcctcccctttttggtcatggg

SEQ ID NO: 93486 - DNA, 452 bp, Heterodera glycines
gaatattccaatgaccaaaactctgtccgtcctcccctttctctccccaatcgttcgcccgttcagcgcaaaagcaggtggtccccacattatgaagcgagccaagggtttggacataatcccggatgactttgtgaacattgatgggctgcccgtggacatgcgctacgtccacccgcccggacgccctcacggtgctcagatgcgcatttggagtccgcatcaatcgccagtgtacgatggggtggcgcgtaagctcggctacaaaacgaggaagggctttcagcacccatagacaattggtcagtttgccacccgcacagaaatgcatagattgattaatgttcactggattgttctatttaattcctgtttggatattcgagtgattccaactccttcgaatgcaaattaaatttctctgtgttacaatgtgtataaataacattctg

SEQ ID NO: 93487 - DNA, 238 bp, Heterodera glycines
agacgacgacgttgaagaatgcgcttgttcgcatgatcaaaggcaacaaataagcatgatcagaaaaaaacaaatgatcactttgacactttcgaagagagaaattccataatagttatgttggaagataattaagccttcgctaattgcttttttaaaaatttaatttgcttatttttttgtaatgttgataaatttggcttgcttttaaaaaaaaaaaaaaaaaaaaaaaaaaaaa

SEQ ID NO: 93488 - DNA, 286 bp, Heterodera glycines
aaatttttaaaaattttccagcaaataatggaaatttttttcgaattcccccccccccaaacgaaaattaaaaagtttaataggcaaatttcgtaacaggtagcactcaaattgccaaaaatttttcccggcggcgcctatcggcaccgccggacctacattttccactatttttacaagttttttgccttaaaacggccaaaatttggtcatttttagtgaaaaagtgcagttgttacccagcagtggaaaaaaagttattggttaaatagcaaaaaaaaaaaaa

SEQ ID NO: 93489 - DNA, 379 bp, Heterodera glycines
aatgagaattaaagaaaaaaacttcaaaaaaaagaaattataaaataaaaaatgaattttaaatgaaataattaaaaaaataagttacaaattaaactatccaaaaaacacctcactgtcacgtaatgatcatgatcattggcactttgattctgttgttcttgttgctgttccattggttgaattttaattgaaaatattttaatttactaaaataaaaataaaattctttaataagcatttttcaattttaattttaagtttgtgaatattagtcccggacctttttccactattaaatttcaaaattaaattttaaatggttccgttctgcggcttcatcaaagtgcggtggcacggcacattctctcattgctta

SEQ ID NO: 93490 - DNA, 398 bp, Heterodera glycines
ttgagacgaactgctcgaacttcttcccgctttgctttccatggaccttgtcgacagggcgtgtcgtctgcagaatgaaatgctcacttttcttgaatttgttgctgaagtccatgcgcaactttggccctctcatttggaggcatttcatttgacgggtcccctcgcattgcatttcgattcaaattcatgtgaaccaatgcccaggaaaattcacctgacagatgaacttatgccgccgaaactgcgctcaaagggcacagaatggaaattggaaattgtcaaataataaaaaaatttcctttccccagtgaattgttgacttataaaatcaaagttttactatcatcccacactcatttgttgattttgttcaattttataaatccaaattttta

SEQ ID NO: 93491 - DNA, 609 bp, Heterodera glycines
gggagacgaagcagtcgggaaatgagaacgaagtggtactgacagggtcggggactgaatcggcagcaaacagttcgatggacattggcaaaaaacagccgaaagaaatgaagaacgggaatttgctgacaacggtttatccgaaggacgttcccttctcttggataagtcggccaactttcgatgtggcggcaatgccccaaattttggccaacccacaaaatcggctgactgcggctgcgtttgccgacatcgtccgttcgattcagagggattcgcgcttcgtcagttatgcgttgttttactcgcggatggtccccgtttggctggtcttttccatcgtcattcttctggccgtcctcgcctcctcccccatgggtggtcttcccgtgatggttttcgccttcgtttggctttttatgctcgtccttggccttctcttctgcgcccttctccaaaaattcattgttttggcccttcgggtcctcgtcaaggaaatcaacgccatttcgcagacttttcgtcttttggtcggaattcagaacagagggatcgttttcattttctacgatttcgatggctgccgcgaggacatcgcccgccaaattc

SEQ ID NO: 93492 - DNA, 472 bp, Heterodera glycines
ccgcctccgacatcaacgactggacccaagtcgcccaccccatcaagggcaaggagctctctgagcgccgcaaggtcctcattgcctacgactcgtcgtcctcgggcgactatgctctccaatgggctttcgacggcctcatccaggacggcaacgaccacgtcatcctcgtcacggtcgttgagcagtcgcaacccttgatccggttcaacttcaacaagggcgaggacgagatccgcaccgaaatccaaaagcgctacgaagccatccaagccgtccacgagacccttgcctccctgttccgcaagcgcgacatctcctgccaaagctttatcctcgaaggtgatgcccgcgacgtgatcctcgaggttgccgacaaggcccgcgccgactgcatcgtcatgggcgcccgtggtctcaacgccgtgcaccgtgccgttctcggctcggcctcgctcttcatcacccaaga

SEQ ID NO: 93493 - DNA, 288 bp, Heterodera glycines
attttaaaatgcgatttttccttttctttttgctcatccttgcctttttggccccagcagcacttggcaaaagttttaagaggcgaagtgtgtctcttgacactgtgcaaaattggaaaattgaatgggcagcaaatgcaaatgacgggccaatggcatgagagaaaatggcacactgactgaccaatgtgatcgatgatcattatgagcaaagccaaaattgtgaatggatggatattcgtgataaaatttatctaacctgaaaaaaaaaaaaaaaaaaaaaaaaaa

SEQ ID NO: 93494 - DNA, 433 bp, Heterodera glycines
aaaatctataaaaaatttaaaaatgagatttcatgcgagattttctggaaataagtttgttttggcctagttaagctgtaaaaaaaatttggggcgatttgaaagagaatagaaagaactaggttcgatgaagttttggtaagccaaaaaaatatccaaacatttaaaaatctataaaaaatttaaaaatgagaattcatgcgagattttctggaaataagcttaatagggcctagttaagctgtatttttatttggggcgatttgaatgagaatagaaagagccaggttcgatgaagttttggtaagcctaaaaaaaatccaaacatttaaaaatctataaaaaatttaagatttcatgcgagattttctggaaataagtttattttggcctagttaagctgtaaaaaaaatttggggcgatttgaaagaga

SEQ ID NO: 93495 - DNA, 477 bp, Heterodera glycines
cacgagggcgatatcggacgcagtcctcgcatgggttaccacgcctactctctggcccggcagggggcgtatgtgaatttggtcggttacatggacaatcagccccatggagatgtttttggcgaacaaataaatttcgtcgcacttccaaagccgccgatttcttcgtcttctgacaatcctttccgtcgctttctgatccgtttggtcaagatggtttggcttctctttgctattccatacgccttttttgtgctttgtcgtggacataggcaccgtcagcttattatggtgcaaaatcctcccggaattcctgcaatgatcgtttgctacttgttggcaaagattcgtttcgctacttttgtcgtcgattggcacaattattcgagttcaatgctcgacaactcgtggatttcttatttggtcggtttgatcgaaggatttttcggtcgaagggcttcgtttaacttttgtgtg

SEQ ID NO: 93496 - DNA, 476 bp, Heterodera glycines
caaagtgatcgaaatcagacgaacccgacggatcatccaaaggctaacggcacgactccgcgcaacgcaatttcaaagccattcaaaaagcaagggacgtccgtaagagagccattgcggcgaaggaagcgcggggcgaacctacgccgcccgaaccggccgccgtccccccgccggtttatcgtcaaagtcccccgacgggcaattcgcctccccccacttacgaagactctctcctgcaccaattcttcatggaatgcgtctcagtgaacgaaaatggccccacaatttgaaaactggttaagcttaaggccaagaagtacgtgaagaggggtgcattattggccaattcactggtgactcagacaattagcagaacgatctcatagtccaaagtttgtttagtcataatattttgtacaattcttatgaaatattttctctgctttatacaaatatttgaagcaataaattca

SEQ ID NO: 93497 - DNA, 442 bp, Heterodera glycines
ccgtctcctccgttcgcccactctctcacgatgctttatccgtccgttttgtccccctcttccttcgccatgttcgtctacctctttctgttcttctcctgctcctgctccatctctttgtccgccatttatccacctcaaaatggcatttcggaggaaaagcgcggcttttccctcgtccgcaatccttactcatggatggcacggcttcagcagaatctatctgtccccgttggattggacgacgtttcatcaaaaaatgacgaacaattgctgacgaatcttttgctggaagaacccctctctaagcgttcgttccccgccgccccgcgacgtccccaaaatccctactcgtggatgtccttcgccgatgccgatcagtccaacatggattggctgatcactcggcttcgacctttctccgatttggtctccaaacggt

SEQ ID NO: 93498 - DNA, 564 bp, Heterodera glycines
cctcgtgccgaattcggcacgagggacgcactaagcaaacgaatatggcagatttggaccaaaataatgctcggaatgaaagcgaaggacggagcgaaagtaccaacgaaatccgcgcgccgatcaccgaagcagaaattagggcgaaagaggttgtgatgccggacgatgtgctcggattgaactgcattactgaaaatttcctctgccgacccgaggataatgtctacgacattgagtttgtccgcttcaaagtgcgcgacatcgattccgaaactgttctattcgagattaataagcctgacgcagcagcgaacgacgactgttccgaagctgggggtaatagtgatgaagcggaggaggaaggcaatgctgaagagggcgacaagcctttcactccgcggtttatccgatactatttcaaaccatcttttttgcgacttcgtcatatcggcgcaacaatggaatttgtcgtggggaataaacccataaacaatttccgaatgattgaacgacattacttccgagatcgacttttaaagagctttgacttcgattttggct

SEQ ID NO: 93499 - DNA, 527 bp, Heterodera glycines
atttgtggtgacgccgtcggcacagaaattcaaatgggtgaccaaatggcaatggttccgacacaatcgactccgatggaacagccaaattgtcatcagcagcatgacgacgtgcctaaaaatggtgagcatctgacaatgaaccgggagttttacagaccaacaactccgagcagcacttccgtcccgaaaaagcgcacttttgccgaaatttcgggtttcgactctctgaccgactcagcgcatgcaacagcaaaagtgtcgcgcatcgctttgatttcctatccggctgctccgcccgcagtgctcaaaagttacacggacgaccggcgatacacaatgtgccatttgcagcagaatgagaggcaaaatccgttggaaattgaagcgcagaattgtctgttggatttgcgtcaagagttggccttcgtcgactcgttagacccttccctgggccaatgtttgaccaactcgcggcgtttgctgatcagcgagtcgatgaaattggaggagtggcacaaccccga

SEQ ID NO: 93500 - DNA, 195 bp, Heterodera glycines
gttttcctcaaaactcggcggatggaacaaagcgcaaacggtgttcgattttgtgaatgaagaaaaaatgtcgcccaatatttcttctatgcttcttcagatgcctaattcttctgattgactgatctcacaaatcaatgcatttttaaaagcaatttcataaacttttttttgacaaaaaaaaaaaaaaaaaaa

SEQ ID NO: 93501 - DNA, 320 bp, Heterodera glycines
ttgcatcggacgagggaatgatccgtcattggctgttatttgccaagagatcataaacggacaaaaagcattagaagaaagaagcgatggaagtgttaagagctttctcgctcaatcggcccattgaatgtgtgtcaatttctggtgaaaaagtctaacgactgttctgccgtttagagaattttagggcaatggaaaaggagaaactttggggagggattgaatttcgtgagaaaaacggagaatggaaggaagagatggagaggaagaaggagcagggagaagagagagagcagagcggaggtaggggccagaggggg

SEQ ID NO: 93502 - DNA, 272 bp, Heterodera glycines
gctagaatcaactttattgggcatgaatcccgattttctatttcatttcgtatacactgcgactcacaattttgggctcccgatcgaatcgccgaaaagctgactgaattgggcgcggccggaacggaaggaaagtgagggatggaacttttcatcttggaaaagcagttcctcaagaaattcaaaaatttatttaattactcattttaaaaacaatcgaaataattggcaaaaaaaatttaaattattattaaaaaaaaaaaaaaaaaaaa

SEQ ID NO: 93503 - DNA, 390 bp, Heterodera glycines
agaaaaatttattcggagataaacgttcctgagaaatatctaccagataatgctcagtcattacaaaaaaaacaacagatagtaaaattaaaagaaaaaaaaataaaaactaaaagctttaaaatttttatttttacagaataatattttaatatttaaaataaaaacttaagaaataaaaatattcaattttttttacctattaatatgaaattaaaaattctaaaattaaaataaaaaatttttttttttatttaagttctcacaaatctaccttactacaacttatcccaaaatataaataaggaactgatggacaattagtactaaaaataataaaaattacaaaaaaaataaatttttttttacttttttttcctattaataaac

SEQ ID NO: 93504 - DNA, 498 bp, Heterodera glycines
ccttttcctcctccatcttctcgcttaataaatgttctgctcaaattcgctgttttgcttctgcttcttccttttcttttccattcattgcgcttttggcgtcaaatttcgcatcaatggcactttgaagtgccgttaccgcgagggaatggagaagccgtatcgcaacgaggcggtcatccaactttgggaagcggatgccaatttatttggcttcattgacaaagacgaccttttgggggagacgaaatcttcgaaaggggacggcgtttttgaactgaaagaaacaaaggacgagtgggaaatgggcgagttggagccgtacttgctgatccgtcacatttgctggggcgaatctccgccaggggagaattgtgccctcctctcgcgcatggaccttcagccgacgcccgccgcgaaaatgcttccgccgatcattttgggcatggacagtcaattgaaaacgatagtgatgtgctgatcagaacgaatggatca

SEQ ID NO: 93505 - DNA, 568 bp, Heterodera glycines
cccgtgtgaagaacattgataagcgggataaagcatccgaagaataagcggacaaagcttctccctttcgtaaaaacctcaagtcacaccctctgtggaaataacgaagaaaagaagaccagcagacaacgagagacatcggagagaaaacggggggagcgagagaaagaaagagggagagaaatagagaagatcagcagattttactgaaatcgcccggcctcgaatcctctccccaaagaattttctctcccgccgtctgaagagaacaaaaagtttctagaagttaatccgaactcaagacaacaacatcaacaacaacagcgaaagtgaccaccaattggcgacagaatcagcggaaggggcggaaaagtgttgggatgagagacatttttggggagagcgcattgagctttcgacggcgcaaattgactgtgttcatcgggtggacaattgtctgtccatttgggttttggaggcgagctgtctttggacgggcaagtgaaggggatgagcgttggcatttgcttttgggacgagtccatcgagttcggctccctccctcact

SEQ ID NO: 93506 - DNA, 654 bp, Heterodera glycines
ttaaattaaagcaaagtgatcattcacgagcaatcaatcccattccacgggttcaacggatttcagacgaataaatagcgaagagatattagagaaaacaaagaaaagatacagagtgctgaagcaaatgaacgtgacaccgccatgttgggtaatttggagttggcagaattgaagaccgtctccacgttgggagttggggggtttggacgggtcaatttggtcaaacacatcgacactgaacgggtgtacgcgctgaaagtattgaacaaacggcatgtcaaggagatgaaccaggtcgaacatgtgctcaacgaacgcagcattttgctgagctgtcattgcgatttcattgtccgtcttcacaaaaccttccgcgactccgagagactttacatgctcatggaatattgtcccggcggcgaagtttggacaatgctaaggaattggggccgattcgacgaggcaaccgcgcgcttttactgtgccgcagcattggaagcgtttgattacctgcaccggcggatgatcatctacagagacctgaagccggagaacatgctgctggacatcgacgggaaccccaaattggtcgacttcggatttgccaagaaattgccgacggagggctcacgggcatggacattctgtggc

SEQ ID NO: 93507 - DNA, 612 bp, Heterodera glycines
agaatggataagttccctcagctcagccgagtgccggccccgcccggggtcaattctgatcaagcagcgatcagcctaatggcaatggctgaaattttccgcacggcgaataaatataaaatggccatcaaatgcgttatgacttcgctgcgcgtcccctgctcttctgaactgttcgcactttgttccttcgaattgggaaaacttttgtggttatacacgaacaatttggagttggcccaattccatttgtgccaagcgcataaactgatgcgacagttgggtcccggccttgaacagccgcggctgaagacggccactcttttggccgaagtttttctcgcgcggcgattgttctccgattgcgttcagctgttgcgttctgagctgcccgattcgcaaaagtgtcactccgtccacacaaaaatgcttttcctcttcgccgaggcgtaccttcgcctgggcgacttcaacggcgctttggacatcgttcgtgccggcgtccaattctcgcggggccccggatggggcggagtgatcgccgaatgttactttcggctggtcaaatcgctggtgctctccattcaaatgactgatcagcacgaattggga

SEQ ID NO: 93508 - DNA, 618 bp, Heterodera glycines
atttgccacgtgtacatcgaccgaaagtgcgacgaaaagatggccattgacattgtgcgcgactccaaatgtgactacccggccgcctgcaacgcggcggaaacaattctgatccatcgtgaccatctcagcacgccgttcttcgaaagtctttgcggaatgctcaaagcggagggagttaagctgcacgcggggcctaaacttcagtctctgttaaaatttggaccgccggccgccgattcgcttaaatacgaatacggccgattggaatgcacgttggagatggtggataatgtggcggaggcggtgaagcacgtgatcagatacggcagtggacacaccgattgcattgtgacaagcgatgacgccgcagcggaacaattcctggcccgggttgacagcgcatgtgtgttccgaaatgcctcaactcggttcgcggatgggtacagattcggacttggtgccgaggtgggcatcagcacgggacgaatccacgcgcggaggcccgtgggaatggagggacttctcaccaccaaatggcttctccgcggcgccggacacacggcacaacaattcaaagtcggcgggccgctgatatacctgcacgaaccgttgaac

SEQ ID NO: 93509 - DNA, 413 bp, Heterodera glycines
attaagcatttttaattgtcgcttccgttttttattctcatttttatccgcgattgtcgactcaaacaaatcccacaacagaacagcagcagcaactgatggcgggtcgtgcagtggcgagtctttcgcgtttctctgttgtttatgtgaccgttccctccgctgaaattggcaaacgaattgctcatgaattggtccgcagtcggttggccgcttgtgtgaacattgtgccacagattacttcattttttttttggaagggaaaggaggaggaggacagcgagtcattgctgatcatcacaacgggcagagaacggctggaacagctcagagaggcagtgatcacactgcacccttacgaggtcgccgaatgtgcggcatttccaattgagtacgggtcaccacccgtactt

SEQ ID NO: 93510 - DNA, 626 bp, Heterodera glycines
gtttaattgttattttaatatttatcaaaacatgtcactttcaaatgttcacacaaatttggtacaaaatggaaaagaaactaatgacccattcgctttttcggctgctgaccacccacaaaatgttggcaacaacgaatcatcgtcatccattgagcagaaaaggcactttcgcaaaagggttggacaattggaattggaattggccgactctcagcaaatgtgtgaagcggtgaaacacgaaaataagctcctcaggatggagttaaaccaccaaaagttgctgacggaacattacgcgctgcaggcgaaagttgccgcaatggaaaagggaccgagaaaagggcgggaaatggaattgcttcatgaccaagttgctcacttgaaagaagaacaggagaaaatttatgttaaatctagcgaattggaacagtttaaggcgaccactggccaagttgatgagttacggaaagatcagaaaaatctcttggaaagaatcagcacagaaagtgagcaacagcagaacaattttgaaacactgaaggggaaactttacggaaagattgccgaaacggacagaaatgttgaagaattgaaaaaacaatttggaaatgtttcgcagtgtt

SEQ ID NO: 93511 - DNA, 586 bp, Heterodera glycines
ttttgacaatttctaacttccaatgaaacgaaagaggagtaatacatcacgaaatctgcaagtgcaaagtaatggcgtcccgacgaaaattccttcggaacaaactgctatcgcagctgccgccaagcaatttaaaactgatcagtcaaatcttaggctttctgatttggggggatgcgaagcgcaatttttggaagcgattcaactgatgacacacctcaaacatcccaaattatgcgaacaaattggtttcacaccgcccaagggattgttgctgcacggaccgccggggtgcggaaaatcggcatttgcgatggcattagcaggcgaacttcagttgccaattctttccgtttcttccaccgaattggtcgccggtgtttcgggtgaaagtgagcggaaaattcggacgcttttcgcagaggcaaaaatggcggcgccggcgcttttactcatcgatgacatcgatgtgatagcagcgaaaagggaaaacgcgcagagagagatggaaagacgaattgtgactcaactcatcgcatcaattgacgggctaaagtctgaaaatgacaatgagtcgtgtacagtg

SEQ ID NO: 93512 - DNA, 211 bp, Heterodera glycines
cggcgcttgcgctcagacatgtttgctgattgagatcagcaaagagcacttcccagagggctatgtgccaacgggtctttccacaattatcgccgagtacatccaggagtatgttaaacgagtcgaacttgcgctgggcgacaccgccggacacgaggactaccaccgactcctaccgcttctttttccggatactgagccgagtcagatg

SEQ ID NO: 93513 - DNA, 602 bp, Heterodera glycines
gtccatttaagatacctacctcatctttttttgatttatttgcctcttaagtgatttgcatatttctctcaaaaatgtctgttcgtcgtataaacaaaattctgtttcgatttcttaaggagctgattcttccacctcgaattcaagccttgactaagatttatcctgctcagaaagtgtcctcatatttgcctaaggcagcgaaacctggcaaatcgccgatgcgcaaaattcttactgggagctttcgcgctctccgcaacagaaaccaattgcttcggcctttcgtatctttgcattcttatcacattcgactcaaagaattggaaagggcgcgtggttttctgtccgttcgagtaagcgagaagagagatgtgttggaacgggtgaagcatttgttcggcaccaatgttcgctacaatcggtcattggcagtcacggaactgccggatcatttggacggatacgaaattggtgccttcattgccaaggggtgcaatggggcggtgcacgagttgaaactgcgcgtcgccgacggacattcgcggcgcatcgctccaatgacttcacagaaggaatttccactcgccctcaaaataatg

SEQ ID NO: 93514 - DNA, 632 bp, Heterodera glycines
gtttttatccgtccgttttaatgatccgtggcttttttaaacaatatgataagaatttggtggccaaatttaattcgctgaaaaacaaggcttggcgcgttgcgatgcccggctcaaacatccgaaagttggacactaagtccatcagtgggtggagtattgtcgtggacatcgccttcaatgcactaatgaagggccaagtggtggccgtgccgaccgacacactgtacggcttggtggcgttggccgagcactcggacaaattgtacaaaatcaaacgacggtccgtccaaaagccattggggctgtttctcgacaggcccgagagcataaagaagtactgtgaccaaactgtgcccgatgagtttctccacctcatttaccccggccccgtcactttgctgttcaatcgcaccgatgccgtcccgtccgacttcaaccccggctgcagcaccgtcggcgtccgtgtgccgcaggcgaagttcgtgcgcgacttgtgccgtcgcatgcccttccgactgctcgcgcagacgagcgccaacgtcagcggaggaccgaatccattgtgcatccgagattttgaagagatttgggacgacatcgatttgatcgttgacgcgggcgaaatcatc

SEQ ID NO: 93515 - DNA, 395 bp, Heterodera glycines
  unsure (1)..(395): unsure at all n locations
agaattcgagccttactttactattatattatccaccatcacatagcaaatgctacaatttgcacttctgctgctctttatggtgtcatcatttgatccctccgctgaatttatggccaatgaccaaattagtgcggtgcaacagcagcaagctgtaaaaccaattgttggctggcatttttggtgggacggacgaaatcgaaattggatagcaaaaaatgcggaaaatgttgaaaaataaaagaaagcaaatgaacaatcgaaaatggacagaaaataaatggcgaaacattttataaaaatggcagagataagtgaatttttgtggctttcttggaaaacgacgaaagattggataaatacatatatttgttnnnnnnnanaannnnanaaaa

SEQ ID NO: 93516 - DNA, 487 bp, Heterodera glycines
cgaagtggaagtcagcgagaagaaggaccgtgtgacggaccctctgtgcctaactcgtgcggccgttgaggagggaattgtgccctgggggggtgatgcattgcttgacgccttgtacaacttggactcactgaaaccggacaatgatgaccaccagagcgtgatcggaatcctgcagaacgctattcaccaacctatttccaccataatcgccaatgcacggcttgagccctcagccattgtggagaaagcgttggccaatgcagagaccaactaccggtacgatgccatgaatgaccaatttgtcaacatgttggaagcgggcatcatctacccggacaaacgtcgtgcccgacggcgttgcacgacgcggccggcgctggtctcgttgatggcgacgacggagtgcgttgtcaccgaaatcccgaaagaatagccgacgatgccatccggtggtggaatgggtggcatgggcggtggaatgggc

SEQ ID NO: 93517 - DNA, 601 bp, Heterodera glycines
aacgcccttcaggcggccatggagggttaccaagtgagtacgctggacgaagttgctgacattgctcaactcgtggtcaccaccaccggctgcaagaacattgtgaggggtgaacacatcgaacggcttccggaggatgccatcgtttgcaatgttgggcatttcgactgcgaaattaacgttacctatatgaacgagaattgcgtgtccatggagcaggtgaagccccaggtggaccgctatttgatgcgcagcggtcggcacgtcattctgttggccgagggccgactggtcaatttgggctgtgccaccggacattcgtccttcgtcatgtccgctagtttcaccaaccaagtgatcgcccagctcgaattgtacacgaaatacggcactccggacgcttacaaaacgggactgtaccttttgccgaaacagttggacgaggaggtggcacggctgcacctggacaagttgggcgccaagctgaccaaattgagcaaggaccaagccgaatatttgggcattccccaagagggaccattcaaaccaggccattaccgttattgaaaagcagcggatggaaggagaaaagcggaaagaa

SEQ ID NO: 93518 - DNA, 411 bp, Heterodera glycines
  unsure (1)..(411): unsure at all n locations
caagcggaaataatgcgcgcgggccccgtcaccgccgccttccgcgtctacgaggactttggccactacgcaagcggcgtttatcagcacgtggcgggcaaataccgcgggggccacgcggtgcgcgttatcggctggggatacgacacggacagcaaattgccatattggctggtggccaattcgtggaataccgcgtggggcgatggcggcttcttcaaaattcggatgggcactgacgagtgcggcttcgaaacatcgggcatttgctttgccgacccggaccaatccaactgaaatgcgccctctaaatgaacgctttaattatggagaaaattaagattaattgttataatctaatggatggaataaaccacataattagttannnnnnnnnnnnnnnnnaaaaaa

SEQ ID NO: 93519 - DNA, 733 bp, Heterodera glycines
taaggacagtggaagtaatgctggacgtccttaaattcatggattattaccagaactgcaaaatggaactgacatcgattggtttcagatcggtaatcgaccgctacagaaacgaattggcattgtgccaattcttccaaattcaactcattcccgaacccgccgttacgcttaccgtataccgccgtgccatcgaaatcactgaacatttctacggtataaatccatcggaagaatcagccgcaattgaataagagatgggaaatgaaaaatgggtccgacttctcgcgcaaaaaccgccacttttcgcatttcccgacatttcatttggctcgcaaatccaacacgacggaattgacagttttttgttgttcatcgcaaagaatgaagacgatgaacaggcgaagctgtgtttggagctccctctataccccgagacctccgatgatctagccctgggccgcttttggcttattcagctttcccgagcccactttcgctggatggacttcgggtcgcttcttctttcaaccctgatctgatcaggggctttcctggccttccccaaaagggccccccctcgggctcttcgtccgtccggatttggtttttccagtggtcaaccattgggcaccctcacaaatggcccgccccccgaaggaggacaacacaacccaaccgcgttttttggcgagattggctttttcgcgtattttccggatggggccccatt

SEQ ID NO: 93520 - DNA, 406 bp, Heterodera glycines
atcaattcaaaatcgatttatttaatattcttcatactccatggaacaaatgaaacaaggagtacaagatgtacctaaatcagttaaaatagcaattggataaaacaaacacataaaaaatagaaattaataataaattatttattttactggcaaaaaggcgtacctcttctctattttatctcacaaagaattaaaatttttatcgtttcgattaaagacataaataaaaatttagaactattccttccaagaaagaaaatgactcaacattaaattaggtattaaataaggaaccaacttttttgaataattcacattatattcacttcgtaaagctttgttatcattgaagaagatatttatatctattcgcgaatagtgtttgagcgagggtgtactggga

SEQ ID NO: 93521 - DNA, 534 bp, Heterodera glycines
tgctctttgacttgcgcaaaaggattttcttgtgaggaaggatggtcaaaaattggaataaattgttttaaggttttcactttttatggctcatatggcgcagaaaattttgccaattcaaaagaagccaaatcacgttgtgaagcattgggtgcaaatttggcttcactccacagctcgtttgagaatcagtttgttcaagaacttgttcgtaaatcgtacacccaatgccaaaaggacaatgtgccgtggtgttgtgactcgtacacttacgatggctattggattggcatgagtttgactcgcgcgagcaatggcacaattttgagtgccaaatggtcagacggcaccaacacacactacggtaatcccctcaaatttgccgaccgtacgccgtggtacacgcccgaacatcgtccgaaacaggacagccccgaaagcaattgtgtgttcatgttgctgaccaattcaggcatcggttgggccgactatgactgtgccatggcgaaaataggtggctatgtgtgcaaaaag

SEQ ID NO: 93522 - DNA, 268 bp, Heterodera glycines
gcgagagactcaccttgttctcgggattgcctcggtgtgctctgtgctggttatgatcgccacagtcgtcactctgccatctctgtactccgatatgagccctatgaacagcaacgtgcgcgacggagttgacggcttccgcggcaacaccgactcggcctggactgacttgatggacgtgcaagtggtcgtgacgccgccgatgaagcctcgggataaccccttgcactccatcttctgtgccatacgtggactgcccggacgctgc

SEQ ID NO: 93523 - DNA, 697 bp, Heterodera glycines
cctctcgaatgaatacaaaaagaaccctctcggccgattggcatttgacccgctaaaagctctttcctcaaattcgcttttctcttgtgccgctctctcttccaaaaatgccatcggatattcatcccgagccatcagtttcttcgagaattccctccgcctcttcgaccgcaccaaatcggccgagtccgaggtggaaagaccctttggtagaagagttccccgctgaaagatgggaaaacggacaagcggaaatgttggacgaagacggaaaaagaacagcgagaaaaaagggagatggaggagaagcggatgggaagcggaggaagagcggaggaagttcttctcggacgaattctacggggcatttccgcacctgagagggaccgaatcagtgaatgccgaacggtggaggacgaggagaaaaccatttgaggaagagtgttcttcacatttggaccgtttcgaccgtaattggagagacgaccccttttggcgcgatttgtacccgcgctgggccgagaccatctttacagatggcatcgacgtctaaacgaacatcatcaacgacagtaaccgtttcgcagtcgagatggacacttaccaattccgcccggtagaacttcgtgtgaacacgatgggagacactttgctgattgagggacgggcagaagatgttcgagacagagagcattac

SEQ ID NO: 93524 - DNA, 349 bp, Heterodera glycines
ggacatccggattaaagacgtggaaaaatgggataaaacgtacaaacccgagtttttctacggaaaggccccagatatggaagttgacagaaaggcattggcacgaactacctcaattttgcactaccatgacgaaaaattagacttggccggcaaagatgaatggcaagaggcgaacgctaacgaaatcattgactttctgaaagatgctaccactgatttgctcccggatgtgatggtcagaatgggacgcccagaaggccatttggacgagatgcttggctaagtgttccagccgggagtcaacgcatttttccactttttgataaactattgaatgactcctggc

SEQ ID NO: 93525 - DNA, 202 bp, Heterodera glycines
tgagcttgtaaaatccgagctcggattcgtgatctgcgcattttttcagcccagaaaatgtgctatataaatttttaaatttaattttcgaagaaaccacaaaactttaccattgccccataatatcttattttgcaattggaaaatctattttttaaaatatcataaaaaaactattcgaaaaaaaaaaaaaaaaaaaaaa

SEQ ID NO: 93526 - DNA, 528 bp, Heterodera glycines
ttggatccaaactcacaaatgccgactgaaacaacggaatccaacgaaaagaaagaaaatcccgaagacatttcgagcactgtgttctttgagcatcagcaggaattattgaatgagacagtttcgagtggtgacgaagattttcgttgtgtgtctgtaacatctaacgaatctgagattcaagaacctcgcttgtcaactcccacctcacaattgccgactgaaacatcggattcaagcggaaagaaagaaaatcccgaagacatttcaagcactgtgttctttgagcatcagcaggaattattgaatgagtcagtttcgagcggtgacgaagattttcgttgtgcgtctgtaacacctcccgaatcagaggttcaagaagctcgcttattgactcccacctcacaaatgccaactgaaacatcgaattcaaacggaaagaaagaaaatcccgaagacatttcgagcactgtgttctttgagcatcagaaggaattattgaatgaatcagtttcgagcggtgacgaa

SEQ ID NO: 93527 - DNA, 616 bp, Heterodera glycines
cttcattctatgctgctcttcacttgatcctctcaggcttcttcaaactcttccaagacccaatcgcaaatcaaccaccaccaacatgtcctccccgtccccagtccaacgcgcatcctcgccaagctctgcgccccgtaccgtggtgctcgccatggacgactcaacccatgcttggcacgccctcgaatactgtcttgccaacgtggtttcgcccgcgcgcaacgaccgcctgtttatcgtgacggtcgcgctcctctcggacacatggctcgaatccattgccaccgcgctgcgcgccgacccgggcaccatgggcgtgccctttgtcccgtcggcgcactctgccagcgccgaccgcgagttgacggatcacacacaagagcagctcaagttggcgctcgacaaggcaaacatgttgctgtcgagggcaaagcttgccgtgcgcgcaaatcccgacacgaggaacatgcacgtcgagacggtggcgctgcacgatacggacgcgcggcaggttttgacggattacgtcaatcatatgtcaccaaaggccgatgtgttggttgtgggaagtcgcgggttgggcgccatcaagcgcgccatggtgggctcaaca

SEQ ID NO: 93528 - DNA, 255 bp, Heterodera glycines
ttcttatcatcgaccaaggctcgatgacccttgcacagttggtggcagcgatagaggcgttgcacgcagaaactattggccgtatgaatgcagttctcggtaatcgccggtgcgaattgcctgttggccagccaattgccaacgaggaccgttacttcggacttgtgaattttcgggctgaagacgttgtgttcgattgtgcggtaaaaacgcgaaattccccgcacggggttattcgggtttatgtcaaatacg

SEQ ID NO: 93529 - DNA, 430 bp, Heterodera glycines
caaattatacgaaaatggaaaagcttgccaaaattggcccaaaacgatggcccaacttccgttgttcaacgatttctcgaagggtaatagccgtgccaattcctgcgttggctttgcgcccgtttcgggcgcacacgaagaagcactgaagacgaggcgaacggtggtgaaaatgctggtcgcttgtgtgtccgtctacttcatctgctactcgccaattcaggccattttcttatgcaggggtctcttcaacttgtccatccatcccccctacgaattcgtccttctgatgaatgccatggccattctttgctccgcttgtaaccctttgctgtatactctcttctccagtcgtttccgcgcgcgaattggccatttgttgtgcctttgctgcgacattttctatcgccgccacaataagtgaaacgcc

SEQ ID NO: 93530 - DNA, 469 bp, Heterodera glycines
tccggttatggttacttgcgcctactagaccccagcccaccgattgggacaattacaattggtgctgcactttcccttacttcggctcctggaagccctcctgctgcccttttgccattcccacgggtgccgtaatcgccgttattattgcgtgcattatccttgtggctgttttggtcggcctttcctgctggtgctgttacttctgtccattgtacaaacatttgtacgaaaacgacgacgaagaagcggaggaggagcaaaggcaaagggagggataaaacagaggaaaagcaaaggaaaagccaaaggaaaagcggaggaaaagccaaaggaaaagcacaattgggggaagggagggaaaaggaaaagcggagggacagcgaaacagcggggagaacggaacggagcaaaaggaagaattgttggcaattcattttattattatttcttgaatccatttgaaaac

SEQ ID NO: 93531 - DNA, 631 bp, Heterodera glycines
tgttctcgggattgcctcggtgtgctctctgttgcctatcaaaggggcagtcgtcactctgccatctctgtactcggagatgagccaaatgaacagcaaagtgcgcgacgggattgagggcttcccgcgtcaacacgactcgggctggactgaattggtggacctgccaatgggcctggacccccccgccgaaccccctggatacccccctcactccatccttccgggcaaaagttttacttcccggacactggccatgcgcctggctcccaacaaccaaactggccccctgggccgccccggccgtcccggaccccctgggaaaccccgaacaacccgggagggcaaagaaaaacccggaaaacctggaaagcctgggcaaaacgcctcctccttgtgcgcccccgaaaattcccccggcgcaccctgtcctggttgggccccccccgcggcccccgaaggaaaaggaaccccccgggccaccaagggagcccccggaaaacctggtaacccccccctccagggggggggaacctggaaaaccttgggggcccccggacccccaggaaagacctggggaaacccggaagccccccgaaagccctgtgcaacccccggaaaacctgggaga

SEQ ID NO: 93532 - DNA, 402 bp, Heterodera glycines
accatttgcggggagcgcgacctttttgcggcactccaatttgtgttgaacaacttggtgggcacgggcacaacggcaaaggcgaagagacaacagtccaacaacaccggcaccaccacgagcaacagtggcgtaaaacctgatcaaaaattggcacatttgttcccctacaatttcggcatgtccaacaatgggccggactatttgcaaatgttgaaaaagcgacgtgccaaagagtctctcggcatgccattccatggcattggcatcaaagtgcccgtgaacaacaaaggcattggctaccgaccgctgtcggacgacgccaaggaaaatgcacaactgaagcgaaacatcgaaacaatgggcacaacggaaaatgaagagaagaaagctgagctgaag

SEQ ID NO: 93533 - DNA, 215 bp, Heterodera glycines
  unsure (1)..(215): unsure at all n locations
ggaatctatgaaatatgcgccggtgacttcttgtgacgttgaatgcagtttttcaatttacaaatcaattttggccgataatcgaatgagttttacccccgaacacctcgaatgtatccgatttgcaattgttttcgcgaaattgatagactgttaaaaatttgtattttttcgcataaacacacttgatttcnnaaaaaaaaaaaaaaaaaaaa

SEQ ID NO: 93534 - DNA, 549 bp, Heterodera glycines
cagtgtccgtaagcttaaaaatctttattcaatgccggcttttgccttctgatgaaagactctgctattcaacaactgacagatccagaaattgaatctgctctacagagatcgaaacagcttgctgcttctaacggaggacaaaagagaacattttccgacgacttgaatttttatccggccaagcgaaagagtaacggtaccgacatggctaacgttggtatgggtgcacaagtagctgagacgctggtcgaaaatgtggacatccccgagagcgccgttgggctcgtgattggacgaggtggtgagcaaattcagctcatacaacagcagagcagctgtcgtgtacaaatgtccagcgaaagcaatgtcagtggatttcgtcagtgcactttgcaaggcgcacgacataacatcgataaggcgaaacaacttattcaagaagtactcgaacgcagcaatagaagtgcccctgggccacaaaatggagccaatgcaataacaattgaactgagcattccaggaccaaaatgtggacttatcattggg

SEQ ID NO: 93535 - DNA, 449 bp, Heterodera glycines
cattgagcctgatgttgggtgccgtcttcatttatccggtctaaattgggaatggcacacattggacactttgcgttctcattttggccaatttggcacgatcgaacagctggaaatggtggcttacccccgtggctgtggttcgttggtgttcgattcgcttaatgctgcccaactttgtttggctgccggtgaaaaacattcggtcaacggacattcaatcgaagtcaaaatggttcccgccggcttttccccgctcttttccccggctcggcccaattcctccgattcggcactttccgccgcttcctccgcacctccgccgccgaatgcccctctgaacttaatctgatctgtccaccttctaatcattcgttgtttcccaacttttttctcggttttttttgccatttccgttggataaaacaaatgtccatttgtatatgcac

SEQ ID NO: 93536 - DNA, 321 bp, Heterodera glycines
  unsure (1)..(321): unsure at all n locations
atttccacggttccattcggtgagcctccgtccgccttcgttttgctctgtcaaactttgctcggcgctcgttttgtccaaacggcacacttttgcagaacgtgcgcagtgccatcggccaaaaagcgttgcaaagattacattttactgttccgtcgaatgccaacgatttgattggggcgttcacaaaaagtgttgtgaggcaataaaacaaagaaattttgaccaaaattgtacagcaacaaattttgaggaattaaatatttcatgagtttgtgcagatacactctttattattnnnnnnnnnnnnnnnnnanaaaa

SEQ ID NO: 93537 - DNA, 83 bp, Heterodera glycines
ccaaggtcagcaccaaaaaagcgctccctctttctgaagcgtctgacaataggttgtgtacacaaaaaaaaacaaaaaaaaaa

SEQ ID NO: 93538 - DNA, 359 bp, Heterodera glycines
caacaaacaacgaaaggacaagagtttcacgttggcaagacattaatccagcgcctgcgctgtctgatatcaaaaataataacaaccataataataataataaaagtaataacttaaatccaaatgttttcccacccgcgccccttcttcggtcgaccgcggcattaccaagtctattaaatgtaacaccaacgcaatcagcatgtctgttgccgtcctcaaatcttcaatctttgctcggtgaagtgcccagcctcctcaaaaaccgaggccatcaggtttttgccgtgcccccaaacattccgccacttcgcctctttgacgtgcatgagcaaaagcagcctttgccgaatggtttc

SEQ ID NO: 93539 - DNA, 462 bp, Heterodera glycines
ttgagtcttctttttcatggaaggattgggttaggttacgtgacacttggaatgccgttgttacgtcgcaatcgcagattcacaggcattctgaacagctcgacaaaattgtttcggaggaaagcagttacagaaattatgcatctgacattcaaaatcgacaaattatgatccaaattgtggaaagaaatgtgaacaaagcgagggaattggtacgaacggcgctatatcagttgaacgctttcaattcggcgctgagtcaaatgagtgcaatgtttaaatcgcaggaagagaacgattcccaaactgagcacggaatattggagctgaacaaccaaaacgccgaaatgcgcttggagttgagccgacttcgcaatgagttggttttccgacgtcgacatatgctcaaaagcctttacgaagtgttttttctgccgaagctgaagcgctcttcgattgcgg

SEQ ID NO: 93540 - DNA, 256 bp, Heterodera glycines
aatgaaagcggagcatgaccctatcgcacgatttccgtggcgagctctatatctctccaagggccttgttatcaacggtggtgttgttgccatattttacagaatccttgccctattcaccatacatcccatgagcatggtcgcaacgcttcttcaactcgccgctggttttttgaccattgcccttgaagcgcccttttgctgtgctttcgtcgatttcatctaaagaattgctcaattttccgagtcgcgagcg

SEQ ID NO: 93541 - DNA, 517 bp, Heterodera glycines
ggaagttggagccatcctttctttttgaactttgtgttgagtctgttctgccgacaaagaaccaacaacagattttgtcttctctcagtttacgccaactttgtcttctcagttgcttggtaaagttggaatcatcggagtataaacagcgcatcgatttcacttaccaagaaatcgcaaaagggtatattaaattcacaaatgactatgagaaatcgatgcgagtgtgcagttttgtgctgtatagagacttggacgaattggccgctagtggcgcactgagtttggcgaagggatcggattttggacaaatccaattcaaaaaagccacatcaaatgtcgaattggatgccatcattaagacaattgggagagggaaaattccaacgaaagtcgaaaattggattttatcaccagaattataattgtatttcttttatatatttgaacgcaattttattttttattatttagatttccatttttgtgttttgggataaaaaaaatcagcttggaa

SEQ ID NO: 93542 - DNA, 634 bp, Heterodera glycines
ccactgttcaacgcacgcactgcactgccccgccgccaccatgaactcgttgcgcactggtctccccaagctcgctcgcggctttgcctcggctgccgtccaggtcccgatccaaatgcactctctcgagggccgctacgccaccgctctcttcactgccgcctccaaggccaactcgttgactgccgtggaaaccgacttgcgcaccttcaactcgtcgcttcgctcggacgccgagttccgcgccttcatcgagtcgcccgtggtcgacacaaagtacaagacgcaagctgtcaaggcggttgccgccaagaagaacttttccgccacgaccaccaacttcttcacgctcttggccgagaacggccgcttggacatgtcggttgccgtgctcgagtcgtttggccagctcatgtctgcgcaccgcggcgagatccccgtggtcgtcacgtcgtcgcagcccctgggacccaagacgctcaacagggtccgggatgccctggccaagggcggaaagttcacggccaagaaccagaccttgattgtctccaacaaggtcaacccgtccattttgggcggcatgattgttgaggttggggatcagaccattgacatggccgtgttcgccaaaatg

SEQ ID NO: 93543 - DNA, 516 bp, Heterodera glycines
atgggtcgtcttcaggaatactaggtcttcgggcgccacctgcgcaccgaggctaacccttcccccgccctctaccgaatgaccatcttctctcccaacgagacggtcgccaagtcccgatactggtacttcttgcgtggtctcaagaaggtcaagaaggccaccggtgagatcgtcagcatcaaggtgctccacgataagcaccctcttaaggtcaagaactttggcatctggatccgatacgactctcgttccggcacgcacaacatgtacaaggagtaccgtgagctgtcccgaacagatgccgtcgactccctctactccgacatggctgcccgccaccgtgcccgcttcaggtcgatccacatcctccgcgtcgtcgagctcgagaagaccgaggatgtcaagcgaccctacatccgccagctcacccagaagggcctgagcttccctcttccccaccgaatcaccaaggagaacacccagaaggtgttcagtgcgaagcgaccatccact

SEQ ID NO: 93544 - DNA, 462 bp, Heterodera glycines
ggaagtcgtcgttcaattggcccattctctgagtgtttttcaaaatgagaccgaccaaattttcaaaaaagctgcgctttggatggaaaaacgcacgcggagaatgaaacaattggacaagcgaatggaaatattggaaaggaaaatggaggcggtggaaaagcttcccgaggtgcctctgctgaattgtgcctccaatttccccgagtttggcacccccggcggaattgtcgtgccaatctttggccattccgcgccttttaatcgcagaagcggcgtccattttatggaacagaaatggaaaaaggatttcaattcgaatttgctgaatgaagccaatgttcgacgcaaggattttttggcacaactttttgtgaaggaaaagcagcgaaaggaaaaagtgattttggacgtggaaacattggaaaagctgagtccatcgtcagacaatggcgattcgga

SEQ ID NO: 93545 - DNA, 296 bp, Heterodera glycines
cagaggagcacgcaaaaccaaagcctttacaatcccattcatctccacggctaatcgcatcgccgcctcgcaacgttacattcgttcactgcaattggccgaaacgcctcggattgccttcgactgtcgtttccttactctgcacaccaaacgtggcctcaatctgacgatgcttcaactacaaatgttgttgtttgtctaccgtgaccggcaaatgccatggcccatccatttgtgcaacttcccctcaacatcatccgccgacgactgcaccggcggtgccgaggctggtgctg

SEQ ID NO: 93546 - DNA, 567 bp, Heterodera glycines
atgcatataaaatttaaaaaggaaagaaataatgatgaatgtaaatgcatactttagcacacaccttaaatgaaaatgatacaatacaaaatacgcatatacaaaaaataaaactgtggatttaatttgaatgcgttgtttaaattgagtaaaattacataaatatgtgataaatttaaggaaatttaaaatgcaaaatgggtttgaattgtgttaaaaggtgaaaataaaacctttggctcacactttgaaaccatttaaattttcttgactaagaaccgagattagaaaaaacatcggaaaatgaaaagatgcaaaaataaaaaacaggaatggggggagaaagaattgcccagcagcgttaactccgtccgatcagtttgtcctcccgcctctgattagtcgcttccttccgtccctcccccttcgatcatttcgtcgtccagaagtccttcgctttcgcccaaaccggcgccggcggcgttcagtcgcgcgtaatagcacaattggccgatcatcgccaagtccaatacgcagcagcccaaggagccaatcacccacggcaaa

SEQ ID NO: 93547 - DNA, 444 bp, Heterodera glycines
gcttttccccaaaaaagggctttttctctgtccttttttgcttcttactttttcctctgcttttcgctgctcgttttggctgatgaatttgccgaaaatggccaaaacggcgctttaaaaaccaaagtcagcccaaggaaagacggctgcgaaatcgcccacgcgactttctgtcggaatgtgtgacggggtaccgggaacggttttatttccattgccaattcccgaacatggacaagccttgtctgcgcgaaaatgccgaagattccgtccatcagttggacgtgttggctgccgagtgctgtgcctccactcgcctttgctccgtcgatgacattgagtcgttttgctgtcgtacgatggactgcttgggcctgtgctatggcgactccttcttggcacaaattcaaagccgcttccgttatgcggacattttgctgaaac

SEQ ID NO: 93548 - DNA, 144 bp, Heterodera glycines
  unsure (1)..(144): unsure at all n locations
tcagtttggaggacgaaaaggtgttcgagccaacgcatccgacacttgtggaatattacaggnggagaagaacaacaagtagccgacacaattcgatgaaaaatgttttccttttgttcgctgcatttcaacattctatttttg

SEQ ID NO: 93549 - DNA, 119 bp, Heterodera glycines
agaatgtgccgtggataatcggcgtgtgcgcttcttccgttgcgctcggctgtattgcgtacaaattgttgcagcaaaaaaactcccagaaagaacttctagacgaaatgactttgagg

SEQ ID NO: 93550 - DNA, 499 bp, Heterodera glycines
atttgttcttctgcacaaccaacggaattctcaatcacaaagcaaaaaactttttatcggagggcttggccgagtgaacgacgacgcgcttcgtcagtattactcccaatggggccatgtgatcgattgcattgtcatcagagacccggcaactcgaagctcacgtgggttcggcttcgtcacttacgcgacgacggaaatggccgacgttgcgatggcccatcggccccacgaaatcaatgggaaagcggtggacgcaaaacgagccgttcctcgcgaaaggatgaatctgatcctcgacaacgaccccatcccctttttcatgaacattgagcctgatgttgggtgccgtcttcatttatctggtctagattgagaatggcacacattggacactttgcgttctccttttggccatttggcacgatcgaacagctggaaatgtgggcttaccccgtggctggggctcgttgtgtttgattcacctaatgctgcccaa

SEQ ID NO: 93551 - DNA, 471 bp, Heterodera glycines
ctgtttatatgcaccgctaatgtaactgactccccacagagagggttaaaagaccgaatggagatgattgaagttgcgggttatgtggctgaagaaaagctggagattgctcgcaaatatttggtcccaaaatgccgtgagaaatgtgctttgcccgacgaaaaattggttataaaagacgatgcaatcgattcgttgataaaatcttattgccgtgaatcgggagtacgatttttgtttatagccattgaaaaaatttgcagaaagagcgcttatcaattagtaaggggagagggcgcgggaacacaagtactgccaattggggtggagaacagcgaccataaaaaaaatgctgggggagaggaggtcacttctgaccggctgcacccgacaacgccggtcggcggtagcatggggacggggtggacagagacgggaaggtccgcccttgtggcgaggcgacccctgcag

SEQ ID NO: 93552 - DNA, 557 bp, Heterodera glycines
caaaaacatcggagaatggccaagaaaatgtacgaaaaggcgcgggacagagcggaaaggggacgcgttttgttgagcaatgagcggggcattgacaccaaagaacgttcctcaatcattctgatgccaattgatcagccaaaagtgctaaccgcagaaacttttgcgagcggacgaagtcgacgagtgaaaggcgaagcgcaagcgaacggtggggcccacacggagagaaagcccatcaacggaccatcagcggcaaaaaggccagcgaatttgcaaattgcgactgacaaacacgcggacgcaaatgcaaatgcatcgcaaaacaccgtagtctacgggccaatctttcccgccgactattggcaattgcccccagcgcttttagccgcgcggctgaggcgtttcagcaaggcggacattatgcgaagccttcggcaaaatgcccgacggatgggcgtcgatggaggcaaactgcgtgcggtgatgcgacacatcgaaataatgcgacgggaggaagcgcagctgcgcaatcaacggcactatcagctgcctga

SEQ ID NO: 93553 - DNA, 247 bp, Heterodera glycines
caattcgctcaaaaaggtggagcctaaaactgtgctcttcatcctcgggtcggacacggtacccaccccacacaccatcaccaacgcttactctgcccgggaatggttcttgcacgaggctgtcgacacagcgcaggtggccccacactttgtggcgctgtcaaccaatggcctttcagcggatgatctcagtattgacaggaacaatatgttcgagctttcgcactggattgcaggtcgctactcc

SEQ ID NO: 93554 - DNA, 463 bp, Heterodera glycines
tgtctgtgtgcttgttggagatgaggacccgaatgtgaatgggaatattaacttcatccagtagaaggatgactctacggtgaccatccagggtgagatcactggactttcgcccggaaaacacggtttccacgtccacgctttcggtgacctgtccagccgctgtatgtctgctgggccccacttcaatccgacgaacaaaacccatggtggacccgaggatgatacgcaccatgtgggcgatctcggcaacgtgttggtcgggcacgacggagtggcaaaactctatttcactgacaaagtgatttcactggtcggtccgcacaacatcatcggtcgcgcgcttgtcgtgcacaagctcgaggacgacttgggccgtggtgaaggactccagatgccggagagcatggagactggcaatgcgggtccccgtttggcgtgcggagtgatcggaattgctcag

SEQ ID NO: 93555 - DNA, 309 bp, Heterodera glycines
agcagcagttgtcctccgctttgaacttgcaggcgttggttggggctggagcagtgcaccaaccgccgactcccatcacttccgccgcggcatccaataatattcccggcatttcgcaagaacttttattccaagcgactcttcttgcggcagcaaatttgaacaatcccggactaattacgtcgaacacaacaccacaacagcaacagagaccaaaatgataagaaggagagacaattaacaaatgttgtcgtcacaatttttagaaaaaactaaaatctaattataaaaaaaaaaaaaaaaaaaaaa

SEQ ID NO: 93556 - DNA, 385 bp, Heterodera glycines
cgcctcttctttcggctcgtaacagcggctacaccggccgattccatttgatctacccggactcgcagcaacccgtgcctctgtctcactatgtcaatgggcctccggcacccattttgttaccaatggaacagcaaacgaagttttcgtcgattcaacagccgaagccattgccaaaattgtctcatcatcagccgaacaataacactaacaacaacaagcgtccggcggagtatttggtcaatgagaagtacaaaacaattttgtgcaagtcgttcaccatcaacggttactgtgcatatggggcccagtgtttgtttgcccatggcgaaggcgagttgcggaaccagaaattcaaaaagtgctggtgaattgatgatgatca

SEQ ID NO: 93557 - DNA, 554 bp, Heterodera glycines
cagatgacggaagcggacactcggatgggaacaatgaaaacagcgatttggaagtcatcaatggcgaagcggaaatggccagcaatagcagcgatgcctccgacagcgatgatgacgaccttttcacgcatgaaacggatgatgggagcgatgcgatggatagcgacgacgaggaccaatccgacgaagatgccaaccgaagagcagacgcacttaccatggaacaggagaaacagttttggtccattgtcccagtcgaacaactgaaaaccgaggacggaaactcccaatcgtcggacaaaccatcgacttcttacgccgcttctcaggccgggcttcctccgtctcaaaagaaaaaccaagcgtcgagttcatctatgcgccatcccaacgtttgtctggacgactcctcaatgccgtgctccatttgtttgagtgacatgcgcgaggagtgcgacgacgatgttgttgtgcagctgtctctctgctctcacttattccacaaggaatgcataaagtccgcctttgctgtgaagcgacagtgtcctctgtgc

SEQ ID NO: 93558 - DNA, 587 bp, Heterodera glycines
tggccggtgtcttctccattgaactgactgaccgtgccaggaaccagattcggccttcagcggacgcattgtccgacatggaagacgaagacaacgaatatgagaatgtggaatatgatgaaattcccacactgtcgccctcttcttcgtatataaatgggccggaaggcgttgaaaccattgaattaggcgataatcccgagttggtgaatccgctttacacaaaagtggggccggaggatttccaattgctcaaagtgctcggtaaaggaggctatggaaaggttttccaagttcgaaaagtgactgggaaggacagtggcaaaatcttcgccatgaaagtgctcaaaaaggcgacggtcattcgcaatcagaaagacacggcgcacaccaaggccgagagaaatatactcgaagctgtcaaaagtcccttcatttgtgacctccaatacgactttcaaactggcggcgagctttatctgatcctcgagtattggagcggcggccaattgtttatgcctttggaaagagaggggccttttatggaagacactgcggtattttatctagcacaaattgtaattgca

SEQ ID NO: 93559 - DNA, 478 bp, Heterodera glycines
gattattcttgcaaacattcgtggattcagtggcggacaaaatgacatgcttcgaaatggtgcttaagttcggtgccaacattgtcgatgcacttcagacgtacactcaaccgattgtcgtttatttgcctccgtttggcgaacttcgtggcggtgcctgggcagttcttgataccaagatcaacccaacatgcattaccatgttggccgatccgaattgtcgtggcggtgttttggaggccagcggtattgtggagatcaaatttcgcgaaaaagacctgctcattctgctgagaaaatgcgacccgaaaattaaccaattggaagaatcactcgccactgcttcggacccaacagccaaaggacaacttctagacgaatacaaaagacgtatagaaaaacttcttccgatttgccgcgcggccgctgtcaaattcgccgacttacacgacaccaacggcgagaatgctccagaaag

SEQ ID NO: 93560 - DNA, 533 bp, Heterodera glycines
gtccaattaagatcagtcaatccgcaatctctgctctctcttctgtccttccgcctttggtcgtccatcagtcgcttcgctcactttcatccaccgattctccaaatgggcggcgactaaatcacccccgaggggaggaagttgtagctgcgtctaaccagtcaatttgatcttctctgcttcgcacagtccaattaattgttttaatgaacggcggaagtgaaagagtgactcatcccttcctccctccttgggacttttcccaattattacaaattcatgtccacttaaatttgaaaatggcctcgggtgccgctccgtgcagtgaccagcgaaattcggcaaaagcggcggacaaagcgccgccgccctcgcagggccaccgaagtcgcaaatgggcgacggacggaggggcagcagcgcactgcgaaaattgcgtcgtttgcggtgatcgggcgtgcaatcaccattattatggcgttgccgcgtgccatggctgcaaatgtttcttctggcgatccatcaaaacaaaa

SEQ ID NO: 93561 - DNA, 293 bp, Heterodera glycines
gggccggcagtggcgacggcatttgcttcgcttttgattgcgtccctttcccctcctccaatgcttttgaaatttgttccttcgcttcttttgctgagtttggtgctgtcgcagagaaataacggccaaaagtccgtgagggttcgctacccgtggatagcactgagcgatggctacggggaaaagggacattggcagccgaaggcaatggccaaatcattggcgaacagacaaacgacgagaaaaggtatttttttttggaagagcaaaagcaaacgaaggacaacaaaaat

SEQ ID NO: 93562 - DNA, 269 bp, Heterodera glycines
cttccaccaccgcttcatctccgcacattcattcggcgagtaacggcggaaactgtggaaaatgtggtagtcattggctccaagaactccaagtactcggacccaaatttgaacattcggtcccgcaaagtgggctccagcagcagcagaagcgattagaagagattaaattgaaatttttgcctgaatcgccgaatcattcattcattttaaattcatttaaataaatttgttgaacacttaaaaaatatttaaaaaaaaaaaaaaaa

SEQ ID NO: 93563 - DNA, 547 bp, Heterodera glycines
gtgcaatcaatttttctaaccgccgccatttcttcattggcaatcattctggacaatttttgcgattggcaaaatgtttgtcgattggtggaaccatcgtggcgcgtattttgtggccaagccacacatgcgcccggcactgttggaccggccagaatggaagcacaaatttatcaaattaaaacacattcaactacatttcgttgaaatggtggaaggcggtgcgcatgagtcaaagccggtgatgtttttcctgcatggctttcccgagttttggtactcctggcgctttcaaatgcgacatttctgtgccaaatatagagtgatcgctgtcgatctgcgtggctacaacgactcagacaagcccatcggcatcgaggaatatgggctggaactgttgtcagctgacatcatggagctgatcgaacggcttggcaaacaagtggtgttggtgggccatgattggggtggcgtgatcgcatggaacatctccatggagcgccccaaactgctccaccgacttgttgtgatgaatgggccacatccc

SEQ ID NO: 93564 - DNA, 398 bp, Heterodera glycines
caattaagctgtgttcgtccgtccgtttattcgttttgttgcgatgttttcgccatttttgcgtcgcattttttttgcttttcttatcgcttctttttatttcggtggaaggacttttcacgcttatttatccctttctgcttcaaacaatccgcaaacaacagcagtgaagcttcgtgaatttgttgacggagctgacttcatggagaggattcagcagattatccgagaagaggtgaaagcattgctagtgaaagcgaaacgagtggacaagcgcgaaattgaggaggaaagggcgagcccggccttctcttttagactgcacatgaattttacaaagttattcggcttttgatcactctcgcggagatattatgaaattttaaaattcattgatg

SEQ ID NO: 93565 - DNA, 434 bp, Heterodera glycines
tttcagttttcatttcggacgacgtgcacttgcccaccggaatggttctgctgcagcagcggagatggctttgttgggttgacgcgggcattcagcaattgtcatgcattgggctggacggaacggggcgaagagtgatttacgccccgcttgagtatccctttgggctgacagtgaatggagcggaggagcgcttttactggaccgattgggaagacatgaaaatccattccgtgtttgttttcggcaaagggtacacccaatttttgccaggaggtggcggaaaaggaaggccttacggcgttctcagtttgcccagcaaatgccgtccccacccgccattgtgcgagtgtatggccaacaacggcggatgtgcccattggtggctgtccgggggccgacgcggcactaccaagggtggctgtccggacaat

SEQ ID NO: 93566 - DNA, 485 bp, Heterodera glycines
cgggattgcctcggtgtgctctctgttggctatcatcgccacagtcgtcactctgccatctctgtactcggagatgagccaaatgaacagcaaagtgcgcgacggagttgaggccttccgcgtcaacaccgactcggcctggactgacttgatggacgtgcaagtggtcgtgacgccgccgtcgaagccccgtgataaccccttcaactccatcttccgtgccaaacgtcaactgttcggacactgccagtgcgctggcctccaacagccaagctgtccccctggtccgcccggcccgtccggaccgcctggacagcccggacagcctggaggcgcaggacagcccggacagcctggcgcgcccggtcagcccggccagcctggaaactctggccagcctggacagcccggagcaccgggacagcccggcaaggacagcggctactgtccgtgcccgccccgctcttccgtgttggcagtcaaaa

SEQ ID NO: 93567 - DNA, 90 bp, Heterodera glycines
attccttttacgacgaccgtatacgaaattgttgcttgctttttcgaagaacagctcgtgaatgcacttattatttttcattggattgat

SEQ ID NO: 93568 - DNA, 664 bp, Heterodera glycines
cgaagctcgcatttcattcaaatcaacaattcaaccatttccaagtgaatgcattccgttgccttttcttctttatcaacagaagaagctcgcttgaacttcgaacaaattttccatgagaatggcttcgtccgaatcgatggtgtattttcaaccgaagaattagctgaactccgtgatgctgtaaaattaattgttgaaggctttgacccgaaagaccacccacggacaacttttttcacaagtgacgaggaaaagcatgtgtccgacagctacttccttgacagcgtagacaaaatcagaaaattgtcagtctgaccggcgctgttcagcctcgcgtgatgcaaagcatgttcatcttcaaacaacccaaaatcggaggctcgactaatgagcacgtcgattcaacgtttttgcacacagaaaacggagacaatcttttgggtgtttggatcgcagtggacccggccaatttggacaatggctgcctatggtttcttcccgggtcgcacaaggacgccaattatctgtctgctactaggcagtacaaattcccaagaacagaaaccaagcaccatggggaaaaaggcatccctccgatgggcccattgttaaaatcttggtgagaatcgggcttcctgtcaaagggcgccaagtccggtgg

SEQ ID NO: 93569 - DNA, 302 bp, Heterodera glycines
acttatggctgccgtttcctctgctaaatcttcctccgccctcaaatgggtttcactgattgtgctcattggtcaaacgacagcgctcgtgctgactttgcgttattcgcagacccaaaaatcgcatccctccgacgggcccaaatatttgtcgtcgactgccgttttgatggccgaaatagttgtccaaaacaatttgctgtttttggccctttccaaattggacgccgccacttaccaagtcacttaccaattgaaaattctgaccacgggctttttctccgttacgatggtaaacaaaa

SEQ ID NO: 93570 - DNA, 105 bp, Heterodera glycines
gacagcgaaaatgccgaaaaaatgcaaaattggaatttctcccaatttttttttgattttataaaaaaaaatttcttttttaaaaaaaaaaaaaaaaaaaaaaaa

SEQ ID NO: 93571 - DNA, 412 bp, Heterodera glycines
gatcgtcgccagacagttggcaaagcccatcactggatattttatgggattggggaaagaacacccggcatttcggaactgagtgtttctacctgtacggaaaactatcacatattggttccacaaaattgcgaatgaaaatttggacctcggctcaccaacttcaggggtatatgtatcggaagacacagcgcttgaacaggcttcttttgtgatccatcaagtggacattttcggctactctgtcgtggtggtttacgcttattcctatttcacgcacccagaggagaaggacttggcaagcgtcgatgaattgacagagctgagcatggacacgagccaagagataatgctactgaatgagctggttaccgacttgcaagacgacatgcgaatgccgcctacggaccga

SEQ ID NO: 93572 - DNA, 529 bp, Heterodera glycines
gaaaaatatcatccatcgcgatctgaagccgcccaatgtgctgatgaagaagaacaaccaggccaaactgactgatttcggcctcagccggcagcaggacggggtcagccgagcgaacaccgtttgtggcacgccgtattacatgtcgccggagcgcatcagagagttgccgtacaccgccaagtccgacgtttggtccctgggctgcattctgtacgaaatggccacgctgcgctcgcccttcttcggcgagaagagcaacatcacgtcgctgacgcagaagatcagcgacgcggagtacccgccggtgcccgacgacagctacagtcagccggtgaccgcgctcatacagtactgcctgcgcccgaaagcggaggagcggcccagcgcggcgcaagtgcaccgtatggcgctgctgatggcacagcggtgggagggcactccgccctactgatgatgatgatgatgatgaagcagtcatgagagaggcgcgcaattaatttttaaaatttaaatttccataattttc

SEQ ID NO: 93573 - DNA, 495 bp, Heterodera glycines
gccccactgatgttcttctgtgtatcgtgggctgaacacatgggccttttcgcgcagagtccgctcaaggaggaacatatttgtctccttttgttaagcgccggtctgacgaatcagccccaaaacgtaatcaactcggaggagcgtcgcccttggctgagtgagactccggttgaatgggccgagtcggaagcaacgccacgacgagcggttacccgaccgtgacgacgcttcagctccttcgttgagagtcttgcctcccgggacttcgaacagcttcactgtttggactttgcacatttgggcttgggttcagccgctttcatgttcatgggagaatggcgtgagctgcaccggatcgcattgaaaacctattacagtttggtgttcatggatcacgacatgcacattctgccatctgccgatgaatcggaggccgatgatgcgtcttcgtctagtggcgctgttgacagtccgaccgctgaccactctcag

SEQ ID NO: 93574 - DNA, 157 bp, Heterodera glycines
agaaaattttcaacttgatgtatgcaaataaatagattcattacaaaaaataaattcataaattttattttttatcgaaaataaaattgtaatccattgaaggagagaattaaaatatattctatatttttcaatcaacttagttgaaatgtaaaaa

SEQ ID NO: 93575 - DNA, 469 bp, Heterodera glycines
tgcttggcccgatcccgtcactacttaaaaatctgcggccattgacttcagcttttaaaactgagatcaggatcggacaggtgctgaataaccgagcattgctggaccagtactgtgtccttttcctcgtgtttggcttcaatcggctgctgctggtcaccagtggaccatgtctaagctgtgttcgtatgaatgaagattggcacgactattgtaatgcaatggcaaagtgttgcgactcgttgcgaattaaaccgtgtgggttggatgacagcgatgtgacggatgacagcgacagcgagctgtcgccaacctcgtgccttcccatttacgtgttcaatgcgccacccgtggaccaatattggagtggcatatgtgaaaatcaaccgactgacaaatgcgattcttatgaagtcaatctatgctttttggacgcaaaaaagcggtgtttaccgcgcatgccatgggc

SEQ ID NO: 93576 - DNA, 272 bp, Heterodera glycines
tcttcaaattttgcgcccgctgctcgctgtttcgctcctcgtcacctgttgccatggtcagaaggagagaaagcctaaaacgggaacgaccaaaacgagcacaacaacgacgactaccaccaccaccactacgaccactttgccaaaaatgactacgccgaacaacaccgctgcaaacggaggcggcggcagcggcaacactctcctgttcattttgttttgagttggcgtatttgtggccttggcggttgctgtggttgtggcggtcgttg

SEQ ID NO: 93577 - DNA, 442 bp, Heterodera glycines
gcatctttaaaatgaactgtatttgagagggcgcatcaaattgccgtaaaatttggcgaagtgatcctgggcggcatcagctaccgaagcgatcgtggtgattatctgaaattgtttgaataatattgatccaacaaagggaaaaagacaataactgacctgttccaagacgagttttttgccattggtcatcatttgctggaaagtttgtgaaagcactgactccaatcttttttttatcttaacaaataggttaaaacaatgaacaaaatacacaataaccgatggcaaataaatactgatgattgacttgggacaatcttcgcaaaagttcacctaaaccaatgaaaatttggccgtataaaaccaccgtcgaatgcgtctcatgccattgcggccgccgcgtgcgcagccactcgcgggacggacatgtcggccatgg

SEQ ID NO: 93578 - DNA, 562 bp, Heterodera glycines
gtttgagccatttcaaattaaaaatgcatttagagtcacgccgaaatgtgacttttcccgtttgggaggcaccctttggaccaattgcattccatgagaacgatgttagctctgagaagctgatcaaaactgatcaaacagatgaggcaattaatgaaaaaggaaattcatttgtccattggcttttcctcatttttctgctgctcattttgttggcattttgtctgtttctgatcagtttgatctgccgacggaaaattcgtcaacgaatcggtcgaacttattatgtgctccaaaaatcggaaccaaaaaatggagggccaacatttgaagttcttaaaacaactggtccaataaagaagcgacggtttgggagcagaaccgattcaatggaacccattcagctggctcaacataaaagattttttcccctggagggctctttttcggccactccaccggtcacgccaacggcaccgctactttttgctgaacaaaagcctatactaaggccaattttacggcatttgcctcctcccaggctaccgtcatcatccattac

SEQ ID NO: 93579 - DNA, 221 bp, Heterodera glycines
gtcggatgctccgtccgccacggcgaacgattggcgagggcaattggtccccatgggaagaagaagcggacaaaagcaacaacaaaaacaagaacagcagcagagatcaaacggcaaacaaagtgccatcctcggggggggggcgactgccaaacatatggatgactaatcgtaggaattgtttttccaaaatgcaattccaaagtaaagtgattaaaatt

SEQ ID NO: 93580 - DNA, 302 bp, Heterodera glycines
agaagcagaagctgatagaagaagtgcacgctgttgtgacggtcagggacgcgaagcacacaaatttcgtcgagtttcgaaacttcaaaattgtctatcggaggtatgccggactttacttttgcatatgtgtagatatcgctgtcttttatctttattacctcgaagccattcataattttgttgatgtgctcaatgaatacttccacaatgtttgtgagcttgatctcgtcttcaacttttacaaagtttattcagtcgtacatgaaatgtttttgggaggacagattcgcgaagcgtcg

SEQ ID NO: 93581 - DNA, 367 bp, Heterodera glycines
gccaatccccgtcatcgaattgtcttaccccgtctccgtcatttactgtggcgaatgttctatgcccgtcgaatactgcgagtacagtggcaaatttgagaggtgtcagcagtggttggaacgcaatttgcccgatttggcggagaaacaaatgaaaattggggcaggagatggaaaagcggcggatttttggaatggggaagagacggaggcaaaaaagcaccaaaagcgaggcggaaagggattgccgaaggcgagaggaggcggcaatggctcaaaagagcaatccgctacggtggcgcaaattacgctgaatacagaagtgcggatcaaaaaccaagtggtgaccgtcgataaaggcctcact

SEQ ID NO: 93582 - DNA, 524 bp, Heterodera glycines
cttaagcttttgcttcttgcggtctccatttgagttgccatctcttaattaggctccattttctgccaaaatggtcattcgtccgtcctctgtccaaatgcatccgccgctgcacaacaatcgcttccattccaaccaattttcgtttgccgttgccgctgagcagtgccaacaaccgccgatgaacggcggcggcggcacacagccgcccccggcgggaggcgcccttttccaacagccgttccctccggcgccgccccgcgggacggaagccgcggcacagattgaacagcaccaaatgatgctcatccgacaacaccagcaacaacagcagcagcaaatgctgctccatcagctgatgctgaggggcgaagttggccttcccccgcaggggcgtccttctgcccaaccgccgcattctttcccgccaaatccccacaacaattaccaacacattgtgggagaactgacgccgcccccctctcagccgtccctcggcggactttcgtccccccaggccaacg

SEQ ID NO: 93583 - DNA, 643 bp, Heterodera glycines
gactgactgactgaccgacctctcatcagccactcactcccacactcacttccatttcttacattctcgtgcccattcaaacaacaaactccttcaattgtgtcttattctctcgccatttctcctcacactctccctcacatcagtaacgtccatttgccaaaatggtgaggaccaatccattgctcttcgagcttgtcttcgataatggctaactggtcgaatgcttgttgtgacagcttttcttccttgtgcttagctatcggaggaactctccatttattacattcttttcttgccggcccttttgagtgaatcccttcttctttctgcaactgctgacgttatgttttacgatggatctcaatggattcgacctgatgctatcaataacattcaacaattacccgattcgcatcatttatcaaacattcaattgatgaggagcaatgtcgatttggtcttcagaattgtggccattagaaatagggataacaaaagactcgtcaaccaacatatattccatcgtcttaaatataaagaggccactccatcttttcatcagtggcgaaatgagcataagcaagttattggtctcaactttactaatgaacaagatgcaaaaatgttttatgaggcggtg

SEQ ID NO: 93584 - DNA, 610 bp, Heterodera glycines
acaacccattctcgtattggtcactggcgcgggtggacgaattggctattctctggttctggtaatcgtcaaacgcgatgattatggcaaacatcagcccattgtcctctcccttctcgacatccctccgcttactgaagtgttctccggggaccactaccaattgttcgactgcgcccttcccgacctctgctgagaccaggtcctaacctcggaagaggcggccatctaggacattgacttcgcttttctggtccgagcgatgcctcgctaagaagggatgaagagaaaggaccttcttgcggccaatgtccgaattttcaaatcgcagaggtaatctttggacgaattttccaagccaacaggaatagtgctcgtggagggaaatcaggtcaacacagacccattaatttgcgacaaatacgcggacagcgaaattccggctaagaattttaatgccatgactcgtcttgaccacaaccgtgccatggcacaagcggcacaaaattgcgcagatggaaccaccgatgggatggtgatcaataggatcatttaagacaatcactcaatcactcatttcacggatatccgacatgacaacattgacaaa

SEQ ID NO: 93585 - DNA, 516 bp, Heterodera glycines
caagcaatcgctgttattcaccagaatgtatccacatctgatcatctatttggactgtccgcctgaaaagtggtttggaaaacattcaaaaacggggcaatcccgctgaagtcaatgccgtggatttggaatatttggtcaacattcaaaattcctacaaggatttttttcgggaaatgagggacgaatgtgaaattctcgcgtacgattggacaacgccccaagtccttgacgttctgcttgaggacattttggagattgatttcgaaacactcgatttttattcctccggcaaacaccgcacttggtcactgatgggaacggacacaaaccactgcttttggcgccatatggtcaccaccaaagaccaactgaaggaaagggcgatgaacaaacttggcttgctgcaaacggaggtgtccgagctgtacatttaccccatggacggtattcatcatcggaatgtgattatgcatgaggtgctaaaagatcgttgcacccacggctacacaaaga

SEQ ID NO: 93586 - DNA, 85 bp, Heterodera glycines; identical to SEQ ID NO: 66515

SEQ ID NO: 93587 - DNA, 124 bp, Heterodera glycines
cgaacctgttggcgatatttcaaaaggaatggctgaagctgatcgcaagatacgctcagtagaggtattaaaattctctttctctctcttaatctttgatatattaaaaaaaaataaaaaaaaa

SEQ ID NO: 93588 - DNA, 384 bp, Heterodera glycines
  unsure (1)..(384): unsure at all n locations
ctcgttcaatttgagtgattcttcaacaaatacatattaattaaccaattgtccaattctgtgcttatgggaacggatgtcctccagcggcagacatttgttcacattgtccatcgccatcatttttttgtgtttcgcggttactgtcgtccaaacccgctaccgtttccgggaggaaccgatgccggacgaggggcttcaccaagactgggacatccgattcaggcgcttttctgaacacatcgctcaccgcattcaaagcactctgagatgagacggtgaagtgactgacgacttttttgacatcgatttgtcccgtgaccgttttgattatgatctcgctattaaacgcaaaagaccnaaaaaaaaaaaaaaaaaaaaaaa

SEQ ID NO: 93589 - DNA, 433 bp, Heterodera glycines
gttaaggtcgcctccggcacataatcactcgtgaatttataacatccatcaatcagttgtgccgatgccaaaaactccaaagtgcaccactccgtccctgctcggccgcgtggtgcgcaaattgagcagcgcgcgcaaggcgcacccgcaccgttttgtgtttgagccgaaaaagttgctgatcgacacggacgaacggtggcggcccgtcgaacacattgtgttggtcttcagacacaggcatcgtctgttccgctccaaaatgcgctccctggaggactcttgcttggtgggcaatcggcgtgtgcttgtgtggcccgaccgcgtggtggacgacccaattgaatttgtcacgacgctgtacaaccggcggaagcagtgcaacgagttggatgacaaggaatggacattgtttgttgagggtccaatggta

SEQ ID NO: 93590 - DNA, 560 bp, Heterodera glycines
ttctaacctaatgtccccaactaaaaaatttgttccaaagcgattgccccccgaacttttatatgaaatttcactttttgtcaatccccgaaataatttgtcttctatctgttcctcctctcgtgtattacataaatttgtgtatctgcgggtggctaaattttatcactcatccgttgaacagctcaaaacctcttatgcaaatgcgcgccgcagcccttcctgggaagctgtgaagtccgtggcttctcttgctcgtggattgcgtgacccttgtcttgatcagtttttggctgcacttgaggatgctttgggcaccggacgtcctgccacttacacatttgagaaaatcagcaaagaacgcgtcggcatcagcctcattcaaacaaagggcggcagcgaaaccaaccgcactcacactgtctcaaagacatctgccggccccgccgcacgtcgttcttctcccggcgataccagccgcactcacactgtctcgaagacatctgccgtcaccaccgaaagcagtacttctcgcttctctctgcctcagttgtttggaa

SEQ ID NO: 93591 - DNA, 368 bp, Heterodera glycines
ttcttctcatctccctaatcattgtcggcatttcgcacggccacccggtttatgaagaggtgcctgtgtatccgctgtccaattcccagggattctacgacaaggaaaagggggaagtgaatggcagtgcaaatggcactaagcaagcgcagcataatgctatccccgtttccggaaatggcacagaagtaaattccaactcgactgtggacacggcatttgacaataatttcaatggcactgcatcgggtgtcagcaaaaatgccattccggcaccacttgtgtccggccatggattcaatggaacagagaacaaaaaacacattgggcaaagcaaaactgggaaaaagacgaagaaaagcagtaaa

SEQ ID NO: 93592 - DNA, 458 bp, Heterodera glycines
cccattttgtgctcattgaactgttcactaaactgcaattaccaccggtcaacgggctccaccgattgttgcgctattccgttgaaaaacgcttttactgtgccgtcttttcgccgaacaacggcattcgtcagcaaaacggtggtggtggtggtgaccagcaaaaacatcaacagcagcacttacgtttcttgggccgaagcaaaggccgtcactgtgagtacgaattgataccgaaacgagcatcggggttttgttttctaccatattttttcaaaaaatttggtagtcattttcccgaaatcaagaacacagtaaacatggtaaagaaatggaaaaaaagcatatttcaaccaaaatttttgtgttttcgaccggtgcaccaagaatttgtacgtcaaaattgaaaaattctgtcctttttaaataaatccattaacaaattgcactcagatttc

SEQ ID NO: 93593 - DNA, 325 bp, Heterodera glycines
accagctgaagatcccgagcccggaaacgctgaaccggcaaatcccacctttgctgcatggcatacgcctcccaatgccggcgggggcttcgtcttcgtctaatgccttccaagaaacactgcgagaggaggaggaagcggccgcggcactcgcatctttgaaatgatttaaaacacaacttcgacggcattcactttgatagtctcacaataagtcgattcattaccatcccatttacattctcaaattatcctcatgtttgccattttaaaaaatatttagtaaatctatttgtttgaaaaaaaaaaaaaaaaaaaaaaaaaa

SEQ ID NO: 93594 - DNA, 434 bp, Heterodera glycines
gcctgtcaggcgttgaactgcgctttcggttccgagggattgtgccaattcaaaaccctttttctcgctgccggcgatgttccgtttgtggtgcctccgtccggcgaagggattgttgctcgtttctcccgcggaatgcgtcgtgcgattctcaaatcgcgtcactttcgccttccctccaacgaacaattggaaatgcatcttgaagcgagtctgtccaccttcggctctcgtctttacatttgtcctgacgagcagcaaaagaccgtcgcgaggctatcaatggaaaaaacggggccaaatggagtggagacggaccccctgagggaatttggatactgcgaattgctaatgggaccaaaagtggaacaacggatgatggagcggatggtcgtccaattggaccccgaattgagacacttttcattggtggc

SEQ ID NO: 93595 - DNA, 635 bp, Heterodera glycines
gttcttgtcgcattatgctttcggcacgtactctccattttgcgcgttctcgtctttcttcgtttgcgccgctttgccgtgcttccacttcatctgtgcgccacttgtgcctgcttggacgcaatttgacgcgctatagagccaaggaaccgttacgtgaccaactgcaaaatgctctcacaaaaaatatagaggcgaaggcggcaccacgggccgactcaattccaccgaggccattgcgacaagtcatcatccgaggcggacttttctttttcgttgccagcaatgtcttctcaatgattgctgccgttaatgactttgagatgacacagaagcgattccaatcggtgattgaccaggccatttacgaattccgtcgcactttttccttcactccgccgtataagcggaaaacggaagccgccaaattgatttggacaattatcggtgccaatgtggccatcttcctactctggcgagtgccaactctggtaccattggtgtggcagtatttctccagtggtgtcgcttcgaaaagtctttgcatgccaatgcttttcagtgtgttctcccaccaaaatctcatgcatttgttcttcaacatggacgtgttgaatagctttgctatcgttgca

SEQ ID NO: 93596 - DNA, 561 bp, Heterodera glycines
aggaagcgaagcatccgcttgactctacgcatttctcccctcgtgaaaccccaacccaccaaccgctgcacaccatgtcgaccggcgtcgctgtcaacgaccaatgcctcgaagtctttaacgagctcaagctcggcaagaagtactcgtacatcatctacaagctcaacgagtccatgaccgagattgtggttgaaaagacggccgatgcgggcgcgccttactctgaatttgtcggctgcttgcccgcgaccgactgccgttactgcgtgtttgacttcaagtacgagcacgccgagggtggcgagcgcaacaagatcttgtttgtgtcgtggtcgcccgacgacgcaaagatccgcgccaagatgacgtatgccgggtccaaggatgccatcaggaggaagcttgttggtgtgcataccgagattcaggcgactgatttctccgaggttgcccaagacaccgtgctcgagaaggtttcgcgcgtgtaacgcctctcatcctcgtcgagtccctcattcgccccttctttgatgttttttccgtcctgttgttgcactg

SEQ ID NO: 93597 - DNA, 579 bp, Heterodera glycines
gtaacaatctcaaggatgaaatttattcgaaagaaattcattttttcctttttgttctgtgccatccaattgcactatttaaatgccaaaaagtttggcggtggcggtggattccgagggggtggagctgctcgcgctaatccagcgccagcgggtgggcatttcggcggtggtggagctcccgttggaggaggacagcctcattttgtcggaggaggagcaggcggattccatggaccgaccgggggagggttccatccgccgcctgcaggaggcggtttccacggcccaccaatgtctgctggcagtggcccgggccgctttggttccggaacgggactcggttcgtcgagccgtgccgggactttcacgactgcgctggcgggtgctgcggtgggcaccgttggcggtttggttgcctttgaagcgggaaaagcgattattcattccttcgaccggcccttccaacacgacggacgcaattactatttggacgaaaaatacgcaaagaaacagcacggagagattcagtgcaaagtgccgtgggataagctggtcaaccaatcccctgctgcgaca

SEQ ID NO: 93598 - DNA, 369 bp, Heterodera glycines
tttgaattcaatgccaatgacaaattaatcagcaattttctgatggacactgtgattaattttgtgaaaacagctaatccgtcatccgaccacagtaccgtccaatggcttccaatggctccgaaggacccatcagaaagttttatgcatttgttgatcgaaatgccaatgccgaaaatgaacccgaaaatggaggaggaaattggcagggcccaattttggacgcaaatgcgaacaaaacacccgaagattgacttaatcaggggccaattttgaccaagccaacgcattttcactattcaatttttactctctttccctatttagaacataaagggtaatattttaaaaaaaaaaaaaaaaaaaaaa

SEQ ID NO: 93599 - DNA, 354 bp, Heterodera glycines
  unsure (1)..(354): unsure at all n locations
ccttcttgtcctgcctggcatatggaaagcacggaatgacggcagtgacgcggcaagctgaagcaattttacatgcactgatcatgatcaacagctccatcagcttcaccttttatgttcggcattcggacgttaacaagagacccagacgcagtggaatgctcgccttcgctgagaagcaaacttccggtagggctagacgttttggaaggatgataaaaagaaaaatgcactgaagaaatatcaacgagggcactacgagtcgaagacaaagatttcgacaaatacctcaacattgtcctaaatgcaattgaacttagaattaacgctagcnaaaaaaaaaaaaaaaaaaaa

SEQ ID NO: 93600 - DNA, 364 bp, Heterodera glycines
cttggcacagatcacgccgaacgtgggaggggcagcggacattgtttttgctgatgcaccgccgaagctttcggcagacgaaactgccaaattggtggaacaagctcacgccgaactgaaggaggatgacaatttgccaaccactcgcattcaaattgtaattccggacacggaacggcccgtcgacgcgcgccttaaccaagggcacacagtgaatcagctgcgcattttcattgtcactgccgacccgaggttggcctaccgtcccttccgacttatgacttcgtaccccactcaaccgatcgacgacgagggactcaccgtcatacacgccggactgatcaatgcgacggcgttggtcaaa

SEQ ID NO: 93601 - DNA, 454 bp, Heterodera glycines
tgttcacttcgttggacccttctgttaagaaattgttgggctggaaaatgggcgacgaagaagagaaatgggcactgaaagcggtcgaatctttggtgaaaaagatgcaaaaacgaaagcaccatggatacggtactgtggaggatttggaatacgcactttcccaccccggctcaagcagcaattgcgtgacaattccccgctctttggacggacgccttcaggtgtcccatcggaagggtcttccccatgtgatttattgccgcgtttggcgttggccgaatttgcagtcccatcagatacgcattttgtcctttgtttacttaacatggatacttcctttacgagttaaggtccaccaccgattgtatgttcccatacgacgggcgaagtgaacagatatgcatcaatccttatcattaccatcgaattgaaatgctcggacagtcgaagc

SEQ ID NO: 93602 - DNA, 535 bp, Heterodera glycines
cacaccttctttttcattaccattttaaattataaattcgcttctttttctctcaatttcttttctcggctatgtcgacgtcaggcgcccaaatttctattcgatgcgatgctcaggaattgctcatgggaatgttgccggaagggatcgaaaataatttggcttattcgtctgacgagaacggaatgccaaattcggttcgtacagcgcaaagaccggtggtcgtaatggtggcgccggaaaagcaaaaaaacggagaagagacaaaagttgggagagaaaaggacgagcaaaagcagcagaagcaaaagcaaatctgtggggagataaggcaaaagctgaagttggaagaacagtgaaaagagagcgaaacgatgggaggagagaagggaccgaagcggagggaaatgccgacgaggaaaagcaacttcttggacccggaaacagacagacttttggcaaacactctctgaacttagaattctgatgagaacgcggaaaacatctcatcgattaaaattcgatttcaaatgat

SEQ ID NO: 93603 - DNA, 521 bp, Heterodera glycines
attttccgcacgtccgtcccttttctgccggacgaaggcggcgtctgggtgacgatgatcagtttgttgcacatcgcgtcatccaaatcgtcccaaattttgtcctcactcgcctcggctccaccgtccgcggcatttccaacggattccatctccgagtcgaactggaagtcgagttcgccgccattggtcgtccactgcctcgaattggcgaagttgcggttgttgctgccgcgtttgttgcgcttggtgcgcacctccttccacccctcttcttggtcctcccccttgcccttcttctgctccagcagtgtttgctgttgttgctgttttggcacctccgtggcctcctcctcgacagtcgccgttgccgtcgcgttttggcatctctgctgttcctcttctgctgcttctgatgcgcgtgccattgttattgttgttgtggttttttcctccacttcttgcgacaacgccgaatttggctgcgtttcttgctgccgctgctgtttttccggttgttc

SEQ ID NO: 93604 - DNA, 54 bp, Heterodera glycines
gtccaattaagccttgcgaaaatggaaaatgctgaaattaaatctcaacgaaaa

SEQ ID NO: 93605 - DNA, 280 bp, Heterodera glycines
gacagaaagatggcacagagagcggagttcggcaattgctctttcacggcattggcgatggttgcgagcgatgcgtttcgtgtgttgaagtgctcaaaagtcgtttggccagtcagggaaaaaatgttttccaatggaatgcattgagcaacaagaaaacatcatcaacaacaacagaaaacagttcaaaatgtgatgaaatggaggccttgaaaatttcggaaaactcgccaaagttgtaaaatgtcaaccaaacaaaaaaaaaaaaaaaaaaaaaaaa

SEQ ID NO: 93606 - DNA, 403 bp, Heterodera glycines
tgggcagatgaagacagctactgccgttgcattctcgaagaaaggcaatggcctgataagggtcagtggacgtccgttgagagactattcagcgccaaattctgcgcatcaaatttcaagtagtgcaattctaattgtgggcaaggactcatttgccggctttgacatactacttctcgtcgaaggtggtggacacatcgcacaaatttatgatgatcgtcaaccacttgccaaatctgtggcggctttctaccagaagaatgtcgatcaacaactgtactaggagctgaatgagcaatttatcccctacaaccgtcatttgatggaggccgaccctcagcacctcgatccgaagaaatttgtaggacctgtaactcgcgctcgctaccataagtcttaccgt

SEQ ID NO: 93607 - DNA, 569 bp, Heterodera glycines
ctttttgcttttctctcccgctcactgactttcccaaaacaaacaacaaacggtcgaaacaacaacaaataaaagtaaaagtaagggaaaccatacggaccgagaaaaatctatgcacagccgagcatcttttttacgttgtattgtaaaaaacagcgaaattattcatttttcgccttatttacaatttaataatttttttgagtgatttagaatcacctgaaaacattagtttaatttgtgaaatgatttccaaatgcaacggagtttgtcggctttcaattgggtgagtgcagtaaattcacagacacacattccatttaattgcaaattcatttaaattaaattttccagttttcgatcgctaacgagcgctcagcgcgagaaacacactttgccggaccttccgtaaactcccaaactttcaattgtttattttacacttccaatttcattttagctacgattacaatgcacttgaacctgcaatttctgctcagattatgcaacttcaccaccagaaacaccatgccacttatgtgaacgttttgaatactgccgaggaaaag

SEQ ID NO: 93608 - DNA, 469 bp, Heterodera glycines
gaaaactgaaaagtcaatttttcgataccgttaaaccgttttggacttgaaaactcctggagcaaaaatgggcttcctgacttatgcggttgtttcggtagttggcggtgcggtcgccatgactggagtgggcttacccattgcgggtttactaggattttcagcggctggacccgttgctgggtccttagcggcaggggcccaggcgtacgtgggaaacgtcgcagctggctcagtctttgcagcagttcaagcattagccatggccgctccaacgccttgaaacggtattgcttgctgtctgactggaaaagggagtatatttttaatttcagcagattttagtcatgtacctgccatcttcataaaaattctacctatctaaaaaaaatgttaatatttcaactttataattttgtaaatttatcagtcagtacaggtacttgaataaacaaaaatgcttattctg

SEQ ID NO: 93609 - DNA, 139 bp, Heterodera glycines
gagaactagactcaaatcatttattattgttaattgtttattgcattctctaaaccattgccttgttttgtatgtattcactttgacatgtttgtgatttctaagaaaggcttaatgaataatgttttaaaaaaaaaaa

SEQ ID NO: 93610 - DNA, 205 bp, Heterodera glycines
ttctcgccaggacagttcgcttttgcgaatgacgcaacgctttctcgaattgcacgccacaggagggattttgaatttgaatgatgccgcccaattggtaggggtctctaagagaagagtatatgacataacgagtgtattggaaagaattgagatgattgagaaggtcggaaaggacactatccgatggaagaactatgacgag

SEQ ID NO: 93611 - DNA, 535 bp, Heterodera glycines
ccaccatgtcgtaccagccgaacatccagaccaccgcggccaacaagtatgccgtgcccacgccgtaccaaggtcctacctccggcagccactcgtactcgggctacggcgccgccgcccctgctgccgccgaatccgtgttccgcctgggccacctcatgatcgaagtcgaccaagcccgtgacctgcaatgctccgagtatttaaccaacatcgacccctttgtcgttgtcaagtgcggcgccgacgacgtcaagaccaacccgatgcgaggcgccggcgctaacccgacctttgacacgcagctttccctgacggtcgccgagggcgaaaacgaggtggttgtcgagatttgggaggccaaccagttcatggcgcacaccttcattggccgtgccaagcactcgctggccgagctgcgccgcggcaaggcccaggacttgtggttgccgattcacaacgatgcgggcgaaaagacgggcgaggtcaaggtcattttcaaccctttgccgtagatgtcggtgatttggtcgta

SEQ ID NO: 93612 - DNA, 544 bp, Heterodera glycines
gcacttcccttcgcttgaccatttatttattatatttgtgctccaaataaatatttgtctgttcttcatatctgttgttctcggacacaacagtctgggccgaaggcggtccgagtgctatcgaaatttattggacggctgagcaggaggcgcgtcctgttagccgttactttgtgcaacgtatggacaagggccgttggattaatgtgtcgaagcccattcctttcactggacaagccgaatactgccacaactttcggcctctttcacttgttcacaacatcgagcacactttccgcgtcatcactgagtttgttgatgggcaggaggaggcgagtgaaacgtttactggccgtctcactatgaatgcgtgagtgaggaaggcccaacaaatgctgtgtcagtgtgtggagaaatgaaaaagctccgtcctcttcacatattgttgtgttgttgctgttgttttgctgttggacatacttatttaacttatttgttctttttctgataaaaccgtgtagactttctttttctttttttgcag

SEQ ID NO: 93613 - DNA, 489 bp, Heterodera glycines
cacggaaaaaatgtattgttgatttaacaattaaattgttgaaaaatatgtccaacatgtttcaaatgtacactttacaatggaggaaagctaattcaaacacgggggtggtagaatagaattagcacttttaattgtaagatctacattgaaacgtgtcggacacagtattcaacaacaaaattgttaaatcagcaatatcgtttgttcccgtgaagatctgtgatcattctgtctaagatgaacaaaatccacacttttcagacgaatcaaaatgaagtaaataattggactacgacgatgaaagtaataataaacgaatttcaaaatctatacctgtaattcacaataattcaccattatcattgggcactgaacacgtcactggagaagtcacgggttcctgcctgctattcttgatgaaaacacacactctccattatttcacggcactgaaaaacactccatggcgaggatcactgagagcga

SEQ ID NO: 93614 - DNA, 428 bp, Heterodera glycines
  unsure (1)..(428): unsure at all n locations
caaagacttcgttatctcttccagcagcgactcggagcaggaggacgccccaacgaaaagaagacggcatcggtgccgggaaatatcgcttctgctccattggaagagccctccgaggggaagatttacatggtggagaagggtagcacagtggacactgtgctcggtgtaaggcgcgatcgtccagccgttgttgcattggtccgctacatggacgagcagtacgaattggtgccaacgcctctgttggtgaagcataacccggcaaagttgatcgaatactatgagaagcatttgcgctttttctgatgggggcgaacttcggcggtgatccaacgacttgtgttatggcacttttctgtttgttttttttgacggcatttgttggataaaatgccaatgaatannaaaaaaaaaaaaaaaaaaaa

SEQ ID NO: 93615 - DNA, 632 bp, Heterodera glycines
tgttaatgtgtcgtccgactcattttaatgtgaaatacgaaataaacccatggatgaggccaggcgacccggtgaatgtgcaaaaggcaacagatcaatgggaaagactgaaacgcactctcgaggaatccggcgcccaagtcgaagtgatggaacccgtgggggctgacaattaccccgatttggtgttcacggccaatgccgccgtcgtccgcggcaaaaatgcccttttgagcaatttcttttaccccgaaaggaaaggggaacaacacttttacgaccgatggtttaagcagaacgggtacgaaaccttcaaagaccttcacgtgcctttcgaaggtgccggcgatgctttgtggataggaaagtcaaagttattttgcggcattggccccaggacggacgtgcgggcgctgactctcatttcggaaaagctgcgcgactacggagcgcccttcaaagtttatggctttcgactcattgacccgcgtttttaccacatcgacacctgcttctgtcccctgaatgatcagatcgccagttactagccctgcgcttgtgatccggtggccggggatgacatgtccgatgaggtcgaacttgtacccgtccacgaggagggggccatgaga

SEQ ID NO: 93616 - DNA, 661 bp, Heterodera glycines
agtttgagcagctcatcttccactcaccccgccttttcaatttgcctttttgcccgtccctccttatttaagcaatttcttttctcttccaaattcactttccatttgccctccttccctagccaatttgtcccccttaaaaatggcactcgtctccaaatggcgttccgaccctttcgggcgttctgactggcccagcctttggcgtgatcgcttttctcgcgactgggacgattggccccgcgattggccacgcccgggagaactgatggaacgtttccgttcccgcgacttcgaccgcgaccgttggtggcgagattggcccactgattggccccggatggacgcaattgtgccaagattttcttcacatttggaccgtttcgaccgtaattggcgtgacgaccccttttggcgcgatttgtacccgcgttgggccgagcccatctttaaagatggcatcgacgtcaaaactaacatcaccaacgacagtaaccgtttcgcagtcgaaatggacacttaccaattccgcccggaggaacttcaggtgaaaacgatggacgacactttgctgattgagggacggcacgaagatgttcgagacagagacaattacaccaaaatgtatttcgtccgcaaataccaattgccggccgatgtg

SEQ ID NO: 93617 - DNA, 216 bp, Heterodera glycines
attataatacgtattatgtgatattattatctcccggcagatcaatgggtgagaccaatgcgatgggaagaataacacaacattaaccccggcgggggtgagaataaatttaaaaaaagaaaagaaaaaaataattattgttaatttatgattttaaaaataattttatttttcaaaacatagcaggtaaaacggattttctgtaatagctctgtt

SEQ ID NO: 93618 - DNA, 497 bp, Heterodera glycines
gtttgagcttcaataatgttttcttggctaggcaaaaacaccactaacaaaaaggaccaagatgttctggaaactgtcagcgagggcctgaagaaaatctacaagcagaagctgtatccattggaggatttttatcggtttcacgagttccattcgcccgctttggatgatcccgactttaatgccaaaccgatgattttgttggtcggacagtattcaactgggaaaacgacgtcttttattttaaactgattatgacaatcagaagatttaagattcattcgctatctgttggaacagaactttcctggaattataattggtccagagccgaccaccgatcgtttcatcgtggtgatgtacggcgaaggttttgaactttgcccgtttctgttcatttgagcaactttagaagaagctgttattcctggcaatgcgcttgtcgtcgactccactaaacaattcagagcactgacaaaatttggaaatgctttctt

SEQ ID NO: 93619 - DNA, 562 bp, Heterodera glycines
tgagtttttaatttggtgttttagaaatggttgactgaatgaattgcgtgccttttttcctttcctttcgttgcacttccctttcctttcccttttcccgtcgttttatgactgctcaccaagcatccgtcgcattgcgtcccttttattttgctgtccatcccgacagattcgcgacagaaccgaacattcgaaataacaatgagaaggcgctgcagccttttcccgaggccaacagcccaacaacagccggtccaggtcgatttctttgtccgagggaaagataacaaatttcggagtgttcggctgtcattgtccggctttgatgttgagcaaattgtcaggaccactttggaattttgagtctttttcggcgtcatcaaaagaatggtcagctcatggattggacgaagtttggcaggatttgcaagaaaatgagcgaatgcgaaggcaacaaacggaaagttcggcggacgaccttttttgtggcattttggtgaacagagagaaggcattgcatcggttggacaaccaccggagcataatggaactgatcagggac

SEQ ID NO: 93620 - DNA, 454 bp, Heterodera glycines
ggctttctttactcgccattggggcgagcgattcttgccacacaaaaccctttgctcatcaccgaccattcccaaaattaccttggagcatttccggcattatttggacaacacagagaagaaacaccgtcaatatttgcgagtgcgaaaaacacttcatcggagccatggccatctcatcagagagcaaatcgcaccggatgaaatcccttcgattttcttctcctccgccttttcataccgtgactcggctacttttgaagcaggtttccttgagccccgacaaggggaggccgacaacatcatttccggggccgagcaaatacggggggccgtgggtattgactctctttatcgtcccgcgagttgtggatcgctgagctcgatgcaaagggtgcaaatgatcattgctcctgctgacgaggcttgtcacgggcgaatgatcccgcggagc

SEQ ID NO: 93621 - DNA, 310 bp, Heterodera glycines
ccacctcaaacagcagcaaccacattttgctgcttccgtttggcatccgtcgcatggccaagaggctgggcccggctcgccctctgtgtctgtgttcatcgccttggccaaagagggacggcgtcgatggtggcactgctggcgcagcggctgcgaagagcggcggagacagcgacggcacgagggaaatggcattggcaccgctgctgctgatcagtcagtcgctgcacactgccaaattcggcgattgcttttgaatcactttgtccctgcagtcggacggcgccttccgtttttgtgttgggcgacg

SEQ ID NO: 93622 - DNA, 485 bp, Heterodera glycines
gcgacttggctgaagaaagcgaaattgccgaaatgattgacatttttcgtgccgtggctgagcagcgggaggacgcagatgggtaaaaattatttgtttttgatccaaaaaaaccatcaataattcaggcaacagaacgagcaccaacaacggatgtaatcggtcgaatgagaggggggaaaagcggctcaaaagaattggacggatgtgccgaattatccggaagatattctcgatcacttatgtatttaatgctgtgtatttattcatatttgaattcacttgtcgtgtttgtctgctctgattgtgcataaataacattctttgtatgataaattatataaatgaattatgaccagggctgagattttttgaggctgtgattttttgtgaggtttgttttttgggagaaagcctcaaaaattgtcattattttgaatcgcattaaaatgcaaacaatttccgccgaactccaaaattttagg

SEQ ID NO: 93623 - DNA, 599 bp, Heterodera glycines
cacagttgtacctcttcaatcacagttgtacctcttttaatcacagttgtaccttttctgatcactgttgcacctcttctaatcacttttgtacctcttcatcaaatttgtacctcttcaatctctgttgtacctcttctaatcacttttgtacctcttcatcaaatttgtacctcttcaatctctgttgtacctcttctaatcacttttgtacctcttctgatcactgttgtacctcttctaatcactgttgtacctcttctgatcacttttgtacctcttctaatcacttttgtacctcttctaatcacttttgtacctcttctaatcacttttgtacctcttctaatcactgttttacctttcttaatcaagttgcacctcttctaatcacagttgtacctcttctgatcactgttgtacctcttctgatcactgttgtacctcttctaatcacttttgtacctcttctaatcacttttgtacctcttctaatcacttttgtacctcttctaatcacagttgtacctcttctaatcacagttgtacctcttctaatcacagttgtacctcttctgatcacttttgtacctctttct

SEQ ID NO: 93624 - DNA, 625 bp, Heterodera glycines
gatggcattgcggaagaacgaagcggaccgagcggagtggacgcaatgacactgaggatggcactgatggaagagataacgcaacgatcgcggaaaaaagagaaaaacagagataacacggaaaaggacggagagaagtgcgagataggccaacaaaagcagagagtggaagagaagcagaggatcggagagagacggaaggcggaagaagatgaggaggaacaacagcagaaacagaggaatgcgagagtgacagagagggtggagagaaaacaagcgaatgaggagagaaaagaagtcgctgaagaacagagaaagagaggaaaacgacggagcggtgagagacacgcgaggaagagtttgttcagcagcagcagtgaagaagagggcgcggaagaagaggaggaagagaaggaaaaggctttcaacatctccaccaaaccgtcgctgcccgttttggagaaccgaagacagaaattggaaaatggacccgattcgagcctcggtcgttcattgtctcagcgtcctctgtccgtccaatcgtttggctcttccgtcggagatggaacaacaaacatttctgatgaccgtaaaacaaccgtctccggtcaaacgccctctttgg

SEQ ID NO: 93625 - DNA, 385 bp, Heterodera glycines
caagtttgagctcgggttatctggtgatcagtttccctcaattcctccgatcacatttttatttgtcccgcgtgccatcccccggcgtccatccgtcgcccatttcggatgcccgcccctgggcaatgcctttgtcgccgtcttccgtttgctcttccgctgcttctccttttgctgtttcctccgcctctcattccgcacttgccaattttttccgcttccgctgatcagtgccaagcgccgcccctccgcatcggtgtgctccttccggacgcataccggcgccgcgtggagccttggctggcattggcccaacggcacatccgccagttcagcgccgcaccgacgccaaattcgtctgcccattttcttcgtgcccattgcc

SEQ ID NO: 93626 - DNA, 543 bp, Heterodera glycines
agtttgaaggatggtataacgagaattttgagaccgaatttgagctaggttagagaaagtgtgttttaaataaaattttgtatttttttaggagaacagcttaaggtttactgtgaaaacgatgtggaaatactgatggaggcaattctgaagttccggcaattgtttttggatattactgacgggatggatgtgttgaaggacagtgtcacaattgctggggtcgtgatgaggatattcaggacgaaattcttgaaggacaggcacattccgatcatgccggagggaggatatgaaagggctgataatcagagcaaaattgccgtgaagtattttgaatggttggcgcaccgggaaggcataagggtcagacatgcggaaaatggtggggagattaaattcggtgacctcaaagttgattgcgtcattggttgtcagaaaagaataattgagtttcaggttttcaaaaataaaagtcatccgttaatgtgagttctttaaggggtgtgcataccatgggtgcaaaaattgttttttgccctg

SEQ ID NO: 93627 - DNA, 653 bp, Heterodera glycines
cccaagcccaagccgaaaaccctaacaaaaaaaactaataaattaaaaccattggccctaaaccgaccaaagcgttgtcattcatttagccaaatgataatatcgttccgtctaattgtcatatatttcgcttgtttttcccattctgtccatttttgctcatcgcgcgcaattggacaacggaccaacaaaaaagcatttctgaaattcacattttggaatataatatttaaagtttttttatcatttttttcaattttaccttccccaacggtggccttggacacttagttttgtgaaaaaacgctcctcagtttttggattggtcaagttaaacggcaccctcaaatgacgattatgttgaacagcgatgatgaaattggcaggggaagaagcattggaaaaagcctaagggaggggaaaacaaattaatgaaaatcaattaaataaactgcttaaacaacacctctttggccctttgaacttgtgtttcaatttgcctaagaatcaatgcgtaaatggcggcactttgtacaaatgcaaattcgtacaattagccgcgtttcgtacaaaagcatttcaaataaatttgaaaaaagctaacctatttttgacttttttctaaatgctttaaatgttatattaaacgcttt

SEQ ID NO: 93628 - DNA, 634 bp, Heterodera glycines
gaagtgagagggaaagggaggggcggggggaatttgcccaagtttttaaccataaaaatagcttacgcggttgcctgcaaaacaatttcagtaaaatccaaaaaattttcccgtcaatgccgataaaagtactcaaatttccaagattttccgggtgtcgtcagttggctccacccgaccttatcccctgtttcccaaagttttcctaattctttctattgtgcttcagaatgttccactgaccattcggactctgttggcggccggcattcgcatttggatgctgaccggcgacaagttggagacggccgttcaaattgcgcagtcgtcctccctgtgccacaaggacacagaactgatggtgctcgcagaacgcagattcgacacagtgttggccaaactgcaggaatacacattgaaggtggtcaaggggggtgtctccgcaaggttcggcttggaagccgcagaacaaaacggatgaggaaaaagtgtggacaaagcaatctcttttatggccaaattcaactggtggaaatttgagctatttggtaaacctgggaaattggttgccaattcctttgggaggaatgaaagcgattgggtgcaaaattgctggtttgctttccttattaaa

SEQ ID NO: 93629 - DNA, 620 bp, Heterodera glycines
gtccgcctcgaccgtcattcagagcgtcctccaacaggttctttctgaagacatttcattggccgcgaataatgacgaaaacgacggggaggaggacacgaaaaagcaaaatggcgatgtccctcatgagcagaaggaattgaaggaggataacaacagcaaaaaggcgggccatgggacggacacggagctgtcttcgacgaatgttgtggtgcattatgagaatttggtggattcatcggccacagctccgcctcgtccccctcagccgtgccacggcacgtcgccaacccatcacaaattcaccgccaatataacgacgaataccaacaacatcaacaacagcaaaagcattgtctcagccgataacacttcgccaaaacacgctcctagcagttcgagccaaagtgaagttttgtcaatcctcacccgcaaacagcaacaacagaaaaccctgcaattgtccgccaacaaaaaatttcatcggcgaagcgcatcggaccgatcgccggcaaagctggacaaattgccccagtgcaaatcgcctaggccaacccatcagaagtcgtccacttgggagcctcatcaggcccaacagcagcacaaactgttgctgggcg

SEQ ID NO: 93630 - DNA, 516 bp, Heterodera glycines
aatcgcttcacagcctaggtagcgaagctcaagaagcgcgaagcgcttatttagaaacgggcgcgaagcgcccgtctgaggacgcgaagcggccttaatagcccaacaaatttagaaacgggcgcgaagcgcccgtctgaggcatcgaagctgccttaatagcccaacaaatttagaaacgggcgcgaagcgcccgtataagcccaacaaaatttaaaaaacgggcgcaaagcgcccgttcgaggccgcgaagcggcctaacaagctaaaaaacgggcgcgaagcgcccgtatgagttcaacgaatttaaaaacgggcgcgaagcgcccgtccaaggccaacaaaaattgaaaaaccgacgcgaagcgcccgtaacgggcgcgaagcgcccgtatgaatcaacaaactttaaataacgggcgcgaagcgcccgtccaaggccaacaaattaaaaaacgggcgcgaagcgcccgtcttgagcctcgatgtggactaaaaacccctaaaaatttttta

SEQ ID NO: 93631 - DNA, 625 bp, Heterodera glycines
gagggttccatcgtttttcctcgtgtccctttgattatcgtcgaaggtcccttggcggtctgtcaacttttggagactccgttgctaaacctggtcaattacgccagtttggtgaccacaaatgcggccagattccgattggctgctggcgaatccatcggtctgttcgaatttggccttcgacgtgctcaggggcccgatggcgctttgtcagcgtcgaaatattgctttatcggaggctttgatagcaccagcaatttgttggccggcaaattgtacggcattccggttagtggaacgatggcacattcctttgtcacttccttcgagcccgatgaaccaatgaaacgtccaaatttgctgcttccaaatgacaaagtggtggacctattccaactgtccaaggacaaacttgactttttgttcaaaattgattcgattgattgggaagtcgcgagaaatgacttgaacatgggcgaattggctgcattttgtgcgtatgcaattgcccaccccaaatcattggtggcactggtagacacttacgacacactccggagtggtctcatcaacttttgcgcctgtgcattggcccttgccgacctcggcttccgtgccatcggat

SEQ ID NO: 93632 - DNA, 592 bp, Heterodera glycines
gaaacattcaaaaatgcttataaacatacggttaaatgtttaataaaatgtggcagatgtagcggctggggtaatactatttttttcaccaaaatatttatttttaggtccgaattttccatgtaaaattgaaaatattgatccaatcgaatgtgatgcttgttaccggattttttataaccaaaaatgttttaaaaatcatcttgaaaaagcctgcaaattttataaaagatgtgtggattgtgataaggaatattataatgatcatcaacatatttgcggtaaatattattttcagtaaaaataatttttaattaaggtgaaaaaatatgtaaaagatgtaaattacgacatactaaggacgaatgttgttttatcaaaaaattaaagattccgaaattattacctaaatacaggataatatgttatgatgtggagtgtagcgtaagtatacatacagtaaaataaaataatgattgtggatttagacagataatttaattgaaaacggcaaaaacaatgggttaaatgagcataaaattaattttatttcggcacgatacacgtgcagtttgtgtgaacatgtcgtacg

SEQ ID NO: 93633 - DNA, 591 bp, Heterodera glycines
acttggccactcttaagttcgtccacgccgtgtggcgacacggcgatcggtctccttcgaaaatgatcccttccgatcagacgaacactttggacaaatggaaggccaaatttggcggactcggtaaaaatacttgacggggaattgacaatggcacacggaaatgaagttaataatgccaaaatagtgacgatgaaaacacaaaaatactgtaggtcagctgactgccgacggtgcccagcagcacttcaatttgggtcgactgatgcgccaccgttacgacggatttctttcgtgcaaatttacgcccgaagaatttgtgtaccggtccagtgactataaccgcaccaaaatgagcgcaattgcgaacattcaaggtcaattaggggggaagggctcaaaaagcaattagcatttgttatgaatggcaggactttcaacggttttaggacttttcgcgccggacagtcaaaagggccccaaaatgccattggaagagaatgccccgcgggggttggaactgtgctttttgccccaaggccacgacccgattgtgttcgatgacgtggagtgtccaagggccagcaaagc

SEQ ID NO: 93634 - DNA, 497 bp, Heterodera glycines
ctcctcttccgtttttgtgtttcttccgctgtggaccatttgtccgtctctcctttcggcactttgtcccatcgtcgcaattgcgacatcgtttcgtacaacttcagcgccctcgtccgaaatgctcggccatttgactcggccgaccgaacattcgtcgctgacactccgttgggcgttgtgcttcggcgacgctttgacttttcttcgccgttaacagcgaatgtctccgtccatttgtccgtgctcagtgccaacaacaaacttttgcttttctcccgcttttcctcccaaatgccatcgccggcggagggcgaaaatgcgcaaacatttcaatacgtcaactacggcaatgtgctcatttttcagctgagggcgaaatgcgccgacggatcggtgggccaaaaatgcacggaaatttgtgcaccaccgaaggcgggcgaccattacttctgcgctgccgatggaatgcgctgtgtgccggggtggggcggcac

SEQ ID NO: 93635 - DNA, 649 bp, Heterodera glycines
ctgatggccaacttttgttctgtgctttcaaatcattttggcctttttctgctttttttggcctttgggtcaaatggccaacaaagggaacacgcggccgaagtgcgcgcagtgaaaggaaagctttttgtccacatgctccattcggcttacttctttccccagacagggtcgtcctacgctgccccattggctccatttgttcccctctcggcaccgttccatcgccttccttctcggcacccccgtctcgcctcactctcacttcccaattcacataattgcgcgtcgtcttgacacttttcaaagctcggaacggtccttcgccattatcgcgagtgacgacgtgcaattcgatggcggtgctcaacaaatagccgaaatcaaagtcaccaacgtggacgcggaagaactgatctgggaactgataagaggccacaaaatggccaaaggattggagagggccattcactcgaccttcagaggacgcggggtcaaccctttcgtcttcaatattttgcccgggacgccaaaccctccaacggatgaagtgcttcatcagttgcgccaccaattgaaatttggcgcaattgtccaagttggcacccaagcccatttccactcgaatgtgcttcagttggcgcgtggc

SEQ ID NO: 93636 - DNA, 661 bp, Heterodera glycines
ggcgcacggaggaagaaaagtggcggaagtcacccccggaagcaatcgatggtttcgtttctcttcgccgccatttcctcttccgcgccgtctattcagaatcggcgccggaaccgacttcccccgccccgacaattgagtgtgccggaacgcggctcattggtggacctcaattcggaggacgaaccattccgactcgtccaaaaggcaccctccgtgacggtgtccgcttcttcgagttacagcaatcagcgaacgccgcccacaaatcggatgagcagagaatgcctttcgggcagccaaacggacggaatgcccccaagtggtcattctcagttcgttctgtttggttttgcctttgggccgcgttcgtcctctttcaagtcgctcattccgtcgtttcccctattcctttggcatttccgttcatttctttcagtcggttttcttccaatcattcgccgcctttctccgagtcgcattttttggctcaaattgacccaatccgtcagtgtccgtctctctcccgcgcattgcttttgcgttgtgtggacccggagcgtaagtaatgaagcaacgaaaatctatcaattgaactaatggctctgttagcactttatccgtttcttcattgcgccgcttttgacagcggagagacgag

SEQ ID NO: 93637 - DNA, 477 bp, Heterodera glycines
gtcggtccttccgcaaaaatggtcctttgtccgctcagtttaaaccgacaactcgggtgcacttgcaccgtcctttccgaaagtcattcggtccaaattctgtgcaacggtacccaacccgacaaagtatgggcagttttgggcggtttcgcccccaacattgacaaattggcaatccgtcgctgcacaacgaacaaaaagagcagcatattgaagaatatgctcccgttgaaggttcgaagccttgagatttccaactgcgcaattgcacaaatccaaccgaacgcctttgactcgttggccgattcgttggaagagctgtccctcgaaagcaatgcgctcacttcttccgaatctccacaaattaaagcgtgtcaaatccctcaacttcaacaacaattcggtcaaagaactgtccgattcgacgttttctggactcaaggagttgaaatttctgcgacttcgaatgaacaaact

SEQ ID NO: 93638 - DNA, 405 bp, Heterodera glycines
gaaaattgttttttattcctaaaaaccgccacattgggcgtttcctaaatccgccatgtggtaggaaaacaaaaaaatgtaagacatataaattcataacttggtccattttcaaccaaattaataattcttggtatcattcaatagctctaggtgttttctatcagaatataattttattaaattttttacttaagtatataaaaagatatggtaattaaattccacaaaaccttaagtcataattttttgtccagaacttttttgaaactcaatgaaattttttgaaattttaaagatatatagaataaatagagtacttgaaattctaaaaagaaaatttaatctatttgcttctgaaaaaaagttataaatcattgaacaggctatgttttttgccatggt

SEQ ID NO: 93639 - DNA, 611 bp, Heterodera glycines
tgatgcccatattggacttgtttgggtccatgaaattgacaatgtcgcgtcggattgtcttgttcatggtcaagtaaattagggaggggaggcctaacaaaaattaatttaaattaattattggccaattctttgaattatttgagtaccatgtgcccaaacccagagaaatgaggccaggtaaatgaggaggtcggaaattcgaaagaattgcatgtaaatgtagatgaggccacagaaagtgttcacggcggagatggccaacacttggagaaaagtctgccgaagggatgaaacgaaaagaaatgagttgggtggacagacccctcacaacggcactttggctgtgccattctcttaccgctttttgagcccttgaactgcttgcaaaccctcccgaagaagttttgtagaagaaaacgaaggtgaagaccaaataagcggaactgaggccgatcgttaccaaccaattgtggaatatttgccaattgttgtaatactaaattctcaggtaatagattttttgaaacttaacgaatttttttcaggataatagaaaacacttagggctatcgaaatattaagattttgaaatctggttcattttgtgc

SEQ ID NO: 93640 - DNA, 484 bp, Heterodera glycines
ggctcgcctttcaagtttctttgaaagcattgggtggaaggtgtacaccgttcctgagactgcgtcaattctgctgagtcctggacgcattcgttttcctgacctgagtagagaccaggctgctcaattccagatagatttgctcaaaacattgatacaaattgagaatgtactgcgttttctaatgcacaactcatttctttacatttttaggtctttttcaaccaggccgaactcagtgaagcggaaaaaattatgatcattttagaccggggtgcgatggatggaagtgcttatatcgacatggaatcttggtcaaatgtattgtcagcatgtggcgtggacaaccatgaaatgcgtgaaagataccaccaaatttatcatctcgtcaccgcagcggatggtgcacaatcattttatcaacttgcgaataaccaagcccgaaccgaagcaatggaggaagccattgagattgacaaaaaga

SEQ ID NO: 93641 - DNA, 528 bp, Heterodera glycines
cgggcacgggcaagaccgccaccttctgcgccggcatcctgaacaacatcgattacaactcgaacgagtgccaggcgctggtgctggctcccacccgtgagctggcgcagcagattgagaaggtcatgcgcgccctgggcgacttcctgcaggttaagtgccacgcctgcgtgggtggcaccagcgtgcgtgaggacgcccgcatcctgggcgccggcgtgcaggtcgtggtcggtacccccggccgtgtcttcgacatgctgcgccgccgctacctgcgcgcggactccatcaagatgttcaccctggacgaggccgatgagatgctgtctcgcggtttcaaggaccagatctacgacatcttccagctgctgccccccaagctgcaggtcggtgtgttctccgccaccctgccccctgaggcgctggagattacccgcaagttcatgaacaagcccgtgcgcattctggtgaagcgcgatgagctgaccctggagggtatcaagcagttctacgtgaacgtggaca

SEQ ID NO: 93642 - DNA, 653 bp, Heterodera glycines
caggagcacgcaagaaaagctggatcaacaccaaaaagtccacgacaaaccacaaaagctccatcaacaaccggagagggaacatcgaccgagacaatgccatcgacttcgaatgctgagccccgccaacggccaagtccacggccactgtcaacaacgcctatcaggcgccatgtccgcacgcggccaacaactaccgaccaaacaacaggcaccgactctcgagcagcagtccagtcaacccaaacgtttttagaaaccgtcgaaactgccacacagacagaaacagagcaagggccaattcaaaggctgtgcacggagctgaacaaggcgaaacgccgaattgggacgctggaacgccagctacagaggaaaacagaagagatgaagcagctcagaaagcgaccgacagagcaccaccgacacaagctcaaaagagtcagttcattggatgatttgtcaaggcagagccggacaacacgtgcaaaggaaatagctcggaatcttagccatctcttccgaccagacactccaatacccgaaatcgacaaagttgtgcgtcaggcccgtcatcaggccaatttcatttcgcccaaaaaatcactcggaaaatggactcgaaatgggcgaacaaggaaaaaagaacggatcag

SEQ ID NO: 93643 - DNA, 660 bp, Heterodera glycines
caccaagcttatggaaatccaatgagttttggttcccgggaaatagcgaattccatgaaaatccgtgacgaggaaaatcacgacgaaatcccgggctaaaatcttgtcaagaacccggaccaaatcatggtaaaagtatgacagcaaatggtaggaaaataatgaaatgaacttaaactgaaaacgatggatgaaaattaaaaattcacatgtgtcaggcgtccaaacacgtgcgcgaaaatcactccttaaattaaaaaaaaatatttaggtaaaaaaaaaaaaaattaaatttatacatttttaaatttaaattatattatatatataattattttatagataatttaaatatttagtttagtaataaaaaaaataaaatttgtaaaatatttaaattatttttattaataataagtttaaaattggatattcacacagaaaaatgttttaaaataaaaaaataagaaaaataaaaatatttttaatttttccttttaaattaaaatatttttaatttttcctaattaaaaattaaaaaataaaaataatcaaaatggtacccactttaatgttatgttggtggtgcacacatttaaatgcttaaaacttagtcgagggtcaagcctaaattaaattaaaaattaaaaaaccaaaaac

SEQ ID NO: 93644 - DNA, 656 bp, Heterodera glycines
gaacatacatcaagcaatattgtcctaagcctttggacaacgagtcgagctaggctgaaactgcttgactatatgctgcaatgttataatacaccgggcaccgagttactatacactgacacagacagtgtaattgttcggcataagcgagaccttgttccagttcacacgggcgagtatttgggtcaaatgagcgaagaatacgccgattacgacattttaacttttgcatgtggcggagcgaaacaatatgcaatgaaaatggtgcataaacagacaaaagcagttaaatttgtgcaaaagattcgaggcattacattcgacgtcaacaattctcaggagcttcagtttgagcattttgtacgcaaagtgatcaactacgggaaagaggatgagcaggagaatgcagtagtcttcaattataataaaatacagccgacaaaagataatcgaattataactaggaaacaaaataaaaaatatttacctgtctgtcagaaaggcattattaatcaaacccttgaggttttaccgtttggatatgaatgatctttttgaatgtataaaattttcagtttactatttaatttctttataattgcagccattaaaaaaatacaacaaataattaagcagtttcatcttgcatagctaac

SEQ ID NO: 93645 - DNA, 617 bp, Heterodera glycines
gtttgagtcatccgttcaaatggcacaagttgacgacgattatgaagcgaacaaaagggtggcggatagtttgagggagtatatgggcaggaggctaaatgttgcgaatgccttcgaaacgcccattttggaagggctaatggctgctgtgaaagtggagccgctgcaacgcattggcactgtgttggacgccagcgccagatgctatgcattccgtgtggacaacacttacagtgcctgctacaaagttctttcagcggcttcaggaggagagaaaattgccccatttcaaaacgacgattggcagaacgatcgggatgaggtcgagacggtcaatgcgaacgacgagggaggggacaaaagcggaacaattgcgagcggtgaagatggagaagggagcggcgaaggaaacaaacgggacaaaaacaaactgtcgaagccattggactcgtcgagaaaagcgaagcttttgacgcgagagactcaccaattggctgagggactttggaagcgatttgcttccgctcaacactttggggacacggaagatgatttgcatgcattgttcgaccaattatcaactgatgttactgggacggtaatgaaacgacgtcttg

SEQ ID NO: 93646 - DNA, 634 bp, Heterodera glycines
cacaagtgtctaaacaaattattggattggtaaatttttaaaaattgtcaattaaaatttaagaattttcaaaaatatttccgaattaattgccgccatttgccaatctttgaaaaaattttcggcattttcattatttttatattttttgaattatggaaaaaccccaaacgagcactctcttcaaatccatgaccaaactgggcccacccttttttaattggctttcggttgccttaaaatgccatcgaattggcactttttgccttttgaaccattgaatttgattttttcgaattattttttacgatgcgttttttctattattttttgctaaattctcttcaaagagtcacaggaacgtggtgcactgaacacatgcgaactgttctcaattcccgacctttgtcctcagcccaattccccgccaatgaattcggcacgacgcgcgccggcacttttccaatttaaaaaagtaattagcaccattttcggcaactgatatgatcaattaaatattcattcccccattgatttgtttgttcagaatgtttttgcggtcggtggttgttctggcccgggacaacatttggccaacgccgaatctgtccaatttgacggtcattaaatttta

SEQ ID NO: 93647 - DNA, 649 bp, Heterodera glycines
aacttgcgcatttgtacaaactgagggaaatgccaaaaatggtcatcgaagttggggagcacctggacaatgtgtcgtaaccaacgccgatcacaataatggacaggggaagagcagaagccgaaagatggggggaggacacgagatgagtgatacggtgaatatgattgaaaggagaaaccgtgcaggtaaacagcctgtaaataccttcacaatttcttccttggtctcctcaaaatcggtgatcgccccatcggtgacgatcagcaaaacgcagtagcgactgccattttcgggcaatgccgcggcacggcgagcggccaaacgaatggtcggcgtgaaatcggtgggcccactgaaagcaattggcagtgagaagcgaaaacgaaaagcaacagaagcgggtgggttggtccacctgagctccacgtgtgacagcgcaatggcatacgcctccaaaagtccgtcgacgccgcgacagcgcgggtcattgacttccaagttctgaacgaaacgaattggcacgaggcgaggaacggacagacataagatggatttgatgggtgatcagtttttgtttgatcaacaaatgatcaatggtcagtttcttattgataaatggaccaacaatttggattaacaatgtaat

SEQ ID NO: 93648 - DNA, 627 bp, Heterodera glycines
gcacacatgaatttggagctgcaacaacgttccgttgaattctcacgattactgtcaaaggatgaactgaggaatgggctgctggagcgaatgcccgccattgaacacaatgcccttcacaccgcagcgacgccaattgaaatggacgataatcaccaggaattaatagtggcgcaaaaagaacaccaaagccaaaaaccgaaggccgatgaaattgacttgctcgggttgggcaatacggattctcctgctttggttgacattctcttcggcggtggggttccaaatgtgcagcccctttcaagaaatattggcaaagaccccatcgacgacctttttagttttgagtccaggtgaaagggaccgatagatttatttaaaaattgccgtctgatttgatcggttaccatgacttcccaaacattctaaacagtttccgtgttacttttttgacacagtaataaaaacggtgcccttgtggaagatgatcagttgaaaacgggtcaaatcgtgctcaaccagcgtggtatcgagatgcaattattcgtggattccaacggattcgactccaatggattggcacaattgcggtttcaaacagttaacaatacccccgctggagtagaa

SEQ ID NO: 93649 - DNA, 642 bp, Heterodera glycines
gtccgtttggtttcgcccgcattcacttgcaattcccaaccaaaaaccgcgtcttctcaaagcaaatcctactcttttgctgaccgggtgatcgaaacactgagtctttatgttcagtcagttgagattttctttgagtcggacagcggcacggactttgactttggcggctccattagcctgtattcactcgctttggagagcattagccccaattggagtgaggagaaggacgtcgacaccaacttgactcggatccatgacaaaaccattcggcaagtgctcttcttcaagcagctcagctggcgattgctcaaaattgaggcgagtgcccacccgaagtgcggcgccgacgagcaaagggaaccgttgagaagcaaaacaaattcaccccttcgtttgctcaccgtcgacggaaaatgtcgcatttctatcaaaaaaagcagtcaaaattgttctcttttggccggtaaaatcgaactgattctgaaggagatccattggctggcgacgatgctccacctgaggatggccatcgactttcacaaacacttggtggacctggccaactgtcagaagaaagcagattccgtcacaccttttttgggacaacgacagaacccgttcacggacgcctcttcg

SEQ ID NO: 93650 - DNA, 301 bp, Heterodera glycines
agcctgcgccttgttgcaacgcgcgtctgcgaagcgtcgccgcttttggtaagacgacgccgcggacggagtgccggaagggacggcacgggggacagagagagaacaaaaaagcggacaatagccgaaacaaaagggagtgttccatcgaggcgaccgatgccgaaacggcactctgtgcccgcggaaccgtccaaagtcaagtccaagtcgttcagcgagtccgcgtccgccggctctgccgcttcctccattgagccatccggccatctccgtgacgtccgatcagtggctgatcgcc

SEQ ID NO: 93651 - DNA, 639 bp, Heterodera glycines
aaaagattggattgcatttcttatttggcgaaagaggctaaaaatcgttttttcggcatcccggatcgacataatttgaagatgtttcgtgtgatcatttccacactttctacgtcttcttatttggtttcggccggtggattgcgtggctttttcacccatctgattgtggacgaagcgagccaagcgacggaggcggacacttggattcccatcggtggcttggttggccctcaaacatcggtcatgttcgcaggcgacccgaaacagctcggcccggtggtccgtccagagaatttaaaatggtttggctttgataattcgctgatgaagaggattatgtacggcgatgtatattcccaagcagacgatcgtgtttttgtgactcttaaacaaacgtatcggtctcattatgccatcctgcgtccgtgctcttatcttttttacgataacattctccaagtcgacgatggacaaggcgactttcacaaattgaccgaatgggaaggccttccaacaaaggggttccctgtcatttttcactcctctcgtggcagcaaagatgagcagggttttaacaggtcgcaccacaatttgttcgaagctgaattggtacggcattacgtggaaaggatactc

SEQ ID NO: 93652 - DNA, 325 bp, Heterodera glycines
ggacctgacgggtgccaacaatttgttggatgagaaggagaagaaagtggaggaggctgaagccgaagtggggtcactgaaacgtcgaatggttgtgttggaagaggagttggacaagcgtgaggagggagttaaacttgccaccgaaaaaagggaagaagggacggccaattgcgacgaatcggaacgtgtggggaaagtgaaggaaaaccgttctctgaaagaagaggagcgtggcaatggcatcgaagaaaagctggaaggaggccgaatcggttggggagaagaagggggagcgaaaaataggaaggaggtcggttggaaa

SEQ ID NO: 93653 - DNA, 576 bp, Heterodera glycines
ttttttttttttcaccattattataaaatgggcaattttaaggctgcacgtggcacgggtgcaaaaagtgctacccaaacgacaacatgctgctccccagtgggaagactgcggggcaagtgcgcgaacgggattccaagcggatggaatttctgagagagaaggtcaaccgagtggacgtctactgggaatgcgaaatccatcggatgctggagaggagcaaggaaatgcgcaaggcatttgaagactatgtcgatgatggcccgctggtgatccgcgacgcgtttatgggagggcgaactggaccgctgaagctgctgcgcaaggctggaccgggagagaaaatctcctattatgacttcacatcactctacccgtatataaagtgagcactgttaaatttgtaacaacttttaacattgttttcttcacagcttcacaacccgttaccccattggcactcccaaagtgcatgttggaaagcggctttgcttccccctgtgcatcacttgcgccaaagagcacccgacaggaggagtggacaacgactaccactgcgagcacaatgacagacag

SEQ ID NO: 93654 - DNA, 518 bp, Heterodera glycines
tggttagaccgtatacaagtgatcttgcgccaccccagctccaagggtggcgcgccaagctagtaaggccagccccagctcaaagggtcgtaccccaagctagcaaggccaacccagctcaaggtggtaccccaagctagcaaggtaaaaaagagtggtgatcctccactcctgcgatcagcgagggaggagttgcacaggctccatcctgcgcgcagtgcaagactctggcttcaagaatccgcacgtgggagacacacgtgtggtcgcaaggtccttcatagccggagcctttacggccctttctcgtgccctgcttactagcatattactctatgctacctgttagcaagcaggttggtacactcggccatccgaaccccactagctcacagttctgaaaccagcaacgcagccttcgcctacgagggctagggctttcggtgcgtgtgggattacacgagactgtcatgttcctaaccagtgcgagccaacaccagaaaggggcctggacttag

SEQ ID NO: 93655 - DNA, 579 bp, Heterodera glycines
ctgaatccccagccccagtcgaagaatctcattgccacggctggccgagacaaatacattcggatttgggactggtccaagagtacgccgcatttcatttacacagtggagacgatggccattgtcacgagggtttcatggtgcccgaacaattcctggcatgttgcttgttgctttgcctcacccagtggtttcgcttactccgataacattgtttacgtttgggacattcgccgacctttcatcccttacgcttccttcgacactcacacaaaaacatgcaccgatatgtcttggcctcgttttggaagcggtgatcagttcctttcttgcggcaaagatggcaaattggcagttaattttgctgacgatgcccaccatcccattctctacgccaattcagtcgctttggactcaaattcgccgttcgatgaaattaccgtcgctgttccgtctgatcttcgaaagagcagttcagttgtggacccgttccgacgtaaagtgccgagtaatttgttctgcgctttcccttccgacccttttttgatgacttcccgtgccgtgtcatatttcgcggag

SEQ ID NO: 93656 - DNA, 391 bp, Heterodera glycines
gtacgcgagacttcatctctattcatacatggaaaaagtgattgcactggaaggggctgagcttctttattgtggtttgcgaatacaatagaaaaaaaatgttagataattttagacactgactcaatctactacgtgaacaagatgggtgggcggtgtgttccggaaggcgaggcacttggacaaatgaagcgtgagcatgttgatcgtcgaattgtggaatttgtagctggtggtccaaaaaattatggaattcggcacacagcacgagacggaactgatgagcgggccaacctaaaaatacgaagcttcagattatcgtacgccactcaacaattactgaattttgaagcaatgaaggatctgacactggctacatataacattgacg

SEQ ID NO: 93657 - DNA, 610 bp, Heterodera glycines
cgatcactcgcgacgtggagagacgcatgtcaatgaaggcaaaggaggccgaggcaaaggcggccaagtcgaattccgacgtgaataatgaatctgccgacgatgacgacgatgtgtttggctcccatcagcaccgtcacacggggttggaccacggagttcgccgctttgctcgttcctacggcgtcggtgctgtcgatttcttccgcggggccgtccgaaaagcgaaacaaatcccagagcatttgacacgaaatgtgtccatgtcgaggtccaccaaaaaatccgaaatcattgcaggagagaacgaagacggcgcttcatcgattgctgacagtgacattgaccaattgtccatcgcggctgctgcttctgagccgaacgcggcgatgcctgccattgccacaccgtccacttccgctggcacagccacgcggaagtggcgctttgggtcagccgaaccgccgcgcggcaacactccgtccgtctcaacgccaccgaccacgtcagccgctgccacgtcgagcacccaagggcaaggaatgaattcttctgccccctcgagttccgctccgttcgctcgcaccggcgtttgccggtcaaagaatgc

SEQ ID NO: 93658 - DNA, 622 bp, Heterodera glycines
gaaagtgctcaacgaggaagaagaagcggaagggacacagcccgggacagagccgacgaatcagtacatccaaacgacgtttatccaccgggacgcgaatgatgatgaccgcgagttcgcgcagttcacccgccttatgttggcctacgttcggccccatctgttggcgcttgcccatgtgactgtggacaacgaaaacatcgactgctccgtggacgatggtcatccccgttgtggggaatatccaatggaaaagcctttccattttttggtggtcgaagactcgcgttccggtgccgctgtgtatagcattgaacgcatgcggaattggcacgccggcggaagccgagcgcgcacaatggcacggattgaagctgcccttttggatgctttgtcccgtcacagtgtccatccgctcactttgtacgcctcggaaagcgccaccaatgaattatgttttgtccgcgaggtgagcgtcactgagctcgagcagctcatccgtcaaaatcatgccaaacggtcttccgccgcctctccgtccaccggtccgtccattttcacgcgctcgccaaccgaacttcgcctgctcaacgaccgtctcctcgcccgtcggcgtgtggac

SEQ ID NO: 93659 - DNA, 249 bp, Heterodera glycines
tgtccatgttcgtttgtccctccttttctccttctgttcaatttctcttcagtttgtctctgtttctttcctttgtcaccttattgcgctttttctttttgtttggcgctaaacaacagatgctttgccttgctgatttgcttatttcgttttgtctgctgattgggactcaattggcgtgccgagtgtccgtccgattcattgggccaattgcaatggcccatcctaaacccatcaacagcgaatgag

SEQ ID NO: 93660 - DNA, 523 bp, Heterodera glycines
cggcgatagtaccagatgggttggcaccgaaagcggtgaatgaacgaaggagcttttggggcctgaaaagcctatggcataagagggagtgccgagttagaaagtgatagaaaagcattaaaaaatgagaaaagactttgagcaggaccatttgaggaaaaaaaaagccgaagagtaagaccaagttacagaattctcatttaaaaattagagaagggagaaagcacagtatcccatccgatcagaatggggatgagagttacggtaggcatttaaaaatatttctgcaatttacgacctgcttaacagcatctgctgccggctgcagaagcttgtaccgaagctgttgctgctcaaccggttccgcctcgtggatcagttcgagcgcgtggtgccgtcgttggtgctgtgccgcttccgcgtcggcgctgttccgcctgctgttttcgcgcttctgcggaccctttggccgccgcgccccaccgggcggacatttgcctaattgggccgggccccgtgggga

SEQ ID NO: 93661 - DNA, 243 bp, Heterodera glycines
ctcagagactagctaacaaaatcagcataggcttggacttccgtaccaattattatttttataatgggtttgttaaatgcaaaacaattcacaaaagttgttttaactccattcagagatgagatagaaaaaaaacaaaaataagtttgaagagccctcgaagagctgcaccggatgcgagtgccgccgttgctgtacgctcaacggttgctgtgcaaagacggaaaattgcttatcaaaaaa

SEQ ID NO: 93662 - DNA, 656 bp, Heterodera glycines
gtgaaacgaatttttagcacattaaacacaaacaattaaacataagcgataataattttaaaaaacgaaatgaaaacgaaaaaaatatcaaaaagattcattaattaataattaattgtcgtcacaatcgttttgagtgttcgtctccatccttccgctggctcagtcctccaagtccgtctcgcggatgggccggcagcgctcgtgttggaaaatggcgtgcgcctcgcgcagcagaaaggcaccgaactcggcgatttgtttgcgcgaccagcgcgaggcgagcccagggaacgagccacgcaccacgttggtcagattgtcaacaccttttacggggtggcatcattaatatggcaatttcagaattgtaattgatttttaaaaatcatgccaatgccagggatttgttgcccgacatttccgtccccaatattcgggggacaacaaccctaattcgggttgtcaaaatggagatcgaatttgcattttaggatccctaaaacgcgtttgtttgattagttaattagccctcctatttttaccaccgatggcgtcgatcattgcaccttcgcgcacatgcgcctcagccgagtgaatgttgcagaacaattgttgcgaaatcactccctcgcaaagtgccaaaataccccccc

SEQ ID NO: 93663 - DNA, 434 bp, Heterodera glycines
tccttgggagtccaacaacgaccagcaaatgtgccatgtatggacttcgctcgcaccagctgatttatgtgctcggaacagttgggcacgactgcgaaggatgagggaaatgtctttgttcaccaaatgccccgatggctttaccaatctgcagctgatcgaactgtttcgactcgactggcgccgcattcgatcagaggaggaccttctcgcccactccgatcatttgcgcgacggtccgtggggccgcggctgtctgatcggcccgaccaactccgccgactgtttgcactgtttcgagcgtctccgacgagcgattgagcaagtggaagccgtccactgggcatttgccaatttgctgaaccgttttgactgtcgtctcgctaaatttggcctcgcttccgcgacagcagcccttctcgcccaacacgacg

SEQ ID NO: 93664 - DNA, 590 bp, Heterodera glycines
gagaatcagcatacgcaatccaagccgttctttgacactgtaactattgttttttgatcatcacttcgctgttgtgtcgatgttagcctctaatcactttgccgtcgtcagccttttgtctgcccattttgctgccctttttcttcttctgatcagtgactgacctcccaaactgatcatccttctgctgctgatcagtccttcctccccctccccaactcttccgccgtcgtttgtcgaggaatgcttttccgcctcacattgttcgtccttcttccatttgtcccatccatcgctgacgaatttcgacaccgaaagttcgaaaagacgggccgtgagattcgaatggccacgaaagtttacgcctggggctatcagcaccttcaggaggaaattgcatccagcagtgccatcgacgacatccggcttcgatcgatggcactgaggacgggtcggctgccgaacagttcaggcatttggaaaaggaagtcgaaaatgggcacgaaaaacgattccaacgcaaatgaacagtcggtggacggacagcatcagaaagaaacaatgacagcacacgcgcgactgatcgaaga

SEQ ID NO: 93665 - DNA, 512 bp, Heterodera glycines
ctcacttttggaattgattgatttagtttccagcagaagcaaaactaccaggaggagaaaaggcgaaagggctattaaaaggaggcaaaagcaaaggcaaaggaggaaaagcgggggaaaggggggagagagggcggcaagagtctcgagaatgtgttgatgcttttgtgcttttggtcaccccccccccccctcctcccattggcttcttttggaattcattccctcccttttttaccaattaaatttgtttagtttttaattcctcgaccatttcaatcaaactcttttttgttattattatttctccttttcttatgcaattccccccaagggcccaatttcatcttctcccagcggcgcccttcgtcaaacgctcagtgctcgggccactccgacgaaggccaagtgcagtttgacaacagccgaagacttcggtgggaaagggtgcaacaaaaattgttccattgggaggagccattggacgacgccaaaaggagacgaaagagaga

SEQ ID NO: 93666 - DNA, 654 bp, Heterodera glycines
ttttttttgaaaattgcaaagatatataaaatgccaaattttctcattctgtcctgccactatggcacccccacaaagtgtccaagccacgaaatgtccaaaagagtaaaaacccacgaaatgtccaaaatttttcaaaatttataaaaacaaaatgagtctaatttaggatttttagggttttcggggtcgctgaatacgaatataccctttatattaccccttgcctaaccttaggcccatctgaataataaaaaactcaaattcgagacttggacatttcgtgggctggacattttgtgggtcagcggccactatgggtcaagcccagtgttagacaaaattgctcataacgccaaatagcgtaattggcgtaaatttttgcgcgctaattcaaacacactgatcactgccatttctgattgtttattttgatcagccatagctttgttcctctccaactaaattgacctaaattggtatctaaaataagaatttgaaaaggagaatctttttctagttaaaataactctacagttggccttatttttgtattaaatttccttattaatcgattcagaatttttttctctatcgtgtgcaaaatttggtggggttttaacaagcagaaaaaaagttaaacagcatgaagta

SEQ ID NO: 93667 - DNA, 634 bp, Heterodera glycines
cggggaatgtgtggcttaatgtggcgccgattccatccttggacgcatctgctgatacgacgattggacgtgtcgggtcatagtgggtcagcaataaatcggatgtcatcatttcttttgctttttcgaaagcattttgctgttcagaagtccaattccaagctacgtccttttggaggaatcggtcgagcggtgcacgcaactcacgcatgcatttgacaaatctgccattataattcaaagcgcctaagaatgatcggagggtgcttttgtggatcggtgcgggcattttccaaattgcgtctgaacgcgatgggtctggacgaatgccgtttgctgacacaatatgcccaaggaacaaaagtttgtgctgcaaaaatttgcatttgtccagttggatgcgaagaccgtacttttttatgcgcccaaaaagagtgtaaagtggcgcgatgcgctgctccaaggatttcgtggcgattagtccatcggagacgcacgcgaagactcctgggataccggcacacatttggaccatcagatgctgaaatattgacggtgccgatgagactccgaacggcatgaggtggcattggaaaagccctatatgtgggttgatcggacacaattgcgttga

SEQ ID NO: 93668 - DNA, 303 bp, Heterodera glycines
tttctctcctaattcttccccctcttcatcattggtgggcgaggggaggggaagaatttttttgtgtgtgccatcacaatttcatcccccccccccaccctcctctcctttcccttcccgtcccgatattattccctcaaatcgctattttctttcaatgcgcacgcttcaatcaatgaatgaataacataaatgggctgccgtagctgctgagcagcgagttcaccccaatccctccatgattgatgcagatagtgtatcaacaaatttcccatatacggggaaagggggaaggggggaagg

SEQ ID NO: 93669 - DNA, 597 bp, Heterodera glycines
gacggattgcgtccgctgtatgcacaccgacccaaagtggggaaaagcggcggaggaagcgatgcgctacttcacttctcttgttgaaacgctcaacacaacaccgaactttacgaagcgctgagactgtcgttggagcgcgagcaattggacgcggtcagcgaacggacgtgccgacttttgctggccgagttcgagcagtccggcatccaattggcttctgtcgagcgaaaacaattcgtgaaactttccgatgaaatcttcgaggctggtacaaattttgtggacggttgtgagcggcccgtgaaactcagcagcgacgagcagaaccaattcggagtgcgcacttcgcatttgaacggcccatggacccaacaggtcgaccgacggctccgatggttcagctacagaaaatattttgaacacgacgaacagcaggaaacctttttacgccgattggtctccgcccgacacaatttggcactgctcaccaatttccagtcgtttgcccatcggggccaaagcaactctttgctgggcacttacgaaaacgtttactcatttcttggcactgtcatcgaaaaatttgtgccaaaa

SEQ ID NO: 93670 - DNA, 244 bp, Heterodera glycines
gatggaactgatcgttcggctcggctcttatgggctcattcacggcgacttcgacgaatttaacattatgctaaatgaggacgagtctcccattctgatcgatttccctcaaatggttagcatggaccatccgaacgccgacttttattttgatcgcgatgtgcaatgtgtacgcacctttttcaatcggagatttaagtttgagtcagaggattggccccgttttggggacatggtcagaaga

SEQ ID NO: 93671 - DNA, 235 bp, Heterodera glycines
gctttatccgctctgatgactgctctgtgtggcaaaaccaaagaattgcccatcagcaccatccttgaacgactgctatgcacaccaggaccacaactgctgaaggatctcaccggcatcctcctgcgcttccgacgcatggaacatgtaatcctggcagacatcgaaaaggcatttctgcaacttggcatccgatacgtggacagagatgcctgcagattcatttggctcaaca

SEQ ID NO: 93672 - DNA, 575 bp, Heterodera glycines
actcaactgctgtctcccagtcggccaacactcctttgacaaatgttcctgcaattcctcatgctacggcacctccgcaaggaatgccaatcccaaaaattggagtgattgctgcaccgaaactggtcgagacgagcacgcaacaagcccaaaatttactttcccaactcggcatgtccacctctgctcaacgggttttctctggacaacagcccatggccaatgttcacgctcctatatcaactccgacagtggctatgttccggccgcctatcccaactgccactgtggcaaatttgcttggccagcaacccatgccatctttcggtgctgtcccttccattccgtcaaatctattgggaacactcaattcggcacttggcgttccgatggcaattccccctgttcactttaaccaacacacaatgccgccgatggtgggcggatttccctcttcgatgccaccgcagcagccgccaatgatgaacccagtcgagatgattttgtactcgaagatgcaattgtacagtcgagacttggctagcattgacaacatcgctgcgctcattgaatac

SEQ ID NO: 93673 - DNA, 551 bp, Heterodera glycines
tcaaaaatggggaaattaagggcggggcaaaaagcgtgggtctgtgacccatttgtttgaaaagcaactaatcaaataccaacagatgattgaaagccgtgaagccgaatacacaaggcattgcttgaacagtgcggtcgcaaatacgaaatttcggtcgatgccaattttgctgagcaattacgcgaaaaagttcgaagcattgaagcgaaaaaaagcggaatttacggaacagaaaaacaaatggccgaggccattgagaagctccgcctcagtgtcgtacagctgaaaaacaacggcacacagaagcgacaggagtgtgccaaactgtcccaggccatcgcatcggtcggcggagagggaactgcgaacgctgggacaaaccacgcaaatcattgacaagctgagatattgtgaagtgtgagtcgcagttgaagcagctcagcgacttctctctgtaggacgacgtgtggaaaatgctgcagggcattcatacggacctgaacacattgcgcatggacatggtgtagttggccagcagtgccggggac

SEQ ID NO: 93674 - DNA, 474 bp, Heterodera glycines
cgcggctgccatgttggatttgcgcgtggcggcgtggtggtgtggtggtgtggtggcaggaacaagggcgaagctttaacttacccggcgctcagcgcttcgttcataggttcggcgcttgagccgtggtagcggcaagtgtgcccgcggcaacgcggggcaaagcgaagacgccgatgacttgacgcctggtatgacaccttggtctatgaagtcgcgctgcggtgctgggatcaagaaacagcaactcgaggaaggtatcatcgagcgtcgttatacagcagacaaggtacgaaacggtgtgcaggagggcatgcacagcagcttcaaatggcacgtgcatggctctgttgcgaacaagctgctctgagacacggattgagagcccttaatcggtggtcacaagaggtggggttacggtatcggggcgctgcgatagtcctgcaagtgctgcctgttgaacacaagggctca

SEQ ID NO: 93675 - DNA, 598 bp, Heterodera glycines
aagtttgagatcattctcacctcctgctgctgttatttttgaacaacagcgtccaaactcagcaagtcattctcattcacttcttcaatacatccaaaattggctcaacacattagacaatttttcacaactgcaagaaatgttgtcctggttgcttaatggtccgctcagtttgctgcttgtgctgtctggcattgtgctgaacgcactttgtgtggttgtgttcgtgcgatttcgtcgaaatgttagcggtggcacaactccgataattcactattacttgatttctttggcgggatggcactcggcacttttgttcaacgcctttttgctttactgtctaccgacaatgctttggggctccgtcgtctcatcgggtccctatgtgcatttgtacccgccaacctacgctttggcaaatgcgacacacaccggcactgtttggattattttggcactcactttggaccgctatttggcgttgtgtatgccattcaagcatcgaattttcagcaaaagaagccgtgtgaagcgtctcgttgtcgggctttcaattggcgcgctgttcttctgtttgccacgctttttcgaagtgcaa

SEQ ID NO: 93676 - DNA, 263 bp, Heterodera glycines
gtttatttacaaaaaaaaaaaaagacgcggcgaactccctgtgtgggtcgtgagaatgatactttgccttatggatggacaaagtattagaaaaaccaaaaatggggggggggaaagacgggaaatcggagattgagtgatcactgatcaacccgatttggttggtataaactcactcgctgcggtggccaacaaaggcggcaatgaggcggagaaacaatagccgaggcctgggatagacatttaaaaaaaaaaaaaaaaaa

SEQ ID NO: 93677 - DNA, 607 bp, Heterodera glycines
ctcctcctgctgatcagaggttgcttttagcaaaatttgatggcattgtaaattttttttcccgaaaaatgccgattttgaaactgaattttctgcaaccactaccttgtggaaaaacaggagcagcagcagcagcagcaggtgaagaaggttcacaactgggcgatgaacggcgcgatgaacggcggcggttttccgtggtgaatgttgtggtggttgtgtacaattgttgctgggttaatgagcgttgtttttgttgttgacggccatggccatggacatcaacaacaacgcgttgctgtcgatgaagccgcttattgctgcccttaatactattgttgttgctgttgttgttgctgttgttgttgttgttagtgccatgcttctgcttttgttgctgctggtattgactaacaatggcggcggacgcggtcaaatggcgccaaattcggttgaaatttgttccactatttaatataaaaataaataaaatgaaataatgatttttaataaataaaaaaaaaatttacaaactttacacatgctccataaaaataataaaatccaaaaaaattcgttaaaaaattgtttttttttatatccgccc

SEQ ID NO: 93678 - DNA, 551 bp, Heterodera glycines
gtgaaccgaatggcatcgagtttaaggaggagggcagtgagtccgacagttgttgctcttcgattgtccaggtgtacaacagtgggagttgtggaagcaaaaaatggactgtggaagcgctgtacgaaagctgtcggatgaaagtgcgaatgacgggatcgggtttaatgatggatgccgaaattatatcgaagcggaaggagccggatggaacatacaggttttatgtgcattacgtggattgtaatctgcgcttggacgagtgggtagcggaggaccggatcgatctcatgtctgttcgtattccccaacgcgtgaagaagtcagcatcacagcaggcaattgctcagtcgttggaccaatcattcgaccaaaattttgcgataagtgacgcacaaagctcacgtagctcaactcccgaaaaagtgattgaaatgtttcgaacaccgactcgatcactgaccggaagtcgaaagaggaagcacttaggacacaccatcgaatacgtcgatgccaattcaacctcttccgaatgctgtccttccgtcacc

SEQ ID NO: 93679 - DNA, 623 bp, Heterodera glycines
agcaaagcttgcatcccgccccatggctttgtgcatttgtttagctccaaggtcgaatttctgtgcatataccttttcgagatggagaagagaaggggtttttccggaatgtttttatccggaatggttcccagtgcatgaaatgagaaaaagagacacacactcttctttttatagattccataagcctacccaaaattgggtcgctattcaaaaggaccccctccctcctccataaccttagccgaaattggttttgtatcagcaaatgaaagacgccacaatataatcagcaataattgttttgaagaaaggagctcaaaaaacgcatttctgcattaaaatttttcgattctgatgtcattatcagtcactagaaatcattattttggcgacttcgtcactaaaatagttaaaaatcactattttggcgtttcgtcgctattttttcactatttcgacattttttggaaaattctttaacaaaaatgcaataaaaccaaaaaatacacccctaagaatcgacaaaaaaaatttcaaaaagcactcctaagaaatgaaaaaaattttctcaaaaaggtattttcgtggcaagaattttaattttaaaaattattttttta

SEQ ID NO: 93680 - DNA, 572 bp, Heterodera glycines
tcccatggcattttacgcgtcccatggcattttacgcgtcccatgacattttacgcgtcccatcacattttacgcgtcccaacaacatattacgcgtcccatgacactttacgcgtcccaacaacattttacgcgtcccatcacattttacgcgtcccatcaaaatttccatccaaattggtttatttacaaattaacattaaaaaataggaatatattttcaaacaggatagttgtgacgcatttcctctaaaatattttgaaatatttttgtgtttgagtggtaacgacgaaatgcgtactggtacaaatatgtttgcaacaattcagggttagtcccatgaaggtgttttaagctttgctttagagccctccaggtcgcttcaattccctgggtgtgtatttgagggttagttggatctacgaagtgtaattgatgatttacaaaacgatggttgtactgctgctgcatgttatttatcccaccatatgctgcccacccatcgctaacgatgctcgtgccgacttcgatgttttcggcaatgataggcagaagtgttgctgctgagcga

SEQ ID NO: 93681 - DNA, 557 bp, Heterodera glycines
ggtcaatcgatttcggtttactcatctcatctataataataatttctttgccggtgctgccgttctctttcgataaggcgtggtgaatgaagcaaatgagtggatgaggcgggtgaagaaatattggcaggtgggaagagatggaagggaataaccgcgaagtctcctcaaaaggaagacatttatttaatgttttcgtttgtttgagactctgagtgaggaggcgggctaccaagaggaggacaacgagcaacttccgacgcctaataacaacagagtgattgctgttacagcaaattccatctttacggtcaacaaaatattcgaaaacggaggtgtcactgccatcggtgcttcaccgtcaaaaaagaaatcaatgcgggaacgaatggcacgcttttctatcggcggattgaacattttcgagtctgaatcggccattgcttttgcaatgagtgaacgacggaacccaaaagaacaagctccacatggaattgagcttaaaatgcaggaagtgccggtgaatgcactcggagacgaaaacgacgaaacggtac

SEQ ID NO: 93682 - DNA, 413 bp, Heterodera glycines
gaacctttggggaggagcagcgaaaggaacttttggagcctttgctgaaggagggatgggaaacggtgcaggagagagatgccatcaaaaagagcttcactttcaaagacttcaatcaagcgttcggttttatgacgcgaatcgcactaaaggcggacaaaatggaccaccacccagaatggttcaacgtctataacaaagtggacatcacactgagcagtcacgacgtgcaaggcatttccgagagggacgtcaaattggcatcgttcattgagaacgtgttcaaaacagtgaagtgaagatggcgttcgttgtgaattaaacggatacaaattgtcattttgcaccctttttaaataaaatgataaaaaagtcacaaccaagagaaaaaatgcaactgataaataaacaaa

SEQ ID NO: 93683 - DNA, 488 bp, Heterodera glycines
ggtcttttcaaccaattcttgggcccagtttcggacatcaaacgacgacttaaaatcccaaccggcaaagaacgccgatttgtcagcgcgtggtgccgcaaagtgatgccgttgagcatatgcacaatggatggtctttgccattgggaaattgcgccgcttcctgaggaggaatggcatgatgaacccccgattgagctgccgcacgagagcaaaacgaccttcaaaatccccgtatgttttctctcttcttttccttttctcccaatcgatcgaaattcgagtttaaataatcccacatttaacggagcgcaacactgtgccgtttgaaattaatttctaatcggaatgctaacaataagcattttactaatgttgtttttaatggtatccgttatccattcctctaagcatacatatgtatatgtatttgtttttaaatttaatttaattttttattttactttattttcgtttaactgtaaatt

SEQ ID NO: 93684 - DNA, 406 bp, Heterodera glycines
tctgatgcatatttatgaactgcaatgggacgacatagaagatgccaatgctacttcagatgccgatcaacgtatccacgaccgatccggcattccctgcacttaatactccaccaccaaaaagcccggcttccgcagacggcgatggagacatcgcagcgctgggctggacttcgtacgccaccactactgtctcttacctcacaatggagtcgattattatgcggacgacgacgatccttaagacattcatctcgttgagcgctacatcaataaagcgagaacgattggcatctgggcagtcggtctcgccggaactgcgattgaaaaagcgccgcacgtggagaatggcaccatcacaatatgcgatagagattatgctccaaaacggcgtgtcgctgtcgac

SEQ ID NO: 93685 - DNA, 752 bp, Heterodera glycines
gtcccattaagatggtgtgtgaatgtactcagtgattttgctggctaagattgcccagctcaggtcaatttatctgtctgtacatacatattcaatcgtctttcgcgcttccacaatattctaacaataataagatgtcttcaacaacgttcacgctaataagcgtgtcctcccttattgttctgttggtcggttattatgtgcaaaggtacggaatgccaccacccccgccaaaaattgcgggcattgatttgggcaccactttttcctcagtcgcaatttttcaaccgcagacgggcgaaacgattgtgctgaaggatccgcttggtaaaagaagcattccgagtgtagttggctttctgtagagaaaacggcgaaattgttgttggcacaagggcagtggaacagcaggaaatgaacccggagaacacaatttatgacgcaaaacgattcattggaaggcgtttttcgtcagacgatctccaatttgagtcggatcgcaaacgctatcctttcacaataaaattggacgaagatggctttgtttactttgaggttcaccaaaaaggtgtgaaaagaaaaatacgacccgaagagattggcgccattatcataaaatatttacgaaaaatggcacagaaccacttcaacgtgaacattcccgaagtggtcatctcagtgccggcagaatttgaccaaatgcagcgcaattacaccaccaaagcagtcgaattggcagggatgaatgttcg

SEQ ID NO: 93686 - DNA, 483 bp, Heterodera glycines
gctcgtaaaaaatgtattaattcccttttttatataagtacccccatagccaaaataaaacaagggagaattagagcctcaatccaatcattttaccaagaaaacagcctcctcattaatgtttgcattattgtgtatatagcctacaaacccaaacattaaaacaaaccattatagtgtaatcagcacgctgatcttttgatctcattaaggaaattacgctaagcaataacgtacactacataaaaaatagtataaccttatttagatatattaaataaatttataacttggcatagctagaaggcatttgtcctacaaaagcctctacagggtctctcctaagaacagttgggggaagcgtacgttgtatcattgtaaaatgataaacagctagagctatgtttaaatgtacaaaaaatacacacttaaaaaaaggattgcccctttattgttttttttctacgctaatcctagcaggag

SEQ ID NO: 93687 - DNA, 253 bp, Heterodera glycines
cttctctccattgcatttgattgccacacaccatcacattttattccggtactttgtcgatggatctgtgccctttttttggagggggacaactttgcgtcaccactgaattacatttgttggaatccaaattaaaaagtcataaagacatgtttcctgggtgacgagggtggacatacttttgggcaagaaaaagtccgacttccatcttaaaaattgtttacggccacaatttgccgcaatggcacacatt

SEQ ID NO: 93688 - DNA, 472 bp, Heterodera glycines
gtctcttcgcacaacaaaaacgccttcgcgtttcggaccgcggattgatttggaattccgacctaattgaaacgttggaactgcaaaatctgctcattaatgccctccaaacaatcgtcgctgctgagaacagaagagagtcgcgcggtgctcacgcccgggaagactttccggttcgggtcgatgagttcgattacacgaagccaacagaaggacaatcgaagaagaaattggaggagcattggcggaagcacagcataatttaccaaaatgtggagaacggagcggtgactttggagtacaggccggtcatcgacacgacgttggacaagtcggagaccgattgggttccgccgaaaattcgctcctattagaagcaataatgacaaattgcaatccaattttgttttaccgtatttagctggttgtttcaattcgattggctttatgattaggtcttcaccgcaatttt

SEQ ID NO: 93689 - DNA, 720 bp, Heterodera glycines
  unsure (1)..(720): unsure at all n locations
tgtcccatcnaaagttaaatgtttcattttatttttccgttttttctctttccaatgccaacattgttaaaaaaggcccttccctcctcccattatccctcctctccgatgtgccgtcccttggcttgccgttccgcatcggcttctgacccttctcacctgcagtcggacgatggcattcgcccggtccgtccccccatcgcccgggacagtccgcgccgtcgactgttttggagttgtttcgtcgtcctttgcgtggccatttccaccggttacggctcccagttgaagttctctctgctcaacaccgcttccgatcacttttacccgccctttcttctcatgtggctcaacaattgctgcttgatcatctgtttcccgctctatttgatctttgaaagagccaaatctaaggaccgatcagtacgcgaaatcaccaacgaatcggcgcgaatcgttgcggagaaaggggtcaaaagcggattggccaaggaggtgttctttctgctgctgtacacagttggcaattactcctacgccctctccctgggccgtatcacttcgagtgccgcgctttccgtccgcagtatggacgtgtccgtcgtctatttgctgggccatttcattctccatgaacgatttgttggcctcaaaacaattgccgttgtgttggccacgggaggggtgctgctaattgcacaggaccaccaatttgctgcc

SEQ ID NO: 93690 - DNA, 490 bp, Heterodera glycines
cctcctcttccgtctcctctttcccctcctcttccgccgtcttcgctctcttcgcagcattttgtcgcaacttcgtccgcttcgtttcccgtgccctcttccaaaagtgccaatgttgcgccattgccaaaagtgcgccattctgttcagtctattttgggcgtctctcaaaaagaaaacattggcaatatgtcttcaaccgtgccaaattcaaatgtgctcaaagaaaatgccaactttggaccaacaaatgtttttcggccatttcactcgaacactatctcctcttcgcccaaagcattcaaacctgtgcttcagcagcgacaaaatttcaacaatttttgatgaattgtgaactaatgatctccgccatgttgcgctttttgaacgttccaatgccacgaaaacaatgccaaacaattgatttaacagacaacgaaattggaatgtctttcctgccaaattcaattttgttttattttttctcaga

SEQ ID NO: 93691 - DNA, 290 bp, Heterodera glycines
cattctttgtccaaattttgttgacttccaattcataccaaaaaacttcattgtttgtgtctgtatcgatcattgttatttaattgcccatctcaaaacagttcgtttttcaatcacttatgtcgcaattcctttaaaacctttgtcctaattgcttttttgaatcgatcctcaaagtgtgtgcctcagcaaaatgacactttctttctttacttttttaattcgactttattttaacatttttttgtctgataaaaattttattggaaaaaaaaaaaaaaaaaaaaaaa

SEQ ID NO: 93692 - DNA, 319 bp, Heterodera glycines
gcgtacaccgtctccccgtcgtcggcgtccgtcgcctgccatccgcggaccgcgtcgccgttcgcgctcgcctcgccatgaactcgcggctccatcaccaccaccggcgaaaacggaacgtactccggaaccaccgccacgccgactttgtgttctaaatctaagcagaaatatcacaaaagcgcacatggaggaaatcttcgctctgtttggggctctaaggtcctgagagttgccaatggaccgtgtgcatgtgcatttgcccccgggatgcggctatgcggagtatgaaaatgcggaggatgcgcgagaacgctcc

SEQ ID NO: 93693 - DNA, 654 bp, Heterodera glycines
ctcattgaaacgtcatttaatggggggccaacaaaaaacgacgacggtcgaatctgtggaaggaaggccaacgcatgcgaacgcgggtgggcaaaattgccaaacctttaattagagtgaaatgtttcaaaattccatttgatcccttcgtcttttgattaggcaccggaacagtctcttccgttttgctggcgattgctgccgggcaaaagccaacgcgtgcttttcccgtagaaacggatcatggaacgggtcaaactcagttggattggaatgggaacggtcactcggcagacgcggcacagctcattttgccatggcacgacgaccaaatgatgcggaaaaaggtggattgactcctcatttgctttgccaattccttttttcttctcctctctccacagattgtccatgcttcgtccgccgaattaatgagggccctcggggcattcatcggaatgcgttgcgatcggctaaagccccattttgagcccattcagctcaccaattggtcagtcagcacaaatacattttgtaattgcaattcccttcgctaattgcccaattttcaaggctccgaagcgtcgaccgagcgctgattctccaagtaagggcccaacttgtcattgataatgcccgatgagtgacaatttc

SEQ ID NO: 93694 - DNA, 142 bp, Heterodera glycines
cagaccatcttttagaatttgttttcgatgcgtcccttaaatttaatttatttccttcatttttttgttgtttatttttgcatttttttccgtccaaagcattgaaatttaacaatttaagataaaaaaaaaaaaaaaaaaa

SEQ ID NO: 93695 - DNA, 391 bp, Heterodera glycines
gattggctacgttattgaaaatctttccaaccgaaaactattcttcattctctccctccttttgcttctccaatcacttttctttctcctcggcgcacttttcgctcccggcccttcttcttccatggaatttgtacttagcgcatgtgtggacaaaagttcgggtaaaagtggtgaatggttcactctccgacccgacaaaacgcaaaattgtgtgttggtccccgatctgaagcagcacagccccctgtcgtcggatgcgcgtgacattgttttcggtgcgcaaatgccccatatgcgtgacggcgtccaattgcgatattcgcccctgtgtcaatttctcattggcttgttggacttggaagttgagttcagtctcgaaacaacgtct

SEQ ID NO: 93696 - DNA, 273 bp, Heterodera glycines
ggcactgtttgctgtccgagaaaatcgctacatggttctgaacaccgactttaacaaagcatataagcaagtggtgaagaaagacagcgacgagttcgctttctacaagtgatttgtgatcgaatgacccccacccatcgtcaaccatttgctttttgttgtttttgcgcttatatatcatcatttccccgttgtgtactgtctttttcattgcgtgtcatcgaataaagggaagtgaaaaggaaaaaaaaaaaaaaaaaaaaaaaaaaaaaa

SEQ ID NO: 93697 - DNA, 508 bp, Heterodera glycines
gagggaaactgcgacggcggcactaaagctgttggacaacgaatggttcctaaattcgacgcgactgttcatttacgtaagccatgaacacgaaatttgcacggaagacattgtgctaactgctctcaaatagggcccagaagtgttcatccccacattctaaaaaggggccgaacgaatggacatgctccgattgtaatctgataaggaattcgattcgttggagggcactctttggggaattcgccaacactcctccagtctcagtcccctctcatttgaagaaacatccgccaaagcacctctcgatttggtcgaagtgcccggcgtggcatttaccacaagcggaaaacgacttggtcttgggcgtggattttacgaccgatttctgaatgaatacgcacaataatacggaacagtgccgagaacaattgcattggcattgaaagagcgattggtggacgatttgccaatggaaagcaaagaccgaatggtggacgaagtgatc

SEQ ID NO: 93698 - DNA, 352 bp, Heterodera glycines
cacgcatgaccagctgaaccatagtgcgggtgaagtcttgaaacaatcccaagagaatatacgcaatttccgatagacgattgaactgcaaattgctctgaaactgtacgacccacagaaggatcagcgtttcagtggaactgttagactgaagcacgtccctcgtccgaaaacgaaagtttgcattcttggatacccatcacattgtgacgaggcctctgccgacggaattccatgcatgacagtggacgacctgattacgttgtactaggacaataatctgattcaaaagctcacctcaagatacgacgctttccttgcctccgaatcactcatcacacaaatccctcgc

SEQ ID NO: 93699 - DNA, 558 bp, Heterodera glycines
attcgtttggcctttccaaacatcaacatttcgctgaacacactcctctcaaaaatcatcggtccgcgtcggcagggcattcagcagggcattcttcagatgagcggtgcttttgcccgagcgctcggccccattacgataggcaatctttacacagtctacggtccgcaaggcatttggataattgcgttgtcggtcatcttcaccactttgttactttggatgctgttcttccctctaatggttccgttgtcgctccccgatgaaaacgaacgacaccatccaacggaaaaaacgactgatcgtccgccctaccgcgaagaaaggacgccgttggtggagcagagcgacggaaggggccaagacgcagaggcggcggagaacggaaatgacgcgacagtgaccacaacggcgagtttgagatgagaggagagagagagagagaagtcgttttgcccagtcatatcactaatcattctcttttatgttgtgaatttcgggttttgtctgtgcaatttttttttatgtatttatacatttgaacaaagattgaatgcc

SEQ ID NO: 93700 - DNA, 733 bp, Heterodera glycines
gtctttcaggcatgaccgcgtaagcagttggaacaccgagactgccttgcaagataatggttcgtggtcgtggatcattgcgtgatgctgctaaggaggaaatgaatcgtggaaagccgaattgggagcacttggaagacgatcttcatattctaatccaatgtgaggacaatgaaaaacgtgcgcgctccaaactcgacaaagccgtggataaagtgaagaaactgctcgtcccatcgcgtgacggaatcgatgagttgaagcgcaaacaactgatggaactgagcatcatcaacgggacttaccgtgctaacattgggccaaagaactcgccaaccgttcctcgtcttactcctctgtccatgctatcaccggtccactcacctctttcgccgcctcaccgtgtgcattccaccgtttcttctcacaatatgttttttggctctcctcttccgagccccgtgaaggaatatggctcgccgcgttcggttccgtcttcgaagtccaccagcaacaccggcggtggtcatggtcattcatttgactttgctcagctgaaccaaatgatgcatcacttcgattgaataggtctcaggtcacccatagattgtcacatttttgttggttttgtttgtttttatctcctcaagttcatccaatttctaagaattcagtcctaagttaattgtaatactaaataagccaaactaagcctaagcgagttatctaatta

SEQ ID NO: 93701 - DNA, 721 bp, Heterodera glycines
gaccctttaaccgttgaaactcgtcgacattagcaatgaaagcgcccgcattcttcgcaatttctctcctaagcttaagcgaattcccgaatctccgatggttttgtcggcaatttcgacttccaaaagcggctcaaattcgcaatcagagtcattccgtacgggtttggaagaagaggaggaggaaagggcaaacggaatggaagaagttgttaacgaaacgcctcacttggacatgatggagacgagtgggacagggacggaagttgagaacgcgtcgaattccaaagggaagatcgaacagaggaagtcggccatcgcaccaatctgctcaatcactttgcgtcaacgatcgtccgcaatgaaatttgcaccctccgaaatgaagcggactcacattgcaacgcccgctttttttgcccccgctttgccctccgtttcaatttgtgaagcggaagggactccttccttcgccaccgcttcctccatcccctcgacgccgctttctattgataatgtttccgtcactgcttctgggcgcctgaaacgcgcagcggctaagaaagttcggtcatatcaagagccgtcattaagcaagaaaatgcgccgatagaaatgaaaaattgcgaaggaagaaaatatatttatattgatcaattctcagttttgcaaggaaattatttggttttggattcctttttcagcagataaattattttct

SEQ ID NO: 93702 - DNA, 701 bp, Heterodera glycines
caaccgtccaggtctggaacatggcctgtgtgttgagagatgttccttggggagttggagatgaagatgcaaactcttcgctcctaaaatcattgtcactggatgcttgtgatctgctgaaacacgcaccacaaccccatcccttgactacttctttcggacaccttgtctggagtgttgtcggatgagcagctacgagatggcactgcctacagacactacgtgtcaaggacctctcagctcaccgatcaaaatcatctttcgagttagccaaggcggagaatgctgcttgcaacagttctcgcaccggcgctctgttccataccacacctgtggtattctgacttcgaactaatctgatcaatagcgtccctaccaacgaccagatcctggtccctgagacccttctcaagaagcgcaagtctcaggagaaggcccgcgctgagcgcaccgacgccatccagaagcagaaggctgccaacaaggagaagcgtggcgtcatcttcaagcgtgctgagaagtacgtcaaggagtaccgcgatgctgagcgtgagaagatccgcctccaccgcgttgccaagagcgaggactctgcctacatccccgctgaggccaagctcatcttcgtcgtccgcatcaagggtatcaacaagatgccccccaagccccgcaagattctccagcttctccgtctcctccaa

SEQ ID NO: 93703 - DNA, 281 bp, Heterodera glycines
  unsure (1)..(281): unsure at all n locations
ctgccgttgaaggcaagggtcacaatcacggcgaggactggggcccgtctgctgttgagatgggtgtcaagagacgggaatgggccaacggaaccatcgacggttaagcccagcaacatcagaacaaagctcgagcaaaggagcaaatagcgatgactgcgggactcttgaatatcggcgttgagtaacaattgaaaaaaagagacaatagacaccaggcggctgaatacatcaccaaacggccttgaacgatngntctgcncnaaantgaaaaaaatgcc

SEQ ID NO: 93704 - DNA, 299 bp, Heterodera glycines
attccttaggcccagttgaagatctcaatgcaatcttgaccatgcccttctacgactccctcttcggcggctccctcggcgacgacgctccgcccgccagcggctcggccaagagcacctctggacctctggcgcagacggccatcggagtggcgcccaccagcataccggctcccgtggcagtaagcagcaagaaacccgtcattccaggcatggccatcacccgcaccaccttttgattgcccttggtgtgcgcaagtcaatcatggctcggaccactcacacgcactttgccgaat

SEQ ID NO: 93705 - DNA, 787 bp, Heterodera glycines
ccacgtttgagcattttaataaagtttaaattaaatatattaatttattttatatgaccaccataacaaaaagtgaaaagcacaaaacaaaatgagtaagcgaactgttgaacaacaacgccagcaacagaacatgcagaaaaagcacaacaaattggagcagtttcgttcaaagttagatcagattgaaagcgaattgatggaagtgagtgatcagctgaaggatcaattggcgcgaaatgatcaatttcgaaaagggaaaggggaaattgaaaaaatgccaattgaaagggaaggcgaaaatagattaattaaggagagaatttttgtaaatgccgccaaaatggagcaaaatcatgcgcaattacggcagaaccaaaaagaagtcaattacgaatttgctgagattatcaaatttttcgacatttggctaagggagagccaaacgcatttcgcttcttccccatttactccgacaacggaaaatcattcccttcggcggcaacaaaatttaaaagcgtccatttgggccatcgatttgttcgaacttcgtcagtttcgcaacggcaattctttggcccaatgcatggaatgcgggaaaaagtttatgaccacggaagaggcggcgatgggttggcacattgtgcagggacacccgcaatacgcagcccaattgctgcagaaacagctcgaaagggacgcgcagcaaaggcaggggacaaacggcacggaaacgacggcacagaaaaggaaacgaaaagcgacggaagagcaggaaaagccgacg

SEQ ID NO: 93706 - DNA, 238 bp, Heterodera glycines
cttgcttcctctatagtagtaatctgattagctaactgccaatagagtaatgtaaaaactatcataggccataactcccccattacatagaagcataccaacgtccacttgctccacatcataaaaaaccattttaattggggataaagctggatgtactgatctataagcagcttattgggatgccaataagcttggtaagggaaaagaatcaagccaaaaaagaaaaaaaaaaaaa

SEQ ID NO: 93707 - DNA, 533 bp, Heterodera glycines
cgctaattcgccgtcctcttcggcggatgaggcggacgatggccagcaaatattggcaaatagtgcagaaggcgaacagcaaaacgagcagaaagacgaggaggacgaagaacggacggaaccgcactccgtggcactgagttttgacgaaaaaggggaagtagccgcaacaattgtcacaggtcgtattcaagaggtcgtccatgtgttggccaatttcaaagtgcgcgcagagtcgggccttaaacgcaaaattgaaatttttgattttggctcttcgaactttgctgtttttgatggcgttgatttgctgcttcgacaatttcgtttgctttgccattccgtccaccgccccaaaaatgaattggtcaccgaattgccaaatgttccggccgttcttctccctgaacagactcaagttctgctcgagaacggttttgccaaattgcgacgcattcgaaacaccggcggaggggcggacggagagcaaagggaaagcgatgaacagacggaaattgaggcgattccgtcgc

SEQ ID NO: 93708 - DNA, 251 bp, Heterodera glycines
gtccaattaagtaatttaacaaagttcccaaaatgatttcactggccattttggtcgtcttcgccctttacgaggcaattgccgtgccactttacctgcgcctcatttacgtgatgctcaaagacacccatttcgcaggcagtccactctttcgcattgtttcaatgattggcattttggaagtgtgccattttctggtcgttctccttttctaccgacttccgctgttcgcgccgactgctgagtttttc

SEQ ID NO: 93709 - DNA, 852 bp, Heterodera glycines
cacgtggccttcgtgccagttgcttcatccgggatggcctttgtggagcattcgtaggactttcgctcgaaattttggcgggatgacgactcgttctccgtacatcagacattcttttgtgatggagaggtcatcttttcgacgaaagaacaattttatttcttccgtttccgaagcaattgctttatcattgggccatccatctttgacaaatttcttaacctttttgatggtttcgtcttcgttccctgctgaaattatgtccttcgatgagagtgacactgtttccaaagtgttgatgaagaaattttcggcttccttctcaaattccatggacgcgatgactcggtcttcttcaggactggtgctttttgcaatcagccttgagagcgcatccgcttgtccaaattctgtggtgttcacatactcaatctcgaagtcatacgccaacagcataagtgaccatcgtaaaagacggttagcactcatttggcggattccctttttgttgccgaaaatggcgaggagtggcttgtgatcagtttgaagaacaaattttcttccgtagatcattttgtgaaattttcgcactgcgaaaatcaaagccaatccctctttttcaatttgggaataatttctttcagcgggtgtcaaagatgatgaggcgtgttcgatggccttaattgctccgtttggaaatcggtgggaaatgactgcgccaattccatgttctgaggcgtcagcggccacgatgatttcccattttgggtcatagtgcgtcaagagcaaatccgaggacaaaatttccttgattttaatgaatgctccttggcattctttgccccagtccca

SEQ ID NO: 93710 - DNA, 852 bp, Heterodera glycines
agcgtaaaaatggttttgcaattttcctccgaacaaaagcgtcttcttggcttgggtcgtgtgccttcgcttcgccgtgggcttcttccacgaacctccctctccgatcagctttaccactgtctcaaaacgtttctgactgatcctgattctggatggtttttggtccatggattggtaggaactggcaaatccgaactcgtgaccaaagttttatgggaacgacccgagctatgtttcgcactcgtcgaccgaatcctttggatcaccgaccgacgctttcatccggctgaattgagtcaattggcggccgacactcttttgctggcggtttcactaaactctccgacgaacttttcgcaaatggacgagtgcgatgcttttttcggatgctcgcaatcggctggcaaaagcggcgaactttcgtccgtcgcccattctctgcactctctgctcaacgataactttgcaaaaacccttctgatcgtcgacggagtgcaaatggccgatagtgtcaaattcttcgatcaaatcaaaggaaaaatgtgcaaaattttggccaccagcaccagcagaacactttttaatgggttggagaatatacaaacatttaaaataccgtccgacaattgctccggcgaagagttggcacagatggcgctgaattacggcattaaagagacattttcggccgaacggataaatgccattctttgtgagacgggcggaaatttcgcacttttggagaaaatgttcgtgatggcacggggctgtcccgcaattttcgactctctcctcgcccaacttcgccattcgcccctcagtttggtcagctgtcacagtgcctattac

SEQ ID NO: 93711 - DNA, 736 bp, Heterodera glycines
gctttatgtttgagttgcgtcgcagtgtgtgcttgtgatgactgcctttgaggagttgggcgttttgcccgaattggcaacggcactcaatgatttggaatggaccttgcctactgacattcaatccgaagcgatccccgccattctcgggggtggcgacgtttgcatggcggcggagacgggcagtgggaagacgggcgccttttgcattccgattttgcaaattgtcttcgagacaatgcttccgtcaaaccccaaacggagtggtgctgtcgaagacaacggttggcgcatgaacatctttgaccgtgaccacaatttgggcatcgacgccagcggatttgtttgtgagagtaaccatcccaaattgtggagcggctcgcgttcagtgcgtggagttaagggatcgggcaaatattattacgaggcgaccattgaaagtgacggactttgtcggatgggttggtcaacagcgcgggcaaatctcaatttggggaaccgatgaccagggctggggatttggaaggcacggcaaaaaaagtcacgcgggtcaattcaagactacggacaaagtttcacgttgggcgacaccatccgcttgtttttggaactcgaaatgggcagaattccctttgctaaaattggcttgacttcccagtggcttttgcctaaagcaacaccagattcagcaaggcttttccctggccgtgtgataagaaagctcgtcttcgccttt

SEQ ID NO: 93712 - DNA, 322 bp, Heterodera glycines
gatttcattgtaattcatcgtccgcgacggacatctcttcgaatttgcttcgctccaaaaattccctcgtgattgtgggccctccactaatgagacccttttgttcgacgccggaaatatttgccaggaactgatggatcacttgggggaaatttcgtgcagtgcgattgcgctttgtgctaaggagaactgattttgagatcgacttttgccacattggatgattttttgtgaagttatttgccaaataatggcgtttatttatttatcgtattgttcaaaatacaattttaaacattaaaaaaaaaaaaaaaaaaaaaaa

SEQ ID NO: 93713 - DNA, 299 bp, Heterodera glycines
aacattatgacgttatctttttggctgaaatgaatttgccaaaggaatgcgacggcggtggcaatgcccaacggcgggaggacgacaatgttgagcagcagcaggaggcggcggcatgcagcaacagtgaggcgcaacagcccgctaatgatgaggatgaggacgatgatgatgatggccaaaccaattttgtgtgcaaccggcaataatgccgtcgatgtaacatgatggattgtttaaatgcattaacttttgaagtaaataccgcatgaattaaaaaaaaaaaaaaaaaaaaaaaa

SEQ ID NO: 93714 - DNA, 559 bp, Heterodera glycines
accgaattgggattggagcagagagcacgtcatgttgcacgacccttctatcgtgaatatggcttcgtacgacagactcaaatcccttttgcgcggaagctcacagcgtcggtaacagccaattgacttgtaacgcttccgcagaaccgaccagaattaccaagacacagttgcctctatggagcctccgatcctcgtccctctcgccaagtcggccgccccttctcgttacgacctctcatcactgaaactgattatgaccggtgctgccccggtgggcaccgatctgttggacaaagtgaggagacggattccctcactgaaacaaatctgccaagggtatggaatgacggagcattcgatgtgttcgcatttgtcaatgatcggatcggacgattccaataccgcctgtcaactaatgcccaatttggatatgaaaggtgatgacatcgaaagcagaatgcctttgaggtgcgcacaaaattggtgaatttgcactcaatgtccaaccacaatggctgactatgtgaaccccgctgatacgactgcgaaaacactg

SEQ ID NO: 93715 - DNA, 232 bp, Heterodera glycines
ggcgtggtaaatggagcacggaatggatgccatcaaaaagagatctcctttccgagaatgtaacgacccgctaggcttcatgacgcacgttgcactaaacgcggacaaaaagtaccaccaccccaaatggctcaacgtgtacacagatgtggacataacgctgagaagccgcgacgcggatggcatttcgaagagggacgtgggattggcatcatttgttgaggatgaggtc

SEQ ID NO: 93716 - DNA, 480 bp, Heterodera glycines
gaaccctaggagggcaatggccatgcaaagggaggcgagggagagcataaacatccgatggagcaccaccaccagcaggaaggcatcggttctgcagctggggactccgctggaggcgttgcgacggttgcccatccttcgaacctttcgtctgcctcctctcaaatggaaaatttgcgtcccgccggaactgtcgtccgtcacatttatccaattggccaaaatccgtctcaaagtcagcgcgttagaggggccgtgagcagtatgactgaaggcggcgacggcactggccaaatgccacacgcaacgcaatacggcctcaacagtccgtatgacgacgagtacgacgacgagctggaggatgacgaagaggatttcgagtatgacgagggggacagtgcggacattgatgacgatttgggtgcccaagtgaccatttgattttctgatgagggttttcgccaattcatccaataaagt

SEQ ID NO: 93717 - DNA, 474 bp, Heterodera glycines
tccttaagcactccccaggaatggcataaaactggcgctttcctggaaggccgttgctttgtggacacggcacaacgccaactcatccctttgagagatgtcaacggaaatgcaaatgtccgtgaagttgcagtgattcttcttatggacagacacttcacccaacgcattggtccctccgagaagggccccgaccgaccgaccggcatcaatcagatgaacattcgtcatttaaaattggctgggatccatccgattgtattcaccgaacggcacttccgcgaactcggcgacgatgaacgatctcaaataaaatttattcgagagaagatcctttccttatcggaggaatttcacaccaacgaatggacggaagagaatagcagttaaagtgtgggcttaacttacgaattgtattcttggcaattattgatttgtttgtgtgatttattcccaaaaaataggaattctttt

SEQ ID NO: 93718 - DNA, 299 bp, Heterodera glycines
gttccatcaaatattcaaatataaataaaaccaatggctgtcaaacatgacccgccggaaattagggcactgaagctgtggaaggcggacgtcaagaactcacagttgattcgcggcatgattcgcggcaaaacgaaaagtacgcttcatgggcgagtcggatgattgcattctgcgcttggctcagagggatggaataattccgcaaaatttgtgaacgttgattcttcacagggatactgttgattttgttgcctgcagaatgataaacactgttaaaaaaaaaaaaaaaaaaaaaa

SEQ ID NO: 93719 - DNA, 513 bp, Heterodera glycines
gaatcgtcataagaagctaaaaaaggaaaaagtgagtgtcgattttcccttgggtggggaggccaccgcctgagaataacaatatcattgccgattttgtcgaccttcttaacggggctgaagagggaaattcgcatttgttggtcgtgatgggtggagacaccaaactggatgatgttttgctccgttcgcccatttttgcgggttcgggggctgcattaggcgcaggcggagaatttggcatcaacgaggaggacgacccggaattggccatggcattgcgcatttcattggaggagcagcgtctccgtcaacaacagcagcaaggcggcgaaggaacggactgaaagatcgaggcgcattcaaccccaatttacaccatcccagacaattctgaaacattggacggagggaaggatgatggtataccaaacgatcatgttgttgggaagtttcggactcactttattttgtgtacgaataaacaaaaattgaaataatgtgttaggaagt

SEQ ID NO: 93720 - DNA, 858 bp, Heterodera glycines
atccttttggtggaacgcacaaaaactcgctcggacggcgatcgatttactgacaaaattttgcggatgacttcgcggacagcggatgccaaactgaatccatttttggagtttactcgacgcattgggaacatgtacacgccgtcggtatatgctcagctgatcaacgtctttctgaacactgaactttccgataaatcgaacgggaaacggatcctcatattttcttatggcagcggatgtatcgccgcaatgtactcacttcgtttcaatttgtgcacggaaaaactgatggctgcctacggcgcaattaaacaaagcgcgaaaaaggcacacgcgcgattggaccagcggatccgacacagccccaagcagttcacagccgcattggagagaacggaacaaattgtcgctggaggggatacttacatcgaaactcccgatgatggcaaacgcagtgatggcattccaatgtttgccgggaccttttatttgcgagaaatcgactcaaaacacagacgcttttatggccaaattgatgatgccaatgagtgatgacagaaagggaagaaaaaacgcaatattcgacgaaatcccatgacattcccttcccttaaggatggcgtcggtccttaataattttattgtcccatcactttccaattgtccccgccttccgtccatttttaatttctatagatgacaaattattttataattttatctcatgaagctcagttaaattttgtgattctttttccataattttcgccgtctaagatttctcaacagccagaggttcttgcttgcttcatttattgtttcctttcaattgcctttctcagtcttccaaattct

SEQ ID NO: 93721 - DNA, 134 bp, Heterodera glycines
atttcattgaagtgccactccttaatttattttgttaagttattgtctttatatattttgttgttttttaaacattggattattaattgcaagaataaattaattaaaaagcaaaaaaaaaaaaaaaaaaaaaa

SEQ ID NO: 93722 - DNA, 484 bp, Heterodera glycines
ccgctgtgcagtccggacggcggtggggcgagaattaggagtgccgttccaagtctctggtccgagattgacaccaacgaacctgtcgaggagttggtctctctcgaaagaaaagcaatgcgcaggcgcagcatccgttccggcatcgcgtctggggaaataagtcgggtgtcgccctttctgaacgacattgttcacgtgaacaagttgggccatgaggagatgatgaacagcagcaaattctcgtccgctgcctccgtccgttctgccaatgtgccgcgtcaacgaatgcgttctcgttccgctggtcgccaatcgatcgctcgactcatcccagcttcaaaaccgaatgttcatatccataaacccgccattccggcttcaagaccgaatgttcagatccataaacccgctccgaaagaacacatttaaattgttgtgttttaatgaagtttatttgtatcaaatgggtcttgtttaagta

SEQ ID NO: 93723 - DNA, 365 bp, Heterodera glycines
gtccctttaagttgtccaatcacacggtttgaaaacggtggtattactccattcacttcgattgtatgcatttcacctccgccgacccctcctcgtcctctgcttacaattcgcagcagcgctttccgccgatcggcggccaattccatggccatcagccccagtcgcagcacttccggcatcaatcgcaacagaatggcgcgggggacagcggggcgggccgaagctgtcctcagctgacactcattctgatcacgttggtcatgtttgtgactgcaattaatctgggcgggattgctgtgatgaccccatcttggcaaactggggactttcccgagtttcaggcggaaccccttcatggcctc

SEQ ID NO: 93724 - DNA, 356 bp, Heterodera glycines
cttccttaacctcctctgatgaactctatggaactaattaaacgattgttaatgcaaggaatctaaaccctaagaggataacatttagggaacccaaatattctaattttagatgcagatcgaatcaattaatctttaattcatctataattcgaaaccgaatctaattgttagtgtcgatgaagcttaccatcgtcgtcgcggttcgtaacacatgatcttgaaaggggaaatcaatttcaaaggcgggtcgatttggccttcaaactgcaactttcaaatctcaaattggagtttggaaatcaaattcatgaaacctttggcctggttttggggaaaaaaaaaaaaaaaaaaaa

SEQ ID NO: 93725 - DNA, 811 bp, Heterodera glycines
caccttttctgccttcaactcagacaattatgcaattttctgacgtgtcgagctccaacccccgaagatcgaattgtttacgtctgtggctcttttgaccttttccacattggccacctttgcttcttggaagaagctcgtcgtcttggcgattatttaatcgtcggaatatactcagaccaagacgtcaattcgtacaaaggacagaattacccaattatgacactccacgaaagagtcctcagtgttttggcctataagcccgtttctgaggtcgtcatcggcgcccctctgtgcgttacgaaagaattgatcgaccgatttcgcattaattttgtggtgcaaggcatccgaaccgaacaccacactgctaccgaggaagcagattgttatgaggtgccaaagcatttgggaattttcaaaacggttgattctggaaatgagatgacaacggaacgaatcattgagcggatcatcaagaacagattggaattcgaacaacgcaatcgtgcgaaagagaggaaagaaattgccgcatttaaagcgcttcaaagaatgaaaatgactgacggaaatgggaccaatgaggaagaaggaaatgcaaaacatcttgaagaagaaaacaatggaaaatgcgatgagaaaaatggccgaagggaataccaaattgtcagcatcaatacggagaatgtctaagtcaacaaataagaagcttatgccattttaaatacctatctccttaacctcaagcttaatataaaaaagaatttagctctatttatccttttaattcatatagtgttaagaaagc

SEQ ID NO: 93726 - DNA, 540 bp, Heterodera glycines
ggtcatcgtttggtggccatggttgactcgccattacttcatgtgattctttccattcaataatctcgaaacttttgtttgtttgttttgcgtttgtcagggaaaatttcctatatggtacttcttcctcggctttttcttgataagtatcagaacaaatattatttgtctcttcaattcattttcctatggagaagtcaacagattaaacatactgaaccattttggcaaaattcatacccctgcatttcattttgcatattcccggttgttatttgattattggtcactgatcacctcttccgattccaattcatccaaataccaaaatttttgattctctaataaatgtattttaatcgaataaattatttatttgttgaaaatttatttctccttttataaaagtaaaatagaaatttcctaattaatttggcggtttaacagctaacaataagataccattctcagttaagcacaaaaagggctttattttcagacaaaatcgcgaattaacacaaaaaaacattgaaagatttt

SEQ ID NO: 93727 - DNA, 565 bp, Heterodera glycines
ccctccttttcgtggcacattgctccgacccttctaaagtgccattctccgccatgtctttcgggttgggccgtgccgagtcggtcactcggctcagcgcattcgagccaaggccgaatccgtcgctcgtccgttgctcctctctgatcgatgtcaaccgtttctcccgtgattttgatcgcttttctccgcgttcgtcgcgtctgtcccaaaatgactcgagcgcattgtggtcgagcagaatgtaccgaccatcgtttgtgatggacaaccattggttcgacaagttttactatttctcgccaattttcaagggcacccaaccgtacaaatgtcacgtggccagccatcgtctcacttatccctcctcttggcatcagccccacgactattggcgccgagtacaacacttttggtatgactcggacaacgattacgcgccacttcaccgccgaatgttcgaaccgttttacggggaatcggcgtacactcagcgcttttggcaccgttaccgttcacatctgttgaacaatgatgtgtatgaatgatgaggcgaggaatatgc

SEQ ID NO: 93728 - DNA, 229 bp, Heterodera glycines
ttttcagctgtacgttcgtcgtgtgttcatcaccgacgacttccaagacatgttgcccaagtatttggcattcattcgtggtctcgtcgactcggacgatttgccgctgaatgtgtcgcgtgaaatgttgcagcagcacaaactgttgaaagtgatcaagaagaagttggtgcgcaaggtgttggacatgctgaagaagatttctcccgaaaagttcgacgagttttgg

SEQ ID NO: 93729 - DNA, 710 bp, Heterodera glycines
tcccattaaatgatttacaatcctttaaagaatagacctgattaatttccattttttgcattttatttttagggtacaattagttataagacaaacgtttcgcataaatatttgttcaatttcgtttttgttctcacaattagcatgacgtggaaagggatcagacggtggctgaaaatgtgctaaaacttcaccgatatcgccctcaaggcgaatcggttggtgccgttcaggttttcggaacggctatggaagtacgaacgacatttgatgccgaaaagggggacagtcatggcagaatggaagtgtacgagaatattagggaatggacggcggtggaggaagggcagaaaattttgagcacccaattcatgcgcaaatacatccacacggcccgggatgtgaagccaaaactgacggatgaagcgtccacattcatttcggaacgttacgcggaactgcgatcaaccgatttgatcaaaacggactgcgaaaggacaatgccatttacagcccgacagttggagacaatgattagactttccacagctatggccaaggcacgactttcgaaaacggtcggactcgaagacgcgaagagtgcgtacgaacttctggactttgcatgctttaaggaaaagccgagagagcgattggaatatgaggaaaaaaaaaacagaaagaaaatggaagaggggaaggggaatcag

SEQ ID NO: 93730 - DNA, 600 bp, Heterodera glycines
gagacatcctaaaaacatttaattttgatggcatctattgacgattcatcatcagaagtcaacggatcaacaaatggtaatgcatcggttcgatcctttgctcttcaaacaacagtaacttctgctaaactcaacagtggtggttttttgagtaaggcacctgatgcttacgttgaaatcattgttgactcgaaggaggaccaagcgaagaaaacgagtgttaagaagaaaacgaattccccgcattgggacgagtcattcactctgaatgtcactgagaattcggtcattgagttcaaaattttctgcaaggccaaagtgttcgatgattctttgctggcttctaaatcttttaagatgtcgaattggttgcgaaaggagtccaacaacggaaaatttgaaaatactcccgtgacggtgcctttgatttgtcgtgatgcaaaaacagaaagagagagtaaatcaggcgagctcaaattgtcccttaccggcaattttgagcggagcagaaggagaagttcgggattacgtgcaaactcgtcgactccgtcaactgccgaatcagccgtcgtcgaatctgccgcgggtccgtctacctcc

SEQ ID NO: 93731 - DNA, 639 bp, Heterodera glycines
gccactctaagctcttctcaaattctctcttctgatttgcgtctgccctttataaggaaaagcgttggattgactggagcagtcggcctcggcacagaattggatttggccatgggaaggagacaaaaaaggcggaaaatgagtcggacgaagaccaaataggggacacgaagcaaaagggggccgaatttgggttggaggcgcggaaacgaacaggcagagaaatggcactttcattgagacgtcatcttcggcacaacgccgagcggtggcgtcgcgcgcgcgacccggccgaattggtgcgcgaggagcctttgccgaccctttcgctgtttccgcagctgctgatcagccgccgccccttcgacatttcacggcgtttaaagccaatgcatcgacatccgctgctctctttaagacgcccaattctctcagagcaacagttgtccaagcggaagctgattctgaacattcaattcgccagtttcatcccaaaacgtttcgttaatggcggcccttcccaaattttcttgcacttttcgacaaagagactttggcgatggaaatgggcagagagaaagaggacgagggggaggagggcgactgtttggaggtggacatgttcgacgtggaagtacg

SEQ ID NO: 93732 - DNA, 296 bp, Heterodera glycines
ggtccatatagagggcaattgggtaggaaaatgggcgaagagacggcctaaaatgccggaggcattgtcctttgggccaatctttcgggacaggtaagtgcaagtaaattgtgggcgggggtggcaaatggagcggcaaaaatgggagggagagagtgtgggagagagagggggagagggcgtaagtgacgggagagaagggccgtgtaggaagcggagctcagttagcgcttcttttcttctttttttttgctagtgatactcgggaacggactctcgacaaaagcggagggatt

SEQ ID NO: 93733 - DNA, 544 bp, Heterodera glycines
gttaacgcttgtccatgggtcgcccctcctttcctctcaacggcatttctttgctttttcttcttccaattttcgccttcccttcggcgtttggttggcatttcggaactttggacagatttgatccgaattccgtcgacaatcggcgtctgtacgttctgaaaaagtccgagtcgccacaatgggaggatttgggctgggcctggggaaaacgttcacttccaaattcggaaaagtcggcacagagcagcgcaaattgggacgatttgggctgggcgtggggaaagcgatcgtcggccggcggaggaggcgaagcgatgaggagggcaaaagcgcacgggactgacccaattttgtcggtagtcgccaatcgggttgttcgttcgatgagcaaacagagcccggactggcacgacttgggctgggcttggggacggaggaagtgagtgaggagatgaacagacaacggcgtgaagaatgaaatgatggatggtcggatgaaaagacacaaagaggaggagaagagaagggacgaaacggaaga

SEQ ID NO: 93734 - DNA, 314 bp, Heterodera glycines
gtacccatttgccaaagttggtgatcggtcgttgatttttggtatcctctttccaaattagctgaaaagctagtggggtaggggggatagggcatctgagcgccaattcaccgcagacatctcaccaccgccacttcagcgccagccaactgagcgccgccatttcagcgccgccatctgagcgccaagcaaatttgagtaccgactaactgagtaccggcgactcaaattttgcaccaaaaaaggcattgtttgcgcaaaatcggatagtttcaacagcaaactcctatttcactccaaatggctcgcctttt

SEQ ID NO: 93735 - DNA, 275 bp, Heterodera glycines
catggcccttaccgcaagggcacacaaaacaatgaacacggccacttatcttcaccaacatcagcacaaccaacaacaacagttgaacaactgcagcaacaaccgcggggcaacacaggaggcaagggcacaacttttgtagaggaggacgggcaaaggcacggaaatgatgaaggacagacaattcaatgctttatattttcttttttttaatatttattcattttaataagcattttgtaaatttatttcaattgtttttatttttcggtcga

SEQ ID NO: 93736 - DNA, 564 bp, Heterodera glycines
gacactttaaaaaatcgatttttttgtttcataaatatttttttcacctagagctctaaagcgcaccaaattccctcggaatactgtaatttggtgacactcaattttcgacctttgcctttgccttaccatttggagaagacgcaaatttaattttcaaccacaacaaagtgtacacaattattgtgccgcccatcactccgttgttcaaaattgtgatgataaaattgtttccacctcccgccacaacatcaattgaggagcacaaaagtaatctaaaattaaaattaaaatattaaataaaaataaatcggcgcctttccggtgcgttgaacccaacagataagcattggtaaatactgaacggtgcatggagaagcacagaaaatatgcaagtccaaaaagcatatttgcgttggttgcgactccttgacctgagaattttttttcacttaaaattgataataattagtcaattatctaattgattaccaaattgggaagagcacagcgacgtaccgttcgatgccgagaaaaagcatcataaagatggaagtccgattg

SEQ ID NO: 93737 - DNA, 622 bp, Heterodera glycines
caaagcaacaacaattataacaacagtaacaacaacaaactttaacagtaccaacagcagcagacaccgcaacagcagacaaatactgtaaatacagtaacaacagcggtgacaacgactacgatgatggagggcgacgcgtggttgatgagcacagtgcaagcggaggacaaactgttacaagcgcacacgaacagggaaaaagtgttttccattctgaagacattgcgcgacagacacttggacttcagtggatcagcaacaacaaaacagctggtcaaagtgagcagagaagggaagggtcagatcaggtcaaaaagagatgagcaacaatgaatgataggcaaaagattaccaatacaaaccaaaggggggaaaggaatgaaccaattttgggtcgagaatttaaattgaaattattggcacaaagcaaataattaataaccattattatgcattatttaacataattgtcaggtgctcgtgctgtatgagtgcgaaaaacattatgccaaccatgaatggaacggtaacatttttaaaccttttgaaaacgtacaggcaaatggtattttcagatttctgtcttggcgaccgaatcattggcattcttctgcaaatg

SEQ ID NO: 93738 - DNA, 553 bp, Heterodera glycines
aatgtctttacttttgcacgagaccgatggtgccacatcagtgaatcctcagtgcctggggtagtttttttgccgggtcctggcaagcagctggtcactgtttgtgcaaaatacatcaaattctaccgacggaacccattttttgtgccaccggcggatggtttcgatggtcaaccaccaacagtccgtttggaatgccttctttccttcactctgatggcacctgtgcgcagtttggctgttgtgcgattaaaatcaacacctttcgttgcaccacggcattttgcccaattctccgggcaacaccaatgccatggaaattgaattgttgtgcacaaaattgccaaggcgttcgtccgtccaatgccatgccgtcgttgtcccgtcaattggcgaaatgtgagaaattgcgcaaaatttgtcacgcacaacaaattcaaacacgcgcaccggcagcgccatcacacacagacagagcagaaagaagcaaaagttgcggaacagctgaacaaatgtcgagaccattcccgaaactcgggctgtccatcggacg

SEQ ID NO: 93739 - DNA, 772 bp, Heterodera glycines
ggaaattcattgaactgttcatcacaccatggccaacggacaaacagcaacctttgcgatggccatcgaccttggctccgagttcatgaagatggcattgatcaaaccgggcgtgcccatggagacggtgctgaaccgggactcgcaacgcaaaacgccaatggcactgaccatccgggacggggagcgcttcctgggcgacgcggcgctgaaaaagttgcttgtccgtccgaagaacaccttcatattctttttggatttggtcggcaaacagtttgacgacccgacggtgactgcattccgcaacgaattcccatatttgcgcctcaaagcgcaccccaaacgaggcaccgttcagtttgagacggatgttggtgacatgtcgttggagtgtgcgttggccatgctgttgtggaatgcgcgtcaagatgtggatgcatatgctgaacaacctgtgcgcgacgtcgtgatcacagtgccctcctattttggtcagatggagcgtgcggcggttgaaacggcggccaaaattgcggatttgaatctgttgcaattgctcggctccggcaccgccgccggactcaactacggcgtgtttcggcacaaagaaatcactgaaaaaccacagaccttgcttatctacgatgtgggttcaaccaagaccctggtgaccattggcccatttcttctcgtcaaccattcccatgagggtggcagcagttatccgcaggtggagaccctcggagtgggtatgaccgtgcgcttggcgggc

SEQ ID NO: 93740 - DNA, 651 bp, Heterodera glycines
gtagcgcgtgttaggtaggactcatgccaaagtatttttggctcaattcctctttatgaatccaatcgccttttatgagtccagaacagggacgggcgaaacttcgaaaacttcgggttttttgggcttcgaacctcgtgcttcgaaaaaaaattgtgcttcgccttcggcttcgagtgctaattgtaaaacgagcttcgtccatccctggtccaatattttatgagtccaataaattgacaatacttggtttttatacaataactttgttcattcatgttcgaacaaaccctatctttttggtatcattcgaatgcaaaaagtctaaagaagcgaaaatatataaaattctcagcgtttaggcaattgccaaaaaagatttgattaattaattaattgctgattatttttgttcgtaagttttttttttaatgttagaattctctggttttttctcgtattattacattattcagactttgtgctttcgaatgataccaaaaatattttgggtttgttcgatcatgaacaaagttattgtatgaaaaccaggtattatcaattgattagactcataaaatatctttggactcataaaagtcgattagacctagagctggtattttcatgcaaaagctcaaactcttctga

SEQ ID NO: 93741 - DNA, 611 bp, Heterodera glycines
agtgagtgccgctaaaaccaaaaaccaataaaatacctaatagtgaaggtcccatggactgatgagaagctccatgaccgagttcggagtacgaccattttcatttgttcttattttcggaaattggtgaaccagggttcgtatttggtggatggaacgttacctaaacaaaccaacaggaaaagccgactatttgcccgtctttctgtcccaatccgcgcgtctttacgatgaaaaagttcttcgagttgatactgtaatgcttttgtactttccaattaacagtaagtcttcccttaggcacttttgaacgtttctccgccggataagcatggttctgttacattttttaaatttttgctgatttatgatgatgatgacaactaataggttactgctcacttggcgttagtgtcgacatgtccaggtcactcatttgccgcccaattcactaaatttggcaaatgtttcccttcagtgccgccgctcgaaacgcgaaaagagtcattgcttccatcaacaaaacgcacccgcgcaccttcggagacgccgaaattcacatttcccaaattgacgcgcttgtccacccggaaacaccgatttatgagttg

SEQ ID NO: 93742 - DNA, 554 bp, Heterodera glycines
ccttcgtatattttgcgagttaaaaaggaattgaccctttgtgtccttttgttggaacgcgcatggaatgatgcggatcaaacgcatggtcaatttgtacttcggcgacttgagggacatgccgaaatcttcgaggaggaatacgaaggcggtgttccggaggaattgcgcgactttttccgctcgccaatgtttttgctcagtgaacgcgctgcgtccacagaagaacccttggcgagtgaagcggcgcgtccgtctgaaaatgaacggcagcggaaggcggcggtgatcgcctgtcattatcaggtccaaatcttcttcaacgatttgattgtttgtgcctctgatcccgtgccgctccattggccttcgttttgtgtcccatttgcccgaattttcgatttacgtgtgtttgaaagacccgagaagattcgaattcgcctgatggagcgtctgtcacgaatggcaaaatggcaggaaattggggaagttttcttgcctttgttagctgaccataaaaccggcacttctgctgacgataatcgtaaggaaga

SEQ ID NO: 93743 - DNA, 544 bp, Heterodera glycines
gcttttgcatggagagacggcgaagtggaaaagttttgcgccgttccctctttctgggccgtgcccatttgctcctctcgctgacaatttcctccgtttttgtcggcctttttctcggattcgctcttcgcattttccaactttcccctgaaaccgttcgtctcgtcaattttcccggcgaaattttcatgcaagtgttgaaaatgatgattttgccgttgatcttttcgtcgctcgtctccgctctcgcccaaatggacgcgcgtgagtcgggtcaaatgagtctgttgaccgtcggttactacgtcatcaccacgcttttcgccaccgtgacgggtgttctgctggtgatggccatccatcccggcgacccgtccatcaagcaggacttggcctatttggaggtgcagcacacgcccatttcgccgctggacacttttctcgacgtcgttcgcaatatgttccccgaaaatgtcgtccaagcgaccctccaaagagcacagacaaaatattttgccccgagaagaaacgcacagcaaaaaac

SEQ ID NO: 93744 - DNA, 473 bp, Heterodera glycines
cgtccggctgtctcatctgttccgttgataatatcatcgcaggactccccgtcgaggccactgaacagtttggctcgttgctgctcccttatatgatggatttgctaatttgtaacactgatcagccgttcgcttcgctgcaatgtcgcgacgaaatcaaacgggcgataatcacttcagatgggcaattaacacccggctacaaatacattgacgagcttagattggagcagagacggtctgcgcacaaatcgcgtgttgtggctgttagttcaaagcgtgtgctgcttcttggcgccggaatggtgtccgaccccttggccaaatattatttttctcgatcgaatgtccaattgaccgtggccagcgattcgtcaaaggaccgccagcgattggcttcgcttgggagtaacaatgagtcgggggtgggagacgggaccagagagccggaagtgatcattcgctcatttcgg

SEQ ID NO: 93745 - DNA, 532 bp, Heterodera glycines
caataagctataaatcccctcaattcactgcggtaaatgcgtcgactattcttacaagaaatggcatttctttgattgagacgcaaccgcaaattaagttgtatttgtttcacgatctcttccaccttgaccaagacccatacaaaaacataatccatgcagaatttctgggagaattgcattcaactgatgattttgtatgggagttacgaaaaaagcgccaaaaatatgcattatttcggccacggctttttgttacgttcgattcgactacaaaccgttgggttccaactcacttcgatgaccaagaaagtgttccgctcccctcgacgagccaagccacagaaactgttgtattccgaccccagaataagaactcattgtcagatggaattcttggaaagcctcggctaaactatggtgctgattttggcgacggaccgaagaattttcagccgtccaacagagaaaatgaaaagcaaaaatccttcgtggcgcccgtggaaaatcgggcgcgtacctgggctccgaa

SEQ ID NO: 93746 - DNA, 519 bp, Heterodera glycines
tggtgtctctgactcagtcacacgttgttccttgtcttcgatggcattccttatacggggcaaaaagtgcttgatggttgcatttacgcatacaatgcgtttgtttcttcaatgcattggctctttactaagcttgcaaacactgttttctttgtgtgggaaagtgttgtcaatctctgctgctctgttgttgaccaaactggacgtacaatttcctttgtgagggacagtgctgttaatgtcacacggtttaccatggagaaaattggcagtgccattttctttatgtggaacaatgctgctcatctcttccaatctggctttgaaaaaattggcaatgccattttctttgtgtggcataatgctgctcatctcttccgatctggcttcgaaaaaattggcagtgccattttctttgtgtgtgacaatgttgctcatctgttccaatctggctttgcaaaaattgggaacgcttttattttcgtgagagataactttacaaatttgttttggaaaacg

SEQ ID NO: 93747 - DNA, 828 bp, Heterodera glycines
aatgccattcctacagcgccggccattgcaacaaatgacgtaaatctctagaagaaatttatgggcgcggagtccgagtcggaaggcgaagagtccgagtggggtactgagtcggacgaatcgtcatccgcttccgatttggaaccattggagggcaaggaaatggaggagcttcgacgctatttcttaaagaaggacaaaacggacagaggcaaaacaaaggaaaagaaggaaaaggcggcacaacgcgagaaaatagcgctggagaagaagaagttggaggaggcagacgggcagaacgaggagtcttggcagaagatcacctacaaacatgacgtggccaagcccctcttcgacggccaggccgaagtgactggcgatttggtggtgaagaaacttctcgaattgggagccaaccgaggccgacgggcgaccaaccgaaaggtgtacgtgcgctacttgcaggagttgtacaaagctgcagatgaacacaatttgggcgttggactgctcgcaaaggtgctcaccgccattatcgctgcactttttgagctcaacacacgcatttccgatgcaatggaattcaattcgtggatgaagactgtcgaaacggtggatggattgtttagccttttgtccgaacatccaaatgttatcatttccatttcgactaatgaagacgaagaaaacattttggatcagtcaaaaccgttttgtttccatggttctgtcattttgatgggaaaacgattggatgatgagctgactaaaatttaccaaagcaccgattgtcaccgctccgaatacctcgaaaaattgcgcggtgaa

SEQ ID NO: 93748 - DNA, 576 bp, Heterodera glycines
gcgtcgtcaccgtgctgcggtgatgaaggagccgcgttcacgtgccttaaggggtgccaccccagcatccaatttgcacactgtcactcacgctgcctgactacattggaccgttgccttgcatcagtgcgcaggctgacatgcaacgtggtgacaagcagcagccaccggacggcggtgcaccacgcgtgccgtcagtaagcgaacgttacgcagaggcgctgcatgcaaacctggccgaggcatacccaaacgtgccgcttgaactggtggctaaacgaatcggcggagactgggctcgtctcgcccgtgtgctcggccttcaccccgacgacatccgccaaattcggaaggaattcaatgcgggcggaggacaggagccaatggcggcactgaaaatttggctttggctaaaggcaattcaacaacagaaacagcagcaggaagaagcaaatgtgtccgacgacttggaaaaggcattacgccaaattggccgtgacgacattgtgcatcgcatgtacggcttggacatcacgggcgccaccgcggcggacattgacgacgcatggcgtacca

SEQ ID NO: 93749 - DNA, 493 bp, Heterodera glycines
agaagtcgttatatgtactttgtaagataaattatcaaatcattcggcacgttgtaaagcttccaattcctacgccgttcatcacacgcagagtgaggaaaatgaactggaagaaattgaagaggaggaggacgcgttggtgcttcgcatggaggagatgatgatggcggaggaggaggagcacaaccgagcgcagggcggcgcggaaagggacggcggcgaggcggacgaacgcgtttcatttgcggactcagaacggttttttgatgacgacgaagtgcaaatatcgagccaaaacagcagcgagtcgggctcacttgaccacaattgctggaggggttggacacttacggattaaagagccgccatcggaatgcacgatttcttgcccgatggtgatcatacgcttttgcgcgagttgatcaagcgttcaaacacaacagccgcaccgccggtgattccgcctttggtcgaattggccgcgcgaagggtc

SEQ ID NO: 93750 - DNA, 469 bp, Heterodera glycines
ccctcctcatcggctcttacgtccgccgcatatcaacgaaaaaaaattgctctgacctgcgcccaataacatgccaccactcgtctatgagggactcgctcaaccgatgcttggacatatgcataccgagatcttcgaaattatggatgatgcgaaagccggtatcaaatacattttccaaactgacaatgctctgaccttcgctgtttcgggcactggccatgccgggatggaatgtgccattttgaatctgctggagcctggccagaccattttggtgatgaaaaccgagtgagggtgcttgcggacaaagaatgtggccgatagacttggtattaaagtgcatcgattggacatacccgacggagaagtgattaatttgcacgattttgccgaggctgatgataactaccgtccccaagtggcattcgcttgtcatggagagaggtcgaacggagtcgtccatccg

SEQ ID NO: 93751 - DNA, 498 bp, Heterodera glycines
gcgatcctgtaaacctggacgagttggtggagttcgacttggccatctgctaccgtaacgtgttggacttgtccactgaagacggccattgttccgttctcttcacgcatccgctggtgtacggggacaggtacggtgtggcaaagttggctgttgctgtgatcacacattggctggaccattcgccggtggcctccaagctcaattttgttggcattgcgtgccaaagtggggacattctccagtgctacatggacttgatggctgagctggcacagcatggttgggccgactttgtggctgcacattccagcgcactgttctcctgcctggtcgactcatttgacacgggcaacaaattcgagccgtccggtgccagcaaaggggctgcagcttcactggaggatcccgctttgcgtgtccatcttgttggtgatgacccgcgacgtccaaggcgaggacaaccgaagcaattggtttcgtacgaattggggatgc

SEQ ID NO: 93752 - DNA, 469 bp, Heterodera glycines
cgttgctgctctcgagctggacaatgggtccggaatgtgcaaggccgatgtcgcgggcgatgacgctccccccccgcgggttccgtctattgtgggcgggccccgtcatcacggtgacatggtcaggatgggactgagagactcgtacgcgggagacgaagcccagtcttagcgcggtattctgactctgaagtacccgattgagcacgggatcggcaccgactgcgactgcatggacaagatctggctccacaccttctacaactagctgcgtgtcaccgccgaggaccaccaggagctgctcacagaggacccgctgaacccgaaggccaacgcagacaagatgacccaaatcatgttcgagacgttcaccacgccggccatgtacgtgtccatccacatcgtgctggcgctgtacgccgtcgggcgcagcagcggaatcggggtggacttcggcgatggtgaaacc

SEQ ID NO: 93753 - DNA, 615 bp, Heterodera glycines
tcctccgttcaaaaatgttattcaatcatcgccaaacagttcaatttccttctgttccaaaatggctccaaaaaagtgtgggcccttctcttcgcctatttcttcgcttctctgatggtcatttcgtttctctaccaaaacccgtcttcctatgacgccgctgaagagataacgaacatgacatgggcacagtttgaccaccactgtgtacgcaacggggacaaccaagtcaacgcgcagagagagtgttcacagttgaaaggaactgccatcaattggaagggcactgtccaatccgttcgcatcattgacattgacaatccctttgaaacactgctcgactatttgcccgactctgtggcgcaggcgttgcgctgcttttacgacacgacggaggaggaggggggccaaaaaagggacggactccggtacaatcgatgctcgttgacccaccacaaccactacacgtacttattggaagtcagtggcccttacggagagaagttccaaatcagcgtgaataagggacaacttttgttggctgccgcgcactcttttggtgacactttgtctctgctcggcgagggcgacattgtccgttttgtggcctttttc

SEQ ID NO: 93754 - DNA, 274 bp, Heterodera glycines
cccccgcctctgggggggggggggtgccaaaatatgggggcggggggaaaaaaaaaataaaaaaaactcccgccggaaaaagggggcggggaaatggccgaaaataccggccgcgtggacccggggaaagtgaaaaaaaagggggggggggggggaaaaaaaaatatgggaagggggagggttttaattttcccccctccccaaagggggaaggggtccgcccctaaaaaaaaagaccccgggggggggggggaaaaaaaaaaataaggggggg

SEQ ID NO: 93755 - DNA, 493 bp, Heterodera glycines
ctgtttcgttcagtgtcaccctgtccacggaccggaacagtgccgaacctgaaaggcggttcggttccgcgtccgcgcggcgcccgattcgttcgttggactgctcgcggtggaccaaagcgtcctgttgctcaagtccggcaacgacatcagcaaggagttggtggagcaagacgtggaggagtacgacaccaccagcgacagcggagcgcacgtgtggaccggcatgcggcggcgaatgatcggcggagggcgcaagcgcagatcatcttggtacccgtggtggggcgttggcggcaaagatgcaagcaccgtattcgagaatgccggcctcgtggggctcactgatttcttcctgtacaaagagcccgagccgatcagggactggcgcttccgtcccatgtacatgcacatgcggaccgattttgccggcggcgaggagcgcaagctgaaggagcagccccggagtgccgggcccgcccatgccgcttca

SEQ ID NO: 93756 - DNA, 421 bp, Heterodera glycines
cgactctttaacagagaccacaattcaggcggacatttattcgttcgctttcaacgctcttgagatggccaccacgggtgcactgcaaagtggctgtttcaacggtgctcctccgtccagcatggcatcgtccgccagcgtcgccccaccctccgccgcctctttcgcgtcgcttccgcttcatgcgacggctgtgcctttgccttcatccgatcgggacagaggagcggtgaccgaaaatgaaccaccaaatggcaccggttgttccctggcgtccgcagcctcgaccggtacactgcaggcgacggtcagcaactggccaaccgcgactgtatcagctgtgacatcattaccgcaatcagcagtatgctctcacgtggtcacccaggagatggtgcacaaggcgctcaactcgttggac

SEQ ID NO: 93757 - DNA, 340 bp, Heterodera glycines
cgaattggacccttacgacgacttggaccatttttactgtggcatggaagatgcaaattcacgcaatttggacttggtcaaagaatggtgacagacggtactcaatgtgaacatggaaaagctcttcgtgattatgctaatggcactgattttcacggcccgcaaagacttaaaaggcgctttgcaattggtcatcaacgccctctccgattttcccacacattatggactgttggagctgatgcttaaagtggaagtctaatacggacgggtggaggaggtgttgcaaacgtaccacaatttggtctatttttggcgcataacacatgctccggcggaa

SEQ ID NO: 93758 - DNA, 487 bp, Heterodera glycines
ggtccgctctttgttcgacatttgtctggcctgcgattgacagagtagtttggggtacaatgccgacctttctcttctcccctgctactgtaaacaacgcttgatggagcttttcgcatcccatgagcaattacactccgaacagtgctttgggcttatgttacggccaatggctggtcggaatttgactcgcctctgcttttacctcaacgaccacttgaatgattcgagcttggaagctttggtcacctttatcctgaaccatcccatcatctcgatcgtcaaatgcccccgggtcactgatacgggaattggcaccgtcactctccgacagaataaactcggctgccttgagttaatcggaattccgctgctcagttcctatgcgactcaggctgcgaattccaaccgtctgacaaaacgccatttgagtggatgcccacagatcgcttcagaaggcaatttctacttggcggttaataatccg

SEQ ID NO: 93759 - DNA, 639 bp, Heterodera glycines
gtcccttttggctttgttccgccccagttgcgttctcgtgacttcctcctcatttttttcctcaatttgtgctttttccgcttcaatttcttctaatggcttccattccgcgacttcgaatggctcatcttctcggctttcgtcttcctccttccgtttaacatcaatcgttcgcaattcctcctcagtgaacgcttttggcgttttgaattgcaattccaccgttatggcccttccttcgtccgtcgaacattttccctcctcattttgtgttctcaatttttccgttgacactaataaagggaagtcaatgctcagtgaacccggcaaaaaatccagaaagatgccggagtcattcatcatttgagcggttggtccatagttccgttcatcgctcattcgtgccaacgccgaactctgttccggggaagaatcactgagaaacgctgagtcccgtgaacgaatgttgtcgtcgagaataagctcgggaggttgaatgtcgatcggatcgggcgaagtgccaaagccaaactctgaagacaatccgccagagtctgaacgagttaatgggcaaaggtgtcgcggatggtacgccaaattggagtcactcgcgtagtgatcgaagacggattggtcgcg

SEQ ID NO: 93760 - DNA, 604 bp, Heterodera glycines
ggcattccttgatgccaatttcaaaaactgcaccaactttcccgaaagtcctgccgactctcagagagttgcgttcggcttcgttcgagaaggaatttgcaattcccaattggccgccccttcgctttgttccttcgatggcttcgattgtcggcccaacagcagcagaaaagtgtccaccacttccttggaaagtggcggatcagcgtcgagcggcggcggaatcgccacactgtcgcgacgagcactgatcacaacgagcagagacgagactcttggactgagtgggaaaacggggggcgttgccggaggcgcgaaaaacattctgatcagtcgccaaaatttggtgaacagttcggcagcgtctgcagcggtggccaggggaattgcgcggaggcacgggcgactgattgagcagcaggccgaggccaacaatttggtcgtggccaagtctctttcccctcgtgttcagcaacaaccgctcgccactgtccagtcatttagcccaacaaatgtgtgccgtcctccgtggactcctcagacggaaaagcgtcggctgatcggtgtcaaagacttcgtcagtcaaaacactttcagcaaagag

SEQ ID NO: 93761 - DNA, 660 bp, Heterodera glycines
aaatcccttagagagattaaatgtacttcaaatttttaaatagttaatcctttcaagaaataattaattaaattaaatttatttttaaaaattaagaaaattgatttcctttattccttcctttttttaatttcaatttaaattccctcggggaaaaacggactcaaatttaaattgtgatgccgctggaatttattattaaaatgagtagattatattaaatttaactttaaataattttcaaacatttaatccttataagaaaagaattcattaattttaaattttttaattaaaaatatagtgtcctttattccttttcaatatttcaattccccgagggattgaatttaattggcaaaatgaaatgccaaaagggttttttaaatttattcattcaagaaattaaagctgagaaattaattttaaaaaagttttttgccctcacaatttttaaataattcagagaacttaagatcgattttcaaattttttaaaaatttatttgaaatacaaaaatcccttattgctcggactaatctttgaattgataatctaatgaattatgaataaaaaaacaatatttctattccattcataagagtgactctctctctttttttttattattttggcgttgtgttacgctgaaaatccgtc

SEQ ID NO: 93762 - DNA, 367 bp, Heterodera glycines
ataaggtgaaaacacacattttacaacccatttttggccagttgtaaaaagccccgtttttttcgttcgaacgcgtttttctcgaaattttccgcatatgactaatttttccacctggatagaaagatagagaagaccgagctctttcgaatggtaccggtctcggtgctcaactctcgatattcgcttgcggccaggtcgttttgtggttagccccccccttatttttatatatagataactagccgggcccggtagatggctgcgcaattgatggggtcggctggtaggccacacgaggggtagaagtgtgaggtgtgcaccgtcgcggttgttagcgcactagcagctcaggcgcagttgcgtg

SEQ ID NO: 93763 - DNA, 605 bp, Heterodera glycines
ccatcgcttcataaaaggaaaggccgtccacgcgacgccgtgccaattgggctgtaaggagtttttggctggtcggactgcaccaaacgctgctcaactcgccgtacattgcacatttgcactctccgaagaccatcactttgctctgcttgcggctgaccctcggcgacccctttggcattttggacgaccaaaccgtgccgcctttcactctgtccgcccagcacagtgcctgtgccccggccggcgcttacctgtcttctgtccacgccccacagactgtgctcagtgcccactctccgccagcttcgttttgtaacgtcgtgctccgattgacctcttttctgatgattatttgggacagctcgttttttcgctcgagatgatttgcggtgtggaaagcattggcccattggcggaacgtcccgaggcaattctgtgccaatttcttatcccaatgtttttgcgtgccgcaatttccggcaaagaagcgccacagttccggcccaaagacttgaacttttgtctgagtctgctccaaaatgccatttctccgccctctttggccaagcaaagcgtggcgccggcaatgagtggcagcagtt

SEQ ID NO: 93764 - DNA, 474 bp, Heterodera glycines
gtcccgtgaaaaaattgccaaaaatgtccaaaagccttacgattttcttcataaattcctctccacaacaatttccgtcctgctcctcattttgatggacttgctgaacagcttgggttcatcttcagctgctgctccattgtcctcctcctcctcgatttttaccaacccaaacagcacattggtggtggtggtcaagcagtatcagcaacaacagcagctgaacaaccatcaccacaaccatcgcaacaaccatgccgcggcagcagctgctgctgttctgttgccattcaacaacaacaacaatttgacggatgaaataacagaattggcacacgcgacagtgcggggcgacggcgatcggcattctgatcactttgctgatggcaccatcattctgttccacggtgcggctgaatggtgcccgaacgtgtcgaatgccgtcgtgtggccctcgtgcattacgctgggaga

SEQ ID NO: 93765 - DNA, 699 bp, Heterodera glycines
  unsure (1)..(699): unsure at all n locations
ggngaactcttttttcctctctgtccatgacgttggctccacgccccacctttcagggaatttgtgaacagtacagcgatgagcagtgtccaacagcactccgtgttccttcacgtttgtgtgccgggccaaaacgacggggcaccgaaattggagggggattttccttcaatggatcaaatgggcgaaagtttggtgcacgtcctgaacacgttggatgtacgaaattgcattggcattggtgagggtgctggcgccgacattctttgccgtttcgcaatggcttggccaaatcgcgtcctgggattaattctcatccattgcttggcaacaccgcatggcatcattgatagtttcaaggaaatgcttcttaatttgcgcttggaggatgggaacatgaacagcgccgcgtgggactatcttttcctgcacaaatttggaatgcatgaaaaaatgatgaaggaggcattcatcgccgagctgagttcagtgataaacacacacaatttaagccgtttcctttacgcttacaatcgacggacgaacatatgcgaaataattggcaaaaaattggcaaataccgacgtgctccttattaccgggtcgcgcgcgccgcacaacaaaaatggtcgacatatgttcgaaaatatgcgccgtgataagagcacgttgcttgtcatcgacgaagtcatagacctc

SEQ ID NO: 93766 - DNA, 354 bp, Heterodera glycines
tcaattggcccctgccgccgtttcctctgttgccaatggccccctcccgcctgccgcccgaacttttgttcgaatttgtgcccttcgtccgtgccgaagatgccgttccgaatgcgttctcgtgctgtcgactgtttcacaaccttttgcttcaacgtgtcgaccagtggagagaaataaacgagatgccataagaacagaataaagaattgacggaagagaacaaacgattgaaggccattattgaagagctgaaggctggaaaactttttgctgtcactgaccagcagccccaatcatcgtcaaccgcctctgccaagtcaccatcaaagcccttccaagagaaagtgaaag

SEQ ID NO: 93767 - DNA, 410 bp, Heterodera glycines
cattgctgttcaactaattggttactaattgggtaactctgattaacctctgagactgttctactttcgccagcaatggctcccaaatgccttccgctcgaacttttgttcgaaattgtgccttttgtccatgccgaagaagccgttccgaacgtgctcttgtcctgtcggctgcttcataaccttttgcttccatgcgttgtcaaatggaaaaagagaatggcggaagagaaaaaagaagaggacttgacaaaacaatttgctgcaatgtccaaagcattgacaaaacgaatggaagcggttgaggaagaattgaaaaaatcgaccgaagaaacgaaaaaatctacctttcgaatggaagcggttgaggaagaattgaaaaaatcgaccaaacgtattgaagcggttga

SEQ ID NO: 93768 - DNA, 399 bp, Heterodera glycines
cgaagacattagttaccgactgtggtacccaatttatgagctcaacattctatatcattggcaaaaacttggggattcgaacatcaaaccacagtgccctaccatcaatcggccaacggacaagtggaacgatataaccgtaccattgtggacatgcttgtcacaagtacggaaggaaaaaattgggcggcagcgttaccattaatttgcttcgcttacaattcttcaattaactaccaaatcggcaattctcctttttatgtaatgcatggcttcgaccctagacttccaagtgaagtgacactcggaaaggtggaggataatttttcggatatggcaatatatgtgcatgagttgacaaaacgaatggaagaagttaagacaacagtaaaagaaaat

SEQ ID NO: 93769 - DNA, 350 bp, Heterodera glycines
tgccgcgagtgttatgaacaccacgccaaactgtctcagtgtaaaatcaagcgtggcaccgaagtgacaaccattgaaaaatcgatctgcaaaagctcgaaaaagtgcatcgactgtggagttatttaccaaatacgggtagcatttgatattttaaattgaaaacaaaatgcttttaagcaccacaaacaaaaggctcacgaatgcggccagaagttttgcaaagtgtgccttggctttcacgttccacgtgaatgctacatcccggaccggccaaataagaagaccgaaaagaggatcatcttcatcgactttgaatgtactacggacttcaagccggaccccgaact

SEQ ID NO: 93770 - DNA, 648 bp, Heterodera glycines
ctctgccctaaaagttaccacgtgaactgcttcagattgtactcaaactctcgacatcaactgcaagacaacttagcagtaggaacagcattttcgagcagcaaacggcaactcgttagccaacaaattgcccccggctctcaacggttgttgatcatacaatcgctggaagccgaaacggaatacgaattgaccattgaggcagaaaattctgtcggaaaaggcgaccgagtaatcattcggcaaaaaactctcgtcgaaccgccagaaccaccacaaattttccttgcccaagcaactgcgaattcgttgaaattgaaatggagtgacggtggagaaaacaacagttccatcggtgcaaacggtcacggcaattattattactatttggagagggaaaatgagaacggcacttattcgcccgtttatgaaggtgaactccgcactgcgcgactgaagggacttcgtgagcaaagtgtccaccatttccgaatccgtgcgtccgtttccaaaggccttctgctgggtccctggtcacatcgcttttctttccaaaccacaaaattgcctccgcctgcacctaaacaggcgcccatcgttgctgagcaaatgcaggaccatttccaatttgagtggaactccgtccgc

SEQ ID NO: 93771 - DNA, 746 bp, Heterodera glycines
caacataataattgcaaatgagttccattgaaattgaggcggctgatgttgttcaacttgtgcaacagtacctgaaggagaacaacttggtacgtactctacagactttgcaggacgagacgaacattactcttaacacggttgacagcatcgaccaattctgccaggacatcaccagcggtcattgggacactgtgctcaaatgcattcagccattgaagttgccggccaagaaactgattgacctttatgagcaaatcatcgtcgaattgttcgagctgcgtgagttgggctccgctcgtttaattcttcgacaaaccgatccgatggccttgctaaaacaggccgaccccgagcgttacacccaaattgagaatttgttggccaaaacatatttcgatccgcgtgaagtatatcctgaagggggctccaaagaaaagcgtcgcgcggccgttgcccaatcgctgtctgctgaagttcacgtggtgccaccatcccgacttctgtctctgttggcgcaggcactgaaatggcaacaacatcaaggacttttgccgccaggcaaccaaattgatcttttccctgggaaagcgggaattccaaaacaggaggacgaagcgtcaccgaacactttggaagggaacaatcaatttggggccaaaagtcattcccgaatcggcccgttccaccccggagggcaatatttggtcaccggaacagtggacgggtttatccgaagttggaaa

SEQ ID NO: 93772 - DNA, 396 bp, Heterodera glycines
aaaaattaaaatttttaattaaactcattaatttggatataattttaggaaaacaatggaatggtggtgcaacaacaaaaaataacgaaaaattttgctccaacaaccaaattaaatgatcaacaaaaagtgctaactcaaaaagatgatcagaggccgccgactttgtggacaatgtccagtttaaaacaaaaatttttaaaaaataaaccgattattttaactgcatttcaacaacagcaaaaaagtgaacaaaatccgccagtcaatccaaattatattcaacaaaatcagtaccagtccactaaactgtttgatcaaaatcaatcccaaacaacttctccaacactgatccaaccaattcagtatcaaccggcggttcaaaaacagctccaa

SEQ ID NO: 93773 - DNA, 535 bp, Heterodera glycines
acgacccttacccctccatttgatgtcattttctgttttgaaaaccactttgaatgatgaaaaagcatgtaagaattgccccgatagattattcgaaggttgggaatttcatgggctttgtttgggttggaattaatcgagtggcgggaaaggtcagtgattatttaaattaattgaacacattaattaattatgacaaaaaaggaaacacagccaccagcagttgaattgccaacgattaaattggatatacatatttatatgttgtttaaaacaaactatttcaacagctttctaacccatagaaatctttaatttttccattgaattgtttaagaaacaaaggcataaaaataaagaaagtataaaagaatttttggccaaaaagcagccatcaacatttttaaattgcgtataaatctcgcaaaaatgaacaaattgtttataaattagagtccggaggaactctcgactcaaattttaatttagaaaataaaaagtccacaagaaataaccaagtttgtcaggttttttg

SEQ ID NO: 93774 - DNA, 310 bp, Heterodera glycines
tgcaaatggtggcccctaaaagaccccgtgagggcgatgcctttgcccgaacactcaccgaggaacacaatgccaattcttcataagagacccaaactgcagggatgtggcagattttccaacagaactcactgccgattggcaaccgcaagtactacgaccaaaagtaaaatgcacagggaaacccccgtgcacatgccattggagaataaagcctgttgacggccaaaaagtggcggtcaaaatgttgcgtttggaggcggccgcgtttgaatgcgagcgcccatgtggcaaactgaacgttgaattc

SEQ ID NO: 93775 - DNA, 622 bp, Heterodera glycines
aaaagcgaaaatgattccaaattatgagttaaaatggcatatttggccttttaaactttgcttagtatcgatatatagattcaaatcagatcataataacaggcatgtatgttagttaaaatgacaaaaatgtgatctgaaattgttcgtttttcaaaaggcctgagaaacaaaaaaaatggaatgagttaaattaaacaataaaaataataataattaccatatggaaatgagtgaattaaaaatgtgtgtgaatgaatatttgagaacgaatttggaaaagatttggtgagaaaagtgagacaataaaaacaaaaatggcaaacaaaaaaaaaggcacgtggttttggacatcatataacacaacaaaactgtaattacgctaattagtggatgatccccgcacgaggatccgaacctcgtgtggcaaagcggaaacaactcgctgttaacaaccacttgaccacaaagtggaccagcgtttgtttttgtcatacagaaattttttggaaaaatttaacgcaaaatacaaaaaacaactgccgcgtactctctctctctctgtctccccctccctttctcgtctgcgccagccactccattttgcatgtgctctctcgtc

SEQ ID NO: 93776 - DNA, 585 bp, Heterodera glycines
gaaaaaccggttcgacactcccggatgtgaaattctctactttgacacggcctgcatcatttacgttcaccccgaggacaacgacccactcccgacaggaaaaggacatctcggtgagctgactgacgaaaagccggaccacaacattttggagttcatcagcgctggctgcaaaaactacgggctgaagttggaacgtaaggacaatgggcaaattgagtacgacttgaaaataagagggataacactggatgaacaaactgtgcaaactatccattatgacagtgtgaaagatcaaattatgcgttatggttccgatgaccccgcggaccccattattgtaacatatccccattttattcgccctaatctaatccaaggcaaagtgtacactcaatctctaactaagcattatcaacctgtcttcacaaaaggtattattaatgattcattccaagtcctcgaatttggttatcgcaaatgataagtatgcattctcaattaaattttctaaatattagttttcttatggttcccttcttttctttctctctgtttatatcactcatgtgggacggaatgacc

SEQ ID NO: 93777 - DNA, 470 bp, Heterodera glycines
gattcttaaaatttcttgttgtgtacatttcaccgattgcctttcctttaagatgtccgatgctgaaacgtccattgccgaactgcccgtacccaaattgaacggcagcaactctgccaccagcggcagtgacggcgaagtgccgtcctcgtccgcgtccaaagttatgcctccgaacactcacagtcaaccgcctcagcagcaccaccacgtcactccgtcacagcccatgccggtgccgatctcttacgcggcgagtgccgcagacttttccacgatggtcggtacgcccgagttcatccaggatttgctttacacacccaccggcagcgccaacggtggtttttccgcgccggcggcggtgttcggctccacgcccaccaacaattacgggttcggctcgttcggttcggtgtatccgccgccatcattggcagcgaatcgaccgctttcgcatcaccaacacaatg

SEQ ID NO: 93778 - DNA, 680 bp, Heterodera glycines
taacccatatagataacagtaactattgtaaaatccagttaatgacctacaagacagtattttaggccctcgtggttgtagtattgaaataggccagcaataacctgaaataagcaacattaaaactaaattccaaaaaactatacctggtctttccattttgatgtcataagccgagactcgttggagataaacaaagagccaccgtcttctactaaattatcatcgacacactaacaatggacgcaaaaggaaccgactttccctcccccatttaaccgttttggtcgtgatttccacagctacaaagaaggaggattttcagggtgactaattcctctggtttcagctgcagtttccttagcggagtggacacttcgtcaatgcaacggtcagtcatttgcctgtaaaggttctcttgacgccacttcctatcctctgttaccaaagtctgaacgaaaatgtttttttcgaatgtcgcccggtctcgccttgctttctattggcaaaacattaacactcctcggcatgcaagtgccatttgaaattagccaaacatcgtcaaggccaatttgggcagtgaaatacccatattcgagcacattgcatggcattgcaaatcttttcagcaaaatcatttgatcattcacgggaagtgaacaaaagataggcaaagtctg

SEQ ID NO: 93779 - DNA, 584 bp, Heterodera glycines
tcctccttgaatcgtcctcaatttttcggacccgctcttccagggcttgggattgctcagaaaccagctgcttcatctgcgtgaatgcggcaattgtcaaagatgcggcatctatacgagcaatcattacataacaaaaatgaacaaatgtttatttataaataataataaatgagcattacagtacctctgtccacttccgataagccgtttggcaccgaagtggacaataacttccgcttttttgatggtgaattatcaggtagtggtgatgatgatgatgataatgatgatgatgatgaaattgttcgttttaatgatgcgagggcagtttgcacaactgcaacctcaacattgccgtggcgcagaatccgatcggccatgacgtcgtgcacattttcttgttgcttcaacaaatcgaacgattcacggagaacggctggtgaaattgatgaagtcgtgtcgagcggataaggcgaaaagtgctaaaattattatcactaaaaataattaatttaattattattttcacttcgcttgccgcccatttctctaacagctctgttctcgcgccatagttgatg

SEQ ID NO: 93780 - DNA, 732 bp, Heterodera glycines
cttcttcttttagtcagctaattaaagtaccataaaaaaaaaccacggccttctttgaggaaaattaggagaggaattgccacgacacgagacaaatgacggaagcgaagaggtgattagagtaactgtaaaaacaatatacgaagttacggtatgccataaaataaattggcatttgctttacgtgagatttgccaagaaaagcgcggccatacaaagcaaaaaaatggtcaaaaggcaagtggactcgaccagcacagcgttggctttgtattgcaaaaactgtgaaaaaaaataataaataatattttataaataatagttctattatacgttttgttccacccgtgtgtgcttgaaccgcagtgaatgcctaaaaatgatgatagtgctaggacaaaggctatgctgatggactgacgcgaatttttccagcagatcgaggagcgatctctgcagtttttgatcagtgctcgcatgccaacatcggaagcagccttctctccttctctgatggcactcatctgcacccattgtgaccttgtcttagcaaatagaattatatttagtcattttaaagagacttagatgaagcattcccaattgaaagaatttaattttatattaataattcagatttatgcatccacctgaattcgtctcggaatgcccgatcagtccattcgactggcaacaaacacactgtattgccccaaatgtccggatttcccg

SEQ ID NO: 93781 - DNA, 628 bp, Heterodera glycines
cactccaacaatcgtcaacaatgttagtctcgacccccaagtgagcgccaatttccttcacacagccatcgaagagaagcgagaggatgagattatccatttgctgtgcaccatttccaaccaacagcggcaagaattggcacgcgaattcgaacaagtgttcggagaagatgtgtccgccaaactgaagaaggcactctctggcgactttgaggaactgattttggctttgttggaaccgccagctgttgacgatgcgcagaatatgcaccgcgcgatgtccggcctcggcactcgcgaatcagttctgattgagattttggtcacgcatagaaaacgacaaattgatgagatgatgcgcgtggaccagcaactgtacggccattcgctggagaaagacatcggcgaggacacccgcgggccatttcaacggatgcgcggggcgttgtggaacgattcgcgcgacgagaggtggagctctgacccgatcaaagcgaatatgacggcccgtgctcttgtcaaataaaaccaagtggaaagcgggggcaacgaaagtctgttcaaccagtggtggggcacgaaatttcattccgttgcgtttgatttcgaggagatcccaagggcagcg

SEQ ID NO: 93782 - DNA, 698 bp, Heterodera glycines
atttactgatgtccatttgatttcagttgatgttttgtgctcttaacctccaccccccccccattttttcactgttttgtccccattgcacccgcttgcccccccccgttccattttaattcaattccccccccccccttatcagtgattcgttccgtcacttttccttccgaattccttctgcctccttttttcattttattcccaaaaaatcatttgagtgcattcattttgttcattccgtgcgtccgcttctttacaattgccattattctctcctcaaaatgacaatttcgacgaatgtttcccaatttgcgctgccaaagtgtccccaattggtccgtttgtccgatgatcggccaatccctcgcctccgccggcgtttccttccctttttcctctccgatcacttccgtttcattgtgttggctttggcgatgctttgcatgacctcgatctcagccaattccctgctgttcaacttcaccgacatttgcatggacggcgatgcaaatttcaccgccaaccaaaacggccttttgatcgccggcactgccatcggcggaattttggccattggacccgtgcctcatgcaatcgccctgtttggcctaagatatgtgttcgctctgtttggactcctctccgggttggtcactttgctaatgcccgtgctgttctatatccagggcgggttt

SEQ ID NO: 93783 - DNA, 663 bp, Heterodera glycines
ctttcccttcataactcttcttcggtccctcctccttctcttcctcttcttaatattccttctcccccgtttcttccgtttccgttttgctccttcctcccctcttttttgtttattttatcttccactactttcgcctcttctgtttcgtgttccttcttccgcccctcttttccccctcttccgcgtcccctcttttctcctccccctccctccgctccatttgcccccgccccgatcacttccaattccaccgtcgcttcgttcgccctcctcgtcatccccgccccgtccctcgccttcactcgcactttggccacttctccctctgccattggccttttctatttaaggttggcccaacatcgtggccactggcactgctgagagtccaatgcgaacatttcccctttctccgccgcccctttttcgttttgcgttttctccaacgaaaagcgacaaattccgccaattcctctgtcaatgtcaatcacttccaaacggcgcagaaggaaaccgggggaagagagctgtaaaaagcgaaaaagaaggctaatggacaagaaaactgctgccggggaaaggacttcggggacgatcacttcggcggggaaagggccgccgaagaagcggggagcattgtcattgacatcgaccaattgt

SEQ ID NO: 93784 - DNA, 763 bp, Heterodera glycines
ctcatatttatctgtgcagtacgacccaaaagcgttcaaccaataatgtaataacagctcctcacgagctatctccgcgcagaccccgaccagatacccaaaggctcattacaagttcaacctggttaggagaaacctgggcagaacgacagctttataaggcagagtgcttatccgacacatcattccagaggtaccaccccaaccaccccttatctgacgagcaaagcactcgccagaccagctccactagcccaggctggcactagtaggaactgttcctccggaactacggcgtcatcagaactctccgccaaccatcatccacatcccaagtcgcccgggggcaccaggtctatctttacctgcataaaacatgcctactaacgtatacatgagtaggtattaggaaaggagttaagctttggagaaatcgaagaaataatgcacgataatttatcgcaacaactggaaaaagagatcaatatgatcaattgctgagatcatcaagatctattccggtttgttggacgaatggcgccgcaccttcttcccagacggaggggctcccccctccttttgcgcggcagacggcccatcagcgtccagctcaatggtttcggcccctttggcaatgccatcggtttcgtcccctttttgctttttgccgccgtcctccgtacctggaagtcaaagtattgcttcgccgtcaatcatgctattatctctaacccgtccccgctttctctctcttctcccgctg

SEQ ID NO: 93785 - DNA, 367 bp, Heterodera glycines
ggacgccgtctttacgaagatgcaagttatgatgatcgacaatgacaatgacatctacccgtgggacacctccgaggaattgtgtggtcccactctggaacgggtggagcgtgtctaggaggaattgcgggactcgccgaatatagtgatggcgactgataacaatttggacgatgctcatgaggacctgacggctgccaacaatttgttggaagagaaggataagactgtgcttgacgctgacgccgaactggctgcactgaaccgccccatggttctggtgcaagaggagatgcacaaactcgcggagcgccttaaacttgccaccgagaacatggaagaagctacggaccattgccacgaatcg

SEQ ID NO: 93786 - DNA, 334 bp, Heterodera glycines
ccgggctttgctaccatttaacatggcatgctgttccaaccgtgaccactactcgaagacagctttctcctcgctgggagtccatcgcacactcctcaaattccctttttgagacccccgctgagggggatctttaccagcacaatcatcgctggggcaccggtgcattgcgacacccttcccattatgacttaatgtgccggaagaaccctgtgctaaagagcacattttgggataatttctcgcaggcacagacatagcaatatgacttgaaagctcaggtatatgttgtaaaaaactttttctcatatttatctgtgcagtacgacccaaa

SEQ ID NO: 93787 - DNA, 244 bp, Heterodera glycines
ctctcatacattcttgatcaacttgatcaattgatcaaacgacgtaataccatttcccgaaccggctgaaattttttttttttttttttgctataaaagtgggccgaaccgacgaaaaaaatcattccataaaacggatcgccaaaaacaaaaaccaacaaatccctcaaaaaacaaaaatgtctcctttccgcttcctgatgatgttgctggttgcgctggtcgctgccatggccatgggcag

SEQ ID NO: 93788 - DNA, 706 bp, Heterodera glycines
gtttgctgtaattaaatgcaatctgcagctgttcatttttctgctaccgtagatggtgaaattcccgatgcgccattagcacaagttgacgaattggaaatggttgagggcagtttcgctgctttctcttcgtcactgaccgatatttcagcgggagattgtgagaagtcgcagtcagacgagggccctggcgaagatttgtcgaattgttctgtcaatttgtcttcgtcgctgcaagacttagtcgagtcttttgacgacaaagtcgcagtcgttctgaaggacttcgaaaaagatgctgaaaaaatagcgccaattaaaattcgttctcaggaagaaataatgtctgaaagccaattttggtggactttgactggcaattatggaaatttgccgccgattgacttcgataattcgcaaatccgaaggaaacaattggaagcactgaatttcaattctccgaaagtcatttcgcctgtctttacactaataaattgttttttgtttttttttgttcttagcagggaacgccgaccgatcgaagtgtcgtctccgactgcgactcgtcggaggacaccgaacgaatcgactttcaccgactcgcaactgcgcaaacacacaacgaaaacggcgaatccctttcctttaacgccgacaaagtcatcgaggaaattgatgagattttacaggccggcgatttgatgaa

SEQ ID NO: 93789 - DNA, 724 bp, Heterodera glycines
ctcaacctgtccccccaatttcgccatcaaattcccttgcttttctttctgttattgacttttttcgcctctgcaaatggcacttcgaaatgcgtttgggtccgcggcgcactccaatgccatcgcgacccgagcaaacatcagaatgtggaagtacgggtcattgaccgggacggatggggcccgttgaaggtgttggaccctgacgacatgatgggcgtgtcttttactgagcaggacggcacctttcagctcgacggttgtggcaacgacatgaacttcctcccgggcgtgcccaatttgcccgaccctttcgttcgcattttgcatttctgcaacagcgaagaaggcgaaaccatcgaattgcccgaattccgaatttttgtgccggacacttatgacttgggcatcctcgtgttggaccagaagactttgcccaattccaccgttaatttccccgtgcccgagaacccccgtcgacgcctgcagcaggcaaaaagaccgacggaagtcggcactttggacgaaagcaatggcaaaaagggggcggaagatgggtttgtgactgtcgacgcgccaaaaagtcacaacgccaaaggcctggacgaccttttgccgcccggcaaaacggtgaccaaaacgaacggcgatttgttgtgggagacgcaatcggtggagatggaggaagtgccggccgaatacgacacgtcgatacggcaaagtc

SEQ ID NO: 93790 - DNA, 608 bp, Heterodera glycines
tccttttggcttatttctatattttgcaccactaattttaaacttcgcgcggacatcgaccggcatccacgacaacatcgtcgagcagtgcggctgctacttcgtcgtcttcaagcagtaacaatttccaacagcagcaaacgccgaggagaggcaacagaacgttgggatggtatttgggcgacaaactcagcggaagcagtcccaatgaaggggacagcagcggaggaggaggagcacttccgccgcgttgtttgttttccacaaaatgtcttcgtcagtttaatcctccatttttttgtgccaatgccttgcaattgtcagccgattccgccgccgccgccctttgatgtcccccctccccccgacccatcgtttgtgttccatttgctgagtgacgacccgcccgaggcatttgaaaagcttcatctcctccactcgtgccctcttcaaaaacagcttttcttcttccgttatccgttcggtcgttttcttccgttcgccacagtcgctgcttttctgctgctcacttccttctcagtcacggcctttgttttttggaggaaacggcggaggacgcgaagaatggaagagagggaggaggaaga

SEQ ID NO: 93791 - DNA, 699 bp, Heterodera glycines
caacaccgtaaaaagcaaaaacccatcattggggtgggacagcaacagcttgtgaaaggaacacgaggcagaaagcggaagaagcctttgccggagaatgtgcgttcttccgtccttggcggtgtgccattcactgctttgggcactcaacttgagcgagatgtgtacgaaacggtggatattctcgttggtttcgtcgctgcaaaaatggacagcagtagcagcagcggggcacctgctgacgataatttacttgttcagaaaatcctgtcacaacaaaataataccaacaacggcataaatgccattgcccaacaatgtccagggaaggtcaaaaagaggcgacaaatttagaccaaaacacgcagtcagcccgacactaccaacgaattggacttgattcaggagcgcatcaaaaaaacggttgagttgataccaccgatcaacaactacatggagcagtaccaggcaaatgacaagcagatgatgaagtatccggatcagtccgctctccctgaccacgaggggtcggagccgcctttgcatggcaatgcgaccggcgaatacacattgccgttcatgcccgattattacgacgaattggaaacggtgcgcgaatacgtcgacgaggagacccttttgccgccaacaatgggcgaaatttgttggaacgtcgatttggacgcattggcaaaagac

SEQ ID NO: 93792 - DNA, 770 bp, Heterodera glycines
ccctaaaaaatcgatttttttcataaaatgatatatcaaaaattaatttgtaaaatattcaaatgtgattctaagcctattttggtcatttttatggcattttgtgcctatttcactttttacgaagaattttttttccaaaaaacagcatttaaaaaattatatttacatattttcctacatatttgaggatttttgtacatatttcataaacatatttcagtgttttttatacatattttatttacatatttcgcgatttttcttacataaataaatgatccctatttaatacaataaaaaaattttgctcacaattttcctcaaagttcgtttctttttatagtaaatgatttcatttaactaaaagaagcaacaaataaacgcgacgagcgattatcagctcaattaaaattcacaatgatcgatcagaatttctcatttcccaacaattcattcactctttcttctgttgctgtccgctgggcccgggattcattttcagacgattttttgtgttcttttggcccgactttggtggagacattcgcctaaatgaaataaaatgtttaaatttgatttttaaagcaaaaactgtttctctcatcagactcacccaatacagtatttgccattaagaggccagaaattgatattgctgaaattattcgtctttttgtcctcccaccgaaccgtcgccccaatttggcatcgcttcaccaccacgatatagtcatcttcgtcttctttctccatgttttcatcaccgt

SEQ ID NO: 93793 - DNA, 464 bp, Heterodera glycines
agatgacatttaaaaaaaacaacaataggcttggagagcccttgaagacctgcaccggatgcaagtgccgccgttgctgtacgcttagcggttgctgtgcaatgacggaaaattgctaaatcagaaaaaaccaaatattatcaggaatacactctcccatctcacccgtagacaaaccgaatggtatatgttcgaacggcaagttgactaccgtacctaattaatatttttgggatgccaattgttaagtgcgtaactgatatgaaaaaagggtacgaaaaactgtgataaccccattcagagactagctaaaaaaatcagaataggattggatttgcgtaccaattattatttttataatgggtttgttaaatgcgaaacagatgacaaaagttgttataactccattcagagatgagatagaaaaaaaacaacaataggcttggagagcccttgaagagctg

SEQ ID NO: 93794 - DNA, 756 bp, Heterodera glycines
aacatcccttgaagtgatcatggaggagggatcagcatctcttccgactcttcctcaattgctgatcgttttgcagagcatgttcaaaatatcggaagcacttcggtctccacggggccactgggcacaagcggtggcggatctaacgctgcgtcatcgatgttcagcgatgccacaacggcacttcaatcccaaattgagtctttttcgtccgttgcctctgcttttcgtcgtcagttttccacctcttccacttccgccaaccaatcaataattcccaacacgggagcctctcgtgccgatgcttttgcagccatccgtgccgccattgagcgaagtgaaaacataatcccttcgttaccaatcgatgtgatcatcggatcatctcctgtcaatgaagggcgaaatcatcgatggcgacaagccctactggacgaattcaatgcttttattccgccttcaatgggcagtcaaagtgatggacgacagcgaagcaacgaagaaggaaattgtggacgagcggctcgaacaatggcaaataaaacggcgatacaacccggtggttggaatgacgattttgtgcttcgtcgtcagttcggggcactcatcccagccttcgaccctcgccccggtcgaaccaatgtcaatcagacacaagatgttaaattgccggacagtattcaattctgtacatacagacgcaaagggtcgttgattagagaggagcctaaaggagggggaacttcttccactgcc

SEQ ID NO: 93795 - DNA, 568 bp, Heterodera glycines
gtcggactgttggcctccgcacccttccatcatcatcagcagggaatgcccattggtgtcgcatatccctacggcatcgccggcggcaatgccaacattgtgcagcagcagaacacggacaacgcacacgcgaatgttgtggaccaattcggacaacaacagcaacagctaatgttctcccccttggaacatcaccaacatacttcggcatttgcacctccgactttggcatccgcttctcttctgctggactcggctgtgagtgtcggactggcggggcacggcacaacgacgacattgatggaagcagcgaacaatgcttttgttgcaaatgattcgttgcttcgcggtcagtcgaccctcggcgcttttttgggcactgatgcgcaacaattttttgtgttctttgtgcggtcgtaaatttcgcaaagagtcggaactgtctctgcacaagcaaacacattttatcgaaccaaatgcggcggtggcgcgtcaaaagggcgcgggcggcgcctttaaatgcagcgattgcttctgcgtcgtgcgatcgaaaggacttttggcacgc

SEQ ID NO: 93796 - DNA, 531 bp, Heterodera glycines
  unsure (1)..(531): unsure at all n locations
cttgcttattgcatgccctcctcaatgccggacacattggctccccttccctgccattggtcgctgtgaaaacgcagaagccgatgggccaaataaaagttgactatttgttggcaacctcagtggactgggaagaggaggaggaggaaaagcatgccacgagaatggagacgacctttgtgaagcattggaagaagcgacgcactttggaggtgggccaccgcggcagcggcgaatctttcacaaaattcgcaaccgcgcgggaaaacacaattttctcgctgaataacgccgcccaaaggggcgccgacttcgtcgagttcgacgtgcagctgagccgcgaccgatcggtggttgttttccacgattttcacgtgctcgtctctgtggcaacgcgaaacgcgcaacttttgggacatccgtcggcggaagagacgaaaaatgccacggcaaagcccggctcaaagtcggagaccaaanntttgagtgagaggacagaagcggcgacggacggnggcggcgaactgcaca

SEQ ID NO: 93797 - DNA, 811 bp, Heterodera glycines
cacaacagtgactatctgcaaattagcgaataaaatgaatattccaacttctatcgagatgggcgtttttccctttgttcaacaaactgatttatgcgactccgaggaaattgtggagacgtccgcgtttgggtcggttaaagtgaacattttcgggaattctgagcgttatccaattgttacctttcacgacattgggctgaatgcgatcgccaattttgagaatttctttcaattccaaactttttctaaactgacggaacagttttgtgtctacaatataaatgcaccaggacaagaattagacgcaaggaagttgccagaaaatttccattatccgacaatggatggtcttgctaacattgttggcgatgtcgtctcacattttggtttcaagtcgtttattggcattggagttggtgcaggtgccaatgtattgcttcgtttcgctatgagtcatcagaatctgttggatgccctccttctgatcaacgccacctcccaaaaggcggggtgggtcgaatgggcctaccaaagatggaatgtgaactctctgcgctcggaacggatgactcgctttacagtcgactatttaatgtggcatcacttcggtaagtatttcgaggagtgcaatccggacattgtgcagcagtaccgcgactatttctactcccatccgaacccatcgaatttggcactttacattgaaacatttctcaaccgaaacgaattgagcctgcgtgatccaaaaagcacttcggattttctgctcaaagtgcctgttttgcaaatcgtcggcatcaattcggct

SEQ ID NO: 93798 - DNA, 199 bp, Heterodera glycines
  unsure (1)..(199): unsure at all n locations
tgtggctgaagtcttgaaacaatcccaagagaagaagcgcaatttccgagaaacgattgaatttgcaattgctctgaaaaactacgaccccacagaggancagcgtttcagtggaactgttagactgaagcacatcccttcgtccgaaaacaaaggttggcttcttggcgacccaaaactttgggacgaaggcaatgcc

SEQ ID NO: 93799 - DNA, 793 bp, Heterodera glycines
atcaacggatacgcgtcgaacaaactcagcgtcagattcgttttctcgtcgttgggaaggcgtacaaatgggcccacaacttggcgaacaaaccaatgccaaccgctgtatttcacctatttatgtataaatgaatatttaactcaaataaatgttctgttcccacgcttcaccttctccatgtactgcttcgcctcgtcgtttagcattccgttgaattttgcccaccgttttttgatctgtgcccacgcgtcttcgagcagttcagccgttttaggcgccttttttttcagctcacgccaaacttggtcgccgctttccatgcgttcggcgccggcgtataattcgacgatggcgccgccttcacttgtcattgctttgatcagtttgagtaacaaatctttgggcaatagagctggaaaaaattgtttcgccaaaaccaggaaagacaattcgtttaacacctcgaaaatgttcagggagccaattagcgataaattgtgtcacattttcgggcttaattagatcagccaaattaccctcctctcctaaattgcaatatttgaattattttacataaataggagggaatgctaatttttgactaaattctcacccatttgcttttgtatctcttctgcccatccgtccttaatccccgctgagaatgcgtccgcgtggctttggaattgctttcggatgtgctcgtccacctcggggtcgtgcccatccaacggaatttcatcacaacgaattggcggaattgcgagcagaaacagaaaaataaataata

SEQ ID NO: 93800 - DNA, 666 bp, Heterodera glycines
gcgagcccttcattgtcgtgcatctaaacaattttgaaaaatcaacaatccaaacaaaaaataaatgacgaaagtaggggagcagctcgtccctcgcgccgaaaaatttcaaaaaatttactaacttacaattcgaactatttttcaaaaaaatgttttcccaaaaaatcgtatccttttcgaaaacatgcaaaagtaccatttggacgatgtaagcgagcgcatgttgcggatctttttgcgccatcggagtgtaacagatggaaatccattcgcgcaggatgttctccactttgctctgcagaatttggtcctcggttcggacgcccaattcgttgcctggcgccggacagaaggcgccgcggccttcagagaaaatgccgggcggaagtgccattctttcggcggtcataatgggcgcggcggaatgaccaccaatgggcggcggatgatgggaagggatgacgccatggagagtggtggtcggagtacgaacatcggtcatggacatttgactggaagggatgaacggtgtggcgagcacatttgtcggcgttcgagaagaagcagcagttggtgtgttcatcagaccaggcttggtaaactcgataaatctgtcctcgggcgcgagcggtttgaagccacagattttcctacaaaattttc

SEQ ID NO: 93801 - DNA, 487 bp, Heterodera glycines
tctttacatacttccaattctcgtctgaatgggctctccgtctttcagcggacatcaacatgttgcccggtaaattccccagcgcacttcagccgaggttttttgatctgtgcgaacaattgaccaagcaaattgtgcccactttggagccattcttgcgggaactaattgcagttgatcagaggtccattgctttgcgagtccatatcgacggcgaagtgatttcttacgaaactgagaaatgggtggcattgccggaacaacactttgggtggacggtgacacttgatgaacaacttatcccttttctatatgggctatgttcctggttaccaagcgtttttttcgttgaattgcacacatttattgtgtccactcggccgcttccggctcttactgttcctgacagtcccggcgattcataacataaaaatcacaattctgtctgatttaaagtgaccgaaaatagagcccggaaattttaaaa

SEQ ID NO: 93802 - DNA, 544 bp, Heterodera glycines
gccaactttagcgaatgatttgcgcgggttgttggcttttgttcacccttatgcccatctgtacgaaacactgaacgtcgaattcctttccgcgcgagtgttcgagcgaattgatgccgagtggctgtcgttcttgtgccgcttggacagtgcccagttgaacatggtgcccgtagagttcgagcagtacccggattgtcccgcatcactcaaacacttttttgcctccgctcggcgcttttcactgctggataaatacagcactccgtttgttgaccaacagcagcataacaacaaatacagtagcccggagcaattgcgaaaagtgaagcggaaaaaggcgcacgaattgggcgcgttcggcgaacttttgcgggccgaatgtgcaccacttggcattgaccgagtggtggacatcggttgcggattgggccatttgggacgagtgttacggcttaacaacgaatcgctacagctacaacagacaagcaatgacaacaacagttcactgcagctggactatgttggcattgaggcaaatccg

SEQ ID NO: 93803 - DNA, 349 bp, Heterodera glycines
ctcagccgttccctcgtgcgtcttccgagtggcagcgctctccactcctctctcgtttcggcaatctgaaaacgcagccaagaattcgtccgctgctgttccttggtgcgcgttcggttgaactgagcattttttgagaaccgttcggcttatcaccgacgagttggacgacggcacggtcactttgctggcggaacgacccgcgcgccggcactacgcgcatacattgggtcaacgaccaacaaaaccatgcagtggcagtgaacaggatctgacggttgagcatcatctattccgttcgtctacggtggcgcccgtccaaactgttgctgtctgttgttgaccgatt

SEQ ID NO: 93804 - DNA, 698 bp, Heterodera glycines
agaccccctttaatctgttcgctcctcgcataaactcttcatcatctcctgggtaagcccaaactccctcctcaaacagggcatatgaggaaaacaattacgaggaaatcgcccgacgagttctcttctgagactgcaagttttgcctgcgtgactgaattccgatacacttccatagaatgcggccccggaaactttttggtgctcaatccattatgatcaacaaatactccctccgttttccaaaaatatgagcagcgatgtgattgaagaattgttatacttcgtttcatggtgctagaggaccagaggcggccaacgtgactggtccggacggagtgcccgtgcaggggtccaaatatgctgcagatttgagccagcgtcgacgttttgcgggtccacgacggaattatttcttccgcggaaatcgaaaccgccgtccccggcatagcgaagaagcggcaggtggcgaagtgccggtgggcgaaaagaaagaaggcgcagaaaacaatggaaaagaggctaagaaggaagaggttgcaaaggacgccaacggaggacgtggcggtgggcagcgtcgaggccggggcgttcgtttccgcgggcgccgcaacaatcgtcgaaacgtcgcgggctcaacatctggtggcacagaaaatgaaggcgaacagaaaaaagaacaaacgcagccggaggaa

SEQ ID NO: 93805 - DNA, 321 bp, Heterodera glycines
  unsure (1)..(321): unsure at all n locations
ctgaggaactgaaccattttgaacaattagtccagtccttttaaatgaaccgcccattatgggtctctgactctctctctctctctcctccccctacccttcagtctctctttccgttctctctctctctcctcctcctacccttcagtctcctttccattctctctctctctctcctccccctacccttcagtctctctttccgttctctctctctctcctcctcctacccttcagtctcctttccgntctctctctctctctctttcctgccaacgacatcgtcgtctttctgcctctgtttccccttctctttccttt

SEQ ID NO: 93806 - DNA, 758 bp, Heterodera glycines
  unsure (1)..(758): unsure at all n locations
atggcttggattgctcttttccttaatatgagcatctttttggccacaatatacagcactttcgcttgaccttgggcatcgatctcccttttgggagcatgcacacggacattgttgccgtccgttgcccgagagaaggccgtgtataattgaccatgggtaaatacttccctttccaggtcaatgccgacagtgcggattgtttgaccttgacctttttgaatggtcatagcgaatgcaggcttaattgggaattgcaaacgcgcgtattttagcccaccaggcgttttgtcctcgaagatattgtgagatctttcaaggaaaaacctcacttgaccaccaatagcattgctattgattgattacacgaccgacaaggcgatcatcgccaagttcttcgaggacaatgcgtgtgccattgatcagcacttccctatcacttttgttgataaggaggacaagaacgcttccgacctttagttgcagacagtggggaggcatcccagagtctgtgcgtctgtttaatgctgccacttcggactcgatctcatcgatgtccaatgggcgatcgtcaagaggtttgtccgtggacaaatattcccgcacttgacctggcacattcgccatcatcatttcgttgatctcgtcgcacgtatggatgttcgcggcgagtatcanacggctgagcagctcctttcattgccaaggagttgttgaaagtttggataaacaaagtttatcagctcttccctgctttt

SEQ ID NO: 93807 - DNA, 659 bp, Heterodera glycines
gccagcttttcgcaggaaagatgccgttcaagcgctacgttgagattgctcgcgtggccctcatcaactatggccccgagttcggcaagctcgtggtcatcaccgatgtgatcgaccagaaccgggctctggttgacttccccgagcaggagcgccgcgtggtgaacttcaagcgcctggcgattactgacttcaaggtggacatcaagcgccacgccgtcaagaaggacctgaagaaggccctggctgacgccgatgtggtcgccaagttcgctgcctcttcgtggggccagaagctggccaagcaggccgccaaggccgccaccaccgacttcgaccgctacaaggcgaccgtcgcgaaggcgaagaaggcccgcgccgtgcgcaaggtcctgaacggcctgaagaagaccgccgcccccaagaagaagtaaaccgcttcttgtagcatcacgcacctcttcccgggcatcaggctgggttgaattgtgagcgccaggcggcggggcgaagtggcgcggagcggccgagctggagcacggagcggctgcgagcggcgcggagcgcgccaggctggtgtaggcggcggcgggccgtcaggcggcgcgggagtctggagtcagggggcgcagcggccggagggcagcggcgcggcggct

SEQ ID NO: 93808 - DNA, 636 bp, Heterodera glycines
  unsure (1)..(636): unsure at all n locations
gatatgtnacaatttataatccattacctaaaaagttagaaaaagggttttagcatttttcgacgatggcagtcaaaaaacttatattgaagaagaattagcaagaagccttaaattaacagtgattggaagacaaaaattagaactttctggtttaggtggagtaaatttgggaaaattcgaaagcccagtagttgaatttggcttaaaagcgagagattttaatatgttaatgattggaagagcaattaaaaaagtcttaaaagaaattcccgttttggattatcaggaaataaataatcatgaattaaagaaaaataaaatttcagttccatatttactcgatgaaccaaaaattaccatcgggagcgatttttacaattattttgacattagacctattaaacatttaaattctggtttttggatcagcaattctaaaatcggtaaaattttgagtggtgatggaaaagtgacctgggccaatttttatgacaaaaaggtgaatacaaaggacgaatataacgtatcagccataaactcaagtgcaatacaatgtgaaactgaaataactgatcaaatggaattggacaaaaacaaggaattgattaaattggttagacaacacgacagttt

SEQ ID NO: 93809 - DNA, 823 bp, Heterodera glycines
cgcttccctaaatcatccatccattcattcgcaattaaatgccaatgacctttttggctaatttttattaattggccttttctttttactttatccatccatcattatctaaattatcttttttgtattattatttttattttttgatgcacaaaaattgtgtcaattccgttcatttgccaacacttttcccaaatgattggtcggaaaatgaataaaataatttgtacggaatattttatgttaatgcgaaaattgtccgatttgtccattactttccaccggaaatggcattccatcgcttcattttggcgatgattgcgatgattaggcttcccatttttgcttttcccccgcttttgcatcgcttttttgctcaatttgccaacgcttttcccagcgatcggacaaaaattgtgtgcttagggagtgttaatttgtgatgatttgtccactttttctgatgcttttcccattttccgcccctttttttgtgtgtccataaaatggcaatgaaagcgtagcaaaaatcattcatttttcattcactaattattcattcatcccatcattcagctcccttccattcttacttcatccgatcccttctcactttgtatttcatccaacacaaaaaaaggtaagtaaattaaataattagcgtttaaattaataaaaataaatagtaaataggtgattttaaaaatatttttaataataaatttttaaaaatattcgtccgctctcattccaatacaattttaaattcaaaaacaaattcagagctccaaaaatggtcctcatccgctccatgcatcttctt

SEQ ID NO: 93810 - DNA, 775 bp, Heterodera glycines
cccctcatatttgctgtgccatcgaagtgctccattccgatcgtccgcccattgcccataggcatttttcggctcaatgccttccctttgaaatgcgaagatcatttgcagggacttaaagccggccaatttgatgttcagcgacccccaaacattgcaactgatcgattttggctcggccactgagtgtccgctgcgcattttggacgcacgcgacagccgacgcattttggacgaggcggccgaactttgcacaatgccttatagagcacctgagttattcacgtgtgaaattggagcgatgattggggaaagcgtggacatttgggtgggtgccattggttttggtaaaaccaattaattagggacggaaatgccattaacgactgactactattaatcggtctattactctccccccccccaatttgccattttgcttcagtctctcggctgtgtgttgttcgccctgtgttactttcgctcgccttttgacggcgttcatgaaaggggcgacagcgtcgctttggcggtacaatcggcgaagataaacttcgacacggcggtgccgtaagttctaatctcattaagcgagcagtaataaagcctatttttgagagttgatcggcacattgccgaactgatccaatcgatggttttaatacggccctcggaaaggccgcacatatctcagattaaaaaacgggtcgaccaaatgcaaactttggatgaagtgaaggacaacgaatgaatgagtgaatgaatgcttcgctga

SEQ ID NO: 93811 - DNA, 818 bp, Heterodera glycines
cttttctcttgaagaagagttcatgaggccaatgattttggtcctttgcgtagccaattaggcccaccccaccacgaagaatgggttgagagctcttctggtgtagctcctcttgttgccagatcagccggattttcagctgttcgaacaaagtgaaacgaacactttgttatggtgcgaatttctttgattcgccgttcaatgaattttggttgggcttcttttgaagccacccaatttaaagcaatttgagaatcactccacaaataggagtgttcaattgctcggcgcaattgagtttgtatgaattttaagcctcgaattccaataagaatggccatcagctccattcttggaatagtgagtgctttcgaagcactctttggcttaaggcgattttttgagaaaatcaaccaattttgaattttatttgaactctccactcggagataaattgcggttgcaaatgtgtggatcgaagcatccacaaatgcgtgcaattgaagggagcattctccctgtatcattgtccttcgtgggactcggattcgcttgtctttccaagattcttggaaagcattccagcgagtcgagtcctcttctgagagggcatcatcccagcctttcttttcctcccataaactttggaagaaaagttttaaaggctggatgcatgggcccatcaatcccaaaggatcgaataaagaggccaaaaaactcaggacgagacgtcgattcactatctttaatgaatcgacagatgggaattcaaagacaatgtcgtctttgtcaatgtcccaaataagtcccagcacttt

SEQ ID NO: 93812 - DNA, 668 bp, Heterodera glycines
ctagactatatagaaagattaaatagcaaaaaaatattcaaagctcttcttagagtgctgatcaaaattcgaacaagtttagggctcctatgtgatccgaattccctctatagacccaccctcagcttcacacattgaaaaaaataattttattaaacattcaataaaattcattacgggacatggacaattgaatcatcaaaattttcaaatccttcaattttcctgcatatccctcaatttgagagtgccggcggaattggaaaatgtggtgcccgaacgatttcgtcctcccatgctgtaaatgaatctttttattgagtttaagagttgatggtgccggtgagtcggtgccgaactctaggggtagccgcatagcttgttccgagttgatagccgaaattattgtcccgagtgcagctaaaaatttaaattttttgaaactaaacgcataaatttaaacaaacaatggttgccgatgggtgaaaaattgagtcgattatctcaaaatgcgtcaacaccatccaacatctggcgctgtgtcaagccgatatatgttcgagagaagtaaaggaagaacattggcattccaggagacggccaagataattgagaaaaactcgatttgtgcatcttcagcaatttcctgagtggtgtgtgaatctaaa

SEQ ID NO: 93813 - DNA, 811 bp, Heterodera glycines
gtttgaccgtaatttctgagactctcaaaatggcttctgttccaactcccttgatgagaaaacgaaacgaaatgaggagttggcaactgcgattctcaagaaaatgccgaagccgaacagactcattgtggaccaatcgcccaaagacgataacagcagcgttctaatggcacagactaaaatggatgacctgggattgtttcgcggcgattcgatccttctcaaaggcaaaaaacgtcgtgagacaactagcattgtcatagccagtgacacttgtcctcccgagaaaatcttgatgaatcgagttgtgcgtcagaatctccgcgtcaaactgggcgatgtcgtcagtgtttcgtccgcttcaaatacgccaaatggactgcgcattcacgtgcttccgattgatgacaccgttgaggggctgaccggaaacttgttcgaggtgtttcttaagccctactttttggaggcctaccgtccggtttacaaaggcgacacgttcactgtcaacgcagcaatgcgaactgttgagtttaaggtgattgaaactgatccggcgcctgcttgcattgtggtcccaacaacgatcattcattgtgagggggaaccgatcaaacgtgaggacgaggagaacaatctgaacgacgtcggctatgatgacattggcgggatgcgcaagcagttggcgcagatcaaagagatggttgaactcccgctccgccacccgatgcttttcaaatccatcggcattaaacctccccgaggaatgcttttgttcggtccgccaggcactggaaaaacacttgtggcc

SEQ ID NO: 93814 - DNA, 302 bp, Heterodera glycines
tcgtcactcattacattcgacctttcgaagtgttggatttgagtgccaattcgcaaattccgcccgcactgtgcggacagtcggacattctgttcgggaacatccgcgagctgttggatttccaccgttctctgctcctacccgccctgcagcgctcctcaaactcgtccatgggatttcttttgtgctcaatgcccagcggatcgtttgctttcgcttaccgcgcctatggcgcaacaaccgatcaggggagcgttgaggaagaaaactcgattgacactccaatttttccggagtgccac

SEQ ID NO: 93815 - DNA, 463 bp, Heterodera glycines
ggtctatcgcttgagtgtggaaacacacgccggtggccatcaaacgaattcttgggaagtgcggaagtgacgaaaggcagcaaagggagcgaattcgtcagagtttacaagaattgaagactttggcaaagtttcgacatgacaacgttctctcactgtacggttattcgctggacgggcccgagccttgccttgtgtaccaattcatgtccaatggtacgcttgaggaccgtttgctatgccgggtaacttacaacggaaaccatttaatgggacggagccactcggttgggccaaaaagctgtccatttgcgggggcgtttgtcgcggcctgcactttctgcacaccatcaaccaaatgccaatcattcacggcgacgttaaatccgctaacattctgctggacaagcattttgagccaaaacttggcgattttgggctcagcagatacggacaggttgaa

SEQ ID NO: 93816 - DNA, 815 bp, Heterodera glycines
cctttctctaaaggtaaatgaccatgtcggaggtgccgaaagcagaactttattgagcagagtttggccaacgtcgtcgacaaagttcgggtcaacctgaaaccacgagtctttgagaattacggtttttagcaaccgttccattttcgacggcatcaattaacgcgtccgtgtcacgcaatcgaattgcgtcaattaaattgcgatgcgttttgtcaaaagcgggaggagcaacttaaaagaatttggataaaaaaaaagaaagagagagagagaggagtttgtgtacccgaatcgtttaataaaactcggtttttggaaattgcagaccgtccttcacagagtaagacaattagaaggtcaatgaaacgcaacgaatcctaaaacaaagtaccaaaataaaaaacaagaagtgttgacaaacttacgttgatacaacgttcatcctttccattgagaaccattttcaaagcaggaaccaatttggacgagctaaaagagaattaaaaatgcaagaaaaataaattggaaactcacgaaagaatttcttcagtgagggcgaaagaacttttgcacagattgacaaagagtgagaaaaccatagagatgaaagcggaacttctcttccgaattctgcagttttccccattcgaagataattcagtgggagcattttcgtgcgctgtcgaagatgaaccaataaggtcgaagagatgcgccaccaatctgctgggagaggccaacgccattgggtccatttgacgtcgcacgaaacgatcggtcattgcggcaaaacatcgcagtgcacactctgc

SEQ ID NO: 93817 - DNA, 748 bp, Heterodera glycines
attttcatgaatcgcccgtcgaaaaaagaaacgaattttccggcgcccttatgtcttctacaattagtgaaaatcagcagcaatcgtggggttcttttgtaaaaacatcttttggaacacgacggcattgttgggtgtgcaacgatgtttggatggacattttgcccctttttgaccatgcccaactcggcctcaaattggcactgatttcgccacgtttcgatgttttagtggacgcccatttcaatggcaaaagcgaattgacaatttggagacaaatcacaattcaaaggttcaaaggaccaaaagcgaaactgtctgaatggatcgatgacaaatgggtggcatttcctttgccggaccgtccgctgcccaacaaaattcgttttaggaaccttcggattgagaaccccgaccattctgtgctcgcatttctccgtgccaatcagcaaatttttgaaaaagccaccaatttatgtttgtctgtttcttcatgcttccatgattgccttttttcattcgtcgacaataatgtccagccgatttgggatgtttttgcctgtgaaatttggccgatttttgcgccaaacattcgccgctttaactttcgcgatggtgatcatttggacaatttgcgtcgccgcatttcgcccacaattctcaccgatctcaacaaccttagtgccatcacttccggtcgtctgttccccgatggcatcgctgatgatgggccaaatgcaactgctgg

SEQ ID NO: 93818 - DNA, 482 bp, Heterodera glycines
aattttcaatgataaaatgctattctaaaaaaggtcaaacttcacagctctttggtctaaaaaaaacccaaacaaattaaatatattcaaacgaaagaataagcaacaaatcaatagatcagccaatcggagggaagggccgcccctcccgttcactcccggggcccctctttataagcccgggaattccttcccaggcagttcagtcgcgacgatcagctatatcatattcaattccccatccatcgatctcgtcccccttctccagcccagggagagctcaacgcgcgggctacggcccgggatggacaagaggggatccgtgggaccggcacaactctaactggtagcaccgatggttctgaccaaatcctgggcccaaggatttggttcggagtggaattgaatgggtgctgatcaccccggggagggctttggccctgagctcaacattccggccgatgccggccaacaaaaaaaaa

SEQ ID NO: 93819 - DNA, 640 bp, Heterodera glycines
  unsure (1)..(640): unsure at all n locations
cacctgtcactgccattttgcgcacggtggccaacacttttctcagtactcgctgaagttgcccacctggttggagagtcgttacaagcgcgttcactttgcggatttgttgcgtctgttgatcgattatgacgacctcagtgacgcatttcgccttctccattcacacattgactcggcacggcagcgactccgggaatttgtggcgcgatggattcgcaccaaccctaaggcaacattcatccccgacgaggaattggccccccttttgccgtacacacacatcaacgaactgttgcggttggcggagaagcgcactgacagacagcaattgcccatcaaagagacggtggacaagttgaggcagttcgccgacttccaaaaatcggtcacaaagaatccgatgccatttttggccaaatgatttgctctcgcacagggcacggcaacaaaaacacattttcttgcacctttttaaatattttgttgtttgtcctacactttgtgctgtcctcctttttgatctgctgatgacacacaaatgacttgttgaaattgaaatgcgattgactgccttttttaattgtaatttttgttaacaattttttattcgcataaattagtgcaatttanaaaaaaa

SEQ ID NO: 93820 - DNA, 718 bp, Heterodera glycines
taatctctctacacacttcaactaaagaaccggaatccgcaaccccttcctcggggtgaccctcactttatacaatcccttatacttcaaatcctccggtctcatccaattaacattaatttcatcagtcttcggtataataatttcaggtaatccaatcgggtaagctgtaccgtaattcaccgacggatacagactcacaatgtcataaacactaatctttttcttctcatccgatttcgcatacaatttcatcggtccggtcctccctcccgcataagccatccgcggatcaataggccccttctcgttccctctgtcgtcgaagaagtcccgcatctcttcatcctttttcaactccttctcaatttgacagccctaaaaattcacaataaaaatgtaaatgtcaaataaacttacccaaacttcttcgacgtccaaagtcttccgcagctccgccaatctctcctgcgtctcatcattcaattcctgggccgtccttcctccaatcagttccgccgccgggtcataacagttcatacatccatgtatatagcatcccataacttcaatgcatttgtcgcgccctcccacattcgcaataaaaatccatccaatttatatttcccaactttgacctcccgtccgttccccgcgtgccgtatctcaattccatcccgcttgctccgccactccaaatactttattgccatcacgc

SEQ ID NO: 93821 - DNA, 817 bp, Heterodera glycines
ggcctatatgttcagcctttgctgttggctccgcttctcacttctcccgccgcttgtttttggcccggcattggccagcggtggtggcccaaactcttcgcagagacatccatcgcatcatcaacagcagcagcagcagctgctgcacagtgaaccgcttcaactccttcactcatcagctgaagcacatccaacggtggtgaacatgagcagcactaacggacgacgggcggcagacgccgccacacttggcaaaagtgggccggaagggccgccccctggcaaatggttgggctgcgaagacgcgccggacgaatggcgaagacgaacctgcattaaattgcgacagattgaccgcaaggcacggcaagcgttgacccgtcgcgtcaagcagatggtctcgccaccgtcgatgcccggctcgccggcgtggttgaagccactcccggtcccagtgaaccatcggggccaaatcgcgtcgcatccctttgagtgcatgacccttcgctgcctttgccccttcttcaaaggcaaaatgcgtcgcgatggcctttgttatttgcccagcggaaagccgctttcgatggcctaccgtaaggagtaccgtatgctcagtgatgaggaacggcgccgtttccatgtcgcaatgaatgagctgaaacgccaaggcatttatcgctttttcggcactcagcaccgccgggtggccaccggtggggcccactcgggacccgcttttttgccgtggcaccgcgaatttgtgaagcgcttagagattgccctgcgtttgctcgacccgtcgctggcggtgccctat

SEQ ID NO: 93822 - DNA, 255 bp, Heterodera glycines
gtttgactccgtttcatttccattcacgggatttgccttgccattttgaatcgaaacgggcttaaatttaaacagcaaataggtaataattaacgatagcatgtccgtacattagcggacgctttggccggctgtgccttctgggccggttttttggccggcacttcgtcgtcgtctcccgaactgctcgactcggacaccgtcggaggtatggccttggtcacaggaatggtctaaaaaaaaaaaaaaaaaaaa

SEQ ID NO: 93823 - DNA, 488 bp, Heterodera glycines
ctcactcttctacaaccgcggactgtcccttctccgtccgcgagtctctccccaactgatcaaaaggggtggggcacgctgaagaattcgtcggatccgtcgacaataaatgtgccgataaagacgagtgtttgcacggaaacggtgaaaacggcgaatgtttgtggcagagaaatcggcacagtcggccatcggcaccaactgcagcagagccaatcgaagtggcgacaagcggcggagctgaatgtcggcgacagttcgaacttggccagtccgccattaacgtccgtcgagttgggaacagcacagcgacgagttggcactgcattgcgtccactcgaagtcagtcggccgtgccgttcggtcgcttcgaacacttcgccgccctccccgtgccgaactccgccagtcgcgcgccctttggcccagcggagcattgccgcgttttacccgttcaaaagacgcgccttgattgattaccaatcgcc

SEQ ID NO: 93824 - DNA, 642 bp, Heterodera glycines
gagttaatttgtacaccttcttttacaatttttggtttttcctcaaaagttaaaagaaccttttcattgtctgcaataaatatagtgccaagcatttgtcctttgaatggacctagcggcaaatactcacattttttcgaaattgaggaattccaaaggagtaatgttttgtcttctaagaaacattggcctttctcaaatgagcagtgatcggagtctccaattgaggtttgaattgatgggctcccgaacttattaattattctcgttttaaataggtagcaattttcactgcttgccttcatccaactgaatgatccgaagagccaaacccgaggagacatatcgattttattgtcagtgtgaaatagttcaccttcctgtttaagtgtgccaaaactgcacttttggtggttaatcatctgttggcattcttctctgtccatgcttaacaattcggagtctagtttctcaattatgggaatatttgtgagggaagtgtgtttttgaatatttttacgaacttttcggcacgcccaagcttctacctcatactgaaaggcatttggtttataaagccaaatggtttgttttcgtgagccctgcgcttgattgaaaagaggagtgggacattgagtaggt

SEQ ID NO: 93825 - DNA, 332 bp, Heterodera glycines
gtctgacgtcgcgaagcggccgaaaaggcccaaataaatttaaaaacgggcgcaaagcgcccgtctgagctcaacaaatttaaaaaacgggggcgaagcgcccgtccgatctcaacaagtttaaaaaacgggcgcgaatcgcccgtctgagctcaacaaatttaaaaaacgggcgcgaagcgcccgttagagcaaaacaagatttgaaaaacgggcgcgaatcgcccgtctgagctcaacaaatttaaaaaacgggcgcgaagcgcccgttagagcaaaacaagatttgaaaaacgggcgcgaagcgcccgtactatgccgcgaagcgtgcg

SEQ ID NO: 93826 - DNA, 773 bp, Heterodera glycines
caaaagcaaagcgacagtcaccgttcgaccggaatgtggtcgagtggaaaattgaggagttaggccaatacgaaagcgaattcgaacggttggacagcgacagagacggatttgtagaggggggcgatgttcgggacgtatttctccggtccggcctccatcagaatgttcttgcccgaatttgggctcatattgacgtgtcaaagacgggcaaattggacttggagcagtacgcaaaatgtgtcgagctcatccgcgagtgccaagccgagcaaaacaatgcgacaatctctgccgagttccaatcggaggaggccatcgtcggcgctggcactccctcgtcgccatcgctgccggggcacccgtcaaatttgacacgtcgcgactcgcaaatttcgaatgccaccaacaattcgtcgacgggtggggcaaagggggcgctgtccgaggcgactcagcgagtgatggaactgaacaccgaaatcgaacagatccagcagagacggagacaggctgaacaggaccttttccaggcggaggcggacatgaaggtgaagaactcggagatacggaacctggagatcgaactgctgacactgaacgcgacggtgaagcagttgaagaaccagcgggtggaagcaaacaaacggctgaacgatttggacaccaaaattgtgagattggaggggacggcagtggagaacaaaaaacggatggaggaggaccaggagaggctgaccaagacccaaatggacatccaaaaagccaaggac

SEQ ID NO: 93827 - DNA, 561 bp, Heterodera glycines
taagacctttcggcgctttctttccaccacacaccgaaaacgcggagccgttcagcattagtctgctgctaccaaaatcggactgtaacgctttaactatttggtttgtctgactttgtaaagaatcaacgagatagaatgggtaacctaggtattcgattccggctgcagattttacccgcttcaagaacctggcagcatcagtatttgtgcaggagtttaatatctgcgagaaaaagccataatgatcagcccggaaattttacgtcaaaataatattgttgcactcgaacggtaagattttatggtaatctaatccaaaaaaatctgttttaggttcaaagacaaggagaaggcataataactttgccgggagcggcaccttttggattttcaaccgtaaattgttaggttgtttgggatcttttacgtatttttagggtgttaacaccgccatcgcgtggaacgtagggccgctaagctgggcgccctacgggttagactccaagccaggatgctccgatttcttttaccctgtcatcgacaccctggagcttatta

SEQ ID NO: 93828 - DNA, 228 bp, Heterodera glycines
gtttgcgcttaacaggataattttgagagtatttctatttgctttcgccctcgccccctaaatgattttagtgagtttcgagtcataatattttacaactaaaaatggacgtggataggctctcccggggaaaaaataaataaaaaggaaataaacagtctgtttacagttacctcctcgtcaacgacgtcctcacttcttacattgtctaaaaaattgacccctttt

SEQ ID NO: 93829 - DNA, 748 bp, Heterodera glycines
gccggccatcagaaagtcggccatttgcgagagcgaccagctgagcactggcgcttctgagtcccgtttagaagtagcaaaaaatttcttacgtcgcttttacaaccattcgacgctgagactaacggggcggagacggcggcgcggaaatggcacaaaaaggggcgatgccgacaaagggacagcggagccgccgctgatgtacagctcggcattgggtcctttcttcgagatgagaaatccacagcccgcggaaatgccgtttctcccctacaacattcactacactatcgaatccactgacgaagcgtccggcgcttcggacgacgacgcggacggtaccgcggccgcggtgcgccgtccgttgcgtgccgtgtcgccacagtccgtgtggagttgctcgcccacgtgctcatccgcaacgataacaagcccaaacagagcggaaatgaccaccaccaccagcacacgcagccaaaacagcagcagttgtatggccatcacagcaaatgtaacagcaaaaagagagatgattagcaacagaaaatgaaatctttgcattttgcagaatttcaaacaaagacaaaacgcagcgaatgccaacggcggggagatgtaccagcaccaacagcaacaccaccaacaacatcggcaccagcggcagcagcagcaatttgcattcaccagcagcagaacatcggcgggtgctcagctcttttccccggtgctccctttttttccatcggtg

SEQ ID NO: 93830 - DNA, 773 bp, Heterodera glycines
gttttctgtagaaattcgacaatcgaaaccagcagagccaatatagacctaacaagccgccaaatgaccggagatggaataatcgtccggtttgcaattattgtaagaaagttggacatgttgctaatgcttgccgtaccagacttgcagactttcaaaacaatcagcggcctcaatcttttaatcaacgtgccaaatcggacagatggtcgacaactccttttgcctctggtgccaatgccgtccatcaggatcaaacattgtcgctgcttcatgaaattgcaagaacaatgaacaaattgaccgtcaacactgatcagcctggacgcagagatgatgtcaacaccattgtcacttcgacagagcagtgccatgtcaagaaagtacacatcaaggataaatcagacatcagtaagtcagagcctttacaagtctcgtcatgggaaaaagcgactttgggtcccaaaattcaccctttcattttcattgtggctatattttgtacttgtggccctgtcttttcaaatacagcaatgattccacaaggaccaatgctatgccaaactgaaacccaacccactctttggaaattaccagaaattcctgaatgccctattccaaaagtgacagtgggacacgtcccaatttctcaaatcagggaattgtatattcctaatgctattgagcacaatactaaagcatgggcgtgtaggaaaatcatcaaaagagcaagaaagttcacttcactttctggagtgccaatcacggaggct

SEQ ID NO: 93831 - DNA, 253 bp, Heterodera glycines
tcggttgctgcagtgtcgttggggcaacattctcatggagggccatgagaccgttttccagcaaatggaccagccattgcagtgctacttcatcaacagtagtcacaatacttatttgaccggtctccaagtgcacggcaatgccaccgtcgagggttacatgtcggcacttctccggggctcactgctggtggaattggatgggtttgacggggaacatggtgagccacaaataacgcacaaacgcacattc

SEQ ID NO: 93832 - DNA, 801 bp, Heterodera glycines
  unsure (1)..(801): unsure at all n locations
agatgccgtagacgtccacgaaatggcacactttgaccgagagcgcatctttagagcgcgtcgnccatgccaaaggcggaggagcgcatggctattttgaagtgaccaacaaggacatcgccaactacagcaaggctgccatgtttagcgaagtcggaaagcggactccacttttcattcgcttttcgagtgttggtggagaggccggaagcgcggacactgctcgggacccgcgcggtttcgccatcaaattctacaccgaagagggcaattgggatttggttggcaacaacacacccattttcttcattcgcgatccgtttctctttccgaatttcatccatacgcaaatacggaacccagtgacgcatcttaaggacccggagatgatgtgggatttttggacacttcgacccgaagcactgcaccaagtgatgtttctgttctccgaccgtgggactccggacggattccgccacatgaacggctacggtagtcatacgttcaaactcgtcgacaatgccggcagcgccgtttattgcaaatttcacataaaaactcgccaaggcattaagaatttaactgctgagaaggcccttcaattggcagccgaagaccccgattacgcaattcgcgacctttacaatgccatcgccagcggagactttccccaatgggacttcttcatccaagttatgacctttgaagaagcgtcgcgttttcgttggaatccgttcgatttgaccaaagtttggcctcaccgtgacttcccattgcttcccgttggtcgaattgtgctca

SEQ ID NO: 93833 - DNA, 270 bp, Heterodera glycines
gtgttcaagtgttgaagatggacgagaaggtaaattcaatggaaaaaagcgaatggtcgaacgaatggaaggcactcacacaaatagagcccgaacagtacaatcgatacttatactttttacgcactttttcgaaaaccagaattcgctttacagcttttcccacggccctagtctctgggtcttgaatgaattttggaaaatgatgcaaaagacctagagttctgttaaaaaacaagaattttgtctggaattctgtccgggtcccag

SEQ ID NO: 93834 - DNA, 597 bp, Heterodera glycines
ggtgcccttacaagtgtcccttaattaattccctaattaattaattaatctgttagggtccgtcggcacaaaatgcgccttctcccgggcccctcgtcgtccagcgaagaggtcgacgactcgtcaaccgaaggccccccgtgccattgtccctcctcccttcattcccctcgggtcccttcccgtcgtcctttgtctcgtgccgtcctttggtgccgtccccgtcggcgttgtttttgtctcgccatttgtcttaccgtcgttgccctcgtggccaatttcactctcttcttcataatactcgacattttgttggcattgttaagacgaaaatgtgccgacaatggatatggacaacaaaaaacgatgggacaaagttcacaaattggtcaaaacattgttaagcaaacattggccaatgccaacaacggcacagagaatgccaatgacagccgtacaaacaacacaagcgaattggcttcagtaaacaggcaatttgccattccttccactccgtcgtcctatctctctccaatcggtgccattccctctgcttcgtctccaatcggtgccattccttccgcttcatctccaatc

SEQ ID NO: 93835 - DNA, 588 bp, Heterodera glycines
taacttaaatcattgaaaataacgttaaaatgcacaaaaaaataatgttacaccgtccggattcgaacctgccccccccccccccctcaaaatgatgcctcagaatccccaatcacacagggattctgatgtcttatcgatgtcaaaagtaaaatctgatcacgtattcgtgatcagcggcccaaataacccctaatgacatgtttttggaagatttttgtcgaaaaaattttttcactcaaaaaccatgtgcacccccctttggtcccgaatctcaaaatcacttttatttttataaaaattcttaaaaaagtgataaaaatgccaaataaaatttatataatagagcaaaaaactgcggatttttgtagtattttatttttccagactatcttttcagaaccgagttatgaatttttttctgaaaattcgaatttttccagaaattctgcaattttgatgaagaggtacaaatgtgatttaaagaggtacaacagtgataaaagaagtataaaagtgattagaagaggtaaaaaagtgattagaagaggtacaatggtgattagaagaggtacaaaagtgattaga

SEQ ID NO: 93836 - DNA, 732 bp, Heterodera glycines
gaacccctagacggcagcgaatgatccgtggggaagtgaccaaaggctattcgacggtgtccgtggcggccaaagaggccgttgcggcggcagcggcaaacgaccggcaacaaacggctcaaacccaagcggcggccccggacggaccgcaagacgcgttcaccttgccgaacccgcaaatttcggccagcacttcggcgatagcgcagcgcaaattgcgcatctatcgaacaataaaaaacagggacggcaccgagtcgaatcggatcgaaacagtgtcacatccccaactgatcgaagcgtatgtacggatccgaacaacacgtgacgacaatttcatcaaagtttacgcccaaatggacgaccagtacaaagaagagaagcgtaaggagcggcgccgtcagcagcaggaagggggccgaaggccgcggaagggcggcgccgcgggcgaaccgaagtcagtggcacaacggcaggacaacatcgcggcagcagcatcgtttgtcaaaagtgtgctggaacaacaacagcaactgcagcagcagcaacagcaaaaacaccaacagccccagtcgcttcccgccgcacaacttccccatcaagttcaagcagtacagcaacaaaaccctcagcagaaagacacgccggcggcactttctgttagggctcaactgccaattaagccaggcccaaagccgaaaaaaccacaaatggaaaagaaacagcgaaagg

SEQ ID NO: 93837 - DNA, 487 bp, Heterodera glycines
caggcaatagaagaatgtgaaatccctccaaatcttgtccccttttcttatttacgcctctcacttcatgcgatacagaggaaggaaaagacttttgttgcaagttttctgaacaatataaaggacgaactaaaaagaaacaaagaattgcaggacaacaagaaattgttggaagaaaggcttaaacaattgaatgacagcgaagtgcggaggaaatatgacaaaatttccaaagaatctgccgaaagcaccgatatcatcaaacatcacttgaaggaattcacagatcacatgaacgcgattgtatcaaatgtaaaagactccaaattgggcaaagatgcgattcatcagctaaaggtggcaacagaaactgccgaaagagttgctcaacaagttggcgaaatgcaggcgtataagcaagtgtcttatatggccaaggaaatcgaccgattggccgatgttcgaatgtataaaaggccagatgaac

SEQ ID NO: 93838 - DNA, 540 bp, Heterodera glycines
gaatacattgtttgccttaatctgaaagtattttcatataaaaaaagcaattaaaattatatatccgagccctattaataagtagggatgccatttctaagaacaaaaattgctaaataggcacccaaaaaggcagaaaaaaatcgtaattaaattaaacaagtgcttaattcaaaaatttggtaaatcaaacataattaattagaatttttatcagaatttcgattttaatttagtattttataaacaaggaaataaaacccttcaaacattggtaggaaataagaactaaaaaagagttgctcggtttctataatttttttgacaagaaaatcaaataaaaatggcaaaaagtctaactgtttttttttgtaagaaaattcaattcgaagaaaagaccctgaaattcgatgtttaagcatcatattttggatttgtccaattatgtatttaacgtttactttgccttacatatgcaaatgaatcgcattcgcccgcaccagttaatctgctgaatgatctcaacattttctcatcagt

SEQ ID NO: 93839 - DNA, 749 bp, Heterodera glycines
gcggccatttattctgagcaaaaaggcgtcattgaaagcggcatcggccgctgttgcctctcccgccgcggaggcggtcgtgccgacggctccgctgcaccgcccgccaaacaaacggaacaacggatggatcggagccgacgacgacgatggggacagtggtgccgagccaaaaaagaagaaacagttgcacaatggcacggcggaggcgggcggcggcgtcaataaacacggtgccgagatggcaacagctgcggcacaaaacccttcctccgcgtcgccggctggcaccagtggtggcggaggaggcggatcctcactgaccgcagtcgcttaagggttgtgttcgttcgttcggctcggccacgcccgcggcaatgttttttgacaaatgaattagtgaatggaatggtgccgaaatgacctcacactgttagctgttcctcctttgtctgtgctgttgttgaattttggcttaatgattggcgctcacatggaaaaatgacactaaaatttgacccaccgacagacactaaatttgaatttaccacttttattcatttttcgcctctttttgttacatttattccccccgcaaatcattcgttgtttttatttttaattttttgttgtttttgctcaaccgtgttgttgttttgctgcttttcttcacacacatataacatatattattttatgacatattttttgtccattttctgggatctttcgtcctccttttcctcctc

SEQ ID NO: 93840 - DNA, 682 bp, Heterodera glycines
  unsure (1)..(682): unsure at all n locations
caatgccacggggnntctgctggnncgcgncnntgccgccgcttttcctttgttggccgtcattccctttatgctcggcctttacttccaaatgctcgtcatttctcctcttcgcgtggccattttccaatcgccgcttttcttcccctggaaagaatgggccatgggtgttgtccacttcaaaattgtttgtgcttccgttttgatgggccccgactggtggctgaagacggcttttgaacaggtccaacaacgcacatgtgctgggttgtcactgtttgtttttattatttacgccgatggcatttggaacatccgtttgcgagacctttacacgaacctggtgttcccaattgtgaatacactcacttttctgatcgcgtttccttacgttctcagcaattttctcctcttttttgtcggtaagcgatttaaatttttttcttttcccaaattttaatatcaaaatattttatcactattttattctgtgttttcagatgcttcacgcgaggaacaaatcattgtgatacgatttgcttatccgtttctgctcggctccatttgtttctgtgctttaatcacatggcaatggcaaaagctcaaacttttggcccagaaaattcgtaacgacaaggtgctttgttttgctactctaataatgaatattgggtagggtttt

SEQ ID NO: 93841 - DNA, 669 bp, Heterodera glycines
caacataaatgggcgttgcgtcgctttgttccattgcggcctcttggctactctgatcgttgtgcctcagctgtaccaacagatcaacgaggtcaactcgcgagtgttcgacggtgttcaggctttccgcgtgaacaccgactcggcatggactgagctgatggacgttcaaatcagcgtcacccctccggcccgtccccgtgagaatccgttcaattccatctttctgcgccagaaacgtggcaacggcgggttgccgcctcagtgtgtgtgccagctgcagcagccgcaatgtccgcccggaaccccggggccccctggcccaccaggacccgctggacttcccggcggaccaggacaacccggaggccctggccagcccggacaacagccccctccttgccctcaagcttccgccgggtgcccttcgtgccccgccggtccgcctggacaacctggaggccaaggaccgcccggaccccctggaggcgatggacaaccaggacagccgggacaaggcggaggacagggaccgcctggccctcccggacctcctggcccgggaggaaacccgggacagcccggaggacctggccagcccggacagcctggagccccaggaacgaaaagttcatcagtgcccggcccgcccggacctcccggacagcc

SEQ ID NO: 93842 - DNA, 745 bp, Heterodera glycines
gctgcactgttatgcaagtgccgccgttgctgtacgcctaacagttggtcatcaatagacggaaaattgcttaaaaaagaaaccaaacaaactcatcaattgttagctcccgttggcaaaccgaaggctacattggggcaatggatgttgggctaccgtatcagttattaaaattgatgtttttcaaaaaggatactaaaactgggataaccccattcagagacaagtcaaaaaaaataataataggcttggactaccatactaattagaatttttagaatgtgtctgttaaatgcaaaactgttgtgaaaaattgttataactccattcagagaagagatagaaaaaaaaaataaaaataggtttagagagcccgtgaacagctgcatcggatgcaagtgccgccgttgctgtacgcctaacagttggtgagcaatgacggaaaattgcttaaaaaagaaaccaaacaaactcatcaattgttagctcccgttgacaaaccgaagggtacattggggcaatggatgttgggctaccgtatcagttattaaaatttttgtttttcaaaaaggatactaaaactgggataaccccattcagagacaagtcaaaaaaaaaataataggcttggactaccatactaattagaaattttagaatgtgtctgttaaatgcaaaactgttgtgaaaaattgttataactccattcagagaagagatagaaaaaaaaataaaaataggttta

SEQ ID NO: 93843 - DNA, 819 bp, Heterodera glycines
atttactgtccttacattccatcctattgtttagaaaaatttaaaagctttcattgatccaatcggattaaagcatttggtcaaggaaatggaaaaatttatgctagaaagaaaagccacccaaaagaaaagtgatgatgatagtgcacaaacagactaatgatctaaaaactcttcacttcgtttcctcactctgatcaccattttgacttgtgatcagtcttttttcatctccgatcactttgctttgtcattgcgtgtaccggttttcgacttctgtttcctccattttgatcagttcgttctgtccgcctttgtcagttttggtcactccatctttttcctttttgtccaatgatttctgtacatctttcatcagtttgatcactttcagtttggcctcctcacatgggtccgttgctaccatttgtttttgagttttgtattccattaacaaaacgccaatatatctttcaagtttcagagaatttccttggtcgaattggcgcaataaaatttctttcaatgttacaaagtcttttttcaaagaataatccggttcattagtaacttttttctcgtgatcctttccaacattgcaaattgttgaccaattttcaggttttaaaatttttcaaaatttaataataaatcttagctttaaaaaaaagattttattataattttcaattaccgagccgagttgcaccgaaacctttcacaacactttaatgttgcacttaacccatccaaattttttctcgtatcagtccataacaattgatcaaggtcgcaatccttctcatttaccaaaataat

SEQ ID NO: 93844 - DNA, 741 bp, Heterodera glycines
cttaggtctttgcttttatttcggtttatttctgccgtttatcgctcacactaaaagtgtcctaaatgggagaatgttcctccaacaatgacgtgccaaacgcatcaaagaaatggccatgcgcttactgcacatacctcaactgggaggccagtctcaaatgtgtgatttgttgccagccgcgcaaccgtccgatgatcatcgaagaactcggtgccatcgaagagttcggcagcaaattggtcctttccgatcgttttgttaaggaaagtgcgccccggtggtcgtgtccgacatgcacctatttgaactgtcagcggaccaaacggtgcgcaatttgtggaagtacggaaagacctgcgcgttttgaggaagagacatcgcccaccgaaaatcacccgaatcggaaagataaaacaatggccactattctgtcaaaggatttgctcaacaaatggtcgtgcagcgtatgcacttttgacaattggccaaccgccccaaagtgcacaatttgcggccgtttgcgttccggcggcagcgcaaatgaaagcgaagtgcggcaaattcaacaacagaagcagcagaaggcgcaacagctgaacatcggtcgcaccgggcgtcagcgatcgtttgcattgtctgcgaatggtcggaaacagcaacagcacaaggacgacgccgacgatgagcaacaccaccaccacaagcacagtgaccaggacgacgagtgatcggcgcgac

SEQ ID NO: 93845 - DNA, 720 bp, Heterodera glycines
tctaaccctttcgtagcttcatttacaaaaaaaaaaaaaaataataatttcctctgtcgaaaaacggctttggttttaaaattttaaacttttcctttgggctatcgaatgaacagaagagcatttgattggttgtttcttggccaagttatggagcattgaggaattcaaaaatttagagtttaacattttgaaaaaaagccggatttactagacaaaaaatccaggcccaggaaaaatccatgttccctgaaaaagggcctagaccttggccaggaaaactacaggcctgagtacaggttcaaatcaaactcaaaaaatttccttttgatttaaaattaaaaaaaaacttttcagcaatttgggccgacagcgatttgattggtgacacactttcggccgtgccggtaactaaaatttttttaaacacacaaaaaaatgcaataaattttcaaaggactcgcccagcgatgaagacccatatgccagcacaatttatcgcccagtttccatggtgtgatttatttattttttgctggctttcaaatttaaaatttgggtttgtccaactaactacccacgacggcacttttttttgtattggtgccgcgattcgtttaaaaataattttttttctgcatattttaaaattaatgccttggttttttttttcaaaattttggggaaaaaatcggggcgcttaaactgcacacatttggg

SEQ ID NO: 93846 - DNA, 603 bp, Heterodera glycines
tcaaaaaggtcggacaaattccttttgatattggggagctagcggctcaagtcgacaatgtccaagatgatcatgccctgctccagaatcaagtcgcaaacttgaacaaccaagttgtcaacttgaacaaccaagtcgtcaacttgaacaaccatgttggagcactcttgaatctggctacacaacagcagggtcagattagccagttgcaggaggcgcttcagcagttggtcggaccggcgattggacaagccgcagcgggcagccaacaacaagaggagaagagcggcaaggaaaagcccaaggaaggcgaggacgaagatgaggcggggggcgaaataactgtggccgaggacaaagaggaggcggagggcgagaaaaatgtgcccgaggacgaagaggaggcggagggcgaaaaaactgtggccgagggcgaaggcgaggacgaagaggaggcggggggcgaaaaaactgtggctgagggcgaagatgagggaaccagcgatggagagccgaaaacgaagcacccccgtttgcaattttaagacgatctgtttcttgccatttcaaatgttttttgaacgcaagaaaataattgttgaa

SEQ ID NO: 93847 - DNA, 727 bp, Heterodera glycines
tgagtgctttttatttcaaataatgaccaccatcgaagaaaatttgttcctcggggctccggctggttactgttcctcatctgaggaagatgaagaggagtttgcggtttcaagaggcgcaatgccatgttcttccgcagtcagagcttgcaattagatcgagacggacggcacaccgcggacggggccgaagggcgttttggcggactttgaacgttcccggcgagaaatgatggccaaagcttcgttggaccaggcaaagtttctcgaggtggcaaatcgtttctcgttgtcgcaaaagcccacaacggaggacggagatgaagacgaattgcagcgaatctgaagtcatcgcgttgaacagctcaaaaacatggccaagggacgcattttggaagtgccgagtcgtctcgactttttgttgcttatcgagaacgattcatgcaacggctcactgctgttcatccacatttacagcgatgggtttgcctaaaaacggtttctaatactcctgaaaatttttgggaccatgtgaaaacaagtgacccttcagattcagtcccaaagaggggtgagggggagacgggatatatctcttaatagacccaatgtttagttgactgttaggaccccaccaaaaattttaatgtgctactgtttttggatctttcatttagccacgaacagttcaatcaactgaacgaagcgttgttggaattggccggac

SEQ ID NO: 93848 - DNA, 814 bp, Heterodera glycines
cttttctcttcgcgttctttcgtctttcgctgtgtgttccgaattaaccaatgcacttcgttcgttcattttcgttttcccattcgccatttttaatctcaaaacattcatttggcgtcaaaagggaggcgaagtgtaaaacgaccgatgattcattcattaatcgaaagatcattgccattctttgtcaaatttccaaaacttttaaagtattatagcgtttattttaattttctgatttcgaaatgccaaattcaattaatcgcctcttccgtcgcttgcgcgaaagccatggtgatggtgggaaaaagcccaaaaaggcatcggtcgtttcgggctgttgttcgcgcagaacgtcctccactatttctcagccgtcaaacagaaaagtgggattgactgggataactcttccctttttgatcttccacaatttcctccctcgcagatgtccgtccccgtcaaatgcaaatgccatttcgatggtccgcttttgcccgaggcgctcctttttcgcattttcgacggcgttgacagtcctttcgaacttttttcgctgcgacttaccaacaaaaattgtgctgactttgtccgctcaaaaatcagcgtaatttgccaacattggtccaaatgattggcattattcattcattcctcttcagcgtgtctctgagatggaccttcgccgcgtctcttttgaccaattgtcttcgctgtccgccaattcgtccggcacttccgcccaatcggagaccacagtgattttgcaaggggagcaatggtgagggcactcgttcattaagcgtggtatatt

SEQ ID NO: 93849 - DNA, 594 bp, Heterodera glycines
aagctctgcgaagggaatgaatgggagaaaggtgttcggttttcggaattcctacatttaagcagaatttctaagcatttccttagtttcatattttctctcccccattgtttttttctttcttttttcccaatttcgcattttgttctgttaaggttcgtttctgcttgttcaacgcttacacacaatggtgcactgcttcaaaaggtgatccccgaggccgatcgacaggaatgggccccgagcaacacttaccgcggcattttccaattttgcttttggcgctttggccgttgggtcgacgtaatcatcgacgaccttttgcccaccaaaaacggacaattgctcttcgcccgttcaaaaacgcccaacgaattttggagcgctcttttggagaaagcttttgccaaattgtacggctgttacgagacgcttgtcggtggccaattagcggacgcactcatcgaactgtcgggaggcgtggcggagacactaaacgtgcgaaagtttttgcacatccataagcaacaaatccaacaacaacagcagccgatgttttccgcgtcgttcaatgcctgcggaattaccgtactt

SEQ ID NO: 93850 - DNA, 747 bp, Heterodera glycines
  unsure (1)..(747): unsure at all n locations
ttctttgtcgcttcccaattgccctattgcgatgggttcatcgccaaatgtgatcccgagttaaccgagtcgttgattcgcatcgtcgagaattgttctctcatcggttggttttaaccgtcccaaattggcatttcttcgtctttctcatcagatactcccattcgtccgattaccgtccgcctttgctgccttatccttcgccatgttctcctttctcttggctctgaccaaaactttcattcggccgtcgaattggccgttcggcgaagtcagcacaaattgttgaatgttctcagaggcgcactgcaaacggagaaattctttttggaaatgtttgaagacgaacattggcactttcaagtcgcaaaaatcaatctttgcattttgccaaaattgcatttttagaagggggaattgacaatgaaagaactcctcgaagacccggcacttttcttgcccccaagcaacacacctttatcgtattgcattttcgattattatttgtgagtttatcttcttanattcacaatttcagaggagttcccttgtcgaaacgaatgccaagcggaaatgatgaacacattcgacgggtggaattaaaattttaattaactgattgtgaaatattcattcccatttagactcttcaatttttctttgaccttcgcaaattcggccaagatttgtccggtcagaatgaacagcttttgcccctttcgtcccgtgtccaagaattggtcgagg

SEQ ID NO: 93851 - DNA, 488 bp, Heterodera glycines
gtttgcctttataggtggcactttcattggactaaaatgataagtgccctgcagccgatgtcgcccaactccaacaacaaaatcactcccaaaatgcgccgtctctctcctttctgttcagcgggccgtccgccgatggcaccgcaaattgtggtgcctttcaccaaaatcagccaaatggaggagccctttatcagcagcacaatcatccgcagcaccaccaccattcagtaattgtgcatacgcatcaaatgccaacggcggaagggacggagagagacaatggggagaagagagaacggaagagaaagggacggaagagaaagcgaagggagggggcggaagacggataagagggagcggaggaggagcagcggtcgcagggcgaggaggaggcggacgagggggacgaccgcggcacgacggcacgtaccacggcaccgtccccgcgggcgatcggagtgcgccgattcatcagtcccttcgaa

SEQ ID NO: 93852 - DNA, 473 bp, Heterodera glycines
attcatcctttcaaaaatattcattctcccaaaaatattcaatgactaaccttacctcgctctcaaagtgaatattcgccaatgtcaaaacaaagcgacattcaccaacttattgactcacaaatgaaatttgccaaaaacaccattgatgccctaaacaaactccaagattccttcacccttgaccaaaagccaattctctcccacttaatctccaccttgtcgactcaatttgaccttttgaactcatcgattgttcatctccgctctgctgacccaactcaaaaagacgtgcccatttcagcagaggagttagaacgacaaagaagtgtcgtgataataggcctgcctgaacataatgacatttcaccatctaagcggggggagatggaccggtccaaaatcaattgtctattcgattcgctggggatcgaatgcggcaccatatcgtaccgaatgggccgtccttacaa

SEQ ID NO: 93853 - DNA, 780 bp, Heterodera glycines
gttaaaatggatgtttacgcgagttatgtgcctcaacagaatgggatgaagcagcaaccgcaacaaaatgcccattatgcgacgagcactccgccatccgtcgattctccgtccgcagccccaaccaccaaatttgtcgctatgcctttgcttcaacaaaccgcccgagtttttgttgggcctgggcagcagaaagaagcacaactgatcggacttgggcttaggaaattgcgcacttatgaaaaggaggacttggaacgggcgaagcgttacgcgatggaccaatccgtgaaatatgtgatgctgaaacagcgcgaggcacaccaacagcaggtgatgtgtgatcggacgatgagcccgaccaaaactgacaatgaatgggcattcgttggcattgtgttttgggaattgagtcggtcgaccgttgtgacctggcattatccctccgaccgttgtccaaatgggaaatgaatgctttgtttcccaaagtcattatttgttgcccctcccttcagaatggactccgcaaatggtaagactgacccgctgcagacgaaccattctttcatttgcttaaccattcatttttcaccttttctcccattaagaaggaaattactaaaagggagtgtgatgggacaattcacacaaacaaacaaacacagaaaatcagcagaaattttgtgctctttgtccgacgattgtgcgttattaatgctgtcccccaatttcagcaacaaaaagtctccctctacacacaggcgctgtccatcatgtcca

SEQ ID NO: 93854 - DNA, 500 bp, Heterodera glycines
caaaaactcgttttgtcccaaaacattggccaaaagtacggctcattttcgccattttggacggacacttcggcatttcttttccgttcgtcagaattgtgccaatggcgtggaattgcccgagggtcggaacgtttctcgcatttgacagagaaacaacgctcggggggacagaatggtacagcgaagaaaacctgggaaattacgattaaaagcttacaattccattgaaacggcacttttaatttatcccatgacttttggctgttctttttgccagaaattggccgagaatttgtcggaaatgagcagcgattgtcagggggtaaaggcgtgacaagttgacgacagcacaaaaacgccgtcaacagcacaccgaccacaataaaaacgacgactgaaaagggattggaattggaagggattgatcagtgatcagcagagagagtgagagaggaacagcgaaatgatcaatcaatcagtaaagggactgagaatga

SEQ ID NO: 93855 - DNA, 789 bp, Heterodera glycines
caaagccttgcctaggacttgagttataacgtgatgaacatttgaaactctcacaacttttttctgagatgtcaaattgcttagcattcacttagaaaaagattccccttttcaaaatctttttttagataccaaatttgttcagtttaattgggaatgaagcgagttatggcagatcaaaataaaaaatacaaaaaggcattttccagtgtaaattttgaattaacgcgcaaaaatttacgccaaatgcgctatttggcgttatgagcaattttgtctgacactggcgcgtacccatagtgctgtcgctctatctctcgccttctctctcgctctctccactttatcactgtcactcaatctctctttttctctctcactctctcccctttctctcacactgttcactttatcactcactatctctcgatctcttcattttatcactgtctctctatctttatccattctttctcatagaaatcccccgccctctctccctctgtcttctctctctatctctttacctctcgtgctctcataactttatctctgtcgccatatccaccctctctcatagacttcaccatcttccctatctttactcccacccttttctcacagttcccctctcatcctctctctctctctacgctttatcactgtcgctatatctctctccctttccctttccgtgttgtctctgcccttttttctcctctctctctcccgccctcccccttttgtccactctctcctccgctcgactgatgacgtcagacttccgcc

SEQ ID NO: 93856 - DNA, 705 bp, Heterodera glycines
attggccttttctagttatcacattcatcacacatctttctctaaaataccatgcaaataagcagggttcgcagatgcgagactttgaggcctacataagccgaaaatgaaaagcggacattttcgctccgtttcttgcggaccatttttacccaatccatttgccatgccatttaatacactgcgttttttttttgcccgggaaatcaaaaaggcgacggcacaacaccagcaaagcaaatcagtgcaaaagtttcattgtaatcaaacaaaaatcatttctggccatcatagaaatggggacacaatgagtgattatacaaaattggcggctggcataactgaaaatgatgagagattatggaaaattaatgacaaaaaaacgaaggaacaattcaaaaacattttgtgttgtgtgtgggctatgggattttactaattatgattcgatgtaagcacagaagaagaaaaaagaaaatcaaaaatgagaggcaaaaggaggagaaggacattttgtagtggctggctggcaaaagcgattcattggcgataatgagggtaatttgtggcggttttttcgttgataggcaaaaacaattagcgctgtgtttaaacattaaggcaaaaaaagaaaagaaaaaaacgatgccacacaaaatcattttctttttttggacacttttttccgtcttttattgtttttgg

SEQ ID NO: 93857 - DNA, 754 bp, Heterodera glycines
cgcgagcgttcaaagacttacaaacaggacgaagtgcagattcattgccctacgagtacgaggcttcggtggacaaagagggcaatgtgagcaatcagcgcgcccgcgtccgtctgttctgtttggcctttctcagcggcacttccttcctggagatcggactgaacgaccggcgccgtgagggaaaagaggtggtgcgacgcaaagacattttgccaatgtacacggagcgatggatccgatttgaagcacccgaactccacgagacggtggacaaagtcgtgtgggaggaggaccaggtgctacgcatcaatccgccggacggatgcttcttcgaagtaatgcgtttccgcgtgcgaccgcctcgcaaccgcgaccgcccgctgaatgtgagatgtttgatgcgcatggccggctcgcacattgagctgcgcattgacgcgatggcagtggcgcatcagcaaagggcccggggcaccgccgcgtcgacgcgtgccgtcccttgcgaggatatcgtcgtccgttttccgcttcccgaggcgtggatttatctcttccgcgagcaacgcccgtggggcgtcggttcagtgcattccaagcagcgcaagccgggcaaagtgaagaacttacgcgacaaattgatgggcaccgtccaacataacgagccgagcttgatcgaggttggcatcggtgaggcaaaatatgagcacctttaccgctcgttggtttggcgtattccccggctgcccgaacg

SEQ ID NO: 93858 - DNA, 688 bp, Heterodera glycines
cataatgctaaagcggggcctacggttgcgagcggaacgccggcaccctacgagtgatgggcaccgtcgcacagtttcgtgaccgcgacaattgtccggtggcggaaagcatcgatcgactttttgtcgttgcgcttcggtccgtcggcatggaatcgcttctctccgccgttccgctgaacgtggacgtcgatgcgccagtgctgccgcgcgacttccgccgttcttggctgcctccgattttggcccgacatgcccagggcgactcgttggactttttcgcccgttcgcttttccctttggccgaacgacttcatcagagattgcaccaactgccggaattgccgcagaaactgtacacgacactcgaacaccaaatttgggccattctcccacgcctaatggccaacgcaccgcgcgactttcacgtcgcaatgccaacactggcgccaattatgggtgctgctctgaacgaccgccccgacctccgtctcaccattctccgtgcacttcgcgaggcactcaaattcgaaacgcaaaacgacggcatttgcatgatggagcgatacgcgcgcaactttttgcccattctctttggcatttacaccgcaagtgcggcaaatacggacaaagcggcgcaaaagggcgacgaaaacggagacattggcaaagggcgaagagcggacga

SEQ ID NO: 93859 - DNA, 791 bp, Heterodera glycines
ttttcccctcttctcctccctccaatttgggcccaaagttcagcccaaactctgccgtttcataggcaatgattccaaacgcccaaatgtccgtttttgaactgagccgcatcgaacgctcattatgcagcatatagccccaattgcatagcttatgatgttcggggctctgtaaaataaaaatatttttttttataaattcattgataaaataattaaattttaattcttacgcatagaaatcagggggataggattaaagaagattttggagaaaagcccaacacaaagaatgaaaaatatttttcgtttgtttcttaaacagatagatatataaagtaaattaaattttgttggcttaattgccaattaaaattataaatattttggcaattggccaattaaaaatataaaatgttttggcttaattggccaaatattagaaattttttagtagtaaaaaataaaattataatttttaggctaaattggccaattagaattataaaagattttagcttaattggccaattagaattataaaatgttttggtttaattgaccaattatctttttctggtgtgggtggcacttgcctcgtaatatttggtggtcaatgggtcattgatgacgaaccatttgcaaaagtttgccatctgctgtcgttgtacatcctcctcttcaacaatgaattgagcagttccgaaatctatggctttcatcactgaatcctctccattttccttttttacataaagcaaattttgtggcttcaagtccaaatgcataat

SEQ ID NO: 93860 - DNA, 487 bp, Heterodera glycines
ggatccttcaggcggagcgctatttggacaaaataacggagacgactttcaaagacgttctgaacgaagaacttataacaaaaaacatgacgacaattgtggagatggacaactcgggactcttttacatgttgctcaatgaccgaattgatgatttgcgctgtctgtacgaattgctcaaaagagttgaaagcgggcctaagacgatgacaaatacaatgagcagatttttgcgtgccaaagggaccgcagttgtcaacgacaacacccaacagcagccgcagggagaaaccgtagagccaatcggcggagtttcaaatccaatcattttcatccagagtttatttgtactcaaagaacaattcgaccgttttctgctcgaagcgttcaataacgacagggaattcaagcagtgcattcagtcggactttgaacactttctcaatatcagtccaaaagcacccgaatacctttctctgtacatcga

SEQ ID NO: 93861 - DNA, 740 bp, Heterodera glycines
cctttccctttcaagaggacgaaggcaccaacaaacggctgatggcttacatgaaagcgcaacacggagacttggcacacaattttctgcttaccagcgattcaattgccgcagctgcaacttcgtccgacaaaggtggcattgttttgatcgctggcacgggctcggcctgccgtctcctcaaggaaaatggcgaagtgtttggagttggcggttgggggcatttaatcggcgacggcggcggcggtttttggatcacaatgcgtgctattaaacgaattttcgatgttgaagatggacttttgtggagctccgataccgataatgaaaaaactttggcttttgtcgactctttcaaaaagactttgttggaacacttcgccgtggactcgaaattgggcttgctggacattctgtacagcccaaagttcaacaaatctcgcattgccgctttttgcaaggaattagctgaagttgccactggtggcgatgcttttgctgtcgaactgtttagcgatgctggcaaggctttagcgcaacatttggtggccatttcacggcattgtgacgacaaaatgttaagggaattgcccgttttgctggtcgggtccgtcttcaagagttggcattttatgagacttggttttgagcgatgtataaaagagtcaaatggcgccgtgacagatttgaatagacggatcaatcgagtgatgcttttccaattggagtgttcagcttcg

SEQ ID NO: 93862 - DNA, 720 bp, Heterodera glycines
ggttcgatgaaactttttaaaatataagcctaaactttttggcctgcttaaaaaggaattaaaaatttttaaaatatttattcatctcccttttgatagaaaaagcatcagagagccttaattaacctgtaaataaagttttgtgtgtttcagagcactttctgaaaaaatacttatgaattaattttgcaaaaaataaataagtaatgaaaaagtcagaatttcgaaaaattttaaaaacaacaagcgttggcattttttcaggttaagttagtcctttacaatggagaaggcctgcaaaatttggagagattatatcgattttagtgcgctaggttcgatgaaactttttaaaatataagcctaaactttttggcctgtttaaaaaggaattaaaaatttttaaaaattttattcatctcccttttgatagaaaaagcatcagagagccttatttaacttttaattaacatttggtgcgtttcagagcagtttctgaaaaaatatttatgaattgattttgctaaaaaaataaaatagtgaagctttaaaaattaataaaaaattttaaattcagaattactggagttagcatcattgcagtgcttttccttgtctttttgatgctctcgcaaaatctggttcgcttctgaccagtttataaaaaaaaagttaagcctaaaatttttcgcatatttaaaaagcaattaaaaattttta

SEQ ID NO: 93863 - DNA, 485 bp, Heterodera glycines
gccgagcgtcaaaatcgaaatcgtccacagaaacgccgttgagtcaaacatttggcaaatcagacgataaaacaacggcagaaaattccggaaatcgtgcgaaaagcaacagcgaaagccgcgttaaaacaacggcatctcagcccatttatttgttcggcgttgaagaatgcattttggaagcgcggagagtgctgaaaaatgttggagaaaacgaaaaaaatgctgctggaggtgggcacaaagaactaaagcaccagcgattggaatgtccccgccatggcattgttcgttgggatagaaataatcggcaaactgaggaatacgtagcgtcggcaccatcatcgtcttcattagttgtgcccgatttgtccaaaatggggccggatttgctgtttgttgaccttgaacatgaatgggctgtcccttcggttagcattcaacgggggaaattggtcggacgtggtgcgtttggcttcgttttc

SEQ ID NO: 93864 - DNA, 802 bp, Heterodera glycines
ccatggccttttcctgaactgttgataatccaccgaaatttttgttgtgctaattccctgtgactcggcaatattttaataaatttgccgttaaaattaagaattccccttaataattttttggttcgattttaggttttactctgttctgtcattgatcctcacaacacaaactatcccgttaatgacacaaaacaatattcaaaaccacttgtttatcgtctgtttttgcaagcacgcgaatctgttttgaatggatcaatggaaaatgtgaacaaagagcgagaaaacgtgaaaatatatatttattaattataaatgtttatttgttttttaatttaatacaaaatctatcgtaatttatctcgttacagtacattttttggattgttggcggctccggcattctgtgcgcatttttactgattttgattgtcacaatattttttgcatattgtcgtcaacgtgacaaaaatcgtaaaaaccaggccaacatggaacatttgcgtcggaatcgtgaccaacgctacacagattttcctgcccgaaggtatttaaaaaaattatattaattaatttttctcgaataacaaaactctcttctttctctaactgtctgtgctctcatttttaaccactctctcactactcttttccatcattaattttctcttaattaatgaataattagttaatttaaattttatttattcattttttattaagtcgtgaagaccaatgggagttggaaaggcgaaatttgatcatttatgaggataaacgattgggttctggcgcattc

SEQ ID NO: 93865 - DNA, 778 bp, Heterodera glycines
atttcctttctgtgacaacaaattggccacttggaaagaaagcgaacttcaggtaaaaagaaaagatttggccgactgatgggtcaccaattggctaacagatgatactgtgcccgaccaatgagactacggtatgcacaagtgttgatgggttcatatgatcaatgaatgattgatgattattcaaaaaaaaacaaaaaatgtttaattttaattattgaaaaattaaaaggataaaagaaaaattatatgcaaattaacagaaaaagggaaagtgaggcggtcatttattaaattcaattgggcccatttgtattaattagtcatcaattgcattaattaattggtcaattattttattaccctcgctttgcataagaaaatgaaaatttaatcaatggtaaaaaaaaaatttttttaaagtgatcacttatcaatcactcattccgttcctccttccatcgtctttttgttgttgcggcagcggcgtaaattgctcacgacgaataatctcgtcggtcagttcctcgtcgcacaaccaccgctcgcctaggaatagtatccccttccgggggcggggtcgggggagggtgcggaatcgctgccaacatgagctgattcgtcagctcctcttcctgcagccagcgctctccgaggaatagattttcagagtttctatatcgtgaaattatatgctcaccctggtagtcacggtattccgctacagcccgccgatgctcttaagtcaaagcattgagtctatccgttcgcaggtctt

SEQ ID NO: 93866 - DNA, 654 bp, Heterodera glycines
caacactcttcaacgttgtcatgcgattttgagaggcggaaagcgggcttacaacagcgatggggtcgacgagtgttcgaactccggccggaggtctttatttgttgttatataatgcccaagcttttctcaaaattttgagaaaattaacaaaaaaaaaatagagggatgggagcgaattttagggttgtttatgacaattcaaatacgtaaaatcgggcgattttctcaccgctcgaatttgatatttgcaatacaatctgataggttgttccctttttaattgacttttcctcaattctcttcatttttgcatttttctctaactctcgcctttttccagccatcgatggtccgccttcggccgactcccatccgccttcggtgggcactgccaatggcatggcgacgggtcgtccgggctctgttcagcaacagttcggcaccgccgcttcgcaagtggacacggaggagcccgagtacaaaatgttgctgaaaaagttgtgcaaataccacgcggatgtaaagcgactgttgggccgtttcgagttggacacattgcccggggtggagatgaaaatcaaagcgtcactggtcaacgtcatccaagtgatggaaggcacgcggaagggcgggtgcgtttttgagggggcg

SEQ ID NO: 93867 - DNA, 807 bp, Heterodera glycines
gctttcttcataaggcactccctcagaacatcggcattgatctcacccttagaaggcaacaacagcagcagcaaacagtgggactggctgcacaaaaagtggtcgtaatgaaaatttcatccgagccaattccgacgagtgcggacggcgtcaaacgaaggcaccaaaagcggaaaggcggaagagcgtcggaagaacggacggacacaactttagtaaagcaaatgaaaggaaccgatacgggtgcaatgggaacaatgaaggaagaaagggaggaacaactgtaccagcgagaggggaaacccgaagcgaaagagaaggacaaattgaagacggcacctgcagaagcggagaaaaagacggagaagacgggcaaagatgggaaaagaggacggaagaagaagagggacaagcagcagcgggaagagggaggcagcacgaagttcaattggttcgccgagttcccattcgacaccgccgccacttccatctctgaagaacagtcagcaccagcggcaactgatggtgggatccccgccaaagttttcgcgtcgcccacccgttcatttgtgctccctgcccacgagcgtcacttgctactgcttccctacatggacattggccttccggactggagagtgcacgactttccccaaccggaccgattcttgtttcctgagccaagtgaatggcacaaaaagccttcctgaagagaccagaaaattcatcccgatccctcattcataaatctgttcgcttttcttcttggatgctttatgacacatcggacaccaatcataatcccat

SEQ ID NO: 93868 - DNA, 815 bp, Heterodera glycines
cttcgccctgaattgacagtctcttcgccgatgcgtacgcttttattgctcaaggcctttgctacgacgaagtggacgaccgggacaatgcatgtttaatgtacgagcgcgggttagagttgggggacaaagcgctgcaattggacacggaacgactgagcggacttcgcaacggattggagagggtccgtgggatggtggccgatcggattgactccattcgcagcaaagcaccgcacgtggacaatcggcaagcggtggaaaacattcgccattcgctggtcactgtcagcgacgccattgccggctcaaccaccgacgccgaactgttctattggctgccggacggtgttcagcttgtggtgatcgaaggagatcaaacaaatgcaccaactccgccctcctcgctggccatcttcaaattgactaagccggaagaagcgcaaaagacggagaaagcgagcggtgccaccatcgaagcgaaagacgcggccacattgccgttggcgtcctcttcgcccgccgctttcatccaagtcggcccctgggcctacccattggaaccgggcaaaacggcaattctgaagaacgaattgggtgtttacgtgatgccgaacccaagccctgaccatccgaatatgttcgtcggtatcattttacctcgcgggttggcgcccggacttgagtccgaatttgtatatgccttgaagcaatttgcggtgctcaacagcagcgacattgtggacagaatgagcgaggagcaacgcgagaggaccagcgaacgtatcgctcaatttctcatccgagctggccaa

SEQ ID NO: 93869 - DNA, 401 bp, Heterodera glycines
caaatccagaaaaaccacagggatggattgcatcagcacggttggaagaagctagcggaaaattgcaggcggccagaaacttggtcatggaggggcttgagaagattgaaaagtcagaagacctttggctggaagcgattcgtcttcatcctcccaacgtgggaaaaaacattgttgcgaatgctgtacgggctttgccccattctgttaaaatttggttaaaagctgctgatttggaggccgatcttaaagggcggaagattgtgttgctcaaagcactagaaaacaacccaagttcggttcgattatggaaggccgccgttgacctacaagggccggaagatgcccgatcactgctcacgcgggcggtcgaatgctgcccattgagcacggaactttgg

SEQ ID NO: 93870 - DNA, 759 bp, Heterodera glycines
gtggtccgttcccctgcgaaaatttgtccatttgcttttcaccagcgaccttatgattgtcattggcttccgcgaccgcgtcgatttgctttcttcgctcattgtcatggccattttggccgtcggctgtctctttgcgttgcttttcaccctttttcaacttcactccgagactttgcatttggccaaattgggctccaatgtgctctcttccaatccggattggcttcgcgacgcgctgaactacacgggaggccatctgacggaggaggacatcgacgcttacatggaacaagcatatcagcagggccggacttggttggccagcaacatccgtcagctggcggacccaaaggatgcggcaagggccgatcggttggaggaccaagccaaattgctcgtcgacaacctctaccatttgtgggaggaacggcgaatcgaagacgaaacgtacaaagacagtttgaccacctttggcagcaccggtgaaagtacagcagggaacaagcgaaagcgagaattgtcatcctcacaaagcagcaacggaaatgccgacggggaaggcgaaaaggaaaacgacgccgggggcgaagagaacgacgaagagaagcgggcgtggctttacggactcgtcagaaatgccaacttagccatgtggaagacagaactgacgtcgatggtctcgcagaacatcgaaatggtgtggacgattgctcactccctttggcactttctgttgatgaacatctctttgctgtc

SEQ ID NO: 93871 - DNA, 199 bp, Heterodera glycines
gaacgtccataaggaaatgttcgaattcgatttagggtttttggtccccttataggttttcagtcaaaaatcatttttcccccaatttttaaattaaatcgttgagagaatggcgctgtctttgccctccatttgtaaattgttttgtttgcctctgcgctggtcattttggccttgacgcattttgccgggcgaccgg

SEQ ID NO: 93872 - DNA, 677 bp, Heterodera glycines
cgaatccctcagactggaaaacgctttataaacagagtaatcgatgacctttcaagcttaaagggaacaatagaaacattggctactgagagtaaacggggagcggataatgtttttgagaagggcggatttcgacgccaatttggcacaggaggacgaagaaacagccaagcggactcgaactttcactctgccaccaaaccaaacacactaccactctgccacgagaccagttgccagaataaggataaatgtccactatatgctgcaaagatgatgacgtcaccactgcgaggggtacggtagtccggtgaaaattcgcaataaattagccgcaggcaagtggactcgaacttttggtctgccaccaaaccaaacacactaccactctgccacgagaccagttgccagaataaggataaatgtccactatatgctgcaaagatgatgacgtcaccactgcgaggggtacggtagtccggtgaaaattcgcaataaattagccgcaggcaagtggactcgaacttttggtctgccaccaaaccaaccaaacacactaccactctgccacgagaccagttgccagaataaggataaatgtccactatatgctgcaaagatgatgacgtcaacactgcgaggggtacggtagtccggtgaaaattcgcaataaatta

SEQ ID NO: 93873 - DNA, 472 bp, Heterodera glycines
tttgaaaaggcccacaacaatttgttgaggagagggccgaccctttctcgtcgtccgggaacaaaaagggcacgtaacaaggcgtcacaaagggcgttgttgtcagtgctttaagcgcaaaaattggggcgataattccggcaaaggttgacaaaacgatgatagctccacagagaagcaaggttttccaattcgccctctccaccatttctatgaatggggccggctcgttgtttccaaaatgttcggactcttgggatttgcattctccggccgccaagtacaggtaaaacacgctggggaacacaaccgaagtcagcgcaaccgttgaaccaccgaagaagtcgagggcgggcccaaagctcggcacggactcggaagtcagcccaatggcagccattacggacgagcggaggacgacgcgtttccagccgaaatcatgggggacggagaccacttcccccctttcctg

SEQ ID NO: 93874 - DNA, 290 bp, Heterodera glycines
aaatcctgttctaaaaagttattctaaaaataaaatttcgaactcttctatactttttttctaatgcatccaattgtttagcttttgcttagaaaaagcttctcctcatcgagagcgttcgagtgataccaagtttatgcaatttcgttggtaaaaacctccaaaaataatttttaaaaatcgtcattttttaatattttggacaaaaataaataaaaatattcatgttgcacaacggactcgaaccaacaccctttgtccccttactatcttacaaaaaccactgagcc

SEQ ID NO: 93875 - DNA, 350 bp, Heterodera glycines
attcgctctccccataaatctgggcgcatcgcttcggggggacggctcgtataagccaaaaaaaaaaaaattattttgaaaaaaaattattaaaaggaaatgactagttactatttgaataggttatttcgcgtccgttcaatgtccctgcaaagtttggtgtgcgtgcttctgatcagtttctgaaaaaaaagttaagcctaaactttttggcctgtttaaaaaggaattaaaaatttttaaaaattttattcatctcccttttgatagaaaaagcatcagagagccttatttaacttttaattaacatttggtgcgtttcagagcacgttctaaaaaatatttatgaa

SEQ ID NO: 93876 - DNA, 647 bp, Heterodera glycines
ctgttccctgggctcccagaaaattggatgagttaccaagctgaaatacgcatgccaaaaatagaaaccacgcaaaacaaatgaacatgaacgaacattgacgaagttggacgcaacgcagcgttaagccgaagcattgaagcgatcagtgaacgcgctgtgtgatcagaatctgtaattggtcaacttaagtcagacattttatgtaatataatgactagacatggaaaaaagccatcaaacgatcagataaaaagtaatgagtaatggtccgatcaagatgggttccaattcagtaatctaaaccaccgatcctgatcacgggtatgatgatgcatcgatcagtaatcaaaaccatcaagtcagatgttttctagaattaattatgataaacgatggttcaaattaggagtagtatagagtaccaaaagcgcacggttgcgcacgggtgtttcccgcacgaacccatgcctatgggaggggcgcagccctttgatgttgccgccccgcacgaacccatgcctatgggaggggcgcatccctttgaagatgccgcacgaacccatgcctatgggaggggtgcagccctttgaagttgccgcccgtggacccatgcctatgggaggggtgcagccctttgaagttgc

SEQ ID NO: 93877 - DNA, 693 bp, Heterodera glycines
  unsure (1)..(693): unsure at all n locations
ggtaatnatgaagatnttttngaaatggtnaatgggggnggnatgccntnntttatgggnggnggaggggggttgtttnagnaaatgtttagngggggaagggagnggtngngnaagggggagaaganggttnagnntttanaagtttngttggaagaantgtanaaagggaagaatanaaaattgnaattgangaagaaagtggtgtgnaaaangtgnaanggaattggtggaaaanaagggtnggtttggaaatgtganngttgttagggaagtggaaaggtttttngnangngtnagattgggnntggaatgatnnaanagatggnggngngatgtgatnaatggtngggtgaaggagaaatggttgatgaaaaggaangatgtaaaaaatgtgttggaaggaaaanggtgnaggaanaaaagataatngaagtgaaaattattnngggaatgggngataatnaaaagattgtnttntanggagagggggaanaggagnttgggattgaanngggggaagttgttttggtnatnaaaangaagtaaaaagaanaattngagngaaagggngaagatttttttatgaaaaaaaaggtaagtntngnagaaggggtttgnggttttattaagaccattaaanattttgaaggaaggaaaattaccntnannangatggccggngatattata

SEQ ID NO: 93878 - DNA, 488 bp, Heterodera glycines
atcactccctcatagtccttccggctcgatcttcgtccgcctttcccacttcgactgactctccgcccacagaccgtccgtcgtctgtccgtcgcttagccaatggactcccagcagtgtcccatgaaagagacggatgagcaccgtcagatgcgccgtatcgctttcgttgcggtcgttgtttcgacggttgctgtgattgcttccgtcgttactttgccaatgctttacaattacgtccagtccttccaaagtcatctgatggttgagacggattactgcaaagcccgtgctcgtgacatgtggctggagatgaccgccctccaaattggcaagggacatgtgaaccgcatcaaaaggggctggttgttcggccaatgggtgcccgagagcggcgccgatgcttacgctgcgggaggtgggccatccggcggtgctccgtcgggaggtgctccgtcttctgcttcggcacccgtcggggctgtgcc

SEQ ID NO: 93879 - DNA, 556 bp, Heterodera glycines
  unsure (1)..(556): unsure at all n locations
tgaanaatggngnganaaaatgttnannggtgagngnataaantttanggagganngannagtggttnatgttgntgnaaggaananatnaatgangnngatatttgtnaataataatgangttatggnnagngtaatggnggtggtgannnagatgaagatgttttgnganganttgatnagtggnngatggannggntgganaggggaangnatnaaggangtggttaanatnggaattggnggntnggatttgggnnngttgatggtganggaagnantnaaanngtannaanaaggggntaatntggatttngtgtnnaanattganggnantnatttggnccaggtggtnaaaaaggtggagnntaaaattgtggtnttnatnatngnatngaagaagttnanaannnaagagaanatnannaangnggagtngggccgggaatggtttttgggngagggtgtngaaanggggnaggtggnnaaaaantttgtgggngtgtnaaccaatggnnaaaaagtggaggatttnggtattgaaaagaagaatatg

SEQ ID NO: 93880 - DNA, 612 bp, Heterodera glycines
caagttcgtgttttaactaaaattttatcgaaaccgttaattcgcaaccacaaaatgccggcccaatcgccattctttctttggtggctttgtatccgcctgaatttatgaattggcattttaggatgaatgagaacagggagagattctacgagccgggaatgactcaagcggacgtggcgaaggccgcaggtcgccattttaccgttacagaattattatgctgtacagtagcccagaaaagggaaggcaaaaaccatttattttagtcttaattattggttccgattcctttataaatcgttttttggattaacaaatgccatttcgggaggattgcactgggcgtattttcctcaaatagtaaaacattttccaggcgaggaatggcgccgtttgcccgagtcagagaaggccaagtggggacagagatcggcggaggaacgaggacgtcaaggggggcaagatgtggaggaagaggagcagtaaaacggagaacaaagggagtgaggggggaaacaaagagaaaacgaaaggaagaaaaccccctttgatcatttaatttgatggcactccaacacattctcatgggcatttcagcctttcttctta

SEQ ID NO: 93881 - DNA, 385 bp, Heterodera glycines
aacttcctttatacgaccccagcagtatttctctcttttcggcaaatgccttgtccgttgatgatcagagcagcagcactattgccgaagaaaggcctctttcgtccgagtcacaattagccgccaaaaagtcaattggcacagatcagacggaacatggcgaaacggacggaagattttccacttaccatcgaagaaaaaacatggaagtggtgcacagacggaatttgatcgaacgtttggataaactgaaggcatcgcacgaagccttcttcacagttccgcagcttaaagccgtctcaaataatcaattgtctctttttctgcgtcggctgctaaagtcagcggacatcaaacagcacatttcaacagaacttttggaaag

SEQ ID NO: 93882 - DNA, 685 bp, Heterodera glycines
acgaactgttatggatgggcccaattagcagaaacaatttgacaattgttgaagcgaagtccgaaattttcgacgcactcgacaaagtgggcaggcgcaaattcgttcgccgcggtttcgtctccgccagtctccgaaatgaaacaaatttcgttgtccgttgtgctgttgagaattgctttctgttgtccgattacgagggacttgacgtaatggtcacgcgatttgacgccgaaagggacgaaaagcgggcggaaaaagcgaacgagtggcttaaaaagtgccaagaaaacggaacgaagaacaaaacggccgaaaggacaatgagacaattcatcgaccaaaattataacattggcaaagtgtctgagctgctggacaactttgagaagcagcactttaacctcaccaacgatgctttgtaccgtaacatcgccattctgcgcgattacggtagcattgaccgatgtgggattacggtctcttcaaatgaccgtccatcggacaatcacacggcaaacgctgctgctatggtggactattacttcgcggggtccttttggcgcgcctgcgaaagttatgccatctatttttacacttgacaaattcagcaccttggcggaggacggaacgccaaaaatttcgattggattatgccatttaaaaaaataataaatttaatgtt

SEQ ID NO: 93883 - DNA, 401 bp, Heterodera glycines
ggtttcctctaccaaaaaaagcgacgcagcaaaagggcaaaaaggatctttgaagggccctctaaggaggggcgacggacagcggcaaaaaggagcagtcgaaaggggcggggacatccgtaaaagtacgccacattctctgtgagaagcaatcgaaggtattggaggccatagagcggctataagcgggtgagaaattcagcgaagtggcagcaaaatacagcgaggacaaagcgcggaacggaggcgatttgggatggatggttcgcggctcaatggtcggcccgttccgagaagcggcttttgcactggccaagagcagcgtggacaagccaatctacacggatccaccggtgaaaacaaaattcggatatcacgtgatcatggtcgagggaaagaag

SEQ ID NO: 93884 - DNA, 312 bp, Heterodera glycines
gtcatccagcgatgccggacagcccggcgagccaggcaacccccgtggagcgggcgagcccggacaacccggagagaagggagagcacggacactgcgaccattgcccaccgccacggactgcgcctggctattgagcattgggaagccaattttggagatgacaattgggaagaggagaagaaaagtgggagaaaaagcaatgaaagacgaacaaaaacaatttgggaggaaaattcattcattgacaatttaaaaagcaattaaaaatgataatgataaaagcaattccaaaaaaaaaaaaaaaaaaaaa

SEQ ID NO: 93885 - DNA, 216 bp, Heterodera glycines
gcctttaggaattggacaacaatcaggtcaaaatggaaacgatcctagaagagaaaaaaggcaccggcggaggagggaaaaacagcgcatgaattgatgatatatgttgaaatattttcttgtttatttggagatttcaaatttatatcttttatttatcaatgttccgaaaattgatacggaaacagcaaaaaaaaaaaaaaaaaaaaaaaaaaa

SEQ ID NO: 93886 - DNA, 474 bp, Heterodera glycines
ctccttcgtcaccaacgaatcatttggtggcgttggtcactccgcctacttccgggtttcggcaaatattacagacaaaaaacatcgaattcactttgcctttcaaaacgacagaatttgttgagttgggccgagaagattgcccgaaggattttttgacaaatatcggagacgaaagtattggcatggaccatgacgaatggctgcgtgaccttggcatttcgccacgttcgaaattcaaattaaaacaaagtccctctgagttggacgtgtcgtcggcttcgcttttgtccaacgaatcgaagaatgattcttccggccttactaattgtaagagtagcgaagacaattcgcgcggtttgtccgccgtttcgtccgtcgaaagttcgaagtccgccgtactcatccgtggcgccaaaaatgtggaagccttttgccgtcttttgattggtcagccgactctttgctccacca

SEQ ID NO: 93887 - DNA, 415 bp, Heterodera glycines
ctcgttccagtgacatgaccttccccgaaattaaactaggccttgactccattcgacaatttacaacgaagggctgggaaaattgttgggtcatagataccacccagggtgttttggagtcgctctacactgattcgcttggggaaggtttgaacaccgacaatgttgaccacgcgcagctggtggatgcacagtgtgatgctctgggtgtgttggatgcgccgaaaaacgcgtgccgccattttatttacactgcttgggtggggcactccggtgaggaccacacgcgccgattggaagaccagcgcagccacagttttgcccattgttgtacggatgcgcatgatgatagcgtgaaagcgcctggggttatactccgtgtttgagccacgctgcgcaattgccaagaattgct

SEQ ID NO: 93888 - DNA, 193 bp, Heterodera glycines
atccatcgattttcgcttgaggcgcgtgcccaccaattgttggccattgctcggcttcactgttacgaattctcaaatttttatgccaattgcgtccccaatttgctcagcgaattcggacgagagaacggtttgggcgagcagagccgcacaaaacttgagaaagcattggcccattcgctgttcaaagact

SEQ ID NO: 93889 - DNA, 372 bp, Heterodera glycines
attcctttaacagtattataatgaagttgttttcaacatttgttccatgttagatgctcatcatcggactgatgggcattattgctccagtgaattcggaagaggaacctggccaagaacaagcttctgctaaaaaggaagaagatgaaaagccaaagcccccaaaaggaaagggagcgggaaaattccgttttttgggcggacgacgaatgaaatgagcagagaagttgctgatttgcttagattagaggctattaaacaccaaattaccgatgaataatcatttaacaataataaatatttgctctcttttttttgattgaaaaacttggaaaaacaaattttatccaataaacttttattcatcgtacc

SEQ ID NO: 93890 - DNA, 206 bp, Heterodera glycines
atttcttgcttttggccttatggacaaatgttccatttttgcaagcttcatttgtaatatttgatcatttccaatatctcccagcatttgtctctttcacgcttttgtccatgttttaaacacagacgatgcctttcactcactcagaattaaatttttaataaatcagattctcgacttaaaaaaaaaaaaaaaaaaaaaaaaaa

SEQ ID NO: 93891 - DNA, 231 bp, Heterodera glycines
  unsure (1)..(231): unsure at all n locations
gggggggggggggggggggggggnnggggggggnngngnnnnnggggggganggncggggggggggggncggggggggggaggggcggnggggggggaggggggggggggggggngganccnnggggnggggggggggggcaaanggcggggnaggnggggcngnaggggnnnnnaangcgggnngtagggaagngggggggaggggagcgggccacggnggggcgggggg

SEQ ID NO: 93892 - DNA, 760 bp, Heterodera glycines
aacccttctcgattttgcgctctccgccacagcgccacaatcgactttatacagaccgaatggagtccatttggcgttccgctgatgggaaaacaatcaaattttacggcaacgttttcgcttctcttgataattggttgctgtacggtttgaactcgatggtcgcaactctgttggccaaggatgtgtttgaattgcaacgaattgtcgcacgacttccctttgagcagcaccgttcgttgtccgcctcgccaacggcacttattgcccagctgacaacgaatgcggcagagtttacacagtccggtccgaatcgcgaactgttgttcgccctcgccaaattgggtcagcaattactgttgttacgcaatctgcaaatgttcgtcaaagcggagaaacacagccaattgggcacactgcaaacagcggaacggacactccgaaggctcacaaatggtgaaaacatatcgaccgacgaaaacaatccgacaatggacttgatggtcctaaacactgacaatgcgttgctcgactttgtttccaaacatcaatcgcttaagtctcccactgctcaaatgtttttcctttctgtgattttgtacttttcctttgtcgctaaagacctcacaacaacgacagcctcccaaaaaggtgaaaaaatcgatggagttgcggtgatggaaggggcgaagctgatgctgcaacattcgcttctttggacacatttatcctccgattccacacatttatttgtgaatgc

SEQ ID NO: 93893 - DNA, 665 bp, Heterodera glycines
tccctgcgttgggtgtggcaataaaatatgcacgaaattcatcctgtaaaggcatttcgcatgaacttgacgaaattgagttggtcaacgacggcatcaaaaacatggcatttgaatacatgcaggcgttcattgtgaaggcgccggcattttttgaattccctttttcaattgacgtggtcgactcgctgatcaaaaatttcatttgctatttccgcgacaagcttgtcgaaatgtgcaacctttgtgaggaggaactgtactcgttgctgatgatgcaacatgacaaaacggcgcaccagcaaatggcggacgacggcgcatcattgccatggcaaacccatcattctcatcatcatcattattcgccatcgtcgctgtcgaagaaagcggtgccaaactttgccaatttgcacttcaaaacattccttgaactgatcgccacactttatgagcgtgaaacggaccaaattgttcgatgctcgcgtgaatttacggacccaaattgcgaaggattgtacgactttgtgttccgaaatcgggcaatctcggcaccttcacttaaaattgcctatttgtcaatgctcacttcgctgtgcaaaagtgccgaatcggcagacgctttctttaattttttcaaataatttttgattttatttttttgt

SEQ ID NO: 93894 - DNA, 466 bp, Heterodera glycines
cttctttatatccggattggccaccaccatcgcctcaatgcccgcgtttacattgtgaagacgagaatccaaaacatgagcgttgttgacggtcgtcctgaattctccggcgtcgtggacgtcgtccgccgcgtgttggccaacgagggcattttcgccctttggaagggctttttgccctattacatgcggctgggcccgcacactgtgctcacattcatccttctggaacaaatgaacgccctttacaaacggttgaaatacggcgcctaaaaatgcatgagggagaagaatgaacacacttttccgatttcaatttcactttttaattttgttgtaaaatgtcaccaattaattttaattaaaattatttggtggtattaatctttaattggcactttcatcgtcgtgtgagcattaacagatataatttcttattttttgccggttttctgtttttgtacgc

SEQ ID NO: 93895 - DNA, 127 bp, Heterodera glycines
tgactatgaccatttgttcaagttgctcataattggcgatagtggagtgggcaagagcagtttgctccttcgctattcggacgacactttcatctccagatacatcacaaccattggtgcggatttc

SEQ ID NO: 93896 - DNA, 372 bp, Heterodera glycines
  unsure (1)..(372): unsure at all n locations
aagatatcgacctggggcaaccgnctccagctccgtcagcacatgagccggacccaactgcggatcccgacccagacccggacccgagcatcgacgaggaggccatggtccaagccgaccacgcgctcgcactgcaactcgcccaagaagaccaagttgaggtcgacgagaacgatgcggtttcgttctttagcatagctggaccacacacagncgttgcgatacaaggccagcaaatggagtgtatcggacgacctgtgggccaacaagttgattgtgccgtgcaacctgctcatttttgtcgtctcgatcgcttcggtcgtagtcacagcttccctgccaggcccatcgccggcgtcaacgaccgagacg

SEQ ID NO: 93897 - DNA, 271 bp, Heterodera glycines
aagagccaacacggccaaagatgggctcccccgttgttctgattgattcatccgatggtttgagatcgacgtgcctgaagccattggaaggatggccatttttactcccggcgactgaattggcatcggagtgaccggcggtgatgactccacggtgttgggacacgtgcttgctccgctgaacgaaaagcattcctatggattgccattggatcttttgtgcgtggaccagggcctaaaaagttaccgggacagactcattctttcgatg

SEQ ID NO: 93898 - DNA, 715 bp, Heterodera glycines
  unsure (1)..(715): unsure at all n locations
ctcccttttcgtcctttctatttgagcagtttttcccatggttgctttccttaattgctctgttctctataattatttggttgcgaagcaaaacaaatcgaactttgtttgtgaatcacgaaaaagggagaagactaatggccgtgcttggttctggcggacatacgaccgaaatgctcaaattgcttgctgcccaggacgaccttttccctggaaggctgtacgtaattgccaaatcagataacttgagcatagtaaaggttgaggagtttgagcgaacacatggcaataaattctgtgtcagaatcgtcccaagggcacgtgaagttgggcaaaatttgctttcttccctcgggagtactgtcgttgccttcttctactcctttaaactcgtttatcaagaacgagcggacgttgttatcagcaatggacctgcaattgggcttgggatttgcctttctgcctgtttattcgattttctccggttgtatcgttgccgtgttgtctttgtagagtcaatttgtcgtgttcaaaagctttcactaaccgggtggctaatttactatttccgaatttctcacgcgttcatcgtccaatggaagaatttgcaaaagaaatacccaagaagcgaatatatgggcaggctcatttaattttcatgcttgctgtaatttttcagctaataaattggtactcatgcaaaaanaaaaaaaaa

SEQ ID NO: 93899 - DNA, 470 bp, Heterodera glycines
cacgcttgagcgacaacgaagcaaggcatgttggtcaaagacgcactagtgaggccggacatttcgaagccgcgctgggaccagtcgacgttcagtggtcgcgcacggcacttcttcaccgtggtcaacccactgaaccttttggcatcgaacaaccaattggaaaacagtcgcaaaatcgtcaccgattacgagaaaggcaaatactccgacaatttgtccgtcgatgagttatggcgtgccaaacatctgtacgactcggcattccatccgcaaacgggcgaaaaactgttgctgatcggacggatgagtgcacaagtgccagctaatacgatcattaccggcggcatgctcagcttctacaagtctactcctgcggttgtagggtggcaattcattaaccagacgtacaatgccactgtcaattactctaaccgttcgggcgatgcgttgagcggcgcacaactttt

SEQ ID NO: 93900 - DNA, 479 bp, Heterodera glycines
gtgctactagcttggggtcggatggtccgatggcagcacaacgacttggtgggcgacgtggtcactttgctgggccaatttgcggtggtcggccgattggccggcacagtgttcgacgggcaggacgtgaggacggcatgggacgtggacaacgccgcctccttcgcactgctgcgccaaccgtcggacgaagtgtccgagacgctggacgaagtttggctgtacaacagcagtgatcagcccctgttcatgtgcgtttcgcggaacgtcgcccgtgccgcggcaccgccctccgactctgcgctcgtgccgaacattcgccgtctgtccccgggctattgcgtgcgcgtgcaccgcatttgtgcaccccccgcggcggttgggtccgccgccgaccacgcgccgccgccccttccgtccgtcgcttcgccattccataggcaccaattcgttggcaacgatctcacgctgttctcctc

SEQ ID NO: 93901 - DNA, 591 bp, Heterodera glycines
cctccttccaaattcggcacgagggtccaattaagtgccattgggcctacgtgccgttcattcagccggacagcgccacgtacatttgtgctgaaaatgacgcggtgcgagagcccggcattcgccaacagttggtcacattgttgcgcgaaaagaaatatgagagccgaatgctgttgctgttggccaaaacgtatttgatggtgcagaacaggccgaccgccgccggctgtttaaagcctcccgaattctcgaaggccacttcgagccgttgttgtacattgcggtggagtactgttttgccaacaatttcaagctggccgccgactttctgacagacgcggcccaattgctatggatgcccttcgtctgctcgtcggtgccaacaatacttcaaatttgagtgccgttgttgacgaacaacaaaatgccatcgacgattattcggacggtcagcaacaaccgccgcaacaacagcatcaaacggttgaacaactgatggcccccggtcatcgacttcgggagccgttgttttgatcaattttcatgatttttgttttttttcattttgtctttcctcacctttgtttt

SEQ ID NO: 93902 - DNA, 807 bp, Heterodera glycines
ctcttttcaaaatatgggctaaatgaagcgaaaaagcgcgaaattctgagcgcttccgctgccgccggtgtttctgttgcatttggcgcgccaatcggaggagtgatgttcagaaccgtggaactgtgcgcggtggtgggcgtccatggaacggaacggccgcgttttgccattgtgtggagtgccgccgtccaaagggatggcacggacgcggtggaggacgtggaggcgcaggacccagcggatttggacatgggggtcgcggtggacgtggcagcttcggcaacggacaacacatgggacacatgcgccgttgaggaaccgagacaaagaattgcggagacaattctcggaggaggggaggaatgtggaatctgccattctctggaggaggcgagttattattttccgctcaaaacgatgtggcgctcgtttttctgcgctttggtcgccggtgttatccttcgttttgtcaacccgttcggaagtgatcagacttcgctgtttcacgtggactattccatgcgttggacattcatggaactgattccgttcgcaatgttgggcattttcggcggtgttcttggcagtttgttcatttgggccaacatcaaatggtgcgcttaccgaaaaaacagccgatggttgggcgcaaatccaatcaacgaagtgctcatcgtcagtgccatcaccggtgccatttccttcttcaacccttacactcggaagagtgcaagttcattgatcaaacagttgtttgaccgatgtggtcccgaggactacaccatggatttgtgcgattacaac

SEQ ID NO: 93903 - DNA, 599 bp, Heterodera glycines
gccttatgaccgcaattattgacgaggatccgctgggcgttgcatcatgttgacgaggacccgcgtcaggctgacggcaaacccgtggacgaggaggaggaccgggaggaagtgtttgtgaagccgttgatcacgtattactgccactgtggccaaatggcaatgatttccgacaccgccgtcgcgcggatgccgttgcgtcgccgggacggcgctcgggtgatcgaccccaaactgacggttgcgaaaacgttctgtgaccagggcgagacggtgtacatacgacgccgggaggggctggaacagcagtaccggaagatttgccgtaactgcaaggtggccctgttctaccagcatccgttcaaccagcacagtgtgctgttcatcttccgcgacgcgctcctttccgccaaggaagtgggcggactggcgggcaaaagtgaggaggaaaagtcgcgcaaagtgacgctgacgaagcacgtgcgcaaccacggcaaagtcggctcagtgacggtgtccacaattggggaggacgaggaggaggtggaggcgcgcgagctcagcgagtcctactcactgaacgcacggattgtcgaaga

SEQ ID NO: 93904 - DNA, 811 bp, Heterodera glycines
tgtgcgtcaagcggctttcgtagtaaattttttgtttccattgtctctggaaagaaggtgccttggcaacagatgcgtccgttgtttcattgccactttccgctgggtccccgttctgttcgtatgggccatcatttgctgggcctattacgtttacgtcgtcattttttgtcttgggatggtcgagtcaattggtcttcaaattgtctttctgttcgcttttaacacgcttattttcctgtttctttggtccaacacccaaacagtgatctctccagtcggacgacccccggaaattttcaatttgccccaccaaattcgttccgaattgagtgccgccgtcactgagacggaatttaaggccattctcgaacgttttgtcagagagcgtaaaatcccgatgttcagcaggtctaatgacggagctgttcgctgctgtttgaaatgctcttgtgttaagccggacaggagccatcactgctccgtttgtggccattgcgttctaaaattcgaccatcattgcccctgggtgaacacttgcatcaatttcaacaattacaaattcttcatgcttttccttggctatgggtctcttctctgtttttttggctttttcacaattcttccctttttcatctcattttggcaacataccgacctgtcacgggcggaagtgggcaggttcctcgtgttctttttgttcttcctcgccggtctgttcggcctgtccatgggctgtctgttcgggtacaatttgtttttgatttccaaaaatcagtccacaattgaatcatttcggcctccatttttc

SEQ ID NO: 93905 - DNA, 769 bp, Heterodera glycines
attcacttaaccacctcacgcaaacatgtcccgcccagtctttgcccactcgccaccgaccaccaagaccaatgacgaccacggcttcatttctatcgcgtccacttggcgctcggtacgcaccgaatcctcagcagccaccgttcaaaccgatcccgttgctctctcctcgtcggcatgtggccctgaaccacccgtcagcatcgagtgccagactaccgacgatctcgccgggtctcgtcctattgggtctgcggccgccgcacggtctgccgaactctcagtctcgacgtcgcgtgggaaactgtttgacgtgatcgagctggccactttcgtccagcgagttgaggggccgctgtcggaaatgctcatggaaaacctgcaatcgtccgcatttgacgactggccgcttgtcaacccgctcgcttccctctctcaagacgacgacaacgcaatctcaaatcaagttggactacttgcgctcagcgacaccctcgtcgccgaccctcaatccacctcaccctcatcagcgaatggtctttcactcgtcgctgccgaccgatccaaatcgggctcttcgctcatcctcgcctacgcccacccacacgacacagccaatagtcccgactcgtcgtcgccctggtgcacgcacacggcacacgtgtccgtgatcctcaacagccagaagcagcgcacggcgcattggcacgtcaatgcgtgtccgacgacactgaccacgcacccggacctgacaaacttagtcgccgtg

SEQ ID NO: 93906 - DNA, 745 bp, Heterodera glycines
cgaggaaggcgccgctgaccagaacatttgggacgttttggtcgcggggtccaacggatggtctaattacaggcaccaggcggatgtttgccatgcgtggcatgtgttagtcgaccacggagtgagcccggacagaataattacgatgatttacgacgacattgcgcacaacaaaagaaacccttaccccggcaaactcttcaacaatccgacaatgaaagatgtgtacgaaggcgttcgaattgactacagaggcgacgaagtgacaccggcgaatttcaaggccattcttctcggaaacgaagaagcggtggaggggaagagagtgctgaaaagcaccagcaatgacagagtgttcgctttcttctctgatcacggcgcttttggtttggtcgcttttcactacggcgacgattacactgaaaatatcttaaccgtaatggaattaacgcaaactttgcgaaaaatgcacgcgaaacgaatgtatggccagatgacattttatttggaggtctgcgagtcgggatcgatgttctaccagaaaattgcacagcaaataaacgtgttcgccgtcactgcttcgaatgctttcgagacgagttggggttgatactgtgacacaccaatcgtcgggttacagtacacttgcctgggcgaacttttctcagtcaattggatggaggactcggacatacagttatttctgcgcaacgaaacaatcgccgaaacattcaattcggctaaa

SEQ ID NO: 93907 - DNA, 326 bp, Heterodera glycines
gtccgtcaaactgtcagaggcgcaattttccatggccattgatccttagatgagtgctcttaaaatgggctgcatggattatgacgagagttacaagccaaagtttatgtttgttgtgggaaccaagcgccatttcaaaaaattcttcatggttcacgatggtactgttgtcaatctgacgcccgggtcggtgattaacgagaaaatggttcggccggacatacccgagtttttcatgcaatcacactatccaaaaaaggggactggcaagccagtggagtacagtgtgttggtggacgaaatcggcatgacgcaggatgaacttc

SEQ ID NO: 93908 - DNA, 277 bp, Heterodera glycines
  unsure (1)..(277): unsure at all n locations
cgacgatgttatttatctagaaggacaaacttttttaatcggctcccttggagcgaattatggagggtcggggagcgcattgatcacccccgaaggtgcgctagcgggaatccttgtcggttcggattcgaaaatgaccgtcaatgatgcacttagtgaatggctcgattcactacatgaacaaaggcactcaaaaatggtcgatatcggtgccatactaatttcctatcgaaacatgataaacaattaggttcnaaaaaaaaaaaaaaaaaaaaaa

SEQ ID NO: 93909 - DNA, 474 bp, Heterodera glycines
gtccatatgtgggaagtattgggtaccgcataaacatttttagcctgtatttagaaaaatatttattgaggagggtgagaatattttggggatttatggacattttatttaggaacggggacgaaaaataaatttttgggtgcgagtgggattgattttttggccattcaattgcataaaagcgaaaataagatgggggaaattaatttgcataagagggattcgaacctgtgggggcaaaaacaaacgccaaacgcacaacctccgcaccatcgaacaacacaaaatggtgcaaatgtttattcgatttattgggatagaaaaaagtttggcacgtcatatctcggcactcgtacttatttcgcagaaaataaaaccacttttcttaagaacccatgggtgctctatgcacccaccaaatttcattccgaaactccacggacacctccagaccttcctttgtgagcacagccc

SEQ ID NO: 93910 - DNA, 577 bp, Heterodera glycines
cttctttcaaaccctccgttatgccaatgccattctcttcctcctcctcctccgatgtgccaatgccattctcttcctcttccccaccgcctcctccttcctctaatgagtgctccttatgcctacaatggtccgaatggaatgactgttcccaaatgtgcggcggatgtggtcgtaagacgcgtcgtcggcactgtccttccgctgtttcatgccaaagggaggaaaagcggatttgcaatcgaatggcatgccccgaaggcaccaattttctgttcaataacggcgagttccacctgttgtggaagggctgctgtgtagggctgatcctgaacaacagcacggcaaagggtgatggttcgtccgtccgcggagagtgcggtccgttggaaaacagtgaaaacccttttttacgaattatttcgtctctgctgagttcgcacgacggacaaaaagaaaagacgaaaagaaatggggggaaaagcaaaagtggtgaagacaaaaacggacaataatcaagcgcattttgttaattttattaatctctttgttactgtaaaataaaattgacgacttc

SEQ ID NO: 93911 - DNA, 711 bp, Heterodera glycines
ctcctgaacgggcagtcgcatcatgtcagcctcaccctcagcccctgacaggtctcacggccaccacgacctccaccggccgggcgtcgatcaccaatccgcacagtttgccaacccccacattcctccaatcgacatgctacaagcattttgtgcaactgacgagaaatcacgggtgtgggacccaacgttcgactcggtcttgagccacactgccaacacaggtgctttagccgttgactggacactacttcgagagctcatcaaagctcgaatgctccatgaagtcagcggccttcacgcacaagcagagcaacagggacaatccctaaaccgggcggaaatcaacgcgcaactccatgtgttgggcggatttttcaacgcacttacgacggctccattcaccgtacagcggatgtgtgaaatagccctcactcgacagcataccaacgtcatcaagtacttgcggcaaatcgagcgcgtggtctgtgtctcctcgtctgtttccgactcggactggatcaggaatggaactgctggtgaagacaatgacattgtgcccattggtctggtcgcttcggacgcgaacatggcaactgcggaaccaattgacactgacatgtcctgagcagactttagctgaggaaccgcacgtgtgtgagcatttgtacatttaccttgtctctttggtatacctcaccataacccggc

SEQ ID NO: 93912 - DNA, 468 bp, Heterodera glycines
atcccttttccggattcttaaattggatcgtgaattttttttcgactttacaagtgatttcaaatcgctttgtaggacttccaggggcccgaaaattaggagatgagttttccagtgccttctgacgatgatttttatgatgaaacaacagactatttatatttgaccaatgacaatgcaaatccgactaactgtgaacagactttggcgaatgaacacagtgccgtggcactttcgtcggcaatccccggcaatgatgaaaattcctcgtcgcccgccgttccctctgaacgaagtttagaattgctgaagaaatatttcggttattcgcgctttcgccctttgcaatacgaagtgatcgaagcggctctaagcaaacgcgaccaattggtcgttatgtccaccggttatgggaaaagtgtgtgctaccaattgccctctctcattcaaaataatctcactttggtc

SEQ ID NO: 93913 - DNA, 820 bp, Heterodera glycines
gatgcgtcagacggatggacaaactctttctccgctgcccatgacccctgagggcgcgtcgcttgaggagcggcttttcctgtccaacctttccctggcagatgagttcgatgtgtccatggcgtttttcaacgaatgtgtggacatgaaccacttcctgtgggagttccagcgtgatcccacctcgcgtccgatcaccgccgccattttcgccgttgtctattcgctgatcgttctggtcggcgtctctggcaatatttgcgtccttttgtccatcggccggacgcgttctctgcagacggtgtccaacctgttcatcttcgctttgtcctgctccgacatcgtcgtctgttgtgtgtccgccacctttacgccttacaccgccttcactaaagtttgggtgttcggagttgcgctttgctctttggccaatttcaccgcgggtacatccctttgcttttccatttttgtcctcgccgcaatttctgtcgaccgttttttgctcattcgctttccgctcaacaatcagcttcggcataaccacgcgttgctcattatcccgattctttgtttgttcgcaatgttcgtcagtttccccatgattttcacacaaaaattgctgcggatggagggatactgcggcgaattttgcgttgaagattggggcacaaatgaattgtatcgtgaaatttacggcacccttctgttgattgtccaattcttcgtgcctttgctcataattaccatttgttacatcggaatttcggttcggctgaacagaaacattttgctacgccgtaaaaagatgggcaattcgtgg

SEQ ID NO: 93914 - DNA, 321 bp, Heterodera glycines
  unsure (1)..(321): unsure at all n locations
atcatcaaaagttccgtttataatccatgtccattcaacgtccctgaaggaggactgggacaatcgcgaactgaacagcattatatccgacaacatccgccaaatttccgagtttttgagtcatttcgacgagacctgcaaggcaaaattggccacgctgaatgacaccatcacatcgatggagcgaaaggtggaatttctcgagtcgacggtgaccagaggagaaacgctgaattgattttccttccttctcatttttatttatttatttttgtaattcaataaacgtttctgaaacnaaaaaaaaaaaaaaaaaaaaaa

SEQ ID NO: 93915 - DNA, 291 bp, Heterodera glycines
tctctcggtgtgcattgcgcgtgatgtggaggcctctgctgtcgcgattttgccaatgcattcttatgcccatgtgatgaaatcagtgacagtgccttcggtggtcattggcggtggtgcggatttgaatttgccaacttcatcagatcacgttccggcggctttcattttcgctgggccagtcaccttcgtcctgttttttgcagtcaatgcgttcaaatggcttctcccagtgttctgcaaatacgtgtgcccccgttgatgaagtgctgtggtccccaagaaagcgga

SEQ ID NO: 93916 - DNA, 471 bp, Heterodera glycines
agttcatcgtcagcagtctcttcggcgtcctccgttggctcggacaatgaacggatcaatcggcggcacaaaaatttacactccagttcgtatgtcaaccaattgtatatgaacgcagcttttggctcgggcgatgagtcatcttcgaccgaaacgaatgctgtggacgaaaagcggaaggctcgcgtccgaggacttctcgagcaaatccccgtggacatttacacggagggagcgaaagggccggcggagtgtgcgatttgcatgggcgactttgaggagggcgactccattcgctttttgccctgagtccattcttatcacctccaatgcatcgacgattggctcctccgctccttcacttgtccggcctgcatggaaccggtggactccgcgctgctttccgtcttcacgggtaacaccagcaccgacctgaacgccctcaccggcagtgcgtccgcgtgcaattcc

SEQ ID NO: 93917 - DNA, 405 bp, Heterodera glycines
atgttccaatttggatccagctttgattaacgttttgttggacgatgtccaattgctaacagactctcaaactgataatgatacgttgctgtttccaattgtaaaagcttttagacaacttcatgctcaattgaaggaggagcttagttgcgttttaagtggacaaattggcagtgaaccaaaaccttttactctactttcgattttggaaaaacaaccaaaaaaaaagtctgacgataaattggaaaaagaaaaagaaatgccaaattctaatggtaaagaaaaagcattgaatgaatgcgctgaatcgattgaagtgatcagtttgaaagagcagaaagcaagcgaactgaacattgataaaatgaaaaccgatgttgccaatacgacgcggaagaatgtact

SEQ ID NO: 93918 - DNA, 478 bp, Heterodera glycines
  unsure (1)..(478): unsure at all n locations
tctttatagngctcattctagtacagaaattgtgggcattcctttaaaggccttcgtagttaaaaaatgtggtcagcccaaaggcatttgaacattggaacatgactgtgcttgtggttgagaccgttgttcaagtgttcaagaatagtgttcccgagaaatttaatctgatcactgtaaatggagccgatctgaaatttgccggcaaatcctacgttgaagacacgtggtttcccggaatgcgttggacttcttgcgtgtgctcctcctgcagttcacatattggctggtatttcgagtcacagaaggacgattttgtcggtctcgtcctcgattatttgatcagttcggaatacgccgacacattgacaaaagtgcctttcggctgaatttgttcatcactcttttggctgcggtttatttacgttaatataaatggggaggcattggtcctttttcttgtcaaacttcaaaatgt

SEQ ID NO: 93919 - DNA, 277 bp, Heterodera glycines
aaggcgaagaacaacatcagcagcatgagagagtgttttcttcagtgactgacgcggtcaaattgggttttgtggacgaatgggagcctaaggaatgggagccgactgacaattctcttcaatccgcgttggcctgcgaaccgcaattcagtgaacggttcacacaaaactacgagcaatggttggaggaagaagtgtacggtcagcagacggattgggactcactgctgcgcaactccaggggactgttggacatttactgctgattcgatagaac

SEQ ID NO: 93920 - DNA, 464 bp, Heterodera glycines
gtcctactagcgcacccactgaattccatcgtcaaatcggcggactttattcgccgacggagatttgccgcaatttttgttgcgattttctgatgaacgtggaaggcccaaccaaagacacagagtgttcccgaaaatgtgccaaagcatcgtttgccattggcacatccatcaaaaaacagctgagggacttgcggaggatgggctgtgccgcggcaaaaacacaatttgccgcattggaggattgcctaaagggcccagcacagtatttcaacgacataagccaaagaagcagcagcagaagtgccaacgacgacgacgagcaggacgaggaaatggcaaaaatgcgggcactgaacaagggcggaggagcagcagcaggacaaatgaccaaaattctttgaaaattatacttttggcccataaaataattagggatggattaattatttgtattctttcca

SEQ ID NO: 93921 - DNA, 302 bp, Heterodera glycines
  unsure (1)..(302): unsure at all n locations
naaattccttttttaatcggcttttcnatcgtaaagtgcattttttttgaagggagttggggcgaagtttttcgggactttttatcaaagttttcgccgttttttcggtttcttcacagaaagggttacataacttcggttttgtaacccagtttcgcgttctgtgcgccgattacatcttatcgcgtacgcgataaacatgtggcaagcatcgttgcaggattcagatgtttcctccttacttggncggctaaggnatggatttttttttttatncccnnngccgggcggggcagggcggg

SEQ ID NO: 93922 - DNA, 229 bp, Heterodera glycines
  unsure (1)..(229): unsure at all n locations
gcgattttttgctgctttccgttgaagaattttccccaaaattcggggtgcatataagaacaagcagaaatgtaattttaaagggaaacattttggtggtttttgaatttggtggggaattgcaagcttttctcgggtatttaaacgaaattttttcatcaatttttcattaaattcttgaatttcatccatttctggcttnttgtgggccgaggccggtcctctgcgg

SEQ ID NO: 93923 - DNA, 439 bp, Heterodera glycines
cttaaatgctcccgcacttgcacaatgggtggcaggttgaccaggccattttggctgaggaggaccgtgtcgtgctcatccgatttggccacgattgggacccgagttgcatgagaatggacgagacgctttacaaaatcgccaacaaagttaaaaactttgccgtcatttacttggttgacatcagtgaggtgcccgacttcaacaaaatgtacgagttgtacgacccggtcaccgcgatgttcttcttcaggaacaagcatattatgtttgacttgggcaccggcaacaacaacaaaatcaattggccaatgcacgacggccaagaactgatcgacatcatcgagacggtgtaccggggcgaacaaaaaggccggggtttggtcatctcaccgaaggattaatccaccaaatacaaatactgagcaacacaaatggc

SEQ ID NO: 93924 - DNA, 425 bp, Heterodera glycines
gttgggtgtgcaacgacgtgtggatggacattctgccatcgtttgaccacgctcaacttggcctcaaaatggcattgctttcgccacgttttgatgcgttggtggacaaacattttgatggcaaaacgcaatttacgatttggaaagcaattaaaattcgcaaggacactgatgaaatgccaaaactttttgttgaaggcaaatcggagggatttccattgccggaccgtccgctgcccaacaaaatcatctttaccaaccataagcaccttcagattcagtacattgatcacttcgtcatcgaatttctccgctccaatcagcagatttgggacaaaggcagcagctttagttttatcgtttgttcagcagataaaaacgaagataacaagccgatttggagtgtttttgtccgtgaaatttgg

SEQ ID NO: 93925 - DNA, 224 bp, Heterodera glycines
tatggcccaatatccggccccaaattccgccccccctgggcaaagatatgcaaattcactataggagagaggagagaaacagagaaaaagagtaaaaaaatatgcgcgagaaaacaaagaaaaataccacttaatcctgtgtaaaatccttaattcgttgtaaacccttgccccccagggcagagaaaagcgcatttgaaaaaaaattaagaaaaaaaaaaaaa

SEQ ID NO: 93926 - DNA, 144 bp, Heterodera glycines
  unsure (1)..(144): unsure at all n locations
ggaccttttaggacgacggacgcttctgacccgntttcgtcattacttaaaagttttgatcaacaattcttaatttccatctaatttatttaatgcgatcaataaaagggttctctctgttaaaaaaaaaaaaaaaaaaaaaaa

SEQ ID NO: 93927 - DNA, 179 bp, Heterodera glycines
agagagaaaagggagggagaaagaccttataagaatataaaaaatgattaatgattcattttcctatttttatatttaaaaatgcttgccgcaaacacataaaagagaaaaattgttctaatgaaattttaaatgaataaacaattaaacattaaaaaaaaaaaaaaaaaaaaaaaaaa

SEQ ID NO: 93928 - DNA, 513 bp, Heterodera glycines
gagtccataagtcgatcaacgcgttacgttgcgtacctcctttccctactgagggaggcaaacgaaacaacgtcccttcgcctgtccgccttttccgcactgctcagtcagcagcatatttttgacgacgacgaaaccgatgccaacggttggctggcgccgtcgcgggcgaatgcgactcgcagacgcaaacggacgggcaaattggtggcgcaattggttggcattgtgtccaccttcctcgacgcccaatttgagttggcttacttgtccgatgtcaacgattatgtcattcggctgcgcgagtggtcggcgtcgtgcagcgaatcgcaactgtccgccgagggccgtgccgacccgacaaacgcgtggtcccattgccaggccattctgttcctcaaccgaattgggatgcatttaattgacgagaaaacgagcgacgaattgagcgccgcgattggacggaacggcgcggaggaaaacgaagtgcaatgcccatttgaacagctcgac

SEQ ID NO: 93929 - DNA, 558 bp, Heterodera glycines
  unsure (1)..(558): unsure at all n locations
nagccttaantgctccatttgataaaangaataacctcacagcatcgtaaaaagaggcaactaccgaagcaagacacacatctcgcactcagcaacacccttctccctctcctcgtcagtcacaaaccgccaagatgtctcagtcaatgcgcatcgtccccggaaacaacaacccccagaccttcacccacacgacgcacacctcgtcggcgccttctgccccgggcatccacgacaccctccgccacggcgtcggcgtctcgccctacgacgccaagtcgtcggtccccgtgtcggcgcaccccctcgaggcccgcctcaagaactgggaggccacccaggagtccctgcgcatggagaccctccgccgctcctttggcatggccgagcccatccgccgcggcatggagctcaagattgtccgcaacggcgagtggcggcccatggctctcggtggaggtctgcctagtgtccacgaggatatcctcaagggtcgcgacgacatgattacctgggaggatatctttaccggcgatgagacgaggggtcttgctggtt

SEQ ID NO: 93930 - DNA, 480 bp, Heterodera glycines
gttcatcaaagagatttccaccgaaggtgctgccactttgacgcgctttgcaggagcgcagcgccagcaacatttgagcggaaatcccaccggctcattgacggcctccgatcgcctgatgaaggagctgaaggaaatttaccgatgccaaaactacaaaaacggcgttttcaccgtcgaactccaaaacgacaacctatacgagtgggacgtgaagctcaaaaaggtggacaacgacagtctgcttgctgctgacatgcgacagttggccaaaccgccgcacaaccaagaccacctgctcttccacttcacttttgccaattcattcccctttgagcctccatttgtccgtcttgtttcgccggtagttgcaaacggatttgtgcttagcggtggcgcactttgcatggaactgctgaccaaacagggctggaccagcgcgtacagcgtagagtcgctgatcacccaactcggcgcgac

SEQ ID NO: 93931 - DNA, 663 bp, Heterodera glycines
ctcactacaaacaacggccaagagaggaacaagccgaggcggacttatccgaagaggaagcggccgcgaaacaaaccaaagacgagaagggcggctccttccaaaccatttccatgatctaccgcgactcactgaacaatctgatgacttcactcgcaacgtgtgacaatttgcacgcgcgatggaatttccacgaaatccgtgccatttttctgcgccgttaccttcatcagtacaccgccctggagctgtttctcgcttcacgaaccgccatcatgttcgcatttcctgaccatgaaactgtcaaaaaggtggttgcccatttgccacgcgtcggtgtctgcgtcaaatacggtttgccgcagaatcgaagggccagtctgatgacgccgaagcagctattcaaacactcaaacatgccccaaaaatggcaacagcgcgagatttccaactttgactattggatgttcctgaacacaattgccggccgaacgtacaacgacctgaaccagtacccagtattcccgtgggtgctgaacaactacacgtccgacagattggacatgggcgatgtggccaactttcgcgacctttccaagccgatcgtcgcactgtccgattcgcgccgaaagcacttccaggcacgtgacaacaaattgacca

SEQ ID NO: 93932 - DNA, 752 bp, Heterodera glycines
gttcgtcaaattttccaattatttttgattttacgcattttcttcttttgatcacccaaaatgccctcttcagcaccggaaattccgcccgtccaatgcttccatcacatcgaattttttgtgtccaatgctaaacaggcttctttttggcattgtttccatttcgattttcgtcgttttgcgcagcgtcagacggaaaatgcctccgaaattgccattagaaagggaccgattatttttgtcttcaaatgtagcatttcgccggacgattcggagggaattggcgctgaagtgggaaaacgcggagattttgtcaaggacgtgtcttacgaagttgactatttggacgccgttcttgcgaccctccaagaaaatggactggaattattggcacctaagcaaatgaccaccgatcaaaatggctgtttgtttgtcgcaaaaattgccggttccgccgggtccattgcccacactttgatccaaaacattgactaccgcggattattcatgccaggcttccgtcccatcgctgacttttctctcaccagcactttgcttccgtccatttctctgctttgtcttgaccacgtcgtcgaagcgcatcccgaacaatcgcttggcaatgtcgtcgattggtatcagcaaactctccaaatgcgtcgcttttggtcaattgacgacaaaacagtgcacacagaattcagcgcactcagagcactgctggtgggcaatggcggggcgagcggaagcgt

SEQ ID NO: 93933 - DNA, 794 bp, Heterodera glycines
ctccttacaaagattcggcacgaggtagtatttttcttttgaatcttataatggtcgagaggcgcaaggaatcgcctaagcgtcgccgccgttcgtcaagttcttcgagttctggaagctcttccagtactggttctagctcatcaggttcatcttcgtcctcttccaccactgcttctcgttcaccttccccaaagaaacaaagagcagctgctcgtccttctgctcgtgacgatcgtactacacgtcgttctccaagaaggtcgcgttctccccatcgtgtccaaccgaaaacagagaaaagcactgtcagctctcgccgttcaccgtctccccgtcgtcgtcgtccgtcgcctcccagccgcggcccgcgtcgccgttcgcgctcgcctcgtcatgaacgcgcggctccatcaccaccaccagtgaaaagggaacgtactccggaaccaccgccacgccgactttgtgttcgaaatctaagcagaaatatcacaaaagcgcacatggaggaaatcttcgctctgtttggggctctaaagtcctgtgagttgccaatggaccgtgtgcatgtgcatttgccccggggatacggctatgtggagtatgaaaaggcggaggatgcggagaaggctctgaaacatatggacggaggtcaaattgacggactggaaattcagtgcgaaatgacttttcctttcaaagggaccggcggaggtcgtggtcattcgcccgtcgggattaattctatgggcattgggatcaagcgcgagcggagccgttcccctgcgcgt

SEQ ID NO: 93934 - DNA, 439 bp, Heterodera glycines
gttgaacaaccacatccaccattggtccgggctgagctggaacatggactattacctgctcatggaaaggatcagacccaagagggaggaccaaagcgatactcaaggagatcggcggttcgcgtacgtagactagcgcaaccgccaaaccaaactggacatctactggcatgagatggtgatgtgaaacaacgaggaacacatatacactggtactgacttccttcggggagcggcggctcaccttctccgaaagggcgacttaccatcccagagtgaccggaaagtcaaccgaaacgacactcacaagtccatcgcttaccttcttaacgccgaactgagcataccagacactgatcatgtgcagctacacgagtgaatggaggacccaaaacccaccggcagtggagtaacttctaggctcattctcccaaaaaaa

SEQ ID NO: 93935 - DNA, 385 bp, Heterodera glycines
cgccaaccaaccacttacgcatccaactggcttcactcaaacaaaagcttgagtatttcaggtccaactaattaaaagtatgaaaagagcatgcccaagtaaatgagcaacacatcttcccttctagcacggattccgacttagaggcgttcagccgtaatccaacgcatgttagcttcgcggcactggctgttcagccaaccgcaaataccaatgatgcgattcaacggttcctctcgtactgagttgaattactattgggaaaataaaattccatcagtagggtaaaactaacctgtctcacgacggtctaaacccagctcacgttccctattagtgggtgaacaatccaacacttattgaattctgcttcaatatgatagga

SEQ ID NO: 93936 - DNA, 532 bp, Heterodera glycines
  unsure (1)..(532): unsure at all n locations
gattccgtcacaaggtcttnttttggaattcctgtgggagatcttactgatatctttaatgaattttttatatccgccatcatttatggcattttatcgccatcattacagtccgccaccatttgtgccatttgtccgctcacaatatttaatgccattaatccgccactatttacaccatttggccgtgcccttttgtccctttatcaatttttctctgtgtcttccatttgtctcatccccctacttcatcattcatcatcgatcatcatcattcatttcgtcaccactttttcgcccatttgtcccttttacttccatttgtcccttttattcctttttttgcccttctcgattgactaaatgctctgctgtccatcatcatttattttatgatttattttcattgccatcactttttttgctccggtctccgcgccattgccccataaaaaacgccgtcgactttttgtccgtccgtcggtccgtcgcccggggggaggacaaaattttgtttgattgatcgccgctg

SEQ ID NO: 93937 - DNA, 473 bp, Heterodera glycines
gaccgtccaaggaagcatctttcaaaatttatttattttttaatctttagaattatttttcttaaaaaaaattaaaagttggcgtggaaaggagccgaatctcctccaaaatattttccgttcataaccactgacaatgagacaagaacttgacaaaaacggaactgtcaaaattttcttaaatggaataaatattcttaaattaatttccccccccccccgaacaattgagcacggcgtttacctgctgtccttttgtactgcgatttgctgaccaatcgctgcttttcttctcgtcggcgcgttcttctactgccgattggaaccgttccgactcagccatttgttgaggagcagtgaacgccacacaaaagcagaagcatgatgatgatgatgatgagagcaaacaaaaaaaataaatcgaaactcttgctcattatggaaattttagagaatttgttaaatgctaaagg

SEQ ID NO: 93938 - DNA, 411 bp, Heterodera glycines
ctcagtaacaaatcagctacaatttaagtttcccagttttgagtcttatctacctacatatgtcggacccgcaccttcaacttccgatcggtcgagtgaagcgaatttgcaaattggatccgcagatgaacactgtttcggcagatgccgttaaattgctcgcgttggctgcagagaaatacgtagctctgcttggacgttgtgcaggaaaatgggcattagctaatggaaggaaaaccgttcaaatttgtgacgtcgaacaatgtattcaaaaagattggctcttcgccattttggaagatgcgcttacggattggcctgaagataatgcagcgaatcgcgaagaagggcaaagtgatggagaagaagaggaagaagaaaatgagaaggaaacgaggaggggaggaatag

SEQ ID NO: 93939 - DNA, 487 bp, Heterodera glycines
cactctatcaatgcttaatccgcctcaaaatgtccgactaatacctgacgttgttgacatcgaaaaggacgaaaaaggccaaataggaattgccattggcggcggtgctccgcattgtccgtgtctttacgttgttcaaatttttgaaaattctccggctagaaagaacggactgcttggtataggagatgaaattgttgctgtaaatggcaaagttttgaagggttacgagaaaaacgctgttgcctcgatgattcgcgatgtaaaaggcgttgtacgaatttcattcaaccgacttcatcttgttgcggacactgatgtggtccagactttggacattctcttgaagaagttcaaacaccggctcgtcgattctatggacgaagcaaccgccgatgcgctgggcttctcacgtgccatcctttgcaatgacgtgttggcacaactcaagacgcgaatggaccaaaagcagcaattttacggagca

SEQ ID NO: 93940 - DNA, 667 bp, Heterodera glycines
gcacgactttccctcatttgcctttcggactatccatctcggcttggtcggtccaattcgggcgattagcgtgtcgcactggggagagttgggatggaggctgtacatcccaaacgaactcgagttaaacgcctatgaacagttggtggacgtgggggtcgagtacagtctcaggcattgtggctattacgcacttcgacacttgcgaatcgagaaattctacggttattggggacaagacattgacagcatgacgacttctgtcgaatgcggccgggttttcagggtggactatgaaaaagaatttatcggcaaagaggcgatgaacaggcaattggaacgccgggtcagcaaacggtttgtccaactgtaggtggacgggcatgacatggacagggacccttggccgcacggtgacgagcgcatctacagagatgggacattggccgggaggacaacgacggtcgcgtacggattcactctggaatgacaggttaggccgggctacgtgcagaacgagcagattggtgtcaccacagattacctcctgcgagggtcgtacgaagtggagatggcaggcaagcgatttccgagccggatctatttgcactcaggcctattgccaatgatcttcgtcgaggatccacaacgctaaagaccgacacaa

SEQ ID NO: 93941 - DNA, 407 bp, Heterodera glycines
gcggcactctgttgcgctacgtcgcctcctggctccagtcgctggtgacctttgagctgcccggcgcgtactccgccgacgatcggctcgacctgaacagatacgagccctacgagttgttggcccgctgccgacactttgtgcagcagaaagacttgctgaacgctgtccgagtggccaatctgatcagaggcgagtcggctcggattttcagcgattggctcaacgacgccaaagcgcacttggaagtgcggctgctggttgagctgctctttgcccatgctcaggcgacgggaattaggacgacctattgaaaatggacaaacgaacgaaggaatcaatcattttatttgatgtgttttcaaaataaattatgtaaattacctaattaaaaaaaaaaaaaaaaa

SEQ ID NO: 93942 - DNA, 692 bp, Heterodera glycines
aagccttaatatccatcaaacaaagatcaaaaatagtggagaaatctacgaggcgaagagtgattgttttgcttttctgctctcctcaaaggccggcgggtgcggactgaatttgatcggtgccaatcggctggtgatgttcgaccccgactggaacccggccaacgacggacaggcgatggcacgcgtgtggcgcgacggacagaagaaggcgtgttttgtgtacagacttttgtcgcgcggttcgattgaggagaaaatcttccaaaggcaagcgcacaaaaaggcgctgtcttcgtgcgtcgtggacgaggagacggacgtggcccggcacttcagtttagaccaactgaagacactgttcgaattcaacgcgaacaccgccagtgacacacatgacaagctgaaatgcaagcgctgtttcctcggcagagagttgaaagacccgccggaggaagccgacacaaactccgacctgacccagtggcaccactccgagagggacttcggcaaagtgccggaccaaatgctgaaggccgttagggactgtgccccggacattactttcgtgttccatcaaaagtcccatgatggtgagacaaacagatcaaattcaccgccagcagacaacgggaaaggacggagagatggggcggaagaagaggacagagaaagcgagggatgaaagacag

SEQ ID NO: 93943 - DNA, 328 bp, Heterodera glycines
cgaaaaggaggacacgaggccccaatgcaaaacctgattggacacggccaaagaagcggccggatccacgcgcggacaaccgagcagccggccgagccaataccaacggacggacacgcgtcccaaccgccagctgcgccccgagtgcaaaacggcgaccagcaaagacacggcgaccccgccccacggccgcggcggcggggacagcgacccgcgcgagaaaagtcgaccacggccgccaggaccacgcacaaaggagacaaaacaaggcccccccaggacggtccacgggggcggcgacaacggcggccacggcggcggcggagcg

SEQ ID NO: 93944 - DNA, 818 bp, Heterodera glycines
gtgcctcaaggagggccactgttctccattgtgctgttgctggtctttccgaatcctcacttgagattgtcaagctcttgcttgatgctggggctgatgctgagtgccttgatgcgagtggcaacaagccggttaatctgattgctcctgcctttgattctttgtccaaatcgcgaaggaaggctttggagatgttcctcaggggtggtggggaaagagatgaactcatgagccaggagatggagctacagatgttttctgttccagagaaaaaagaaggaagtgataataagaaagaataccctgttgatatatcgctgcctgacatcaacaacggtgtatatggaacagatgagtttaggatgtacaacttcaaggtgaagccttgctcaagggcttactcccatgactggactgagtgtccattcgttcatccaggggagaatgcgaggaggagagacccacggaaatacccttacagctgtgttccttgccctgagtttcgcaaagggacctgccagaagggtgattcctgcgagtatgctcatggtgtttttgagtcctggctacatcccccccaataccggacaaggctttgcaaggatgaaacgggctgtgctagaaaagtatgcttctttgctcacaaacctgaagagctaccccctgtgtatgcttccactgggtcggctatgccctcacccaaatcctattcagctaggggacttgacatgacagcgatgagtcccttggctcttaattccacattcttgccgatgcccactgtttcaacccccacccatgtctccctttggcagaag

SEQ ID NO: 93945 - DNA, 727 bp, Heterodera glycines
aaatcctttaaaggcgatcaaaggagcgactaatgggattggattggcaattgctgaacgattaagccacttagggagcactctctgtgtggtcagcactacagacgaagactatgtgaagcgtgcgatcgatcggatcgtctcttcgtgactgaagcgttcggaccttgccggatgcacttgccatgtgaccaattctgaggaccgatgtcccctgctgaaactgaccatccaacggatcagaagtgtgcacattttggtgaacaatgctggcatcaacccaattttcagtgatttactggacttgtacgagtcaccctgggacaaactgttcgacgagaatgtcaacgcggacttcatgatggccaagctgttctcgccagaaattgaacgaatttgtgtagggtccatcgttttcaactcatctatctgcgcctatcggtccccccagggaatcgctgcttacgggatcacaaaaactgcactgctaggtcttaccagagatctggcagaatcacttgcacccaaatggattctcgtgaatgcaattgcgccagggattatcaacacaaaaatgatcaaatcgctttgggaaggcattgactaacggaccagtgactaagccattgtcacacttatgggacggctgggaatgccggaagaatgtgctgcactcctcgcttttttctgctcttctgacgccagttacataacgggcgaaactgtg

SEQ ID NO: 93946 - DNA, 486 bp, Heterodera glycines
gccctcaagggaattgcgcttggggttacaacgcttgagcaccttattatgcggcccgacttcggggagtcacggcacggctttctcgaccagaacagagagggaattttctcgctgatcggctactgcttcatctacgcgctgtcgctgatgtacgcgcggagcagcgccaaactgacgctaagagacaagaagctgtccccgctgaatgtcgcgggcgaactcggcttcagcctgtgctgctactgctcgcagagggtgctcgaggcacactttggcttgagcgcctcccgaaggttggccaacttggcctactcgttcgccatgttgaccctgttcagcaccacctgtgccctgttccagctcattcagctcgtcgttccgttgccgcaggatgcgcgccggggtggacttgtggcagcgatcagccgaaacgcactgctccattttctgtgtgccaatctgatgactggcttcgtcaatctg

SEQ ID NO: 93947 - DNA, 471 bp, Heterodera glycines
atctctcaatccctttgtcagtttatcattctttgttccattccttaaagatataatggaacaatatttttaattgatattttttagaatgcgttttttaccgtcgtgattatttaaaattttcttaaaagcaaaattaatgggaggcaaacatctgaggcgcaatcatagtcactagaagtaattggacgataattatcgcctagaacaaagcctgcgggtgttctattttccaattccttcaaaatgtcaacccttttatatgcgttaattaatatgtcactttacattgtcaataacataagtgatgcgcgtgtacaagcaggtggcattcacattgacctggaaaatgaaaaattgatttgcctaattattccttaattaatttttacataatcgcaagtgtcacagatgggacagatcaattcatggctaattcgtccttggcatacatcattgctaaaaaaaata

SEQ ID NO: 93948 - DNA, 670 bp, Heterodera glycines
ctcagtacaaccagtacaaagaggagcaggagcgcaaattggcgcctcttcaagacgagctaaaggaactccgtgataaaatggtgagcagcggaaaggagtgactgaccccaaaaaagagaatttccgtctgcctctgaccaattcatttcattccctcccttttgcgttgtgttcttcacaattcttcactttgtgttgcgtaacttgataatgtccgaccattgtttgtctcactttctttccattcccaaaatgcctccgccgtcccttccattcgaaattcgaatagttttgccgtaattcataaaattcagttgcttttaatgttgtgaatgtttgaagatcccattcttccggtattccaatgctttgttagttcgttcgaccaaattgcgtcccctttcgtccctcctttgggtggtcccgaattctttcgtttgttccttttagtgcctgctaatttaacttatttcatttcaacaatcagtttgtttttttgttttgctttttctcccatctcatccaaatttgcgtattacttaaataaacacaggggcttatgtgtacacctttgaaatttctacgttttattccgtcatttgtgttatttttcgtttgccgcttttcattgtttggtgttgtatcattaaattaaataatattaaag

SEQ ID NO: 93949 - DNA, 589 bp, Heterodera glycines
aactatacaaatattccctatcgtttaaacaaatgcatcgaactcttagcgatcgcgcggtggaagaggtagaaacgcgggacaaaaactgctggcagcagcagcgcacgcagcttttcccgggggaaaaaatgaattgcttcacacaatgtcggcgatcgaaaatgacgagacaaagagcagaatttggcagcaactgaagaccaaactccactcgacgatggtcgccttcggaagcgggtcggtgcagttgcccaagctgatggacacgttcaggcatgattggggctccgaattgacttcgtacgcggtccaactcggcttcggctgcaacgacgcggcggtgtacaaaatgttgctgacgatgcccgacgaaattgaaagcggcttcatatcggccactggcaccttcgcgttcaaagtgattccgaaggcggagaccagcgaaaacttgacgaagatcgaccagagcaaccaataccaagatgaaatgcgaagaatatttgcacggcgtcgctcctcaatgtcgagcggcttccatcgttcattccctttcaaccagtctttccatgtgcgtccgcctgtcaga

SEQ ID NO: 93950 - DNA, 592 bp, Heterodera glycines
gttcctcaacgaaatcgccgagtcatttcttctaccgcaatatctttagaggccatccgatgggttcacatggaaaacggcgaaatgtttgcgtggcaaagaaaatgaacaaatcgttagggacgacgaagccaaaacgctgctgctcccttcacaacaatttttggatggacattttccccttttttgaccatgctcaactcggcctcaaattggcaatgctttcgccgcgtttcaatgttttggtggacaaacatttcgatggcaaaagcgaattgacaatttggaagctaatccaaattcacaatccgagaacggcaccgaaactttctgtgctcgtcaacaatcgcaaattggtgccatttccgttgcccagcaaaattcactttaagaaccttcgaattgagtaaagccattggcaatttgccgaagatgatttttggacgttttgcttcgactcacttcgccctcaatgctcaccgatctcaatcagttggcttcaatcaattccaatcgtttgctgccaaatgcaacttctgctgctgctggcaaagcgttgtttgaatggttgcactctccgacgaaagatggc

SEQ ID NO: 93951 - DNA, 244 bp, Heterodera glycines
aagtcgttttcgggccgtatctaaaaaagttgggaaggcattgtttctcgttgccggtggcccactgattgagcatcacatttcgcagctttgcgaagagttggaaaacctccacgaaatttttattgttggattgtacccggccgaagaatttgggaagtttatgtctgatggggagaaaaagtatcgagcgggggcaagtcgattaattcaagagaactgtccggtgggcactggcgggggg

SEQ ID NO: 93952 - DNA, 404 bp, Heterodera glycines
tcctattcgtcccatttttgcccggatgttcgtctttttatttggcacctcctatttctccttgtgtctcctccgatatcgccaaaatctgcggtgaaccatccgttgcgcattatttcgagtgctgtggagacagtggcgcagattgttgcctcagactgaacacgtggtccattgtgctggtgtcgctgctcgccttttgcctggtcgcttgccttgtgctttgcttggtcaaatgcatttgcctttgctgctgctgaagtgactttttttgaaaagaaaggaacggacggaggagaaaaatgagcaaaacgaagttaaaatgccatgcgatttcctgtgaattttgttgtgatttgtacataacatatatgttattaatgtatatttgtaaatactgaata

SEQ ID NO: 93953 - DNA, 469 bp, Heterodera glycines
  unsure (1)..(469): unsure at all n locations
acccattcagatttttcttgaattcaaaaatgacggaacgccatgtcttgtatgtgctgttgagtgccgatttgctcgacgtgttgcgctggccccttggcgcggtgttcacgcaaattgcacacgcggcaaccgcatgcatttggacgttccgcgaggacccggaggttgccgcttatatgaccgacatggacaacatgcacaaagtgacgctcaaggtgccagatgagaaaacgcttttggaacatgccaaacggttggctgacgaaggcattgggcacagagtttggcacgaggatggcatggctgtttgtattgcggtgaagccgatgccgaaacattagctgaagccattccttggcaatttgcctttgtacaaatgaaacttattcatgaatgatatctgtctgattgcttattatacttttttggtgaattttaaatatttggacaaaaaaatgaattanna

SEQ ID NO: 93954 - DNA, 718 bp, Heterodera glycines
gaccctatttccataaaaataatggattttgaaaatgccaaagtcctcctaggggatgccgtcaatttggaccagaagggcgccaccgaccaggccattcccaaataccttgccggcattgacgcactgctgccatgtttaaatgattttgagggaccgaaaaaggacgcactgcgccaacagatcgagcggtacatgtcccgggtggagacgctccgaggccgcaaaatggtcaaggtggagttcatggagcagcgccggattgtggaggactctatcggccatagctacgagtcaatttttgccaaatgtttggacgacaaagtgaccgaagttcatgtctaatacccgtggctcgccaattaccaccaagtgagaagcggtggtcatcatttactggttggtcaatttggtcaagttctgtgagctgttggtgcgaaagtgtccaaatgtgcgccgaattttacttcagacgacacggcccaacggaccgtcggcgcaaatggacgaagcgctgggccaattgggcgacagtttacgcacaaaaaacattgtgttgacggtcaattacgcggacaatatgcacgacagggaaatacggttcaacaatggctgggttgtcaaaatgggccgagggttggacatcttacaaaatgtggacaagttctcgatcggatcccatgactaccatctgagggccgtgcaaagcaacactgat

SEQ ID NO: 93955 - DNA, 255 bp, Heterodera glycines
  unsure (1)..(255): unsure at all n locations
gtanccccaatgatcgaacattaatgggttgttgtgccgaaggaccctttgatgggcggtgagtcttccgccgaggctaatgttctgattttgaaaagttgagcaagatacccactccaacgtgaacaaatgccaaagaaagacaaaacgaaagccaaagtaattaatgaagcaattaaagcaaatgacatttattctgtttcctctttatacggtctgaataaacaaatgtataaaaaaaaaaaaaaaaaaaaa

SEQ ID NO: 93956 - DNA, 636 bp, Heterodera glycines
actgtcagaccgaatgagattgatgccattgaaacactcagtcctttgaattatgccaaccgagccaaaaacatcaaaaataaggttgttgcaaatcagaacaaaatcaacacactgctcacagcgccgccctccgtcgacattgccatatgggaggcgtggaacatggagttggacgcgcatctggggacgaacatgccggaaatacccgacccgatcattcaactgccctcgcttggcgcaccggacgacgtggaagcggtgatacgggcccgggaacagttcaccaaacagttggcacgtttccgtggatttgagaaggccgagcaacaaaacgtgaaacttttcgacgccaaattgcgccagcgtctgtgtgtggctgacattgaccgtgagcgcgtgctgtcgctggaggacgagttgggaagagttaaaacggaactcactgtgcatgcccgggagaatcgccagctgaagcgcaagtacgccgcactggagacgcgtacgcgagaatacgagacggaactcgaaaacgggcgggagcagatggaacgtgccaagcgctacattgaccaggagaagagaccggagaaggacgcacgtcgcacactgctcaaattggctgaaatgttcgag

SEQ ID NO: 93957 - DNA, 646 bp, Heterodera glycines
  unsure (1)..(646): unsure at all n locations
ctcgccccaaagactcagtcaaatctcttcttcctcctcctcttcctcttcttcttcctctttctcctcttcacatccctcggcaattggggaacacaacgtggaccgatccatcgacgaattggaggaatttatcgtacaacaaatggccaccccagcaccgtacccaactgatggcaaatccttttacgatacgaacgaatgcgccgctgctgcaagtgccgtccctttgccccgtcgcttcgcttctctgtccgatttgtccccctctttttcctcctcctcctccccgtcgtcctcttctagcagttcgtcctcctctctcaactgcggcactttgggccggagaaagtcgcccgccccgcagacgccaaagccaaaaagaatggcccccggcgaatgggactatttgcgcgtgtacacggcacnaatcaaaacggacacggactacaaaacgttgcaagtgcccgcgggggtcagcacagaatgcgtcattcgccagttggtgttggacaaactgcgtctgtcgttgcgcgacctgaacctattccatttgttcatggaggtgcgaactccgcgcatggacggaacggaggcacgcaagattttggagttggaccgaatggcacgaccgctggatctccaa

SEQ ID NO: 93958 - DNA, 523 bp, Heterodera glycines
  unsure (1)..(523): unsure at all n locations
cnccgtccacggttccgcacgaggtttatgtttcaaacattattcttattatggcctgcctttgttcggttcgaatcgatgagaatcaagaaaaagagggatttgcagccgttggttgcttgacaaccccattcggttgggaggggttggccatgtggtgcaaatagatgaggcacttattgcgcgtcgaaagtatcaccgggggcacagagtgcgcgaaatttggttgtttgggatgtatgacgtgcacaccaacattggagtggttcgcatcgtaccagacagatctcgtgctacactcttgccgataattgaagaatttgtggtgccagggtccattttttattccgatcaatgggccgcatacatgggtggcgcaattccagccatccctgtcatcccgccttatgtccaccattctgttaatcatacaatccactttgtggatcccttgaccggagcccatactaaccacgtggaatgtttttggaagaatctgaaaatgaagttcaaggccatgtcc

SEQ ID NO: 93959 - DNA, 316 bp, Heterodera glycines
  unsure (1)..(316): unsure at all n locations
tatgagncggcttggtttgcttccctataagggcggtcatagtgacacagtcaccggtctcagtctgagtccggatggnaaccacgtgttgtccaattctatggattgtactgctcgcatttgggacattcgaccttatgcaagctcacaacgatgtgtgaagacattgactggacatcagcacaactgtgaaaagaaccttctccgttgatcttggtcaccagacggacaccgagtttcatgtggatcgagtgagcggttcgtgtacatttgggacggtggttgcagaaacattgattacaagtggggggggcat

SEQ ID NO: 93960 - DNA, 253 bp, Heterodera glycines
atcaaaggtttcggaccgactttgtttcccatgcttttttcttctcatttgccagcctttgttttgtttcacaaagtacaaagccaatgaatgccccaggggcatttgtatgtttcccgtatccatcaaattggacatattccttgctgtattgttcgactgtacattcttaaacgtaacatgtaacattttgatagttactttacgattgataaattagtgttgctgccaaaaaaaaaaaaaaaaaaaaaaa

SEQ ID NO: 93961 - DNA, 439 bp, Heterodera glycines
cttcgttcgacaaactgttgctttttgaccgtcagcagacggtgggcattgacagatcggcgtatttgcgggaggcacttcgccttccccaaagtgccgcaaaggtagctgtgtgcagggagacgggcgacgtggtcggcttatgtcaagcgcggcatttactcggcgatcggctcggcatcagtctgttctatgccaacagtgagtccatcgcctcggctcttctccgtgccgttctgctccaatttgcgggccccgatccctccgccaagttcgactcgttcatctacaaaactccgtccaccaacacggagtccatccgtctcttccgccaactcggccaaaatgggccggtcgaacgtcggcttttctacccgcaattctcgcgttattcgctgccttttcccggcaatcgcattttttcgatcggcgatgagca

SEQ ID NO: 93962 - DNA, 633 bp, Heterodera glycines
  unsure (1)..(633): unsure at all n locations
tgtcataaacctcttttatttggcacagattggcattgcaatcctctcctgtgtccaacaaccatttgttcctgccctatcagcgcaatccgatgcccgagtttctgatgaaggggctgaacatcagtttgtccaccgacgatccgcttcaatttcacatcacaaaagaggcactgatggaggagtacagcatcgcccatcagttgtggaagttgagttcgtgtgacatgtgcgagatggctaggaacagcgttatccagtcaggatttgaggaccgggtgaaagtatattggttgggccccaactacaaggaggagggagtgctcggcaacgacgtggcacgcaccaatgtgcccgacattcgcgtctcattccgtcacgaggcgttggtcagcgaactgtacaatttgttcaaggcactgatgctgtgaatgaaaagcgggtgaaggaggacgacgatttgttttgttttcgttttttccaatttcaaattgcccaaaagacgagaagaaaagaagcgacacacaatacaatacaaaatagttaattatccattattcgatcgggttacatttttcgattttgcataccgatgtgttgttacaattacatataaacattgaaaaanaaaaa

SEQ ID NO: 93963 - DNA, 611 bp, Heterodera glycines
attcatgagggcatatcaaactttctgattttgggctttgtacgcttcttagaaaaatacaccggacagaactttaccggaattggcccagccaactgccaacagattttgtctctaagcctttcgagtcgaaaaggagagctgaaacttggcggaagaatcgcagagcatatgcgtactccaccgttggtacgcccgattatatcgcccctgaggtatttcaaccgaatgggtacacaaaatcatgcgattggtggtcacttggcgttattatgctatcccccgttctgctcagagactccccaggagacatacagaaaagtgatgaattggcagcaaattctcgcttttccgcccgaaatacctatttcaaccgaagcaaaaaatacaataaaagggttctgttgcgaagttgacaagagactcggcaaccattcgggcattgaaagcatcaaacagtgccctttctttaagagggtcgactggcagaacataaggcttttgccggcccccattcgcatcgaagtgaagggaattgcggacacttccaacttcgaccactttggggattccgatttggccttgcccggcgttaaggaagttgcctctga

SEQ ID NO: 93964 - DNA, 349 bp, Heterodera glycines
  unsure (1)..(349): unsure at all n locations
attcatcaaactaatcccaacatttccttttgttattctcgacccttacacaatgccgacttatttttgacactttcctttccgtttgtaagcgccttatctcttggattagttgtttagtccgcctttgttgttacgcctcaatttgaattttattcttggccttaacattgtatataccatcttattttcttttgtcccttccctaagcatcattagtccctcctcgtttcccatttttattgtttttttttctgccggtgcttccgtttattctcgtcaccgactttttcaatttctaatcacatgcataaaatacttaatttcnaaaaaaaatatttaaaaaaaa

SEQ ID NO: 93965 - DNA, 481 bp, Heterodera glycines
tcctgctgagctgacaatgggtgcgccgggactcgtaattgacttgcgaatcgaaaagaaaggcacggaatatgaacagccaaagacgagggcattctcgggccagggaaacgaactcggcacaatcacgccgaacgtgggagggtcggcggacgttgtttttgttgatgcgccgccaaagcttgcggcagaggaaactgccaaattggtggaacaagctcaagccgaactgaaggaggatgacaatttgccaaccactcagcatcaaattcaaattccggacacggcacggaccatcgtagcgcgtcttaaccaagggcacacagtgtatcagctgcgcatttgcattgtcactgccgacgcgagtttgggctagcgtcccttgcgccttatgacttcataccccactcgaccgattgacgacgagggactcagcgtcaaagacgccggactgctcaatgcgacggtgctgggtaaattg

SEQ ID NO: 93966 - DNA, 641 bp, Heterodera glycines
cgccttaagccaccatgccccgcctctcgctcgccgtgaccctcttcgccacggccctgctcgccgccctccttcttgcgcccaccgcagtcaacgcgcacagccgcctgctgagcccgcccacgcgctttggcggcttttgcgcgcgccgcgacgaagtgtgcccgccctgcggtttccgcgacaaggaccacgcaaagcccgagaacaccgtgtacgcccgcggccagcaggtgcccatggtgtggccgcgcaacaaccatgcgggcggattcgtgtcgttttcgatcgttccgttcaattggaagcagacgtttgaggagtttgacgccaacattttccaattcaactgcaacgagtcgggatgcaagtcaggatatcctgaagatttgttcggagaagatcccaagtggatgggcgagaacgaaaaccattgctcgagcaacttggagattcccgattacttgcccgacggccagtactcggtcaagtggcagtggtttgctgtcggcaactggtttggcgattacaaccgcggccacactgactactacggatgccacgacttcaccatccgcggcggccgtcccttcaaccccgcctcgcgcccggcctgcccgcgcttcatccccggcgacgcc

SEQ ID NO: 93967 - DNA, 652 bp, Heterodera glycines
  unsure (1)..(652): unsure at all n locations
gtcctttaaagttctagtggataagttaatttactctgcaaaatcttcgatctttcagacgaggatgtcgcaaaggtaaaattcgcgttcgaaatctatgacgtagacggtattggtgcaattgacggcaccatgttgggagctctcctgagggcgctcaaccttaacccaactgagggtttcattgagaaattgggaggaaccaagaagaagggtgaaaagacaatctcattagaagaattcctgccaatctacagccaagtcaagaaagacaaggaccaaggagtgtacgaagatttcattgaatgtttgaaattatacgacaaggcagaaaacggacttatgtcatacgctgaattacatcacattctattgacccttggtgagaaattanaagagaaagaagttgacgaaatcttcaaggactgcatagaccccgaagatgatgaaggcatgatcccatatgttccattcttggcgagagtatgtgaaaagcccgttccaaaatcaattattcctgaataagctggatctcgacgccacaaattctacattctgagccacatcatcttgtcaataaaccaaacagcgagacaatgcgtgtcagcggagccgctactacaaatctgtacaaatgtatgatctgatgtat

SEQ ID NO: 93968 - DNA, 355 bp, Heterodera glycines
ggcaatacaggaagctgaaagggaatggaggagaacggaggaaccgaggaggatgggagagggggaagaaaaggaagtgagagaaaatggaggaagcgaagagaaggcggaggaggagccgcaccgcctggacaagctcctcttttggttttacttcttccgcaaaatggtgcccgcgaggatatttcggatgaaaaaataatgtgccaaagtgcgttgtgcccttccctctgtttggcttagcccgtggcattatctcctctcctcttttgttctgtttttcactttttgttttgtcataaattatgttttcgaaaaaaaaaaaaaaaaaaaaaaaattttttttaaaaaaaaa

SEQ ID NO: 93969 - DNA, 788 bp, Heterodera glycines
gtccaataaagataataatttcagctcaaatgttccttttcctccccttttgcttcgtttctttgctcttcgcattaatgtccaaaatgacaatggcatcctcaaacgctccacccgaactgctcccaatggagggccaacagtcgcgcattcgcattccgttgggcaccaaaatgttcaaattgaaatgccccgtcaaaatggacgaggaccaaagcggagaccaatcggaagaagcattgatcatcaaatggagcaaggatggggcaccgctgacaggcgacgaccatttccgcgtgctgtccaatgcggaaagggacttgcgcatccgaacaccgcaagtgaaggacagcgggaggtaccgctgcaccgcaattaatgagtggggacaccgcgtcgtcgacttcgaattggaagtgttcgacccgaacggaagtgtcggcgcacaaaagggcgcattagcggacggcggctcgtcgctgagcgaaaaagtcagtgcccccaaatggcgcgacccgtccactccccgtcagacaaagattcatttgactcccggcgccgccctgcacctccaatgcccgccatcggtcggcaaccctttgccccaagtgatttggacgagagagggcgtccccgtctcgttggaattgaccaacccaaacgcggcttcgttttcgctggacaaagtccctcccaccgactcggccacttattcttgcaaagtccaaaatcagctcggctccatccaagccgactttctcgtccaagtcggctcttccacctcccag

SEQ ID NO: 93970 - DNA, 289 bp, Heterodera glycines
aaagactcacatcgttatcgggattgcctcagtgtgccctctgttggctatcatggacacaatcttcactataccgtctctgaactcttagatgagccaaatgaacagcattttgcgcgactgacctgaggcattccccagcaacacctactccgcctggactgacttgatggacgcgcaagtggccctgacgccgccgcctaatcctcgggataaccccttcaactccatcttccgagccatacgtcaactgccctgacactgccagtgcgctggcatcctacaccca

SEQ ID NO: 93971 - DNA, 250 bp, Heterodera glycines
agtataaaagaatcaaagaaaaaccctaccttatcaccaatttcataagatcaatatcattgatgaccaactaccttaatagtcaagtctgaactagtgttagaaaaattaaaaaaaaaaagtaaaaaaatagaaggaataatttgagaaatcaagaaaaaaattggaataaaacatatccaaaactccaataaaccaaatcctaaattaagattaaagaaaaaattaaaaaaaaaaaaaaaaaaaaaaa

SEQ ID NO: 93972 - DNA, 668 bp, Heterodera glycines
tgccattgctgaacaacaacaacaataacaacggcaataacaatcctgagaatgatgggggagagcacatgcaacagcctaagggactgttaagggttgccagtgcccgtgagggatgtgccgtcacaaccaagtcactgtcatcactgtccggcgccagttgcaaccgaagtccgtcattgtcgccgcgcagcggcggcgctggcgccgggcgttggcacacgcgccggaacacttgcgcaccgaccacaacgcaaatgccaatgttggccggcgcccacacaaaaaagggcgccatcggcgcaggcaataatggcacaatagccaccaacattctgtccggcagcagtggcgccggcggtccgacaccgctgacactgcaaataccgtcaattgccgaatgatcaatcggaacactacccgggcgggcggctgatcagactcactccaacgatcaccgcttattgatttattgattgatcacaaagttaatggttcagagccgaatgatgtttttgttttatttatacccttaggacacagtttttcatgcttacagtaatgctacttctactattactattccctcatcccctcacattgattttttgcccatagatatttgattgaccgaattgtttgtcctactgtaaccaaccgtatgccag

SEQ ID NO: 93973 - DNA, 469 bp, Heterodera glycines
  unsure (1)..(469): unsure at all n locations
gtccgtgcatgagggatcgatatcaaggaatnggaccatgggatcttttaagacttacccatcgactacacaacttatgtccatcggatcgggcgcactggtcggatcaaagaaggagcatctacatcgttttttgatctcgcggaagatgttgagctggcgaaagaactcgttgaaggactccaaaaacaagaccaagaagtgccggattggcttaagctggtggctgaggggaaaatgccacttgacgagtcggaagcagccagcggtgcaaattcggtgccgatcgctgttcgcgttccgtcggaaactgttcctgacaccaattctttgccaactttttttactgttccgactgataatgtggctgcaaccggtgctaattcggtgccgcttggaacccgcgttcaagacgacggaaccccgaatggagaagcaaaggacccagccatccagaacaattctgctc

SEQ ID NO: 93974 - DNA, 713 bp, Heterodera glycines
atctcttcagcagttttcgcctatattttatcattttgcacaatcttcccgaccatcgaatgctttttcgtgcgtcgacttcgattttgctaaaaaatcacagaaaatcgttgctgtccgctatttccaccacaatgcaagccaattcatcaaccgcttcttcggcttatctgatcaaccagcccaaatatgcattccttgccgaattgggcatccaacagcaaaacgatggggtgtttgacggcacatggaatgcgtcggggacggaagtcgactcattgtgtccagcgacgaacacaccaattgcgaaagtgcgattcggaacggcggaggattatgaacgtgtgatcaaagcatcgcgtgccgccagtgccatttggatagaaatgccggcgccaactcggggcgaaattgtgcgccaaattggcgattctcttcgcaaaaacattgacaatttgggcaaactggtttcactcgaaatgggcaaaattttgtcggaaggccgtggcgaagtgcaggagtttgttgacatcgccgattacgcaactggtctttctcgaatgttttccgggcgtattatgccatccgagcggaagaagcaccttttgcttgagcagtggaaccctctcggagtggtcggtgtcatcagtgcgttcaatttccctgccgccgtttacggttggaatgccgcgttggccctcgtctgtggcaat

SEQ ID NO: 93975 - DNA, 495 bp, Heterodera glycines
atcctaaacgcccccgcggaagcaaatgagagaggaagacgacttcagcggaattgacagttggagtgtggtggggaaaaacaatagtatagtacgacagcggataatgagtgaattggagaatattgtgcccgatgattgccccctttttctgtgcaatttttgaatccctttttcttgtaaatcgttgacattcccaaaatatcccttgtttatatttaactgtttcccatctcttagtgtctgtattaaaatgccataattcgccgcccttttacttttttgttcattgtctgtttttcttcaacatgttcaatgtgttcccatttgaattttgttgtgtttaaattattctgtcttaattgtctttcgatgttttattccgattcttcttctgtctctcctttcattttcacatgtgtagaatctttcaaattgtctaaatgcttctttcccagattccaagccgattttgataattaattttacaaaata

SEQ ID NO: 93976 - DNA, 645 bp, Heterodera glycines
ggttccatcaagtttcgcatttcattcccccaatgttttccatcgtcctcatacaatttttctcgtcgccgttttgctcacttttttctccctctttttgtcctccaccgacggggccatcgcgcgacgccaacacaacacgcagaaaaaagcaactgatccaaacagcagtgacgagtacgattatcgtgtggacgatgattacagtatcggcgtttttgttgacgcggtgccaatcgccaaaaatggggacgaaagtgccaaaacaccacagacaaatgaggacggaaaggcgtacaaacggacgaataggtacccgacgaaaaagctgcgcagattttttgttgaatcaaaagcgcggagggaatggtacgaatcactgttcagcagaacggcggagagacggcgaagataaaagagagagagacgggggacggagcagggactgtaatcagcgcaaaagcagtagccaatcaatgaccgtaaaatgcaatcaaccgatttactactggttgattacggtagccaagcgagggttcaattactcggctgaccagcagcaagagaccgatcagaggacgattcaatggttctgatcagtttaatgaatccatagttctcaaacggattgccataattctcccg

SEQ ID NO: 93977 - DNA, 543 bp, Heterodera glycines
gctccttctccgcaaaatgtgtcgtctgtggggtcgcattcgctattgcgagggctgggaccccgttgaccaggcccaactcgcgctgaagtccttttccctgaaggatgtcaccgccgtcttcatccagttcgacccgttgcatggcgactccaaatcgttacgcgaattttggcatcgtctcactctgccacaagtgcgtgccacaaacccaaaaatgcaagtcaacgtgaagatgctctccgacggatgtcgtccccaatttgtcgccaacctccacgatggtcgccaggtggtgttcaaaacggacggctttcagctgcccgacctgttgatgcgtctgaaccgtctgctcggtctgcccgcggtgggactgcgcggtgagccggacgaggcactgcagcagcgaatccccgaagccaaaatggaggctcattttcgtgcgctggcaaagaaaagaaagccaatcgatttcctttcatgatttatttttgagaataaatcctcatttttgttgttatttataatttaaaaaaatgatta

SEQ ID NO: 93978 - DNA, 800 bp, Heterodera glycines
accgttttgcatccgtggactactaaccaaccaacctctttcctttgatttgtcttttgtccgactgtttgtcggagctggccgtgctgttcagctgctgcaactgttgcttttgctcggcaccaacaccgcgtggtgttgttgggccgccgctgctgagcgcggcagacgcagtagaaaatgaacgtgtcaaccgctttttggccttgaaaattgccgagtctccgctgctcagcgcctcgttgtattcttggacaggacaacgcggcagttcagcctcagacgacgacgaagaagatggattcttgacaagggactttcagttattttgacaaatctacggattgccaatcaccttgctgaacccacaggcacaggacaccggcacacacgaatcccaatagtcagaatcaaacggaatagtgacctaaaaagtaagggcgattggcattttaaataaaacaacacaaagaggtgggttttgttgacaattctgcgatgccaaacgaatgttttataaaaatgatggccaacatattggatttggaattttgtaatgctttttccaatatctcgaccccaatttggacaaaagacaatatctgggaaatcgggattaaatgacaagcgctattccccatccccccttcgataccatctacaaacaataaatgtacctcattggacttgtcaatgtccgctgtggccccccaataaatgtgtatttgaccctccgaaatggcatgtctcaccgccgcgtttggcctacacgacttgcgcacagcgcgcgcatctgaccc

SEQ ID NO: 93979 - DNA, 734 bp, Heterodera glycines
ggacccttatgagcgacgctcgtggaacatgttctccatccggcgcctttgcggcatggaaagacgatacaattccgatgggcgaattgaaagtcatttcccagattggaattggcagatttggagaggtgtacgaagcgtattattatgagccagctgtgataaagttcttcgacatgttccatgtggatgagcagaagaggctggagacattcaaacatgacacggcctgtttccaaaatgtccgccatgaaaacttggtgttcttccgtggcttctacacaatggagttgtgccggtttggcattgtcatggagctgatcggcgggcacactctttcacatatccttcacgaggagccgacgccgcacatgaacagatcggcgttggagttcaacgaaatcatggaatatgccaaacagatttgccagggtatgtcttatctgcacaccaagcacatcctccacaaggatttgcgttccaaaaatgtgttcgtcaacgagaggagaacagtcaaaatcaccgactttggtgtgttcaacttgaaacggctctcctttcccgcgaggagagattcgtttctcgtcccatcccattggctttcgtatgcagcgcctgaattggtccagattctgtcgcatacctttgaaccgtttcaattcaccgaggcatgcgatgtttattcattcggtacaatttgggttgagctgttgacgaatgcatttccattctcc

SEQ ID NO: 93980 - DNA, 462 bp, Heterodera glycines
gtccatagaaggaaatttaccagtgagtgcgaaggtcaaggcgggctttcatggtgctacatttgcaacacggacggatgtaacaaaagttggaaaaattcaactttctcttccactactccgacgagtacttcgaccaccaccaataaattgtcctctacgcctctcgcggaaatcaaaaataaattgcaatgtttggcatggaatatttgcaatttgagcacgaaattgaagcagtcaaaggtttcgcgacggttttcaattggtcaaaactgcgaggaaatggccaaagactggggacagattgaagaagatgaaaaaatcggagatgaatacgaccaaagtgccgacgaagatggccaagtgtttttggcggattttttcgttgggcgaattaatgcaaagatttaattgattttctaacaaaaattccaatttgaaaaaaaaaaaaaaaaaaaaaaa

SEQ ID NO: 93981 - DNA, 577 bp, Heterodera glycines
tccctaaaagagccaatgtttcgccgttgtccgtcgcttcgttcttataaagttcttcgtccgtccccctcccccttttctctcccttttgtcccttcttttcctttcgctgctttcagtcaattcgcacagttacgaatcgtcagaaatgagaattatggaggaaagaggcggaaagcgaatgttctaccagccctggtcgtttatgaagcggacgccgtccgtcgccaaagccaatgatttccaaaaacgccccgaagggcgacaatttctgctccgatggccttccgccgatcattttggaaaacggtcaactgtcgtcccattgatgcgattcggccgtcgaccagcggaaagggcggcccctctgattcggttcgggaaacgagcttatattcggacagatgccgcaccactgatcagattcggaaggagttcagaagagagaaaatgaagagaaaaaggaacgatgagaaaagaaaaatggagagacggacaaacagacagagaaagttggcgattgatcacccaaagatttacacagaacatttggaaaagataacggagtgacacaaaa

SEQ ID NO: 93982 - DNA, 473 bp, Heterodera glycines
tcgtaagaacttgccgagctggagcagtacatgaagcaggacctttaaagaaggccccactatcaattctactctcgtgccatgcgtgtccgggcatatcagcaatttttgtcaccgtacaaaacggtcggtcttgatgtcatggccaaatgctttggggtcagcaaagagttcatcgacaaggaactgttcatgttcatctccttgggtgcgttgaagtgtcgcattgacacggtgaaagatgtggtggaaatggggcaggccgacaacaaattctaccagtacaaaaagttgcttcatgacggggacattctgttgaatcgtgtgcagaaattatcgcgggttatcaatgtgtgaaatgaattggaaaggatacgatttgctaaaaatgatttttcttttttgttatgtgtgattaaatatagaccaataaaaaggattgtcagcggttaaaaaaaaaaaaaaaaaaaaca

SEQ ID NO: 93983 - DNA, 730 bp, Heterodera glycines
gttattatcggcggaatacgcgcgcattgccaacagctttggacctttgtttgaggagctgagcgaaaagacgggactgaacattcctaacttggaaattctgcaaaaagtcaccgatgccattgtcacgagggcaaatctgcccgcttttctgcctctgcctcaatgggcttcttccgatgcttacatcgacaaaatcgtccaaaaacggctggaattacacgagcaattgattgatttgtttttggatccgctcggaggttggcactttgatcagctgatcgggcggatggacgacgtggtgaacaaccgaactcagcaaaaggcagccttttattctgcgcatgacacgaacattttgacattgggccgttacttggaaatttcgccgatcaatgactcattcttcggctatgccagtttcatcgccttcgagctgtaccaggacagcgaggaatactttgttgagatgaagtcccacccccaactcaatggcactctctcacgcctcgtcattccgcactgtgcccacccgtgcccattctccgtcttccgtaccctccgtccccgcattccaccggccaatggatgtcccgctgcgttggcatttcttccgacgattgttccctttacgggtcaatttcgggagtactcatcgttttgatgatacttttggttgcgctttttggttctgctctttggtcatgccgaaattacaaaaagaaatgtg

SEQ ID NO: 93984 - DNA, 202 bp, Heterodera glycines
tttgcaaaaggaactttccgaaatgcgtgggaacaattcggacgctgttcgtgttcttgaggttgatgagtctaatttgcttcactggagccttatgctttatacggaccgtgaaccatacaacaaaggtgctttacgcgtgaatgttgatggtccaaatgagtacacattgaacacgccgtacgtgacattcggaacaaaa

SEQ ID NO: 93985 - DNA, 207 bp, Heterodera glycines
gtcaatagatgtcaatgaccaaataacggcaaaatctgtgcatactactagcaatgacgacgcgttgttaaccgacatttttacttgtttgccggatagcaaccaaaagaatggcaatgaggggggcactgggaatggtctcgtggacttgttcaccttagcccctgctaaccaaccgtcttcacagcttgttgaccaacccttcga

SEQ ID NO: 93986 - DNA, 466 bp, Heterodera glycines
ttcggcccaaccgctcaatgttttgtcggacattgacaataagttgcatgagaacaatgcgttcacctatttgctgggcgaaattgagaccaaaactggcctcatacgtcttcacgtctttggagccttggacgacctttacatgctttatcttctgttctgacgatggggtcatctggggtgtaacatcaccggctttctctacccagcttacatctcaataaaagcgattgatagtcgccagaaggaggacgacacccaatggcttacctactgggtggcttttgcgctgcttaatgttgtggaattcttctccaacaccattgtgtactacttccctttctattggatgatgaagtgtgctctgctgatgtggctgaacttgcccagcactttgagtggtccgctgttgtacacgcgcatcattcgtccgttccatcttcgactgcacaagaacattgacagc

SEQ ID NO: 93987 - DNA, 679 bp, Heterodera glycines
gtcctacggactctgatggacgacccggtcggcaccgacttctccttggaagaatatcccccttcaacaacttttcattggaatggaatttctgctaaatgaccaaaatggaaagacaagtaaggttgcctgggaccaacttgctaaaggcgtcaaacggctgtttttctgtgccaaatggtgtccaccgagcaaacaaatgcttggccaactcgtcgaagtttacccaaaaattaaatcggatcatcctcattttgaaataatattttgctcttctgatcgttcggaagaatcattcaacgaacatttttcgctaatgccttggcttgcgtttccatatggtgacgaaaaactcgttcaaaaaattgcgaaggcttacgacatttgcggcattccttcatttattctcgtcgatgagaacttttcactgctaacgcgaaacgggcgaagcgtttgtttgtcggacccccacggatatccctggagaagaaaggcactctacgaactcactgagcatactgtccaccgcttatcggaaatgccttcgctcattctcttcacggaagggtcggccgaggacatcgaattttcttgccaaattctcagtccttgtgccgagtcggttttcactcaacagaatgagtcaccgcaaatcgccgcctctttgcctgccaaatta

SEQ ID NO: 93988 - DNA, 444 bp, Heterodera glycines
ctccgttcggacggtttgcggatgcgcacacactttcgctgccgtctcaccatcgccacacggcgtaaccaggactatcaggtgcaacgtatgatgagttcgtacaccgccacctgcttttggctgtacggaaacaacattcaagacggtttgctgttgcaatgggtggagacggcgatgggctgggagaagttcaagtttctgttcatgcagcattttcggatcaacgccgaggtggagcggggtttacaggacaaggacttcgacctgctccagtataaaatccaatgcaatgactgttcccctccttcgtccacatttagtggagatcgcaaaatcaccttcaaaaacattctgtgtccccatttgcgttacgaatgtggctcaacgaatgtccgcttcagtgtgtggcgtggactgctcgaactgctccaactctttcag

SEQ ID NO: 93989 - DNA, 517 bp, Heterodera glycines
catcagccgacacctcggacgaggggatcacattgtccgcgaacagaacggcgaccactacaagaaccgccaccaccagaacttgactcatcacacagatggcatgaacacagacagttgtgtacatgacgcaataatgtcacacctcctcgtccgctactctctcccacactaagaactccacaaaagtaccatctcgatcaacattcatgataaagatggtgaccgatgtgtcacagcccaagtctcagtcaaatactgcaccgatactttgcatcagcacaacgacgatctcatacatataaatctcccctcgggcgccaagaaggccgtcaagtcggcttgacgtggcaccgctgacattgttgctcctagagggagcattgatcaaaccatgcgcaaagctggttcagcctaccaccacagcaaagaccctcgtaacccccgactcaatacccttggagcgcatctgaatttcgcgaactgtccccatagcgaagagaaccataaccatctc

SEQ ID NO: 93990 - DNA, 538 bp, Heterodera glycines
ttcccttaaaaatgtccaattcttttcgaattctttccttattccgttcgagggttctgcttctctttgttcctgagacttcacgagctctctattttcacatcgctgagactgagaaaacatgtttcattgaggaaattccggacgagacaatgtggcgcccaattgcgcgttcatttggacatccaagtcggagaacatgcccaggactacgagcaggtggcagccaaagacaaattgaacgaacttcaattgcgtgtgcggcaattgttggaccaagtggaacaaatcaccaaagagcagaattaccagcgctatcgcgaagagcgtttccgacagactagcgaaagtaccaacagtcgcgtgctttggtggtccgtcggacaaacgattgtcctccttttgaccggtgcttggcaaatgcgccacttgaagggcttttttgaggccaaaaagcttgtctgaatcgatgcttttttcctggcagatatttatttgtctccgaattgttgttgtgtatgtactcttttttgcctta

SEQ ID NO: 93991 - DNA, 283 bp, Heterodera glycines
taatctttctttgccaatggttttgcttgctttttattccatcaacagcaaacttttgattgtgtcatgccaacaaagttcgaacttttcggaatgcggcatttccgacttcgaacctcaattggccaatgtgtcaaaaatggcaatcggcacaaatcatgtgtataaagggccagaaggtggggatgaacaggcacctccatggatcgtccgactgatttttgggaaatcgtatttgcaacgaaacaatatcggtccccgacatattttgaacggattgcat

SEQ ID NO: 93992 - DNA, 144 bp, Heterodera glycines
gtcttaagtgttgacgaaatacgaggccgccaccatcgacgatcatagaggagagggaagattgattgattgtctgccagtgatttttatgggtttctgcgcttgaattttttccatttgaacgtcaatttcgtcagtaaagca

SEQ ID NO: 93993 - DNA, 197 bp, Heterodera glycines
gtacattccatgcagcaacagcggcagactttgactcactcaaatctacgagtggcgacggccatttaccgcactgctttggatgttgtgcaaaacatcagcagaattctcgacagcacggcgaacaccgcaacttcccaacaacagtacaacattgtccctggtgattgtgtcgttgcctctgttcaaactctaat

SEQ ID NO: 93994 - DNA, 306 bp, Heterodera glycines
ctcattctattgatgtctttggataaaattttgaaaagcgatgaccagccttacatttctccggtgattaacattcgccaatttctggccgatgcttctgctcaaatggatcgactgaggcaatattttgacgacattccctcagcctcggctgctgccgattgttctgcagttgaacaatcgacttcttctaatgcgtcggacccccgcaaaaatttccttaaatttgtgatggaccgcggcttttccacggaagacgcggccaaggccattgcaagcggagatggagcgttggccaaaatgttc

SEQ ID NO: 93995 - DNA, 637 bp, Heterodera glycines
ctccgtaacgctaagaaggacggaccaaccaaaacattcgcattccttcaccggccaattatttgcacagttctcgcaatttttgagaatggacaccaaaacgggcggtactgaaaatgcagcacaattttggcttgcttcgagtagcgacgaagtggcgccgtcgagcaaaaaagtgattccgccgggcacaaaagtgtttttcagatgggtcaatcggaccgatgtttgggcgtcgtccgccgaaactcacaaaaagttgctgaggcacatgcagcagaacggcagaagggacgaggcgcggtcggactcaaatgagcacggcatggcgccctcgcccgatggcgtcgatttctttgagccgtccctccactcaaatgccgatggccttttcttcgccgtcatcgttctcctctctctgatcggcctcgttttggtctttttgctcggctattttctcgtccgatttttccaaggcggcgatgacgacgaaaattccctgcggcgcgaggagaaaagcccgaagcatcggcacgagttgcgagtggtgctggtgccgaagaacggacgccgaaagtcgtcgcttccgtccgcactgatccatccttttgggcttggcgacaaaaagcatttgatc

SEQ ID NO: 93996 - DNA, 340 bp, Heterodera glycines
gtgaagtgtgtaggtcgttgttcgatcacgagttctcacaacagtgtcaaggaatgtgctcccgccctgcccaccacaggcacattccacatgggtttctttttcttcttcgaacagagtgtggatgcaagtggcgcaagggagcgaagtgatgagtatgccacgcaagcaccccgatctgacgcgtccactccagcattatttctttggttttcaactgttcataaacaggaggaaacaacaggtagtggagggttttttcccccgttttgaacgggttttttgtccctataaaaccacacctcgtaattaggcaagcaatataagagatagcacattc

SEQ ID NO: 93997 - DNA, 677 bp, Heterodera glycines
cctcttttgaatttcatctccgctccgatggcgcgtcgggtgctgtcggggacgtattttattccgcgggtgtgcgtcgacagaagggggacagtgcgcgagtgtttcgcgccccaaagattctcagagggaccggtgcccattcccaatttggcgctgcgctgacgcgactcggaaatgtcgacaatgacgcggaagggacacaggatttcgctgtcggtgcgcctcagtccgactctggccaaggatcggtgttcatttatttcggagacaagtgggacgctttctcgactgaacctgcccaggaaattcatgcgagtgtgctcaatgggagaatctatggccaaaatttaactttcttcggatcggcacttgccggcggcgtggacatggacggggacggatacgtcgaattgggagtgggagcccatcagtcggacattgtcgcgttgtttcgtgcccgaccgattgtcgatattcaattggcacactttttcccgcaaaaacagattaaaattgacgcagataacacttgttcaccctctgcccacagttgtttttctttgttcacttctctccgccttttgcctcggaatgattcgtctcgccttttgtctcgccatttcgctgataataagccacagcagccctttctgtgccgactttcagccattccc

SEQ ID NO: 93998 - DNA, 223 bp, Heterodera glycines
tccgatggcatccgctgcactcggtttttcaaattttgtgaatggtgccctcatccgacaccctttcgttgtgctgcggcgccagtgacaagtgcatgaccacgcgacatgcaaacatttgacgcccattagtctttttgcggtgtggtcaactggccgggaaaaatgtacttttttcctttggaaaggcgccattggcacggcgttcctttgggtggtttcc

SEQ ID NO: 93999 - DNA, 350 bp, Heterodera glycines
  unsure (1)..(350): unsure at all n locations
gtgcctcaaagtaatcttgatatggtggcatcgtttctttcgaactttgaggggttccatgtgagcgccaacgcggcagggcatcgggcaaacgatgttgagacgagcgaagcgattgtccgtcgttctgacgcacagattgagcgactccgtcagcttgagatgcgtttcaacactttcatcgaagatttggagaaagtgcgcaaccacggcgccgaatgagaacgaagtgcagcagtaaattgacggaggatgaatttgttaaattgattctcaattgttcgatgaatcataatgtatttttgctttcaacgtaaagagcggatacnanaaaaaaaaaaattaaaaaa

SEQ ID NO: 94000 - DNA, 690 bp, Heterodera glycines
tggacacaattcaatgacaatacctgaaaattggattactgtgtacatcgtcttcgcccagttggcattgcccagttgatccccatcggatttttttatggacgcataaatacagggagggaccctggcttatacattcatttcttctcaattaaacctgtacatagagttgcctaaattgttattcacttacttacatatcaacacttcctgggtgactaactaatgccagcagaagcacagatttgtgatgttggaaaagaattttccggtgacatcggcaggccaaatttcggaataattcagagacaaaacattgtacagcaaaatgaccattaaaattggaagtgaactcatccaaaaggacaacaacggacaaaaagcagcaaaaaagggaaaaaacaaaaaggcgaaaaatgaaggaccactccaaagtgctgaactttgtccaccgacgaacatggccaccaaacccgagccaatcccggatgacaaaagcggtagggccaaaatggccgtcaattgcgcaccaattcggagtgacaaaattccaccaaccaacaaatccaaatcggccaaatgtgcgaacaacgtaagccgatcgaaagcaaaaagcgggaggaagtggacgaaggcggtggcttcgaatgggaaaaatgcagcgaacgaaagcggcacagagcttggcga

SEQ ID NO: 94001 - DNA, 628 bp, Heterodera glycines
cctttttacttttctgcttttcggcgctgctttttctgctgaacgatttaagccacaagcgcagcaaaaggagcagcccggccccaaactgatcgatgagacgacgcggtggagcaaatgcaagacggatcagaacctaaccatttacgactttgaggtggaaacattggaaggcgacttcaccaatttggagaagttcaaaggacaggcccttctggtgataaacgtggccactttttgcgcgtacactcagcagtacattgacttcaatccgctgattgagaagaacctggccaatggcaaccaattctccattttggcattcccctgcaatcagttttatctgcaggagccggccgagaaccacgagataatgaacgggattacccatgtgaggcccggcacgggtggaagcgcaccgcgactgcactctcggcaagtggggtcaacggcgcaacagcaccgctgacgaatccttaagatggtgcctcaaacggtattcaatcggaaagagggaggactgatgtacacccgatcagacccaacaacttccatggaacttcaaaaatttctcctccaatccaaagggcgcccggctttccgtttccatccaaccgggtggccccac

SEQ ID NO: 94002 - DNA, 841 bp, Heterodera glycines
gtccaataaagattttcttgtttatttttatttgaatattagcgccgctgagacgacaaaaccaatttccgccctgtcaatagcctaaatggggtgcatccacagtgtgagcgacaaaaatgcgaaggcaaggagcaggcaaattgacgaacagcttaaggcggaccatgacagggcacagagggaggtcaaactgttgctgttgggtgcgggcgagtcgggcaaaagcacaattgtcaagcagatgaagatcatccacgagacgggctacagcgacgaggagcgcaaggcgtaccgaccagtcgtttactcaaacaccatccaatccatgaatgccattctgagggcaatggttcggctgaaaatcaacttttccactccgtccagaaaggaggagtttgcgcagtttgttcaacttgcacaaacgacagaagacggtgaactgccattggagttggcctccgtgatgaaacatttgtgggccgacacaggcgtccaggagtgctttgagcgctcgcgtgagtaccaactgaacgactcggctgcctactacttgaactcgttggaccgggttgcacagcccggctatgtgccgacgcaggacgacgtactccgcacacgggtcaaaacgacgggcattgtggagacgcatttcacttataaggatctcaatttcaaaatgttcgacgtcggagggcagagaagtgagcggaagaagtggattcactgctttgagggcgtcacggcgatcattttctgtgtggcactctccgaatatgacatggtgttggcggaggatgacgaaatgaatcggatgattgaaagcatgaagctgttcgac

SEQ ID NO: 94003 - DNA, 394 bp, Heterodera glycines
tccgttaaagtgctaattctcacataaaatgtccataaaagaacttcattaatgtcgtctctatcaaatgaatgtgcaataatgtccgctaatgttcacatgaagtgtaattgatcgaatctccgataaatgaaaaagtcgccgcggcttccgttctcacggccgactgataaatggcgaattgcaatgaaaattatcggattgatctttgagctttgaaatgggcactaattagccgaacatggactcaccctaaaaaaataactcaaataggctcaaaaatcattaatttggccgaaatttaagcgatcagagtaaaaataatttctcattcgacttttgaattttctcttgcacaattggcagtcattttaacttagtccctagaaatttt

SEQ ID NO: 94004 - DNA, 340 bp, Heterodera glycines
ggccaaatatttggaggagccatgcattgcggtcaatgaacgggacgaacccatcggcactgtgtcaaaaagggaatgccatgcaaaaccaattctccgccgcgcgttgagtgtgttcatgttcgatgcggacaaccgactcattttgctttataggtcgcagacaaaaatcacattccccgggctgtggacgaacacatgttgcagccacccccattttgtggacgaggaatgcgctggggaggagggcatcagacgggcggcccaacgcaaggtgaaccacgaacttggcattgatgtagacctggagcacatgcacgtgatggggcggctcatttac

SEQ ID NO: 94005 - DNA, 549 bp, Heterodera glycines
atccgattccattgtgggcgtttggtcgttttctcgttcactttcgctagttatgcactttatcatgcttcacggaagacgcttagcggagtaaaatcgtcactttcggatgattggatcaatggaacagatcacccgccattttttcacgattcgaagagtgcacaaactttccttggctcgttggattcccttttcatgttttgctatgccattgctctcgtcttctgggggtggctcggcgaccggctcaaaatcaactcgcttatggtcgtcgcatttggaatggttggctcggcattgacactgactgctttcggttcattccgttttggttcaatttttactccgtcccttggtaccttttcacttacgctcttttcgggcgtgtcccagcgtgcggttggcccaacgaagtcccaattatgggctattggttttccgaaaaccaaccgcgggtttatcatgggaatgtgggcaacttgccaaccattcggggataatcttggtgctttggtcaattccttccgtcttcccatggggtatgat

SEQ ID NO: 94006 - DNA, 181 bp, Heterodera glycines
  unsure (1)..(181): unsure at all n locations
atccgttggggaattgcgaaagagaatggcgaaactgcgcgaaactggcattgaatatgagttcgactttgagaagaaatacaacgagtttttaaattctcaaaataccgagtgatttttgcctccgttgttttatttttttataaattttgttggttcnnaaaaaaaaaaaaaaaaaaaa

SEQ ID NO: 94007 - DNA, 686 bp, Heterodera glycines
acgcatttctaaaaatgatgatgttccaattgcaaaatgcgctctgttgtcaatgttgccaaaaccgaaaaaggaaggaggaaacggaggcaaaatgcttccggcaaagaaactgttaccaatttcaataacaacagtacagccaaaacagacgacaggaaaacaggcgtggaaaaatgatgtgttggatgatgacgaagaatttgacacaaaattggccgagaagtcggcaaaacgaattggcaacgaagagacggacgacgactcctcgggagccgaggagggctcaactcggccaacaaaacattcttttgacgaacaaagcgcccagaaacaacttggtaaatcggttgctcaaataacgcttaatcgaccgcttggaattgattacggggacagtgacagcagtgaagacgaagcgaatgacaacaatgagacggacggtgaaatggattcgcgggcgaaagacttttttggacttctctcaacttctccggttgaaaagcgtgcaaaaatggacgaccaattcaatgctgaaccccagcttttcattgaagatgttgaaccagggccgtccaggccccctaatcatcaaattgttggcatgggacgggcagaaggaaatgaagggccgatcaagaatgtccgagccatttctgacgagcaagcccatcggctgatctacg

SEQ ID NO: 94008 - DNA, 807 bp, Heterodera glycines
gtctatataaggtaatttggaatggattcttcaattgcattgacctaggagaatgaacgtcattttcgaaatcctttccttgaaaatgtggctgatggtgctcgagctgttagcagggaatggcttttgcaaaaactcgaaactctgacagagcgaattgcgtcacgaaaaattcgagcggaagagaatggaaaagttggtccttatgttggcccttctggaattgcttattctctcattaaagcgtcaagaaaactgaaccaatctcaaagcaatttgagcgattacatccggacacttcttgcgactgaatctgattatgatgcaaaaaaaacttctgattcgcataaatgtcgttatttgacgggatcgttgggttttttcactgttcgggcgatcgccgatttttacttcaaaaatgaaacggatgtctcttccctttcggcgcattttcgcaaattgcttccgaccgttctgagttctaatatcgaagaatttgaaatgttgaacggacgtgcagggtttcttgcatcactgcttgaacttcgcacacattttggccaacaactgctttccgacagtgaagttcgtcaagtgttgggtttcatggtcatttccggtaaaaattactccggaaaatgcaactctaccgccaagcttatgtataaatggcatgacaaagaatacctcggggcggcgcacggcgtcagcggaatttaccaaatgatgttgagcttctggaacttgcttgatgcctctgcgaagtcggacttaacgcaaagcgtcgattggttgatgagcacacaa

SEQ ID NO: 94009 - DNA, 816 bp, Heterodera glycines
cacttattaataaaaaatggtgaaaagtgttgtgagtttgttaccaagttacaaaatttcatcgccgtcaaccacttcaaacacaactccatcaacaaattcatctgacgacagttgtgacaatgaacgacaacagcaacaacaacaatcggatgacataaagcgagtgaatggcgatatgaaaagcctacggaatgccgcatatggagagaaaacaatgttggccagaagtgaacagggcagcgtgtggaaatcaattgccacggacgaggatggcacaacaaggaatgtgacaataaaattgcttcgtgcaccgtttcattcacccggcacagccaaatacacattgcgcgaagtggcactgctctccacactgaatcatccgaatttaattgctctttacgatgtccgtttgccacccaaattaaagccgttgaaaaaatttgatgatttacacttggtgacggaatattttggcaaaaatttgcgcgaaagaattgtggaaaagttgaaaaatggcacgctgtggacgcaccaagaattgtcctactgtatcattcaaattttgtgcggtgtcaatttcttacacaattctggcattgtgcatcgggatttaaaaccgactaatgttgtaatgaatgagcgtggtaatttgaaaattttggactacggtattgccagagatattgtgccagaaaatctgacaaccgaagcgggaacaccaatttaccgagcaccagaaatctacttgggcattgatagttacgacaaaaaagtcgatctttggtccgttggttgcatttttgtcgaattgat

SEQ ID NO: 94010 - DNA, 594 bp, Heterodera glycines
catcgtacaggcggagctcgacgacagtttttcactaatgcacctgtctgttggaaatcactcggatgggccgtgccggcgttgtgttgagcagtggagctgaagacatgctgcagcttcgtggaccatttgatgtctcaaatttgtgctctctctttgggttgacaccaaagtgcggacgtcgctttgtctcgagcaatgccctctccgttcttttgcgttcccaaacgcgtcgtcacacagtcaaaggtgcaattcatcaggtcgaccttgccttttctcctcaagttgcgtcgacttcgaataattcccttcttcccaacaaaaacattactgaacaacttgcgacaattgaggaatttgcaattgaaatgtctgctgcacaaatggaagtcaaatgccccgccgaggagagagaaaatgaacgcggagaaaaagacgaaaaaaggccgaaacagaaaaaaagaaagctggaagaagaggtggaccgggaacatggaacaggacgaggagacccacccacgaattttgaaaatcttatggagttgttcgcataaaatctttgttactgttgttaataaaattcctaaaaaa

SEQ ID NO: 94011 - DNA, 572 bp, Heterodera glycines
caccatgagaccttaaaatataagccttaatgattagtttgtttgctcttttttgcatttaaaattcactgatggatgatgaaaacgaaccgcaagaatctgaggagacagcgatggacaccgaagacgacgaattgcccattgtgcgtcttctgatcgcatcggacatccatgccgggttcgcagagaacaaagagcatatcagcaacgattcattcgaaacattccgcgaagtgctcaagattggggtcgactcgaaggtggactttgtccttttggggggtgaccttttccatgagaatcacccgagccgtgaaacgcaactgaaggtggtccgtctgctacgaaaacactgtttccgcgagggtccactttggcttgaattcctttccgatccgacccgtcatttccaacacagcaattttcccggtcgcccattatttgggacgtgaatcttcacgtggacctgccccatttttccaatcccacggaaaccatgacgattttgttccgaaaaaggtctttctgcccttgaactgctcccacaaaggccgggctcattaaatttgttt

SEQ ID NO: 94012 - DNA, 833 bp, Heterodera glycines
gatcgtaaataacaaaatggagaggaacagagaaaatttgccactttgtttcctcactcaaaaaggacggaatcgaaatttcagagagtgccaccgatactttgttcgtgagtaacagcagtcatttggtgggcgtccccttcgagagtctcgagttgcttttccgtcgttttgacctgcactgtgccttcaccgtttacccggccaacaaatcctactcattggtccacttttccgaagtgaatttggcgatcgctgcgcgcaatgctctcaatggcaccaaacccaaagactttcccagtgaaaatgctgcacaaattcatttgttcttcgtcaggcaaaaagcggcaaaccgttcgccgccagcggcattgccaaacggcctgcaaatagtgccggatttcatttcgacgcaacacgagtccgaactcgagcaatttgtggccaattgtctagcagaaaggacaaacattcaggaattgaaaaatcgacatgttttccattttgggtacgtgttcaattacaatgaaaacaatgcgacggacgaagcgcctcaaattccgcctatttttgaccgaattattgacgaaatttgctccagttttgactgccaatcagccgaaattcgaccgaatcaaatcactgtgaatgtttatgagcctggccatggcatccctttgcatttggacgcccattccgcctttgaggagcccatttactcgctgagtttgctgtccgacgttgtgatggaattccgcgactgcgccaacagtgcccggcgcgcctctgcgcatttgcccaggcgtagcattctgtcgctgcgcggcgatgtc

SEQ ID NO: 94013 - DNA, 79 bp, Heterodera glycines
  unsure (1)..(79): unsure at all n locations
ggccgtaaaagcaaatatgaataaacgacgaactgctgctgatgactaacaaattcngaaaaaaaaaaaaaaaaaaaaa

SEQ ID NO: 94014 - DNA, 262 bp, Heterodera glycines
cgagccggtgctcaccgatactgcactcggcgtcgcaggctctgcggagcgtgccaaacaattagctgcctgcattcctaagtcatgcattccaatggagctcgccaacgaagctgaccccgagatccattatcgcacaactgggcccgacatttggcagccaactcatggtaaggttgatgcatgcatctatggcattggctccaggacgacggtctatggcgtacgacgctttctgcgtgatatgaatccggacatagac

SEQ ID NO: 94015 - DNA, 136 bp, Heterodera glycines
  unsure (1)..(136): unsure at all n locations
gacctctaatgcttattctttgtttctgtccactttctatgtttactgttatctgaatacacttttacccttttaaattattttgagtgttttcccataaaagtccgctgctanaaaaaaaaaaaaaaaaaaaaaa

SEQ ID NO: 94016 - DNA, 449 bp, Heterodera glycines
tgccttactcgtcgaaaagggaggaacgcagcgggtgtttaccttcgaagaggccaaggataagaattcgagtgccttgtgcgattacatgtgcgacatggtcacattcacggaaaagggcaagccgcaaatccaagtggcaccgcaagaaatggagacggagggacagcatgaggaagaggaggagaaagtgttggaacggacccatgacgacgacgggaaactgaacttcgacgattaaaagggcagagacataatttgagaagtttgagacggcactttacttcattcctcacggattttactcaatgatatattatcttcaatgtttgtttgtagccccacccaatgaaagtgaactcacataaaaccgaatttggaataaaaatgaattttgatttcattggaataaaacggctcccggtaaaaaaaaaaaaaaaaaaaaaaaa

SEQ ID NO: 94017 - DNA, 735 bp, Heterodera glycines
atccttttaaaatttgattgtctgccattgtctcgccccctctccctcagtgtttcttcgccctcctttctctcgccgtgtgttaccgcgtcggccctccgtcggaccttcgcactttgaatttgctcgtttggctcttgcgactgagttcactttccgcactttactttttcagtttgaatcgtttccgtgccattgtctccgtcatttttctgctgattttctcaatttggtgtaattatcggagagaaattcgttcttttgcaataattacacaaaataagataagcacttttatttatggcccccagccgagggaatttttaacggagtcggaataccgcgaggaggctcggatttacactcaattggaattggacaaacttcgccagcacattcagtctcgacaagtgtgtgacacgctgagactcatttatcaacttcacactccgaatagaacatcaagctttatcgcgggtaatgctgaacatatttcgccggaggaaagaaggagtcactgcgaattgttcggcttttccgaagcccaacgaaacggcgacgacgaaacggacgaaataacggatgaatacgaaaatgatgaatacataacggatgacgacgaatgacggagaagggacacttaacacacttttgttatccgattaatataatatttatgtttttttcactttacaacaaaagttgccattaattccaaaataaacacttcaaaaa

SEQ ID NO: 94018 - DNA, 669 bp, Heterodera glycines
ccgacggacgacccgaaaaatcgtgctaaaatactcaccgagaaattcgaaatggacgcgaccgactcgcgcaaaatttggtgcttcggaccagagggcactggtgccaatttgctgattgacgtgacaaagggtgttcagtacttgaacgaaattaaggattcggtggtggccggtttccaatgggcaaccaaggagggtgtgctctgcgatgagaacatgcgcggcgtccgttttgacatccacgacgtcacgctgcacgccgatgccattcacggtggcgggggccaatcattcccacggcgcgtcgtgttttctacgcttccgtggtgaccggcaaaacctccctgcttgaacctgtctatcttcgtggagatccattgccccaagcgggtggtggtgggatttacggaatgccgaaaccgccgccctggggtcctccttggaggaaaaataaaatgctgggaaccccgatgttatcggcaagggaatttggccggcaaacaaacattcgggatcaccggctggtttgcgccccacaccgggggggcaagggtttcgccaatgggtgtcgaacattttcaagtcttccccgggatccccttgatggacttctcccccccgggcagggtgccctgaaactcaaaacaaaaagggttgagggggggg

SEQ ID NO: 94019 - DNA, 779 bp, Heterodera glycines
gctcgaacagcagtgaccaccaaaatgaggaggaggattcgaaagggacaaagtcgaaaagcggcgactcgtttccgccgcgccattcccacacttttatcggttcgaccttcgccatttggtcactgattttcctgctgttcgccacttttgcctctctgcagtactatttgcccaaggccgcttcctcttgcctttgcccggccgctgaatttgggcgactgaccgcccaaagagcgtacaacgacagcagttttgggaatcccaagattttgcccgacggtcgaatcgaatacgaattggcggtggtttccgatttggaccatgacagcaaaatggaggacagaaaggagacgtggcgtagttttttccgcaggggtcgcctcctcttccgccccgacattccttccgtgcaagtccaatgggccaaggacaagcaggacaacacactgtactcgcagctttcgtccggaggacgcgcgatggaactgtccgaactctgcgtttacgacggacatttgctcaccgtggacgaccggacgggtattgtgtacagaatggacaatttcaaagacatggtcccctgggtgctgctgaatgatgggcccggcaatgccaccaaagggttcaaaggcgaatggatgagcgtacggcacaatttgctttatgtgggcggattgggcaaagaatggacatcggtcaccggagaattcattaattacaatccgatgtatgtgaaggtgatcaatccctacggcgaagtgttgcacgtcgactgg

SEQ ID NO: 94020 - DNA, 235 bp, Heterodera glycines
gtcctttcttgtccttttgtaattagcctgttcgtaaatccgttctcaatggcctctcttttgtcgcgggtgctttacgtcacttcgatcttcttcgtctttttgtacctcctggtgcctgcactgtttttcttcttccccacttttatgcagcacattttcttccttcattttgtttgctttccattcgtcgattaccacaacaatctgcgcgacgtggtcagaaatcacccgt

SEQ ID NO: 94021 - DNA, 477 bp, Heterodera glycines
ttccgtaaaaacttccttcactcattctttctcccccttttttcccttcttttttcagtcccttaaaatgttccgatcgcccgcacttttcgcgatgtttcttctgctgctgattgtttttcagctgtttggggttggaattgtgcaggggtcgaagcgaagcaaaggccgcgcacggacaaaagaaagcgaaggcatttcgaatcgggggaaagaatcggcaaaagaaaaagtggacgaattggagggcaaaaaaacgcagaaaaaggaagaggaggagcaaaaggaggagaaggaaaaggcaaaaaaggaccaattgacgggagagggaattggaatggcaccgacggggggacgaagagcacatcgagaaggaggagaagtgaatgaacaccgcgaggatggccaagggactgtcactttgagaagggcacccggcgaattgggggaaatgggcacgaagaaaaagcaccgcga

SEQ ID NO: 94022 - DNA, 438 bp, Heterodera glycines
  unsure (1)..(438): unsure at all n locations
tctttcaagagatttactgacttcaagcccccgggagtctatttcttaaagcccccccccccggaatatggactttatttcagggggaggtgttctaattcagggttttaatcaaggctgtagtggcacccaggatcaacccgtggttttgtcaggcgtacatcttaacttaagcaaatattcaaaatggctgatgttttgttggcatttgttctccaaactgcactcatcgcagcggaggcgcaacttagtttcagcgcgtgcgttccttctctgcgcgaccgagaaacagtgaatgccaaaccaattcagaacatatacaaaacatggcaagatgccgcagggtgtccatgcgtgacaatgattatgtgaaggaagaaagaaacaattaataaattaggatggatttccnnaaaaaaaaaaaaaaaaaaaaaaaaa

SEQ ID NO: 94023 - DNA, 320 bp, Heterodera glycines
ctccatcaaagtcaaccagcagatgatgacgccacaaatgggcctctttaaagcaattccctccaaacgcacctgcaacaccagcgacaccccaaatgtcgcagtcaattgggacgccattgtccgtgcacaacattcaacaacccggttctgttcaacctcaacagcccggttctgttggtatggttgccacccctgcggctccgtattctgttggtgcgtcgactaccggtggtccggcctcaaatcaaccgattgccggcccacattccaaccctccggcggcacaacaagcgacacagacgcagccaatcggcgga

SEQ ID NO: 94024 - DNA, 764 bp, Heterodera glycines
gttcttcaagcttcgcgttccccgtttgaagattggaatgttccgttaacattttgcaaataactgttttctccgcttccacctttattggaatctcaatcagcccaaacaatatgaagaactgcgtattatacgtgtgtcgaacgaatacaccgacgaactgtttacaaatgctgcgaatgctgttggtcttcagttggatgagttgcttgcctgcattcctgagagtctgataatgtacgtgaacccaggcgaagtgttctactgtcttggtgactattcgcctccggtgcctgtctgggtcgggtcagtctgtgcggatctcaagtacaacgagacgtccaatgtcacttttccgcctccgccaattccctcgtccattttgcccactcataccatccaaccgcttattccgcgtgccattggcggtgtctctgctacggtcgactttagtgttgtaaactatcgcattcagttgtcgttagtgcatccgcgtgagcttggctacgctaccaatccgtcgagtgattttgtgatgttccgttacgttgtccccggcactccgaattacaccgtcgaatcttttgcatcaactcgattcggctcgtatcgtaagcgtccggactacgaatttgtcacccatcttcaacgttcgctgttgctgatgaacatgaacatccattcgtgctcggatgagagcacttaatatttttgaagcgtaacctttgatgataggtctgtttgtcgaaatgttattgtatttt

SEQ ID NO: 94025 - DNA, 735 bp, Heterodera glycines
gtcaatcaactcattgaggacaaacagatggagatggtctacgcttcgttggcagtcgaaggcacgagttggacaagtgaggacaacattcctgtgcaagttgtgaacacgctaatcggccaattcgacagaactcactgtcggaatagttcacgattggctagaacattgagcccaaattccggcgttagttcattcatgtcatatacgacttcctataaagacacgggcctgactgggttatttttctgtgccgagccggacgcattgttcaatttggcccagtccgtatgcaaggaatggcggcaactttgtgaagaggtggacgtggacgagttggaacgtgccaaacggtctcttctcaccaattctcttctgatgttggatggttctacgcctatttgcgaggatattggaagacaattgctgtgttttgatcggcgcatttcaacagaggaattggaagagaaaataaattcaataacaccagacaccatacggagcatcggacgtcgctattttgtcaacaaaccttttgcctacgtgatcattggaaagacatccaactggccaaatcccaggaaaattcagaagtggttgagctggtgacctgttcatactttgtcataaatttatgatgttttgatttgataattttaccatttttgttttgcttttattttgaaatattatttttatggtagaacaagcaaattacaacaatgattttgctct

SEQ ID NO: 94026 - DNA, 683 bp, Heterodera glycines
gttcgatcaaagtttgtgcattatttctcagacttaattggcagccatccttcatcaatgggtgttctccgttttacacttcgaaatgctggcaaaatcactttggtcgcactggcggtgaaagttgcggcggacaacggcgtgtggtccctaaactcggaggagggcgcctcactgttcgccaatttccgctccaccgttttgcccggcactattgtatacagggaagagttgccgtcggcggacaacgcgtgccgttccatcggtgcggcatggaatcgcaatgtgaactgtgcctttggcgcgcttcgttccgcgacgcattcggcgcgcgaatcggtgcaaaaaatggctgccgaagcgatggcattttttgacgacgacgaggaaaacaaaagcagcagagggaggagaacggcagcagaacagcgccaatgatgagaaatgagaggaggacaaaatgaattgaatctgttttaatatcattgtgcatttgctaagggtgctctcttctctcagtctctctgattttgggccgaacgaacaaacactcagttaattattaagtgtacacaccaggaatgccatttcgaggccctggaaattccgaaaatcgaaattcctacctcaaaaattttaatggaaatcggaattcagaccacaaaaatatcaaatcggaaaaa

SEQ ID NO: 94027 - DNA, 487 bp, Heterodera glycines
aatccttagagtttggacggacgacatgtcatcgccggccattggcacttcaattttggagcacccacgtgaagagagtggggcaggcgcttcgatggtcgttcgagtgaccactcaacaccaagaagtgttctactcatcatctccaggccgtaacagaaaggcacagccgataccgagaagacaaaagccaacgaatcaccagcctattgtgacggaaatttctgatgacagtgccgaagaacaactcgaaacagtgccaaatgtacgtcgaagtgacctctgcacagacgatgctgagtttttccggaacaacgatgaacaattggaagacgattttgttggggactttgggcgaatcaacacgaacaattatcagcagccatttcgacggcgcagaagagaggcgacttcggcaattcgcaacaaatacaaataaagaacagaagattaattggataattatttaaatcaactttttgtgttt

SEQ ID NO: 94028 - DNA, 484 bp, Heterodera glycines
gcattatggcggttcaaaatccgacacagcagcagcaaacaccgtaggccgtctctgttgcagaaattgccaatggcgttgaggaggttcatggccaaatctttgaagtcgctccccgatatgtgaatctgtcatatatcggcgaaggagcctatgggatggttgtatcagcactcgacacagtcaccagggagcgagtcgcaatcaagaaaatatctccatttgaacaccaaacattttgtcagaggacgctccgcgaaatcaaaattctgtcacgattcaaacatgaaaatattatcaacatacaagcaataattcgggcgccaagcattgagctgatgaaagacatttacatcgtccaatgtctgatggagacggatttgtacaaattgctgaaaacccagcgcctttccaacgaccacatctgttactttctctatcaaattctgcgcgggcttaagtacattcattccgcaaatgtgct

SEQ ID NO: 94029 - DNA, 283 bp, Heterodera glycines
  unsure (1)..(283): unsure at all n locations
catggtcggtttcgcgcccctcacgtcccgcggctcgcaacaataccgtgccctcacggtccccgagctcacgcagcaaatgtttgacgccaagaacatgatggccgcctcggacccgcgtcacggtcggtacctcacggtcgcttgcatgttccgtggccgcatggtcatgaaggagggtgacnagcagatgctccatgtccaaaaccagaactcgtcctactttgtcgagggggatcccancaacgtcaagaccgccctgtgcgataattccgcccaaggg

SEQ ID NO: 94030 - DNA, 235 bp, Heterodera glycines
gtgggacaaggcgtgtcttctcacgcggttggtcgcctcgtcagtgcgactgtccgaagcggcgggcggaattattaaggacataatgaaaagtggcgacctgaaaattgtgaaccaagaacaaacaggacaaatgaaggattttgcaaccgaggccgatcgttcaacttcaattttgcattgacggtcactgcgtggcgaattcggcgaaaatcttacaatatttggcgaggag

SEQ ID NO: 94031 - DNA, 691 bp, Heterodera glycines
gtccctaagaggacgccatccaaaagatttggctttggcagaaacctgtccacggctttcggggccccgatttggtggagagtaatcaccgaatgctaatcaacggcgaattgcactgtcgtgcgctatggcgcgcgcaaatgcaatgggcgaaaagtgtgcacgcttatctgttcgaccagacgattgtgctgtgccgaagggacgtgctgaggaggcaccaattggtgtttaaggagagaatggcactgaacggagtcactgtgcaggagctgcacgacggaaaagagccgatcaccggcgcttcccttaggaacgcgttcaaagtgtccagccaggcccgcgactacgtgttcagctgtcccgacgcggccacaaaaggcctttggttggaggcgcttcgcgaaaggccgcggccacaaccgccgacgccggcagaacgacgtttggcaatgctaatgtgaagaagcaaaggaagaaaagcagcaaataaatgaagaccgaaccgaacgaaccaaaaacaacgaaaaccgacggagggatttgaattaatcggagagattaatcgaattcattcgcatttcattttttattttatgcgctttcattcgcctcgcctttcattctttttgagtccattcctgtgaacaaaaacagacatttttatttttgccaataaaatttctttttc

SEQ ID NO: 94032 - DNA, 751 bp, Heterodera glycines
accttaatatttgctgtcacaactcgcaaaatgcgctttccgcccttgcaatcaaatgtcttttattgttatcatcatccatttttacattgggatttgccgaattgaacgatgtttgtggagaaggacgggacaaaggaaatgatggctgtggcacgccagcaggaggtcgacgtttttactacgacacaatcacaaaacggtgtcaaccatttgcatacgaaggctgtggcgggaatggcaaccgatttgattcattggcacaatgcaggcagaaatgtgccaactttgagtcggcggcacaaggcagttcaacaggcgatgaaggacaacatcattcaatggttttgccagtcccaaagtgttctggtggtgttcgcgcagcggtgaacgctgatgcacgagtgattgaatgtgccggcactgacaaatgcccggacggctacacatgtgttggcaataaaaactgttgtccagcgtcgaaagaaattgtctgcggtattgaatatgatacgggacgatacgccttccaggggtcgcatacgccgcgttacttctacaagaaagacattgacaattgccttctgttcacttattacggtgcactcggaaatggcaacaatttcgagacatacaatgaatgcatcaaatactgcaagaagacttaataatttatgtagttataaatatttcatgatgtgaagtcaattggcgttgagaaaaaaattatgtcatttcataaaaatgatcc

SEQ ID NO: 94033 - DNA, 478 bp, Heterodera glycines
tgagggtggcctccaaaactgggagtgtacggacgacttgtgcaattttctactcgacaataatcagaccatgagcggagttgacattttggagttgggctgtggcgccgctttgcctaccaatgtggcgctgtcaatgcgcgccgattcaatctgcgtccaggattaccatgctttggtgggcaaatgtctcaccacaaggaatttcgaattacatggccatagaatggacggcggaaaatgcgcttttatgaacggacgatggggcggagaaactctggggaaaagcgggcagaacaagctcggactgataagcgctcgcgaaaccatttacgaccaggcgactgactcggcacgacgcgaagcaatggactcccttttggccgacgagggaaaaattcatttggctgccaaaccgcattattttcggcgttcggacgaagtgtgtagagattcgtttgaattcgtccgctcgcga

SEQ ID NO: 94034 - DNA, 546 bp, Heterodera glycines
gtctttggaggaagcgcaccgccaggacagagaacgcattcgctcctatgatgcaaagagaagtgacaaaagtggcggaagcgcagggacagacgggcgaaaggcagacacttttcataacggcagtgtccatgctgcgtgactcggaatgttacgacccaacggtttttgctgcggggacttcgcctgccaaaaagcaccaaacgccctcactcgcccaaattcagcagaaattcagttatttggtgaacaccaccaaaaatagacatgcaatggaggcacacactcttggcgaaaaccataagtccgaatggaacagagcactgcgaaaaattgcgcgtgaaaatgaacggcagcaaatgttgaaaggggtggcaaacggaaaacagcgactcgtccaacttccgttggaatgctgcactgaatcggtggtccccgttgttaaattggtcgatattcctctcatttcatttcaaaatgattaacaacaaagcctataaaatgccaaaatgcaattcagattgtctatatgtgaaaataaatttg

SEQ ID NO: 94035 - DNA, 799 bp, Heterodera glycines
gtccctaattgcaattgccaaaaacaacagaaacaaagggaacgcttcacagagtgggccaactgagagaaaggccttcgggggaaggggtcgggactgagttggcccgggggggaggcggcgaattggccgatttgctgagagaacatccaacagaccgggaacagttggttttggcgtggcgtttgcccccggggagtgaccctttggcaaccgaacttttggaaagcgttgctctgattgtatttacgaacagcgaaaagtacgaagggcggaaaatttggcagaaaggcacagcgaaaaagcggacgaagcgttgggtttcctcacaacggacgaattcggcgtcaaaagcaaacgacgacgacgacgcaacggacaattcgagcaaacggcgaaggcaccgaacacaccgcaaaatggcggaaagcgaacagcgccagcagtgccggaggacggcactgtacgtggacttcagggagctgaactgggacgattggatcatagcgccaaccggctacgaagcctaccaatgccgtggccgttgtgcccatccattgccggccaaactgaacactaccaaccatgccatcgtccagtcgctcatccactcaattgacccccactccgtgtcggccccgagttgcgtgcccgttcagatgagtgccatttccatcctttacaaggacattaacaatgtgattgtcgtgaagacttatgcggatatgcgcgtggattcttgcggatgccattgaatggccaacacggcgcgccgcttcgtttacctctgtcaaattcg

SEQ ID NO: 94036 - DNA, 704 bp, Heterodera glycines
gccgatcaaaccgacgtttttggggttgcttcgtcaagcattggaaagccaatcagagttgaacttgggacagggagcagaaaaacaattatttccggcaatttactaacgacagacccggagagcggctcaatagttttggtagagaagcgtcagcaaaataaaacatcggatcaggggaagtgcagccaacgattcattctgattcccggcagttctgttcactctgccaaattggatggacaattggaggaagggacgaagagtaatgccgaactgcgcgagaaggcggacggaattgagtcgggggacgaagcgacaatcgaaagccatggaaaaagaaccctgtccgaaactgtgagaatctttgacgaattcgcactttcgaggcgcctttgtctgattgatgcactaaacaaatatggcatcaaattcagcgaaaagccacatgttttagtacaaaatattgacaatggacagactgagggacaaatgccatcgacggtaatttctctgcagagcggcggcatcaaaatctatccgccgtacggaaagaatgatataatcggcggtggttcaattgtagtcaaagaattgttgcacaaactctccacagaaaatgtttttgatgagtgaatcagccgaaagacaaaaaaaacaaatcaaattctaacattgttctgcgttaatttttcaatatcact

SEQ ID NO: 94037 - DNA, 504 bp, Heterodera glycines
gcgcttcagccgcactcacactgtctcgaagaaacctgctggccccgctgagcgtcgttctcctcccggcggagccagccgcgctcgcactgtctcgaagacatctgccagccccgctgagcgtcgttctcctcccggcggagccagccgcgctcgcactgtctcggagaaatccgccagccccgctgagcgtcgttctcctcccggcggagccagccgcgctcgcactgtctcgaagaaatctgctggccccgccgcacgtcgttcttctcccggcgataccagccgcgctcgcactgtctcgaagacatctgccgtcaccgccgaaagcagtacttctcgcttctcgctgcctcagttatttggaaagaaaaagaaaagcggcaagggaaaaccgaaaccgcaatagaaagtggacgggtcaaaagatggaagcaaaaagaacaaattggaaaaaatttgatggaaaattgtttttttagcttatatacacaataaagactt

SEQ ID NO: 94038 - DNA, 428 bp, Heterodera glycines
gacactacaagatggtgcagcgtttggtttaccgacgacgtctgtcgtacaacaccaaaagtaaccggaggagagttgtaagaactcctggtggtcgtcttgtataccagtacctgaagaaacctggcaagatccccagatgtggacagtgcaaggacacactccgtggcatccagcctgccaggcccatggagcgttcccgtatgcccaagcgattgaagactgttaggcgtgcttatggtggagttctctgccataagtgtgtgaaagagaggatcgttcgagctttcctaattgaagaacagaagatagttgtcaaggttctgaaggcacagaaggcagcagtcaaaactaaagcacccaagaagtaacctgttaattttcgtaatataaaaaatttaaaaacgaaagaaaaaaaaagaaaaaaa

SEQ ID NO: 94039 - DNA, 717 bp, Heterodera glycines
gagctttaggggacgcaaatggagaaggagatgatgaacgagggcgtgatggaagaagaggcgagggaggggaggagtcggcgacggaaattcggccttgttcttccatcggatttcaaaacaacagcatcatcagcagacttcgtcaaagtgcacgacgaaaagtgccaccgcagaacacccaaattcagtccgactttcccaccgacgatggcgaggcgcaggaaactccgacagaaactctctgtggagtgaatgtcagaacacttttggtcccaaacacaaacagaccaccggacaatataagcattgtttcttctgacctaagcgaattcgaaagtttgggtgctcttggcttctcattgggcagttggcggaaaagcagcagcagaagttaccagcgaaaggccatcaccagctcggctttggctgtcgctgcagctgccacggcttcggctgaaattgacaaagtcggcgcggcacatcgcccggtggggaacagttcgtcattgggcactctcacagcctcttctccaacggttctccagtcttcgccaaaattgggcttttccaatcttttgccgcgtcgcccttcgacttcgcccgaggcgaagaaagataaaagcgcaatcgaaaaagccatcggcgacactttcgatgaatccaaagacagtttaatgagtcggacggaggacgaaacggcggcggaacaaaggc

SEQ ID NO: 94040 - DNA, 504 bp, Heterodera glycines
agccgttcttgcggagtcggccccaacactttccgtccatcgaacgttcggttgaatggtgtgtgaagagcaaaacgacgtccaatttgagagcagcgaaagtgtcgatgccctgccgactgaaaaaagtgaaagacaactcaaatggcgaggtttttcaatggcgtaccaatttggcacggaccgagccccactggcaagggtggttcagcggactgtccaaactctttttgcaatgtgagccggtcaaagtactgattttggcgaatgtcgacagattggacaaggaattgatgacgggacaaatgcgtggccaatttcaactcgaagttctgcccaaagttgggcatgccgtccacgaagactctcccgaattagtggcaaaaattttcgttacgctggtgaagcgttacaatgtcatatttcaaaaatatttgtaagcgaaggatttcctatttgtgcaacaaattcttttgtactttttttcactgaataataaattat

SEQ ID NO: 94041 - DNA, 807 bp, Heterodera glycines
gccctataaagcatctttatatgacaatggattatccttcatcgcactgattgtggggaagaaattaatccgttgcttatacgaaaacatactaaactgatcagaacgtgtctggacgttttgccgagtgattatgcagttttccacagcacaaagcccacaattctcttcttcatgctctctgggatggacgtgcttggcaaattggacgcgtccattgaccggccgcgacaaatcgaaatggccgattgggtctacgcacttcaattaccacggggcaatggatgtctttcgccctcccgtcgttgcggtggcttccgcggctgcgtcctttccgtcccttccgccggcctttgtccctacgagtcggcccatctcgcccaaacgtacacctccctctgcattctgctcattctcggcgatgacttttcccgtttggatcgtcgcgccattctccgcgcagtcgccgattcgcaaggggcggatggaagcttttttgacggcgatcgaagcaatgaaaacgatatgcgctttctatattgtgcctgtgctatttgttaccttctcgacgatttctcgccaattaacattccctctctgttggactttgtccgtcgttccgtcagttacgacggtggcattgcccaagggccgtccctcgaaagccatggcgggtccactttctgtgccgtctccgccctgttgctgaccggccacctttgggacggctccgtgttggacagtgccaaaatggaacggctgataaagtgggcactgatgaagcaggaggagggcttccacggccga

SEQ ID NO: 94042 - DNA, 695 bp, Heterodera glycines
gtcctagacgaattcggcacgagggtccatttaaggactatggtcctatataggagacaataaagcgttctttttctgcgacggccaatggcataattggcggtgtttctccgcgttccgttctcggttcaccggcttcgtcgaagggttctttgggtggatggatacacccgcccgcttgtcttatcaatgcccgggttgaatatgtcgtcaaaatgcttggtcaaacggaagtgccggcgccgagagggaccaaaatcgttgaggatgccattcacgccatccgctttcacttacaaatcgaacgggggaaaacgggacattcaggcgcaaaacaaaggatggttgttctgcaaatcagcgttaattgtgtgaacgttctcgacgcgaaaagccgggcgatcatcgtcaagcaccatctcagtcgaatttcattctgtgccgatgaccgacaggacaaacggttgttctcgtacatcgccaagaacgagcaagggaagtaccaatgctttgtgtttttgagcgacaaaatggccgaaaatatcacattgactgttggagaagcgttcgacttggcctatgagaaacaagtcaaaaaacgggggaaagaattggcgaaccaaaagcacgaacttcttttacggaagaaaattgctgaactggaggaggaaaatcggcagctgaaacaccgtctc

SEQ ID NO: 94043 - DNA, 126 bp, Heterodera glycines
ctcgattaataatggacataagctcatcaaaaaaaacagtttaacctttgacggaatcctgttttatttatgttttcgttgtttttgatgacattctttgcgacaaaaaaaaaaaaaaaaaaaaaa

SEQ ID NO: 94044 - DNA, 441 bp, Heterodera glycines
atcctaagagtgcccatttgggccgactgagaacgtttggcgccttgctgggcgacgaggtgcaggaccaaaatctgatgttggaccgcattcaaaagaagacggagcgcaacgacggcgtcatccgctcgcaggaggaccaaatgcggaagttgctcggctaatggatgaccaattaacacgcctaattaatgaacgaatgagtaatgtgatggtgttgatctatggcactgtgccgactgaccaatttaagacgaaatttgacttttgacgaccccccaaattaattggtattattgataatgatgattgatgatggatgattaattgtttcgttgattgtcccaatttctctctcttttttctaccgctgccaccgctcactgacctttgtatttaatcggttaaatgaataaacgatagaaaatcaaaaacaggaaa

SEQ ID NO: 94045 - DNA, 142 bp, Heterodera glycines
attgctgagaacccagcgcctttcgaacgaccacatctgatagattctctatcaaattctgcgcgggcttaaggacattcgttccgcaaatgagatgcatcgcgacctgaagccgagcaagctgttgctgaacacaacttgc

SEQ ID NO: 94046 - DNA, 476 bp, Heterodera glycines
accctagagattagtcgtgacgagttggagcacgacttgcactctgccgggtttgccgtcatttcgtgtccgctgaagccggacagtaagcaagtgattgccgaaattgcggacgcgtcgcaccgggttgtgatgatcaccggtgacaatgtgctgactgccatccacgtggcggtcgttcttcggttcatccgtcgcagtcgaatcgcactgattttggacgacacgcggccaattgttactaatggtgaacaacaacatcagcaacagtcggcctccactgaactgcttcaatccgacgacgaagacgagcgcaacgacaaccgccgatggatttggcggtcgtcccaggacgcgggcaaatccgtcgctttgtccacggaggcgcttattggcagccatctgcgacatgggcaccacaaattcgagctgtgcatcaccggagcagcctttgaacacttgatggactcgctgaa

SEQ ID NO: 94047 - DNA, 406 bp, Heterodera glycines
tgcgtggaagaagaccgaattcgcgatcacttcacgtggtgtgcgtagagagtagccgtctggctcagcagacgggatgaaagttttcgacacgattgccaatcacttcgtgttgtctccatgtattattgcggtctcttccccgaataaccatgcgatgacaatgggtggaggaagcgattggctggcaatttgatgatcagtggaatcaaattgaaattcaaatcgatagtcagagtgaaatcggggatgggcttctcaacgaaactaccgacccaagtgatcagcaggaatgaatgagtgatttgctgagaaatgatcggttatggaactgggaattgacgtgaaatgttgaactttgttgaaaattgaattttcaaaaaaaaaaaaaaaaaaaaaaaaaaaa

SEQ ID NO: 94048 - DNA, 571 bp, Heterodera glycines
tgaacacctctccgggattgcggtcaccggtacgcgctactcactccagtgcaatggggtgcaccgggtccgggcgaccgaccacacccagactttcccccgcatggagggcaacggaccctccactgctgatttgtcccccattctccccaatcaaactcttgtgcagtagacaccgactcccgtgcccgattcgacggctaatggcggcccgctgttggactatgtccacggcgtgtacaccgactgcggggacggacctctcacctctccctgtgaattggccgttccctatcacacctgcgacgcagacatggatcaggccgtgatgtacaaccctgatggcgactttctcaacgtgccccattacagtattattcacatccacactgcaatggacgtaattagcgtgggaccgcagaaaatcgacaacatctctcagggcgtccccctctccgacgacgcttccatgccgagccatcggtaccatctcgaagttatgacgaacattttcaacttcctgaatttggccccaccggtgacaacggaattggtcatgcctataggtttc

SEQ ID NO: 94049 - DNA, 483 bp, Heterodera glycines
aaccaatgaccgactatgaccagttgaccaccgtctacgcgggcgacaaacacctgattgagctgaaagtgaaggcgaacacgcgcattggttggcaatacctcaccgaggaggaggacatcggttttgcggtgtacttcgacccctcgggcaatgccaacaatctgacggagatggactgcgtttttccttacattcgattggaatgttcccaagtgcccatttcgggttccctcctttgtgagcagtcgggccgatacataatcgaattcgacaactattactcgtggttctctgctaaacaattgcggtataacatcgaaatcgatgacaggggaatcggacaatgaaaaagcggacgaataagcgacagaagttgacagtgagaagcatagtaacacaaagaacaccataataataacaaggacgacgattatcaaattccagccaaatatttcattcgaataaattttatttataaaa

SEQ ID NO: 94050 - DNA, 717 bp, Heterodera glycines
tcgttaaatgtcttttgtccctccttccgacggagacggcctctttacgagatgcccgcttttttagcggccgaagggaccttaacaaaaattgaaaaaatagtttaatttcaatatcaaaatataaaattatttgttcgtgaaactaaaaatcgcacattttcagcgacttttttggcgttctgtccgattgccgtgggcaggcgacttgcgctcgaagaccgactttcggcaggtccaattcggcctctcgactaacaatttaatctcatttacaaaatcattaattgtccccacccaatccctttctgcgctttgtctttcgtccatttgtccctttgtcgacactttgtcctgacactttggtaacactcctccaaaactgtcctgcattatttattattcgggactattctttttcatttacactttttgcctttgttggcgattcgctgccgcgcctccgactgagcggacgacgggtcgaagaagtggcgacggaaaatcataaaatcagtgagagacaattaattaacaattaattaacgaaagggggcggggacagaccgctcgcatttggctggggaagccgagagagagcggtcaaattgagtacggaaggcggcgcggcggacggaggcctttgcctttggggagggcgaagcgaatcagaagacggcccgatcaaaagcagcataattaattaatgcaatttgt

SEQ ID NO: 94051 - DNA, 466 bp, Heterodera glycines
  unsure (1)..(466): unsure at all n locations
gacccttaaagcaccggctgagcaattaagagaggcaacagacgcttatatggctcggtggccaaagctgtggaggccaaatatcaccagcgtgaggagcagaaggtcaagcagtaccaggaagaacgagaggaatgggagcgaaggatggcggagacgagacgcaaatttgagacggaacgccacaattttgagcaaaaaatgcgcatgaaaagggaacaacagacggaggaattggcacaaatggaacaacaaatggacgaacagagtcaaaaacattgccgagagcgagaacaacaacagcaacgataattaataaaataatggcaaatttgatacttacaaaacaaatacaactaattaaataatggctaattggttgatggaataatttttacaatattattcatctattttaataaaataaataaaactatttttttgcnnnaaaaaaaaaaaaaaaaaa

SEQ ID NO: 94052 - DNA, 788 bp, Heterodera glycines
ccccctttgagtttgatcaattcggctaatccacccatcttcgcctcctccaccgttttcttttccgcttccaatccgtccgcttccgtcttctctccgtcgttgttccgactgttcaacgcctactctcttctcgtgatgaccatggacgtgctgccctcctgctccgcgccccacgacacgaacttcatgagccaattaatcgagaagttggccgccgcttccattctctccagcgccggttcgctgtgctcctccacatccgcttcctcctcctccgttccttcctcttccactcatcccccgtcgcccccaccgtcgggcgcggcacgaaatttcaatcagcttagcggcgcccgctcaaagcgattcgactcggctgctgccgttcccggcgagttccactcggtgcagaatgcaatcgccgtcgctgtgctggtgcggctccaccagtggtgctgccggctgttctggctcaccattgtgtgcctgatgagctattacagtgatcagcagcaaaatcagaggatgagcagtggcggaaacgccgaaaatggggacaaatccgcggatgacggaggggcggcagagcgacagcggaggacattccgcgaagtgcgcaaaagcattgtgcaagcgacgcaacggcacggctccaaaaaggtcaccgacttggaaatgcagctgctccgccacttgacctgcccgcagacggccgttctgcgcccgctgcgtcctttccaccacaaaaagcggcacttcctctcccggcccccgtcgccccaact

SEQ ID NO: 94053 - DNA, 517 bp, Heterodera glycines
gtcaatgtgtgttctatgacggttccttccctttgctgctgcaccaccttcgtctgctgtcgtccgatgcgattgtgtcaaattcggacgaagcgtcgacaagtgacaaacagcaaaaggaaagcaaaaacggaggaacaccgacgtacgtggtcaaaatgttcagggacgaaattactatcaatttttattccgtccaacacattgtgatcgttgaatggatgtcaaaccccgtgaatgatttatttgccgatgcgacactttcggccattcttcacgcccaaaccaaccctatcctcgataaaaatgttccgaaggatttcggtgcgaaagcacagcaaattgagcaaaatttggaatcgattttggttgggacactgtgcgaattatgcggtgacaaaagttttgtggaagtgaaagaggaggaaaaccaaggggaaaaggacgcagcagcggaggaaagcgacaaaaaagaggggaagagacggagagtgattcaattggagttggacgggaa

SEQ ID NO: 94054 - DNA, 730 bp, Heterodera glycines
catcctatttctgttcaatgtcttcgtttttcatgcatcaccacctgaagcggtcgcaccaacaagcggccgccgtcactttggcggacattcgctggatggaaccgatggccgcgactgaaagtgccgctacttcaacaccggcaaagcggctgttggcacgactcggcacaaccagagtgggccgctacgttcaacagttggccatcgattacgcagcttccttccgcgacatcgtcgttggaatgcgtcagcgaccgctgcgagtgcgtttaaatatgtttccgactgtcagggtcacggacatgcaattcattcgatcctctaatggccgtcgcttgcggcgccgccttggcttcgcttgtgttcactttaaaatccaatccggacgaaattgcgctgcgcgcgcgtttggctcagttgcgtcagcaaatggtgctcatcccggcgtccattcacagcactcgtgccggtgaatacatttgactgggggacaaaacgattattctggaaggggctcggcagttcacgaacggctcgagcagtacaccgtcctgttgaatgggaatcggcttgaactcgtcgactttttgctcttctctgtgctcgttgagcgtccgtttgacaaaaagaatgacttttacgctgcccacgacaaaacattgcgtggatggccgtggacggagctgtggcggaacgcgtgggacatcggcgcgttcggccgtttctg

SEQ ID NO: 94055 - DNA, 291 bp, Heterodera glycines
caccatgatactaacaaataagcttggatttatctgcaaatcatccatgaaattaaaaatgcaattctttgttggctccaagctcccattggcctttctgctgctgcttttgttgtcttttgtgttttccaatgccaaaaaccaaaaggccgttcatagtgccggcggcacttgtaaaaggggaagaattcactgcaacggaaagtgccacaaaaaatgcacgaaaaattcgcagtgttttcacaagttgcgctgcaaaccgtgccgaggcaccaaagggcgccacgcgtg

SEQ ID NO: 94056 - DNA, 433 bp, Heterodera glycines
gtcagccatgagatttcttacacaacaaaaagcgatagacatctacggggagctgttcggctcgcgacgcttcagccagcaccaactgatggaattggcagggatggcctgtgcgcaaacaatctgcgaaacgatcgacccggggaacgttctcattaagtcgcggtctgggaatactcgcctgtatggactcggttgtgcgcgacgcttccagcatgttggattttcgcctacgattctctggcctgaaccatcactcgatgatctgatgcaacgatagatgcttcaagtggaacgccacggcattccctgcaaccaatcattccatgaccccagttctattgagaagttcaccttcctcgttgacgcactcgtcggagttaggtttcgtccctcaacccggggagcaggcgagaccattttcaagcagatg

SEQ ID NO: 94057 - DNA, 743 bp, Heterodera glycines
cacgttcttaaagacccaacctattatcccgacgggataaaaacttctctgaagtgcgatggttcccgtcaaatccgccaaggaatatgaccgtcaacttgacgtagcagtgcttttttccgaatgtttgactagggctatcaaaatgggctacatcaccaaggaacaaattgatgattgtgacccgaacgtgatcatttctttgccaaggcttgccattgtttggggcctccttttttatcctggcggtgcccttaatgttaatgtgcccaaagaagacatatctgaaatgtttcggcatttccacaaagtgctcattcttgtccgtaaccttcttcaaactctcgaacccagtgaactttccaaactcgagcaaaaattggttggcgaacacgacggacttggcgaatcttgctcatcagtgcgtgccttggaacaacaaattgagcctttctcgggacgatcgttgaatcgtcatgagcagcagaaactcattgaaaaatatgaatatgggccgaatgatttttctgactctatttctcttatgagaaattctcaccgcaacgcacctttaatttcaattccatgcactgattatgaaacagacagaaaggaaaattcaattgatcgctttgcatatggaacttctgaaaatctgatccatcgtctgtttgtttgcattgcaagcattgctgatcaattgcagtcaaattattccgctgatatacgaaaagtgctcaaaa

SEQ ID NO: 94058 - DNA, 458 bp, Heterodera glycines
  unsure (1)..(458): unsure at all n locations
gtccattaagatagcgacgatttgcgcctttatttttccattcccctagaagatggccaactgttcccattcgtttcattgtgtgactctgatgacaaaattgagacaaactttgggcccaatttcatggccatcattccgaagacgttcaaaattgtgccaacaaatcatgaaattgttttccgcactccgtcgatgaacaaaagtccgtcttcaaatcctgaaaatgttttacgcactccgacgaccagcagcattatttcgccgataattcttgcttcatttgtcatgcttatgtgttggctttttctaatttttattttttttagaattgtaatgtaattttgcacacttttcttctaccattctcgattctccattttatgtaatattacggcatttttttttgttaaataataaagtgatcgatcgaccnnnaaaaaaaaaaaaaaaaaaaa

SEQ ID NO: 94059 - DNA, 801 bp, Heterodera glycines
ttccctaacatctttctccgtctgtccgttgtccattcccacccaccttcaaagcctccccccgaaaaaagtccatttgtcccatttctctttctttcccacaaaatgcttttttccatcatttccttcatcattttcttttattcggtttcctctgatcagcaacaaaatgtgtcaccgttgcgcaatgtacgggcacattacgacgccaaaatggacacaattttggtggattgggaatggagtgaaattggacggaaggaaattgaggattacaaattgtttgtccactacaaagtgtcgaatcagcacagacacagagggctcaatgaatggcatcgcgtgtcatccgaagacgactctctcggggcaaagattccgttgggccaagcgttgaacaatggcgacgaaatcactgttcaggtatttgctgaacccattgaacggggctttgcaactgaacagagcgatccgctggtaatttggatagcgagaaagtcgcaggacaaaggcaatgaaagcggagaaaattcggagaatggcgcgatttccatggctgatgagcttcttccgccgtacaatttcaccgccaacattctcagtcccggcaaagtgcgtctcgagtggagaacgcctccgctgccctcgccttcgtccgtccctttttacattgtgaatgtccgtcagctaagggccaatacaggggatcgcttccctccccaaacacttcgcgtcgatggcactcattttttgctcggcaatttggtcgctggagaaaactttgaggtcacaattcggaac

SEQ ID NO: 94060 - DNA, 661 bp, Heterodera glycines
ccccttaagtgatgataatcattcgctgtttttcaattgtttcttcaagtggttcgtttgctagttgttttcaatgctcgaccatttccagcaggcgtttcttctgccaccaaaggcgggcaaaggtttcgactccgtgtccccctccccccgatccttcggcggaatttcgtgttgttccaacttcgtcagttataccgcccatctcgggcacggaaaatccgtcgcttggcagaggcgaggcgcggcggatttcatcgctgatcaccgacaatttccgtgccgacgtcgtcgctcgtcgctaccgtttggaccgccttcggccgtccgattggctgctcgtctacaattaccgggtcggctcatggcttttcacggtcggccgttatgcgtttgcccttctctgcgtgatatttttaattgccgtcgatgatttcgtgcgcgtgggcggcggcaaattcacactccaaaagctcagagtgacacacaacgaactgattaggcttggcatcgttggcaaattcttttgtgccattgctttgctcatttttttcctgctgctgcgcgtccggtcgctgtttttgctccgaatgtatgtgcacagaaaggagccgaaccgaatttgtgcgaccattgcgaagggagtgttctccaaaaaatt

SEQ ID NO: 94061 - DNA, 754 bp, Heterodera glycines
ggcggcgacaaccgcttggatttcgattggttcgcctaatgacctcaacgaagagcacttccctgatgaatatgagccccccgatgtgccgaattatggcgcgaaagtcaaagtgtgctatgcccgagtctgacttgctgacaaggaaatcagtcgcgcaagacgactacgactaactcccagcgctcaggacaccagactctttccagactacgaagtgcccggagtgatccacgacctaggccccgaagcacctcccggagagtacgactcccaagtcgcccacttagtcattgaatgggcctctgattagatgtgccaacatggctatgctgactatggggcagtgccccatttgccacttcttgccgagattcccgacactttggcaatgcatgtcgcgacgagtcttcccgccagcgcttcttgggcactctcagctagtgtgcatgcccaacctgtcgttgaggacatcaccagcacttgaggatgctgctccattttcactgctgccgctggtggacttggactttggatcctgacgttggcctaagcttttcttaccgcgggactggataacacaatcaaactgattgttgctgcctctatcgatgagagactttgcctcactgaacatcatgtaccagactttctagtgcattgtgacgattcggagtctttcgaatatatcttcctgcgaaccttggctcgtcttaccaatggccttcacattgtgttcgatttcgtcacttcc

SEQ ID NO: 94062 - DNA, 798 bp, Heterodera glycines
ggactttaaacatctgcagatgaattatgctgcctttcccttaggctgtggataactaccgtccccaagtggcattcgtttgtcatggtgaaagttcgaccggagtcgtccatcccttggagcgttttggcgatatttgcaatgcatagtaagtaatttcatgtcaaactatcaaatctctaaaaccatttacgtgtatccacactttccaatctgtcccccttagtgacgttcttttcctcgtggacaccgtcgcctccatttgtggtgcccctttccatgccgatgcgctgaaagtttctcccttttttcgaattttcttgcatttttatatttgaaaggttgattgtgtgtatgccgcaactcaaaaagtgttaaactgcccgcccgggttggctcccatttcattcagcgaaaaagcactgtaaaaattagtcatattaaggaaaaaaagtttaattcagggagaaaataacgaagcggaaaacgcgagtgccctcattttatttcgacgcgttagagttgggcaattattggggctgtttcgacgagccgaggaggttgcaatttttattgcaaaatgcaaacaaaaaacggaaaatttgaggacgtttaataaaccattcaatttatagataccatcacacggcgcccatttcgttggtttatgcgctacgcgaaggtctttcagcagttgcccaggaaggaattgggcacatggtaaaccgacacaaaatcaatgcaaaacttttgtatgacgcttttgaccaattgggactggaattgtttgtccaaaaa

SEQ ID NO: 94063 - DNA, 322 bp, Heterodera glycines
ttgcagtcatgagtttctgttcatttgtgatcctttcatggtcaatggtcagtcggccgtcgatttatttacttcagtgatgggtcggtccatcagccttttattgaaaacgttggaagaaaaaattgctgccaatttcgatgcgatttcgctttttctgtgcatttgtttctgcgcgaaatttcgcgaaatgatggccgaccgtgccgttgtggtcatcaatggttattgagatgctttggtcggtttcttatgggctcgggtggatgccgtgatgactggccacagtgacagcgtaagggcgattgatgtgcgcaaagtg

SEQ ID NO: 94064 - DNA, 628 bp, Heterodera glycines
  unsure (1)..(628): unsure at all n locations
cttggccagcccaattcaggcgattagcgtgtcgctctgcggcgagttgggatggatgctctacatcccgaacgaactcgatttaaacgcctatcaacacctggtggacttgggggtctagtaccgtctccagcattgtggctgttacgctcttccacacttgctactcgagacattctccgtatattgtggaccaaacatttacaccatgactacgcctgtcaaatgccgccggctattctgggcggacttttcatgacaatttatcagccacgacgcgctgaccaggcaattggaactcgggggcagctcacggtttgtccaactgccggtggaacgctctgacttggacaggcacccttggccgcaccgtgacgagcccctctaccgagatgggacattgttcaggtggaccaccacggccgcgtacagattctcactgtaatgtgctgcttgcttgacgctacgtgctttaacgagactactccgtgtcacctccgattactctcctgcngctgctcgtgcgacattgcagctggccgtgacgcgattcccgggccagatctgtttgcactcaccctcattgccagtgatctcttccgatcatccactgccctacctaccgact

SEQ ID NO: 94065 - DNA, 272 bp, Heterodera glycines
  unsure (1)..(272): unsure at all n locations
gttccatgtgtaataattttcaacgcattggcttttcgattcgcggccttaatgaatcggcgaagaaacgaataaacaccccattgatggggtcacttaccgccggccgntcaactttggacattctccggctttgtcagccggacatccanggtggtgagcgggggccntttcggatggttgcggggtggctaaacgtgggacagtttttattcgacgggcaacttccgggagttgtttggggcctaaggcacgaacattccgccgccgct

SEQ ID NO: 94066 - DNA, 709 bp, Heterodera glycines
atgccataaaagagttaattaataataattattccgcaaattttaaccacacctattaaatcgttcatttcaaatgaattctgcgggcggcgatgaaaggaaaaatgacaagatgaaaggcgaaaaagcggaagggaaagacggaaaagggacggcgagagagcatgtggaagaggcgaagacaggcgagaaagatgacgaggaagacgacgatgtggtcgtaattggcgaatgggagggagggagagaaagagatactctctccaccgccagcgatcgttccccggccgtccctcataaggcgctttatccatcgcttccgtccgattcgtccgcttcccaaatggaccctcctccgcagtatggtcatcctcaagctcagcaacaacagcagcagcagtccacgtggttctctcctgcttcctttctcggctcttccaccaattcgcctccctccgccgccaatggcaccgatcaatcggtgccgtccgcctcggccagtgcccagcgattgctgaccgaactccgtcagagatatcagccgtggtccgtgttcttcaagtgcgccaagttcggttttcctcccggcgtggcagcgattggaccgcgcgtcaaacgcaatttggcgacatttaccaccaattacctgtgtcttttcgcccttctccttctttactgcgtgctcacttctctgctgatgctgctcagt

SEQ ID NO: 94067 - DNA, 281 bp, Heterodera glycines
  unsure (1)..(281): unsure at all n locations
actccttgaaatcattatcagtgccaaatattaaggcaagaaaaacctaagatgagatggaggattcataaaactgtcgaatgtttgtaaacatcggactgatgatgcctaaatgaaattgtttggtggtcgccaatcggtccttggaatgttggaatgccgcatagaaaagcagggagaaatgggaacgaaacgaatgttgaaaagcacaggctcttttgtttgttcattttaacaaattttccacttcaccnaaaaaaaaaaaaaaaaaaaaaaaaaaa

SEQ ID NO: 94068 - DNA, 779 bp, Heterodera glycines
atcatagagggcacgctcatgatccctgcctgctctgcgcacctgatagtggaccctctagattgactgcctgaccggacaccatcatggctcacgctgcttcgtccctcgtctccgcgtccgcaaagtatgcccgccggctcctgcacattgtcctctacggcacggccatgggcgccattgccctcaccagcaatgtggtccaagtcgtcaccttgctgctgtacccgttctcccgctcgtcggtggcccgcatcaacgcaaagatctgtgaggtgatttggcgtacaattgattttgccatggagcgtcacaataaggcccaaatcactttctctggcgacatcaactcgattcccgtcaacgagcagcccgtgctgctgtcgcaaaacccgcaactcaacgccatcgagtcggccattgtcatcagcaaccactgtgctgcgatggactgggcgctcatcaacgccgtggccatgcgccgcggcatgttggcgcactgcaaatactttgtgaaggcgagcatgcaatgggtcccgttctttgggcccggcatgcgcctcgcaggcttcccttatctgtcacgcaactgggccgccgacaacaagaaaatcgaagccgtattccacgggctcaaatccgacaaacttccctgctggctcatctccgtcctcgaaaggactcgcagtcagcccagaaaacttgccgaagcgaaagctgtctctcgcttcaaaaaactgcccagggtcaacaattgcatgaacccccgcaagaaggct

SEQ ID NO: 94069 - DNA, 729 bp, Heterodera glycines
cgtcccttatgcgaacaccaacaattgctggacaaactgaagagggacctagcggaactcgaggcagaagcaggcggcgaagtgcaaaaggaaacggcggcgacaaaatcgggcactgtttcacccgaaaagaatgccgaaatggatgtccaagatgcactacgacgtaaaactcgaaaacgtgcagccaccgcttcatcgtccgtttcgtctgcgtcttcaccaactcgttctccaaagaggtccaatgccatggacacgtgcgaccgaatggaagcttcctcctcccatcggacagatgagtcccctccagccattaacctaaacgagtccaactcgctttcgcaccgccatttggctgaagaggccaatgcttcggttgcaggcgattcagcgacagagtccacaacaacagcagcggcggcacttttggtcaaaaagggacggaggagagagttggacggactgctgaagatggactttggcaaacactcgcccttccagacttcggacccggacaaatacgcgcaggaagtgctcatcgaggcgcgtcagcagcagcgcactttggcattggcacaagaggagcaacggaatgcgcgtcggagcgtggagagttcctgcggcggttcagcgacggggaaaagcagcaagcgcgacaaatacgcaaaaaagcctttttcgccgcccgtctcgccactgcccgagtcacgtgccgcttcagtacgg

SEQ ID NO: 94070 - DNA, 487 bp, Heterodera glycines
gtcccattaagattgtcctcagtttgtctttttcatccttttgacctctttttgtcatttccgatgtctcttaatccatcggctgaccctttggctggcatttatcagaaagaactcactgaatacgacttgaatcgattgccgcatactctgaaaaagggggaggatgatcagttgctgaagcggtccgatttgattgatacgctcaacacggaattttcatgtccaatttgcttggatttgctgaaaaacactatggtcacggaatgtcttcaccgtttctgttccgaatgcatcaaaaaatgcatttacaagggaaatagggaatgtccgacttgtcgaaagaaaatcatttccaaacgcaatctccgagccgacccaaacatggacaaattgatcgacaaaatttggcctgatcgtgagcagtacgaagcgttgcaacgcgagaaggcgcaaaaatggagcaaacatttcgatgttgtcgcat

SEQ ID NO: 94071 - DNA, 728 bp, Heterodera glycines
gttcctggcgacaaaacgccgttcgctgtccgcggcgacatcttccagccgattggaggacggaaaactcagtacgagtggatcgatgcaaagcattggagaagaagaagcggaaaaggaaagcgatcatcagaggacggaggaagcgaacaacgaaaatggcaaaaacaacggggggacaaaggccgaaccgatacgaaggcacaacacactgagcaaaacattagctgtcgtcttggagagggacggcaaattgtcagtggcacattgagtgaaagcgatgttagcactgacaactgagtcccctcccctcccccgtcgccatcgctttaatttaagtttagtcattttccgatgcctttttaaagagtgaatttgtcaattgtttgttgtttcgccatcatatctctgttttgtttgtttgttttgtgcttttcctccgatcacttttctcttccccaatcgaatgaatgctcaaatccgtccccccctccctatttcctaatcattcgtcgtcacttcgttaggtttttctcccccccccccaaatccgtcgccccttttccctccgtccgttttccgtgcgtttgccttctcatcagtcaatcattcgctttactcaatcattcaatcattgatcaaatttctcatttctgtttaaccgataactttttgtgcaaaatgaattattttgaatgctgcaataaaaaagaataaattaaaaattt

SEQ ID NO: 94072 - DNA, 289 bp, Heterodera glycines
ttttcgatctctggtgctttaccgtcacttctttgatatagacgaagatcacgtttttgcccgcttgctgcacagtgctatgcctgcgcagacgggcaatttcatctcccaatttgtgcggccgtacctctaattgaggggaccattttggtggactgtttgcctcgtgttttcgattgcgactgatggctatctggcactattcttgcatacatacagctccgacgatgtgcttatcgactacttcagctatgtcactgttgccactttcctcgagtacggttacctg

SEQ ID NO: 94073 - DNA, 662 bp, Heterodera glycines
atcttttatgaacaaaagaagtgaagttttacgattataccgacctataattcgcctttcaaaggattgggtggcccaagaaccgacgaacacaaacgaagaacaaaaatacatcagagaagaggcccaaaaagggttcaaagcgtacaaaaacgagaaggaccctgaaaagattagtgaattgctgaaggaagccgaaaagcgtctggaaatcgcctgtcattaccaaattccctacgaccgtcccttttatttgcctcctcgttcttccttcgatgtcgactcatcttccaagtcggccaaacagcggactcttcaccgctctccgatctcttccaaattccttccgtccgccgcttctcgcggaaactcttccgactgaactcactgaaaatgtcactttccgtgcgtttctttcctccttttttgcttcttcgccgatcaccgtagaaaaacttgacaaatttttgaaacaaatgcaacaattcccgaatttggacgcgttggtcttccgttctccggcgagtgttcgcttcccgccaaagagtgaatggttcagggcacttctgaagcgactgattgccaggatgaatgagttccaatttgatccgagtgatgttctttatgagtcgctttgtgcttcgatggcttccgactcagaa

SEQ ID NO: 94074 - DNA, 485 bp, Heterodera glycines
gtccatttaagaaaagtgataataaacaacaaaaaacatcttatttattttaattgacgtatttttttcttgtcttatcaaatgacaaatcatccgaaaaaaactcagcgaattcagcggaaaataataaacgctttttctctcttttcgtccgccgattccttttggccttccgttttcgcattttcctcccgtgccgaagttggcctcaaatttgcccaactcagcaaacatttcgacgctttgacagacaaacacttgactgtcactgaatgttttttgggcattttgcacattcgacggtcggaaaaaggcgaaggcgcggaaattgtcaaattcgacgaagacgggcaaaaagtgctgcccattccgcagaacgaactgccggaccgcgtcatcggattcagacgcctctcaattggcttcgtcgatcattctgtgcttgcatttctccgtcttattcaccgtctcatcgacaacgaatc

SEQ ID NO: 94075 - DNA, 688 bp, Heterodera glycines
gccccttaagaaggactggaatttgttctacaacgaatatttggggctgagtagcgaggagcggcagctaattcattcgatgggtctttctgaggctgttcttatccgtcacattcactcgcaccaccaacaaaaggacccgagcaaagggatgcgaatttacgttgtgtttatgcttcgtcaaatttggaatcagaagcccttgtgggaggtggcgcgttatttcggcgtcccccggggttggcttcagtccgttttgcagtccgccgtctgtcagtcgagctcaatcgttcgttttgcggagcgaacgcccgacctttgggcgttgcgttcgctgctgccggaaatggtcaggcgtctctgcgaatgctcccgccaggaattgattccgttgcttcgcattgaatgtgtgaaaattggacgcgctcgtcaactttacgagaacggatttcgcactgtcggatcgatatcgaaagcggagccatgccaactgatcaaagcgctggaggggaaactgagttgctggcagtgcagacgaatgatcagcagtgctaaggcaatcatccgcgaccaaatagcagaaaaagcgatggaattggaggaattgggagctgacggactgctcgcttttccacctaccttttcgcttgatcaccaaacggaccaacgacagaattacgagtcggcc

SEQ ID NO: 94076 - DNA, 712 bp, Heterodera glycines
gttcgatctgagttaatttgaaactttgaagtgaacactttgcacccttcaaagttaattgtcaaaataacagtcaaaaagaatgtctgctgctccgacagcgcattatgcttacaatgctggcgacccaaatgttcagggcgcaacatcgtttgacccacagctggcacagaaacaatatgaggcatggcagcagtattatgcacagactggggctggacaacaaccggtgcagaacattcaacaacataccggacaagaggttggtgggacatataaagcctattttgaccagccggtccccggcacggtgccgcccgctgctgcgcctcaaccgctcgccagtgcttatgttggccgtcccgcttcgaatgcgcctgtctttccaccgcctcaaccaccgcaagtgcaacaaatggccgccccagttggtggagcatgggccgccagtggaggccctccccaacagcgcggaccaccagcgccattgaattcgttcatgggcgggccaccgccgtacgggcaacaaacgccgcgcggtgggggctttcaacgcggcgggggcagtcaaagtcgctggagcagcggtgggagtgaacggcaattcagcagaaggtgaaaactgcgcaaaaatttggggaattgagtgataaaaatagaccaaacgagtacaattatatgttggtctatttaatttctctaagttacaaag

SEQ ID NO: 94077 - DNA, 826 bp, Heterodera glycines
cttccgtagattatgccttcccaacaaaaccggtcattctgatgccgtcttcggtgtttggacaaaattcgctcaaattaggcccgggctgcccattctttgaccagtgctttttcacctatcaacgtcgcgcattggcccacgcggacgccgtcctctatcacgttccggacatcaaatggacttcagacgaacgcccggactttccggaacaaatgttgctgccggccaatgtgaggaacgtttttctcacccaagagaatccgagtgcgctaagagattatcaccacgcggaaaagctcagaaagctcccaactttttccattggacattgacttatttgcgttcctccgattttgtgatgccttacggtggcttttggatttctcccgaggaaacacttcgtctcggcttttcgcccgtccgtctgcccactgatcgcactaccattttgaaggacaaaattgtgaggggcgccgtttggtttgtgtccaattgtcgcaccgagtcaaagcgtgaattggcggtggacgcactttccaagcatatgctcataaacattggcggcaaatgtgccaaaactgagcagggcaaaaaactttgtccacgcaatgcgacttcctgtgaccacgtgttttccgcccattactttttcatcgctgccgaaaatgacatttgcaaggattatgtgactgaaaagtattgggaccgttaccgtcttccctccgtgccgattgtaatgagaaaacacatttatgaaggcatcgttcccaacaattcgttcattgccatggaccaattcgactcacccaaagcaatggctgac

SEQ ID NO: 94078 - DNA, 761 bp, Heterodera glycines
gcgcccttcttttcccccgccattttccccgttttgctgtcgttgtcgtctgctttccctcttcaactaattgcatactttttgttggtgccattggggatggcagtaggcaaatttttgtgccgttaattcaacaaacgaatgacaccaaaaatgggactcggtaggggagacaaatggttggcaggcaccacaatgtgcaattggagacaaaggtcgtccacgcgggtcggctttggtggagcggaagatgaagacggaagatgtggagaaatgcccaccactcagtatttgtacccccggggggaatttctcgctcgcccagtgccacgcccacccaaatttgaaaaagccacccccaccccatttacgccgcccatgcaaagcccacccccaaggattttgggcgctctcgtgcatacctctaatacagagatatttatttgcattttgaatacataaaaaaggaaacgaggttgttagagcacatagacgggaggacaaaattttgccttttgggcaacagcgatgactcaccaccacatgaccgaccattcattggcattcattagccgccgcctgggacaatggcacaaacgaaacggagtggattttaacgcgaaatgcattcggagaatgctcttagagtaaatttcttaaaagcagaaagggactcgaaattatgagttttgtcccgacactcatactccaaacttgacaattgggtgaataaattcgagaactttttcttattaatcgac

SEQ ID NO: 94079 - DNA, 315 bp, Heterodera glycines
aatcgtcttgctgtatcagcaccttcattgttttgtccactccattcatttatttgtgtatgtgttttttttttgtcaaggttgagaagctagccagagaaagcttcttcttccttggagagtctttcccacacgattcagaaagctttggtgcattccaagacacattaacaatccagaagcctatgctagtctccagaccaatctcctatgtctttaatctccatccgccttctgacatccagtttggtaactacacctctcttcttcgcaaatctcttcacaacaaatgatctcttggtgaaaaaaaaaaaa

SEQ ID NO: 94080 - DNA, 801 bp, Heterodera glycines
ctctgttcccccgtcctcccaatggtcgtccctctccaatccattctccccgccattatttccgtcgcttattatctgttcgtgttcttttttgccgaagtcagtcgcaagttggtcgacctgagtctgaagaagtcttcgctcgtccacctgttcctcatcgaactgattgccactgctcaaatgtgcacttgcgtttatgagaatgccatcatcatcaaacattacggtccttccggcttcttcctcgtcgtcacttttctccaaatcgccggtgcctttttcaaccgcggcgctttcgtttctccgctcgctcccattgaactgtttttgcgcggaaaaatggacaccgaaaagtttttggcaattttgctgtcgcaaactttgggcggttactcggcatttcgactagccaattccctctggtattactcgcaatcgtactcgacggatcaccaccaattttacgacagtctcccgtgcgctctctcttacaaagtgcctttctattgtgcccttctgttcgagctgttcggctcctttttcctccgttttctcctccaccgtttccccctctcttcccggcatttcttcgctccgccgacaatcgccgctttcctttccttcgcactcactttcatcggtgttcctggccttaatcccgtggtcacttcctcgaggcttcaaggttgtcccggcttggacttgcaatggttcattatgacttattggtgttgtccggtggtcggttggcttttggcctcaaaattggacaaaacgccgacaaaacagaagaaaaaa

SEQ ID NO: 94081 - DNA, 414 bp, Heterodera glycines
aatcatattgtgcttttcgagcttcgatggaatgcgttgaagtcctaattttattattcggaaaagctcgggagatggcagaatgccaagaaattcgccagattttgccgaaaagtttgaccagcacggaactttacaaccacatttttgagaagattttccccgctttaatgccaattcgaaattcgtgtattttgacagtgaatcatcgctattgttttgaaggaagagacgccctcggagggacagaaaatcgcatcgaattggaagaaaactccgaaattgcgataattcccccaatatcaggcggatgaaaaagcatcagctgggtaacaactgctgattggacaggccgacttttgcggattaagtaaattgaaataaatttttagaccagaaaagaaaaaaaaatga

SEQ ID NO: 94082 - DNA, 639 bp, Heterodera glycines
acctttagtgggattggcgaatccgagcgccttttggtgtcccttcggggcatcgtttgcaacggcggacacttccacagagacaacgtagacatgcgcagttgaaacacagcgccagtgacgcattgaccatggactacggcttgggacgcatacgccgaagacggtccaattatggagcgatgtcaccgacgaagagtgtccaggaggtacaacccgtggcattgtcttggcacggtctcaccgctgtccatgccaaatcgggacggaaaattcttgacaatgtgtccggtatggccgacgcgggccaactcgtggcactgatgggcgccagcggggcgggtaaaacaacgctgctgaacacgttactcaaccgaaatctgaagagtctgagcgtggagggccaagtgctggtcaacggacattccctgggccggtccatcacttacgtcagcgggtacgtgcaacaggacgacttgttcatgggcacgctgacggtgaaggagcatctgatggcgcaggcacagcttcgcatggtcggacacacaaacggacgatgcgcagacgcgtcaatgagatcattgatgagcttggcctgcaagagtgtcgccatgcgcgcattggattcagtggggtcaa

SEQ ID NO: 94083 - DNA, 319 bp, Heterodera glycines
gaaggcatgcctcattttgcaaggtcacctttttgagtctaacggaatacttcggcggattggcaatttaatggcggatttgtttcgtggccccacagtggagtacttacggcttcaaggcaccgaattgataatttcattgacagcaccttcctaagagcggattaaattcataccttactgagcatctctaaagaaggacatggaatctgcgaccccaaaaatagaattggttgacatgggaccgaatattgacttcaaaatcgacaggacgatattggcaagcgattcgctcttcataactgcactcagaaaaccc

SEQ ID NO: 94084 - DNA, 346 bp, Heterodera glycines
tcgagatgtatgtgaagccgcgcgtcgatagtaccgacaaagcattttgctggagtcgcatagactttgataaattggagacttttcttcggcggaaactcggcttatcttttgaatcatttagcaaaatgacttttggtgcctttgaaaaatggaatattttcatccaacaaaataagcagagataccaaatgagaataactgaatttgcccgaccaaacgactcatttggaggtattttggggttaaacccaattccgaagcaaggggaaagaattcgacgagcactcggagccataaaagatccaaaggaggaaggcagaagaaaagaaactaaaagtaaaaa

SEQ ID NO: 94085 - DNA, 336 bp, Heterodera glycines
gtctctttaaaggttattcatttaaccaacaagtgatcaaactcaaccttataagaaaatagcaacagtgttaacttcgttttccaactcaagcagaacagatgatgatcgcccgtgcctatctgaacgggttggagcagtccccgcaccatttgctgaactcttctgacacggcgtccgccattccgtcctcctccaacgacggctcctcctctctatcgtccacgctgaaggatgcctcgtcctcctcttcgtcctccgcgcacactttcgacaactcttccgccgctcttcagtcacttccattccctccgaattggtccccccgctgaactg

SEQ ID NO: 94086 - DNA, 208 bp, Heterodera glycines
tccgggtgcctacatcaaatttgaggacgagcgcggtgtggaggttgaccaacctttgaccaccaccgcgtttctggaccgagcgctggtctgcattccgccacacacaaatgccattcccgacgaggagacaccgctgcaaaccggcatcaccgctttgcccggccaacggcaactgccgccgcacatgaccaaccaactgcatgac

SEQ ID NO: 94087 - DNA, 559 bp, Heterodera glycines
gtcaattaagatggtttaatataaaaattgaatcatgatcaacaccattttcattgtaaattcttctcatgatgttatattggaaaagcactacaaatccgtcatccatcgttcaatttgcgattatttttttgatgtccaaaaacaatcaccaaatgccgaaaacattcctccggtcattgcggcaccgcaccattacctttacattgtccaccacaacagcctgtatttcatagcaatttgcgtcacagaaactcctccattaatggttattgaggttctgcacaggataattgctattttcaccgaatattttgacgaatgttcggactctgcgattaaagaaaatattgtcattgtttttgagttgctcgacgaaatcctcgattatggttacccattgtgcacagagttaaatgtgctgcaggatatgatccaacctccgaatttttttcgttcctttaaaaaccaagttacaggacggacaaacatttcagaaatcctaccaacagggccattatcaaatgtttcatggagaagagcttctgtaaattttgca

SEQ ID NO: 94088 - DNA, 483 bp, Heterodera glycines
  unsure (1)..(483): unsure at all n locations
gagactttctctgtgccatcgcttctgccagctacaccgttcacttctattttcacgtttccagaacatcaattgttgagccatttgaattgttgctgaacgaacggacgaccaacgaaaagttgacactgatgaaggaaggaggagccaattttggccgaaattgttggtggacgatgaagcggtgcccaattgttggggagggggcagcggctcaattggaagacgacgacggaggaattaattgggacgacaaattgaacaatgtccaaattaatatgtgggctcccaaaaattgcattggcccattgtcttcgccaccagcagcggaagaagaagaagcgagcgggtcaatgcgaagaaaaaaggcgtctgatgagtgcgcggaagtgaattaattatatttgagaaatgctcgatcatctcaccaattgcaaatgaaatttgattgctctcnnnanannaaaaaaaaaaaaaaaaaaa

SEQ ID NO: 94089 - DNA, 837 bp, Heterodera glycines
gtccatttaagttgacaaacagttgcatcactttgtaaaactctgctccgatgagtccattcaatcgcagaatcagcgccaactcagcttacaacaaaagtcgtcatcaattcacaaatcaaatacgaatgcatcagtgatttactctaataagaaaggtccaattccgtcagtgctgaaccgtctgtgtcgagtggtggtactgctggagggtttccgcttaatggggatccgtccgactttggcgcggcaatgcccgcaacaaattccccacagtcatcaaatctggcggaaaaagcaacggactctctgctcaacgggctgcagaacactccggctgtgacttacgaggatttaactgtcgcgactgacggattcagtcccaacaaaatcgtcggcaggggcggctacggcgtggtctatcgcggagtgtggaaacacacgccggtggccatcaaacgaattcaggggaagtgcggaagtgacgaaaggcagcaaagggagcgaattcgtcagagtttacaagaattgaagactttggcaaagtttcgacatgacaacgttctctcactgtatggttattcgctggacgggcccgagccttgccttgtgtaccaattcatgtccaatggtacgcttgaggaccgtttgctatgccggaatgggacggagccactcggttgggccaaaaagctgttcatttgcgggggcgtttgtcgcggcctgcactttctgcacaccatcaaccaaatgccaatcattcacggcgacgttaaatccgctaacattctgctggacaagcattttgagccaaaacttggcgattttgggctcagc

SEQ ID NO: 94090 - DNA, 700 bp, Heterodera glycines
cgctgccacgctcttggaccccaagcacgccgccaagctcgcaaagaaggaggccaagaaggccgaaaaggatgccaagaaagctgacaagaaggccgacaagcctgccgagcagcccgctgctgctgctgctccggccaaggagtccaagcccgcttcgcccgccgccgcccccaaggcggatgccccggcttctggcgttgcccccgacaccgacccgacccgcctcgacctgcgcgtgggctacatcatctctgcggaaaagcacccggacgccgagtcgttgtatgttgaaaagatcgactgtggcgaggacgagccgcgcaccgtcatctctggcctggtcaaccacattcccattgaccaaatgcagggtcgcccctgcgtggtgctgtgcaacttgaagcccgtcaagatgcgcggcatcatgtcgcacgccatggtcatgtgcgcgacgagcgccgaggggaaggtcgatgtgttgtcgccgcccgagggcagcaagccgggcgatttgattgcgtacgagggtattgagggcggcgccgggcccgatgcgcagctgaatcccaagaagaaggtctttgagtcgattcagcccgggttgttcaccaatgacgagttggccgctgggtttatcaagcacgacggtaccttctgcaagatgcatgtgggtggcaaccccgttttggcccagtcg

SEQ ID NO: 94091 - DNA, 544 bp, Heterodera glycines
  unsure (1)..(544): unsure at all n locations
gcatgagattgttttcactgcccaaatgccccatatgcgtgacggcgtccaattggaatattcgcccctttatcaatttctcattggctttttggacttggaatttgagttcagacccgaaacaacgtctttttcggaagacattctgatggaatgcgacgttcgaatggcattttggcgccgggggggcccacccgccgcgggcggagaatgggtcgaattggtccggtcgacggtccgccgggcgttgcaatgtttggtcaaccccgacaaagctcgtctcggcttctccttcgactgttccctgttggatttgtttcacttcggctctctcccccacccgcaatatttgttgaacattcgaatccccgccaaccgaactttgtgccttctcagcaacaacaaaggccccaattgcgccttccccgggcccctccacgagcttcgcctcattgaaattcaccaaaatggcggattcactttggtttggctgtggcttaanagtgccctttcgcccgtccttttgtccgtcctcttttggttc

SEQ ID NO: 94092 - DNA, 418 bp, Heterodera glycines
attggtgctggaactgatggagggcggctctctgagtgaattaattctcccagccaaaagcatcgcttatcagaattgtcatgtgattaattggactttccaagtggccaaagcattggaatatttgcacaagtttagtttcatccatcgggacggcgaaccctccaatatgtggctgtctcttgattatgtcgtcctgaaacttggcgacttcggcacaatcgctaaccatcggacggacatgaccaccacttgtggcccggccgcatggatggcacccgaagtgcccacaggggagagttacgactttcggggtgacggtttctctcttgggagtctgtctctgagaaatgctcgcgccaagtccgccattcgccgacgctcccgaactaagttccttgaccgcgttctgggacgt

SEQ ID NO: 94093 - DNA, 442 bp, Heterodera glycines
cgacactatcatgtctgctgtcgaggctgttcaaactttcggtcgcaagaagaccgccaccgctgtggcccactgcaagcgcggcaagggcatgctccgcatcaacggctcgcccattgacctcgtccagcccgagatcctccgctacaaggtctacgagcccatccttgttgtcggcaaggagcgtttcgctgacgtcgacatccgtgtccgcgtctctggtggtggtcaagtgtcgcaaatctacgccatccgtcaggctattgccaaggctattgttgccttctacgccaagttcgttgacgaaggctccaagaacgagctccgcaagatgcttgtcgactacgaccgtaccctcctcgttgccgatccccgtcgctgcgagcccaagaaagtttgcgggtaaagggtgcccgcgctcgtttcccagaagtcgtaccgt

SEQ ID NO: 94094 - DNA, 745 bp, Heterodera glycines
cgggaatgcctcagtgtgctctttgttctctaaaagcgccacaggagatgctctgacatctctgtactcggatatgaggccaatgatcaccagagtgcgcgacgaagttgaggccttccgcatcaacaccaaatcggactgtactgacatgatggacgtgcaaatggccaagacggcgccactaaaaatcctggataacccctacgactccatcttctgtgccaaatgtaaactgcttggacactgccagtgcgctggtctccaatgaccaagctgtcaccctggtacgccctgctccgtgggaccgcctggacagccctgacagtctggaggcgcaagaaccccggacaggctggacagtctggccaacccgctcgctcattgccctgcccagaacatactctgtccactttgacctgctggcccgttcggacgctgcggaagacacggacaggccggacaacatggagcctctggacaacctggtactctcaatggaggaggaggatctggaacgactggtgtgttgggaccccaaggacaacctgtacagcaaggacgctccggattcgctggctaacccggacagcgtggagtgaatggaattgtctcacaacaaattcctataccgaatggatcgcctggagcgtctgaccagaatgcaaactccggaagccaaggactcccaggatagccggggagacacggaccgtccggatctcgtggcgcgccggacagatcggcc

SEQ ID NO: 94095 - DNA, 810 bp, Heterodera glycines
gcatcttcccaatatgccggcactgtgccgctgtcgaccggcacactgccaccatcgtcatcaacgtcatcgatgacggcggcagaggcgacgacaacggcacttcccacctccgctgatctgtcccgttcggcgtctgctgtggaaatgttcccgcgcagacatcggcgtgccgtttccgtaaatgaatgcctcttccaacaacagcaacaaggacagttcaaccaaaggtcgctgctggacgaaacgccgtcgtcctcctgcctcgggtcgccctgctcttccgccagtctgccagcccattttcccgctgctgctgttgctgccacctcaacagtgctgaagagtgatcagatcagtcccatcgcccgcttcgcgttcagtgatctggtgatcactgtgttgcgtttggatttctacaggacaggcgacccggaagcgatcaaattttgcaaacactcattggacattttgctgaaatggggtgaactgccggcaaaaacccagcaatcgttgcggcatcgaatcgaagagaaccatcctttcaatgaagacatcggcgcattgataactgccgtcaagttggaccccgaattgtgccagccccaaggactgctccatctgctcggctcgctgctcctttgtgttctcgttgacggcgactacgacgcgcgtttccgggtgctgctacggcacatttccgcactgcttggcatccactgggacttatttgaggagttcgagtcaacgctttgtgatcggctgatcgaccaatacaatgaaacagttgacaatcaaaaggtgcgcgag

SEQ ID NO: 94096 - DNA, 386 bp, Heterodera glycines
gaggcattacacataaactgatcaatgggactcatttggccaaatcctttataatgagaaaccgactgatcagctggtgaatgctgtgccgggtgatcgttttcccactgtcttttgcgtctttcgctttcataaaatgccaattccctctccccttcccatttctcacatttctgtgctttctttgctgttctttctcatttcacttttttcgctcattcgtttccaatcattccttttttgactcaatgattgatcaaatgtcctttaaatcaatcgaaacattccttctaattttaaatttaaattgttccaattacaaatgaattaatatccatctgaattttaaataaatacttaatatttaaaaaaaaaaaaaaaaaaaa

SEQ ID NO: 94097 - DNA, 310 bp, Heterodera glycines
acagcatatgggcggcagaaaatattactcatgtctaagatgcacccacgtacctcaccaactgaatcggagttgatttacacaccccttcacaggtgcaaccggacaggcgtatatcttcacaaacatcgcgaatatcatcatggctacagtctagtcgcctttcatgatcactggacagcatatattccgctacatgctttgtaaaatttgcaacagatagcttggctggatgtacgaatttgcccatcagcaacaacccttatacaaccaaagactagacacttatagagcgctgattgctaaccca

SEQ ID NO: 94098 - DNA, 800 bp, Heterodera glycines
gtccattaaagcaaaaaaaaatgctcacgaggagccaaattgatctcgctgccgcgaagcggctttttcccccgtcagtcccgtcgcttagcaccgttccgcacgccacggttgtgccgcgtgacatgcgcgaggtgcagccgcaaacagcaggccaagtgatcccggccaatgaattgacacgtgccatcaatgaccatctcaaaatccaagtattgatcagtagtttccagactcgtggccacaacattgccaatttggacccgctgggcatcaacagtgcggacttggatgacacaatcccgcccgaagtgcggaagatgttctccttcactgaggaggacatggaccgcgaattctcgttgccacccaccacattcatcgggggcgaacgcgccacattgtcgttgcccgaaatttacaaacgacttaagaaaatctattgccatcacattggcgttgagtacatgcatttgacaaacgacgagcagcaggattggatccgaaaccattttgaggcgcccgaagtcacagaattaccaccggagcagaaaaaagtgcttttcaaacggttgatccgctccacaaaatttgaggactttttggccaagaaatggcccagaaaaacgcgtttcggtctcgagggttgcgaagtgttggtgccggccatcgaacaggtcatcgactgctcgcacgagctcggtgttaactccattgtccttggcatgccgcatcgtggtcgtctgaatgtgttcgccaatgtgtgccagcaaccggtgagcaccgttttgggcctgttc

SEQ ID NO: 94099 - DNA, 445 bp, Heterodera glycines
  unsure (1)..(445): unsure at all n locations
acacccgctgaacttaagcatatcagtaagcggaggaaaagaaactaacgaggattcccgtagtaacggcgagtgaactgggaagagtccagcgctgaatcgcagctcctctggggttgcgaggtgtagcgtatagaccgtgagcttgggttggcccgcttgttcaagtttcccttgaccggggctccagagaaggtgcaagacctgtccaactggcggtgcctacccatctttacgtgtcttggagtcgggttgtttgggatcgcagcccaaatcaggtggtaaacttcatctaagactaaatacggccacgagtccgatagcgaacaagtaccgngagggaaagctgcgggggcgggtggggaaaaaagaaataagcagccaaagaagaaaggaaggatgccgacaaagattaattatctntaattagtaaatgatccattcg

SEQ ID NO: 94100 - DNA, 215 bp, Heterodera glycines
agacaatcgaagggacgaacggacagttcaaagccgacaacgcgcagcttacgaccgattaatgtgtatgttcgccactcagcaaaggcccgattcgtgcggattttttgaaaaagaatggaaaaatgaatggaattgtgaaaagtcgtcaccaaaatgtttaatgccagcccaaattaatgtgaataaagcatttaattttgaaaaaaaaaaaa

SEQ ID NO: 94101 - DNA, 448 bp, Heterodera glycines
tgttgctttgtccatcattgatggcatgtccaattagcagcaactgggcacttcggtcggtctccccgggcatggccctttgcaaatgacggcacaaccccagcagcagtgccctgcttctgccgaagccgtggagttgaagtatctgcgcaggatgctggaggggtaccagcattttctgtccttgcgaaaggccagttacaccctcgtggatggttttccgctcagtcgccgtgacaatgaagactgcccccagagcaactttggcacctccaaaaagatttgcaaaattgaggcaagtctgatcatggacattgtggagaatttcttccacccattcggacaattaccagcggaagataagcgcaaaatgttcgacactttctactgcttgttttcaaatgccgaacgcgcgtttcggacctataaaatgtttggagctgaagac

SEQ ID NO: 94102 - DNA, 509 bp, Heterodera glycines
ggtccaacaacaatgtcggataaattattcaaaaacattggatcaaagggcacaaaagttaaatgaattgatcatccaatggttgtcaagaaatgggagctactatgaatttacgacaaaagacaatttctttctgattgccaattttcgtgattttcttgacactgcaaaacgccatgaacagacgggaacaagcataaaagcgtgggaagcatcattcataggccaattcttgaatggattttcgaggacaagaaaaaatggcaatttgtttaaacggttacgactggttgatcaacgaatgatcagcatgatcgacgaattctgtgagatcagtgtcgactttttgatatcgaaccaaaatgtggcggccgaaacagcgaagactaatgaacccgaaaaattttgtgccttttggcctaaagtcaaagaaaatgcgtccaaattcactcaaattgacattgccatggacgcatttaacaagtggattaacacatcggatctgctca

SEQ ID NO: 94103 - DNA, 445 bp, Heterodera glycines
tgactcttcgggcaaagcgggatttgagcaacttgagggagatgaccagaagttactcaactattatcaaattctgagtgtgattcttgactttcagattcggcttattgtcgatcccttcttgtttaaagagggcgaccgttttctgcgtgctgtcaatgcttgccactgttgtaccaccagacgcggaattttccataacatccaaaataactttctggtgtgtgccaacgagtaacatctccttcgtatcatttcaatgcaatatgctggccatgttgtaccaacgctggaactgctaatacccggaggcaacgccatttaatcgaaagttccgatttccccctattaccgtcttggctgattgactttatgtcctacccaattgccaattactgttcttgcgagtgctcatatccgaatgtccaacatcctgcaaaagccc

SEQ ID NO: 94104 - DNA, 391 bp, Heterodera glycines
cgcatcacatttttttcgttatgaccctccgccaatcaatgataaaatgcaacaaaaacacatatcgtgaaagagtgggaaatgagcagaacacaaaacacgcgctacacaaaacgacggacggcacagaagcgaaaggcgcgcgtgccgcccgagtgcgttcagctcccgtacagcacggcgttgatctcgcccatgatgtacacctcgcgcccgttgtacctcctggacaggtccttctccaactgaatgaaagggacgcaaaaattactacagattttggtatacaaattaaaaatgcaataaattaattaattccccgcaaaaatgtcatcaattttatttgagtattttttatttctttttgtttaataaatgcactttgtaatat

SEQ ID NO: 94105 - DNA, 96 bp, Heterodera glycines
agaatatgtggccaattaatcaatttgtgttgtatattattaattttaagcatttttaaaacaagcataaatatttgtggagaaaaaaaaaaaaaa

SEQ ID NO: 94106 - DNA, 459 bp, Heterodera glycines
aaatgaccgaaattttgttggaggtttgtgtcgatgacgcggacggacttttggcagcgattcggggcggtgccgaccgagtcgaactttgttctgcgcttgaggttggcggattgacaccgacgccgggcctaattgaattggctcgctctctcaacggttctgtgccggtgttcgccatggtcagaccccgcgcgggcgatttctcatattccgatagggaatttgattccatgcgaaaggacattgaatgtgttgccaaagctcgattggcaggcattgtttttggtgccaatcattgcgatgggacattggataggcacagattggaaattatggcaaaaatggcaaaggtttaatgtccaaaattattttagattttagaaatgcaattttaattcacaattgtgtgtttttttatcattttcaaataaaattattatttgatacttacaaatg

SEQ ID NO: 94107 - DNA, 424 bp, Heterodera glycines
cgcttttcccgaggacaaaattcatgaagcaaacggaaagaattgtgaaagtgtatttgaaactgaaggacaatcccggcggggggtggggcccactcatccaaaaaatgtttggcgaaatgattttggccaagaaattgggaaagggcgacggcgcgtcattgcgcgccaattgccaattggcactcgaactgatcggagaaggggacggtgccaccgaagcaatggtcgatcagttggccaaggcgaagccgtacagcaacttttggactctgacgaaacgaacgacaaaagcgattttgtgccttttaaaaggcaatggcacggaaagtgagcgacaacggagcaccgaagacattctgagaatgctgaagacatttgcggaggacggtgaatcattgaaaatggtgcaaaaaggaaaggg

SEQ ID NO: 94108 - DNA, 340 bp, Heterodera glycines
  unsure (1)..(340): unsure at all n locations
cttccattttcctgtgttctaaaccttcatcaattaaaaacaatgcctttcctccgctcgcttcttcttccttccgttttgcttcttcttcttctgcttctgtccgtgtctctttgctccgctgcgtatgaagcgccaattcgattggtttggcaattcgatgggtgcgcgtggcgccggcttcggaggcggatgggtgttcggcagaagatgaaccgttaaaggcgccaaccaattaataaaataataatgcacaataataataatatttatttcatttgcccccgattccccattttcaaatgaataaattatatattcnaaaaaaaaataaaaaaaa

SEQ ID NO: 94109 - DNA, 488 bp, Heterodera glycines
ttggtgtgtatgcagctgattccgagtcatacaaagtgttctcgcctctttttgaccctgtcatcgacgaatatcacggcgggtttggacccaaacaaaagcatccgccttcaaactttggcgaggaccgattgggcgaattgaaggacttggacccagatgggaaatacattctttctaccaggattcgctgcggtcgttctttgcttggctatcctttcaatccgttgttaatgcgtgacgattatttggtcatgcaacaaaaggttcgaatggctctcgagaatttggaagatgaccctgaaatcgggggaacttattatccactccaaggaatgacgaacgaacccagaaacaactcatcgccgatcatttccttttcaaggaaggcgaccgtttttttggagggcccaaattcaaaccacttttggcctgcaggaagggacattttcccaagtgctaaaaacacccttctgccgcgggccaat

SEQ ID NO: 94110 - DNA, 513 bp, Heterodera glycines
tcctcctcccgtatattacataaatttgtgtctctgcgggtggctaaattttatcactcagctgttgaaaagctcaaaacttcatatgcaaatgcacgccgaagcacttcctgggaagctgtgaagaccgcggcttctattgctcgtggatttcgtgacccttgtcttgatcagtttttggctgcacttgaggatactttgggcaccggacgtcctgccacttacacatttgagaaaatcagcaaagaacgcgtcggcaccggtctcactcacacacagggcggcagcgaaaccaaccgcactcacactgtctcgaagacatctgccggccccgccgcacgtcgttcttctcgcttctctctgcctcagttgtttggaacgaaaaagaaaggcggcaagggaaaaccgaaatagaaaagtggaacgggtcaaatgatggaagcaaaaagaacaaatttgatggaaaattgagatgtgttttttatccaatttttttttttgctcctatacata

SEQ ID NO: 94111 - DNA, 82 bp, Heterodera glycines
  unsure (1)..(82): unsure at all n locations
ccatcccaaaaacttcaaattttccgcacaaattacggtattttttattggtaaaaaaaaaatattttacaactcnnaaaaa

SEQ ID NO: 94112 - DNA, 503 bp, Heterodera glycines
ccccaccctctctctctctcatccaccttttgatgaaaacaacgggctgtttcgctctattgcaatcattaatcaacaatatgagagataagtcgataaaatagtaaacagctccgaataagaaagtttgattaaagggaccttggcattaaaagggatattggaaatgaatttttgtacgtcagtaaggtgcagctttacgtttgttttccaatgaggtaccggaattccatttgcgaaaaattatggctttcgtgacgcgaataggtcacatccaccattcacatcctgattttttggactaatctccgatgtgcccacctccacttctccatttctttgcctatgaagccattctctctcctggttcattttttccgtttcgtcatttagcccaatttctgcttcatctcctgtaaattgcactgttctgtctcccttataaaggtgcgtaatctacttctgcttcgttagacttacccctctctttttcctcttttcgg

SEQ ID NO: 94113 - DNA, 550 bp, Heterodera glycines
tgggccgtcgtacgaaatgcttttccgtttaacaacgacaaatagaagcaaatctgctccttttctggccaaaataccgacaaaaactttgaaaagggaagtcgcaaacgaagcaaaaacggttcggtcttttggggaacaaattgaaatatcaaaggaaattaacacattgaaagaataattcaacaaatgatgacgagaggaaggaggaggagcaattcgcatctctgaaaaacgttggcatacaatcgcatcgacaagcgcaccttttgcttcaacaaaagtgcaacaaaacggggtggacaacaatcattctctgtctgaaaacagccttcgtcttcttctcccgtggattcccaaaaacttttcaacgccaaatggcttttgaaactcggaacaatgcggaaatttccggggcaatttccctttcccccaaaaaaaaaaaattccggaaaattttttgaaaaaattggttttgaaaaggagagaaataaaacgaaacccccaaaaaaaaaaaacccatttcccccccgagttttagagataaccc

SEQ ID NO: 94114 - DNA, 288 bp, Heterodera glycines
aataagaggaacgacggaagccatcagagaagggaaatgatgccaaaattggaatttggggcggggaattgcgattggttgccatagtgattagcaccaaaaatgttttggattattatggtattttagctaccatttgcttttgtctccttttttggtcgcccatttgtccgtccatccgacagataattccctttgtcatctttccgcgtcaaattccctggcattcggcttcccgccggtgcttttaaagtgcgcttcgcccctccgcccattcattccaccgtg

SEQ ID NO: 94115 - DNA, 503 bp, Heterodera glycines
ggtcctcaagtatattcgataaaaataattccttttaggacgatccacggattgatttacaatgtctgttctgttctgtccggtcactcattttgccattttaccgatttttaaggcattgaaacttttcatggaagagaatcagaagttgttcgacctgtgcgtacagaacttcaacaaacagaaggagcaggagcaactgaagcagcagaacaaccgcagacggtgggaactgctcgaaaaagcggccatggaaaacgcacgcgcaattcgacagcaacagacggacggagaggcggagccgtactcaattggcgagggagagaagaagccaaagtgaaacggtggcgaccaattgatgattctgtacaaataaacccccgggaaagaacggaatgtaccgcttcaacatcacttacacacactgagaatttccaaatttctatgccacgccccccccccctttcacctcacacttaaccctaatttacttctcacatttt

SEQ ID NO: 94116 - DNA, 540 bp, Heterodera glycines
caacaatacggttccatttccgctgcccgagcgtccgttgccgagaaaaattcgcttccaagccttggaaatattgtacatcgaccactctgtcatcgaatttctgcgtgccaacaagcaaattttcgacaacaaaggcaccaacttggtgttcaaattgtcatcgtatttgtccggaaaagaagacggcagaaccatttggcaatttttgtgccgcgaaatttggcccatttttacgccgaacatccgtcagttgggcttctacaacggtgaccatctcgtcaatttgcgtcgtctcatttcgcccacaattctcaccgacctcaaccagctgaatccgcttgattccggtgaactgtttcccgctggtgttgctgacgatggaccgaacgcaactgctgggcaagcactcaccaaatggttgcacacgcctaccgtcgatggacagccgaaggaattgtattgcagtgatcatgtttggggcttcaaattcgactggatcaaaacgttcaaagaggaatttctccgttccaccactcc

SEQ ID NO: 94117 - DNA, 394 bp, Heterodera glycines
gctgatggactccatgaaccacggatacacagacacggaaaaaaaggagtttatggagacgattatgaatattctccgggacgtcgccatattacaaaaggtggacatcggtgacagaagcgcgtgggacgtgcaggagcggttgtcagtcccccagcagagaaacggaactgactgcggcatttttgcgctgcttttcgcacaatattcgctggagaggcgccaattggaattcggacagtgccatattccgtactttcgacgacggatatgccacgacataatctctgtgattctccatgatcaaaagtctccggttaacagaagcgacgaaactgtcgtacagtgcccatttgctttgtgaattttttgctcaaatgcctttattattgtt

SEQ ID NO: 94118 - DNA, 224 bp, Heterodera glycines
aaaaagagatcacccgcgagggcaaagtggccaagattttgaccgaagaagaaattcagcgcgaaatggcggacacctactgaagaaacgaaagaatgaatgaatggacgaaagtgatcggaatgttggatcggagatacagaaatcaaaacaaaatatgtaaacatttggcgccattttgagcaataaattggttttatttttaaaaaataaaaaaaaacaaa

SEQ ID NO: 94119 - DNA, 509 bp, Heterodera glycines
aacttcacaatcgtcagatttaccctccaataaatgtacttccatcgctgtcgcgtctgatgaaatcggccattggcgagggaatgacccgtgccgatcattcggatgtgtccaaccaactttacgcatgttatgccattggtaaagacgtgcaagcaatgaaagcggtggttggagaggaggcactgtcgccggatgatttgctctatttggagtttctcacgaaatttgaaaagaatttcatttcacaagggaattatgaaaaccggacggtgttcgactcactcgacattggttggcagctgttgcgcatttttccaagagaaatgttgaagcgaattccagcgaaaacattggataaatattacccaaggggaggcactggggcgaggaacgaatgagcgaagagttgttaattagtctgacagatatccacttaaagattccataattattcacttgtgtgatttacgttatgtcattgactggatttttgcatatttgcggat

SEQ ID NO: 94120 - DNA, 50 bp, Heterodera glycines
aagcaacactcacaaaaacacatgcgcacacactcattaacacaatgtac

SEQ ID NO: 94121 - DNA, 233 bp, Heterodera glycines
ccaaattaaatgcaattttgaaacgaactttatttttaaatttattttaataattaaacatttacatagcccaatccatgaaatttaactgaacattttcatttttaataaatttatttgaaatagaatatttattcatttaaaggattcgttcgtttatatgcaattagcagtcagtgtataaaatgaagtgaaagcataatttaaataaattcattttctcgggagaaaaa

SEQ ID NO: 94122 - DNA, 530 bp, Heterodera glycines
ttcatcagcacaatgaaacgaaattcattgaatgtgacgagcacagtgaggaatgaaaattcgggggaagacgaaagcggggacggagaaacgggggagaaaacggcggggacagaggaaaagcgaccgacagaacgagggccaaagtgcagacaaagaaagcgggggagacacctgtaagtgcaacccgcagcagaacagaagagaccaaagaggaggcgccaacgcctgctccgatggatgttgtgcttctgttggacggatcctcgtcaattacggaaagagtgtttaaggaccaaatgttgcaattctgtcgcgagtttgccaaacaaatgggcgtgtcgcgaaaaggcaatcatttggcattggtccaattcgccggccattgccgcacagaactcggactgactgattattttaatgcaaagaagctcgaaaatgccatttcaatggtccgttatttaaacggggggacacggcttggtggagcacttctctacacgcagaaaaaagtgatggcttcggctaga

SEQ ID NO: 94123 - DNA, 303 bp, Heterodera glycines
  unsure (1)..(303): unsure at all n locations
aggctttggagaacgacgggaaatatggaaacgaaaggaattggccacggaaggactgagtgaagaagaaatagagaaggcaattgagcaatgggagaacggcggaagaaaaatagtgaaagctcacaatcaacacgaggcagaagaaagccaaaaggggagaacaaaagagtgaaaaccaacacaagagaatgaccttgaagaatgccgcatttattctttaatgtcctcataatcagcaataaaactagttggaaaatannaaaaaaaaaaaaaaaaaaaaaaaaaaaaaaaaaaaaaaaa

SEQ ID NO: 94124 - DNA, 237 bp, Heterodera glycines
  unsure (1)..(237): unsure at all n locations
ttccaatcactgggattcaagctcagcaaatttattcagcatttttcttatggcataagttgttaacatttcctcatcttccttgtttatttcaattttcttacgacacaacatttctcaacattcatttttacaactttttcaaactaattctcattcattcaactgtatatcataaacgaaatttcattannnnaaaaaaaaaaaaaaaaaaaaaaaaaaaaaaaaaaaaaaaaa

SEQ ID NO: 94125 - DNA, 85 bp, Heterodera glycines
tcgttgttggacggaccgacgtcggtcctccagcctaattataattaatggtgttgaaattacataaaaaaaaaaaaaaaaaaaa

SEQ ID NO: 94126 - DNA, 208 bp, Heterodera glycines
ggaagaaatcgcacgaaaaattggaaaaaaccgtcgaccctccggcgacgtcgtcgtcctttcgcttcattggggcggcaattggggctacgaaatatcgaagacggagagagactttgctcatcagctgatcgacagagggacggtggacattttgtgcgggcactcatcaatccaccccaaagccattgaggtgtataaagggaaa

SEQ ID NO: 94127 - DNA, 536 bp, Heterodera glycines
gccgcttcgtctgcgcagcaggaattggtggcccaggggcgagtggccgacccgggcccagcaaatggcagcgaagagcagcaatggactgcaggtttggtctccgccgctaaactcgtcgccgctgcgactaaccaactttgtgaagctgccaacggattggttcaaggccattcgacggaggaaaagctaatcgcagcggcgaaacaggttgcttcttccaccgcccatctgttggtagcgtgcaaagtcaaatgcgacttgaacagccgagcaatgcaacgactccaaagtgccggtcatgcggttaaaacggcaacagaacatttggtgaacgcggctcggcaagcgattacgcaagaggactgtcgcgggttggtcatctcggaaaagattgtcacgggcattacacaaatgatggacgcgcacgaagaagtgctgagaaaggaacgcgaattgaaagaggcgagaaaccgactggcgcagctgaacaggtctcggtatgaaaagtcgccggagccctcgccagaaaagca

SEQ ID NO: 94128 - DNA, 507 bp, Heterodera glycines
ttgaccaaggagaattacgtcgagatggaatcaaaggtcaaagcggtcttcgagcagctgaagggcgatgccgaccacttcttgtttaaagagggcgaccgttttctgcaggaggccaatgcttgccgttattggcccaccggacgcggaattttccataacgccaagaaaacctttttggtgtgggtcaacgaggaagatcacctccgtatcatttcgatgcaaaatggcggcaatgttggacaagtgctggagcgtctcataaagggagtcaaggccatcgaatcgaaagttccgttttcgcgtgacgaccgtcttggctgactgactttctgtcctaccaacttgggaacgactgttcgcgcgagtgtgcatatccgacttccgaagatcagcgcaaaacccgacttcaagtccatctgcgacggcctgaaattgcaagtccgcgggattcacggcgaacattccgagagcgctggcggcgtttacgacatcagcaacaaggcc

SEQ ID NO: 94129 - DNA, 538 bp, Heterodera glycines
ttttaactttgagaggcgagggatatgcgtcaattcggaaaattcgtcccaccaccgctggcattccgacaatgtgccatcctcacacttcgctgtccaaccgatgctatgagcgcggactgatgaaaagtgcgccggaagcgtaagaaacggacgaatcggacattgaacggcacttatttgattgagcatatttgaggaagcgcaattcggccgtgtgattattcatttgtcggaggtactcggcagcctgcaacataacacagattggattccgtccacaaatagtgttttgactcttcttgaggtactcgttgaaaatggttgggtcgagcgtggcaatcgcgttcattccctgctggtcaaggttggcaatttgttcatggattggccgtccgctgttcgattcaatgggcgtgtaacgaaatcgctggccccaatggcaaaagtctgatgagatgacgaaaagattgttgggatcggaaatgtaatgggcaaagatgcggccataaaattgctgacgtgaagtgcttaacga

SEQ ID NO: 94130 - DNA, 202 bp, Heterodera glycines
  unsure (1)..(202): unsure at all n locations
aaagcgaacgaaaaagtaccacataagaaagttctgtgcgcgttgcagtggtggcagaatggggcgggcatttgcctggggggttgttgtgatcgctaactaacaaatttgtcattgtattcccagcggaattgacggtaaatttcttgattanaaaaaaaaaaataaaaaaaaaaaaaaaaaaaaaaaaaaaaaaaaaaaa

SEQ ID NO: 94131 - DNA, 368 bp, Heterodera glycines
tatctatttattattcatttattaatttctgtatctaattgggcttaggaacaattttactgcgctttggcctccgttatgtatttgataggctcagtgttcgccgttttgaacatgctcaaggcaatattcgcccctctgtggttttttcatttgtttgtaacttttgccggttttggcctctacgcattcgacttttggacacgttggaaacgggacagtcagttgaggaaggagcaccagcagaaccaatccgtctatatcacttgaccaatcaaacgcacactttgcatacattcgcaattttcccacattttttaaatttttgtttagaaaatatttttgaataaattattatttttttaaaa

SEQ ID NO: 94132 - DNA, 260 bp, Heterodera glycines
ataaatgaccaccccgtcccctttccccgtttattgtctcaatttcacacaatggttctcttaatccgttgaagaagcgccattaacaaagccgtttgaataaaaggacatcgctaaagcccccatatagcgccataacacccacaaaatccaatctcaacatcaaattccccgtgatgatttatttaatgaattccgatggttggttgattaattgatcattcttaatgtgtttgaaatgaataaaggtgtcatgttgc

SEQ ID NO: 94133 - DNA, 67 bp, Heterodera glycines
tcacaaatgttgtttcaatccttctctttatataaattattatgttaaattaaagaagctttttgca

SEQ ID NO: 94134 - DNA, 439 bp, Heterodera glycines
catcagagaaggagaaaaaggtatccaaaagtacaacagaagaaagctctagtattcattgctacggaggaaaccctaagtttaaggaccaaccagaagaatgggcaaacagtgtatgcaaggactggaccacatggcaaattatcgagattccagagttccgctttacgtatgagtatctcgacgagccgttcagatcatggttcaagtatcaattttacccagattccatagatgttgttaagtatgttgacgatgaatactttgaaaagtatgaagggcaaacacaagatggtaaaagacatggagaaggagtgctgacatggaaaaatggagatgtctacaaaggaccgttcaaggatgaccttgctcatggaaaattcaaattacaccgcaatgataatcataagttcaaactggaattcattaaaggtatgcc

SEQ ID NO: 94135 - DNA, 371 bp, Heterodera glycines
gccccgtacggctacacgccgttttgcgacagtcgcaagtccatggacggctttcggttctggcggagcggctactgggcccagcatttggcgggccgcaaataccacatcagtgctctttacgtggtggatttggtcaaatttcgccaaattgccgccggcgatcgtctccgtggccaataccaagggctcagctccgacccgacactcgttgtcaaacctggaccaggatttgcccaacaacatgattcaccaagtgcgcatccactcgctgccccacgaatggctgtggtgcgagacgtggtgtgacgacgtgtccaaggacagtgcgaagaccattgatctttgcaacaatccgctgaccaaggagc

SEQ ID NO: 94136 - DNA, 545 bp, Heterodera glycines
atgcagcgttttgacactcgcagtcccttcgttggcgttgtgtttgttgaaggtcaattcaaagagccgcgctgtcgttccgcgtttgtcgatgagagtgccattggacgcggggcggcacggaatgcgcaaatccgactgtcctttggcacgtgcggcataaagcacacaaaaagggtcatttaaagtggacaataaacaaattagctgttttggttttattattatttttttttgtcaattttagaatttaggaggattatccccggggcgttttcctcagtatgcgtttggtggtcgcctttcatgcccaatacctctccaaattggacagggtttacgatttgcgatgcttttacatggaaatggagcacgagttggagaagccattcacagtcagaatggatcctccgacaatgcacagcaaacaaattcagatgcctaattgtcgctatgaagtgttaagcgaagggcctcacggtccgcccgtttattacgcaacggttggccaaatgatttatcacaaatggacttgcgaagcgaat

SEQ ID NO: 94137 - DNA, 394 bp, Heterodera glycines
ccacagaaacaactgctcactgtgccgggcaccaataacaacaacaataacagcaacaacaacagtgccatcgtcggcttcgtcggcgatgccaacggcgaccatccgccgctgagtctggagaacaacacattcttcccgcggcgcagaagtggctgttcgtcctcaaagcgccgtcggcgtgagcgaccgttcgccgtctttggcagggccatgcgacggttgcgccatctcttcggctccggcgtggacctgtccaaacgagtggacattgtgtcccgggtcgcttttcctacgctttacctcgcatttctctgtttttattacgttcgcttcgttttgtttcaatccgaagagtgggaaacgatgggcggcgcaaagaaactttgaattg

SEQ ID NO: 94138 - DNA, 298 bp, Heterodera glycines
aataaaaagcggaaaatgtccgtgagcggaaaaaagggggaaagatggaaaaattaaaaatctgttctcattcgcttaactttttaatccgttcaacatcttctctctccgattaaaaattatttattaatttcgaattttcgcaccgtaataaatatttgtcaccgggacattgtttgaaggttacggtaggggaaaatttggtactaaaaatcgtttcaccgggaaacgggaattggtccaccggggacttttgaaaacaaaatctgtcaaggggttggcccaccggaaattaaaa

SEQ ID NO: 94139 - DNA, 536 bp, Heterodera glycines
agaatggcaccgccaggggggcaaattgctttgtccagcgtggtcgccgtcccccgacaaacgtacatgaattgatcgcatgcagcggacgcaacgaacggaaagtcaccgggacaatcgtccacggtcaaaagcaaatcggtgcactccaaaacggatgagtgaggacggagagagcggagggcacgcgagaagaaagtggcgatggaagggtcattcatggccaaaaggtcgagcgaataatgcgcacgcaaaagttcacgcggagtgggaggggattagcaatgcgccaggcgaacggaggcgtaactcaatgatagaggcgaaatagtcatctcttagggcaccgatggaagaaaagggccaaaaaagaatggcaccgccaggggggcaaattgctttgtccagcgtggtcgccgtcccccgacaaacgtagcgaattgtcgcatgagcggacgcaacgaacggaaagtcaccgggacaatcgtccacggtcaaaagcaaatcggtgcagtccaaaacggatgagtgaggac

SEQ ID NO: 94140 - DNA, 475 bp, Heterodera glycines
tttagtttctgcagttacttatactccggtaagcaacggatttagtattaccgcatctccatctaccagcggacaaacctgttttacagttcatagtgccgaaagtggttgggcagcaatcggagttggaagtggttcaatgtcaggagcagatatctatttaggttggaagagctcgcaaggtgcaatatctgttggaaatttcgaaggttccgggcatgttcaaccttctgccaattcggttcaaaatgcccaacaagtcactttattggagacttcaccaagttgggccaaactttccttttcattctgccggcctacagcaatttcgtcaaatggcaaatcaatcacttcggaccagagctatatttatgcatcatctccggatcaaccatctggaagctctcctagcaatttgagattcagccaacatgcaggaacgtatggtagttttgccattgactttacgagcacg

SEQ ID NO: 94141 - DNA, 478 bp, Heterodera glycines
acgaactgaagacgaagcagtgatcggtggacagacaaaagtgccatggcaagcggatgttcagaacagcgaaagggaggagactgaaaagaatgccggagcaaatgttatcgaaggagtgccaaaaggattttttgacgacgaacaaatgaacagcagagtccgtgaaaccattgaaaaacagaagaaaattaccagtgaaattgaccgattttacaaagaggtcgaagaattggaggttcagcgagaagatgaacgcgaggaattgaatgaacagtcggcactccgttcggacatcgaaatgattgacgagcaaatcgaacggtggaaaatggttaacgaactcgagaagaaaaaggaaaacattgtcgagtcggtggcaaccaaatttgagcaaaagccgaactttgaccctgtggaaatgtctgatgacgatgattccgatattgttgattttgataggataagttggagaaca

SEQ ID NO: 94142 - DNA, 425 bp, Heterodera glycines
cgaagctttgatgaagttcaaactcggcactctcccactttttctgctatttagtgaatgtttggcggtgatacctttgagcttatcgaccgaacgatttttggacaactttgaaaagatggggaaacgaagcgaagtcgaatacgaccaattcatcaagggaaccggcattccgatgatcggctttggcaagagggacaccgagttcgacccggcgaccattccgatgatgggcttcgggaaaagagggacgggcaggccattccgaaacaatgccatggagacgaagttgcaactttggagaatggggctgctgggataaaatgaaaacactcatcagcccatccaaatgatcgaatgctttgaacataaataaattacaataaagttaaacaaaaaaatgctaataaaaaggaggtcaaaaa

SEQ ID NO: 94143 - DNA, 545 bp, Heterodera glycines
atatccaatccaacaattttaaatggcagctgcctccaaatccaaatatttcgagttggtctccggcttctacaaaagttatgcagcgatgcaaaattttcagagaactgctgccaaatgccgagttgtggacgtagacgaaggccgagtgaaagtcgaaatggaagtgcaggaagagcacacgaacacttttggcactttgcacggcggactgaccgcgacattggtggacattgtgacaacgactgctttgtgcgcgacacggcgcgggtcggccggtgtcagcgtggatttgactgtaaattatttggcaccagcaaaaattggttaggtgacaccattctgattgatgcatttgtgaaccggagaggccaaacaatgggtttcacaggggccgacatcttccggaagagtgacggcctaaaaatagccaccgcattgcacacgaaggcattcccaagagaagtctccgaagcccaggaaaagtgacggaatgaaaaaaatggtcaaaatgtcatttaacatcaattaaattgttaacgaga

SEQ ID NO: 94144 - DNA, 465 bp, Heterodera glycines
tttgccgtctttcctctgcccatttcatttggcccttcgcccgttcacttttggctcaattgcgtccgcccaatttcgcctctgtccagagtatggacacttcgccaaacgcacattggccaagcggaggaattggcacagctcagaacaatgggcgaacaaatgttttgtcaagagggaatggccacggaattgggcggaaaattggaactcacagtgcgaactgtgcaccaaagccgacaatacacctccagtgacattttacaatcgcttaaatacaacgcaatgatgcgacggattgggatcagtgagcaattgcagtgtcgcattgccaaagtgttggaggagttcgatcgggtgaagcgacagctgatcaaagtgcggaagggtcgaagcattgccaacgcataaaaaaggaaatttattttaaattttgctattaaataaataattttttttaaaaaa

SEQ ID NO: 94145 - DNA, 81 bp, Heterodera glycines
gcaaagacatggccaataccaaacaaattgtaagaaaaccaaaaaaaaaataaaacaaataaatgcgaaaaaaaaaaaaaa

SEQ ID NO: 94146 - DNA, 542 bp, Heterodera glycines
agatgataaatttctggcataattattgcatttttttatctcgaatagacatttactcatcttggctgaaatgcacgaccgtaacatttttaaactttgcccgcctaattatgaactccttgcaaggaaataccacgatttcagagtcaaatgttttattggggcgggtggaaaggtttgtgtgaatttcgcagatgctgagtccgtgcgtttgttgtcccaaattttgctgattgaatacttccaattgaatgtccaacttccaattggtcatctcgtgccgcgcgtccctcagcgattaaattacattttattagtggaggatttgatttgcaaaaataacttcgatacttccaacgtttgggggtttgacattggtactaatctctctctgactcggataacttaataatttctgggacgggtgcttcgtgcatatttccgcttttgggggcacgtctcaatggatggaattttgtggcgacagaagtggacgcgaattcattcgcttacgcagcacagaacgtcgaccgaaacaattt

SEQ ID NO: 94147 - DNA, 115 bp, Heterodera glycines
atcaaattcaatgaaaactattaaaaattaattgaataaatagtcctgtgccataatttttatatttttatttttgcaattttatcaacaaatttgtgaaaaaaaaaaaaaaaaa

SEQ ID NO: 94148 - DNA, 285 bp, Heterodera glycines
  unsure (1)..(285): unsure at all n locations
ttgtactgagttcggccaaaaaacgtgtaattcccccccccctcctctcacatttatttcattttccaccgcactttttattttattttatttgtcccccccttcactgaatgccattccttccttttcctttttttcccttttttcgcacttccgccgatttgtttcattcactgctcattcattcattgtcagctgaattgaatttgggcaacagaatgtgaataaacgaaccgattnnnnaaaaaaaaaaaaaaaaaaaaaaaaaaaaaaaaaaaaaaaaaa

SEQ ID NO: 94149 - DNA, 394 bp, Heterodera glycines
  unsure (1)..(394): unsure at all n locations
atggatgaaaacaaacgaacaaaacgagagccttcagaaggagcggagggccaagtcgagcgatacacatacggcaacggggaggaggcaccgatggcactgaatcttaacgagttggacaatcggcgcttggaagagagcttgacaaaaatcattgcgtacatgcggaaagtgcacttttattgtctgtattgcggatgcgcattttcttcttcagaagagattgattttgagtgtccgggaatcattcgcgatgatcatgaataatttattcgtacaataaaattttttaccaaaataaaagtagccaatttttttannnnnnaaaaaaaaaaaaaaaaaaaaaaaaaaaaaaagaaaaaaaaaaaaaaaaaaaaaaaaaaaaaaaaaaaaa

SEQ ID NO: 94150 - DNA, 394 bp, Heterodera glycines
tggttgggctttttccttttgtgcgatgcttctaaaaaagatggaaattggagccgcaaatgttcggcaacatttcgaattgtctctcaaaagagcggtgtggaggattttaagagagaatacaatgaaacagtttttaacaatgaagcgaagtcttgggggaactatttcatttcttttgcggaattaatggacccaagcaaagggttgtacaacaaagacgaggacaacgtcaccttggcaattgattttacatgtgaatagcgtaaacatttcgagaaggattgaaaagggaaaggaaggaaatcagcaggatgagaagagagtcttggagggcacaaaattttcttggtgcttaaattttatatttttttatgttttgtaaagtattttg

SEQ ID NO: 94151 - DNA, 497 bp, Heterodera glycines
aaggagaattacgtcgagatggaatcaaaggtcaaagcggtcttcgagcagctggagggcgatgccgagttgggaggcacctactatccgctccagggcatgacaagtgctggagcgtctcataaagggagtcaaggccatcgaatcgaaagttccgttttcgcgtgacgaccgtcttggctggctgactttctgtcctaccaacttgggaacgactgttcgcgcgagtgtgcatatccgacttccgaagatcagcgcaaaacccgacttcaagtccatctgcgacggcctgaaattgcaaatccgcgggattcacggcgaacattccgagagcgctggcggcgtttacgacatcagcaacaaggcccgtcttggtctcacggagttcgaagcggtgaagcagatgtacgacggagtgaaacacctgatcgaattggagaagaaagcataatgggaggaccgatctatgatgatgactttatattgcgtaatgtgga

SEQ ID NO: 94152 - DNA, 151 bp, Heterodera glycines
  unsure (1)..(151): unsure at all n locations
accaaggagaattacgtcgagatggaatcaaaggtcaaagcggtcttcgagcagctgaagggnnnnnnnncgatgncnncgagttgggaaaggcacctactgtccgctccagggcatgaccaaggacgtccaaaatcagctgattgccgac

SEQ ID NO: 94153 - DNA, 549 bp, Heterodera glycines
tgttgatttgagtaaattttgaaaagatgccgactcggacgtgagcacgtacgacctgttggacaacgttcagcagcaacagcagacgaaccatcgaccgcaaccgcaaataaaactgaacgaccaaatgccaaggcagaacagtccacaaccaaatctattcagcattgaggacccacgactgaagaaaatatcgaggcaattaattagtgaatgaacgatgtatttttaagctaattagctcaattaaattccaatcaattcatacactatattagcctgacttggtttaaatttaattttgcttttaggtctttgcctgaagatttccattttgagtacggtgctggtcaaattcagaggaaaaattcatttgttggttcagcacgactgtttaaaaagcagatgacccgacgggctcgcgtgctcaaaaggacactgaaccaactcagaggccgggaaatggccacaaaaattgatcagaaatcgcgcatcatttttccagccgcgtttttgctgatgaacgttttctactggtcatattatctg

SEQ ID NO: 94154 - DNA, 329 bp, Heterodera glycines
gttttccatgcttttgcctcgcagcaatggcttctcaattttgaattgattgaactgagaaagcctttccaacgacaaaatcgccttttgggcgttggaaggttggctctaattagcaacaacgaatcaattgagatggaaatggaactgatcagaccaattgaaaagcgaaaggcaccgatcggaggagagggaaaagggcgagggaaagtcggagaagaaacaatcggaaaagcacggattgagatcagtgcttatgatgatccattttatatctgatcacccacaatattaataacacagacgaataaatgttttttcaattttaa

SEQ ID NO: 94155 - DNA, 381 bp, Heterodera glycines
  unsure (1)..(381): unsure at all n locations
acaacaaattccttcccgaaaattcaaataatccattcaaaaaatggctttatcagcaattaaattgctttcactgtttctgctcgtcctttgtattggcatggccattgagcagacccaagcttattatggctggggtggttacggctacggctatccctacggattttatggcaaacggcaagccggctttggcccatccgcaaatgttggcacttttggtcgcaacgaaggcgaaaatgccaacggaggaggaggaggaccattttcactaaacaatttttgagagaaaaaggaaatacaaaagcaaaattgactatctcttttttgtgaacgaatttttcgtcaatacaataaaatttgaccnnnaaaaaaaaaaaa

SEQ ID NO: 94156 - DNA, 517 bp, Heterodera glycines
caaatggaagaggaggagcaaatggaagaggaggaggaagaagaggaggaggagccaaccccggagcaaatggcgcggtggcgtcgacggcgactgctgccgaacgaagtggtcagtgacatttgcgaatttatgagttttgccgagggaagccgactttacacgtcaagcggattatttgttgcgctgttggagccaaaacggaagttgtgcttggcaatgtttctgaaaagggtggaagaaactcggcagaaattggacaaaacaattgaggaagtgaatgaacgtcgtcgccatgtcgtacaactgacagaaaacattgggacaataaacgcgagattggctgaaatgggaaaccatttggccaatttggacacacaaattgtggtgaaccatttgaaattggacgaattacacaaacgaattgcggcgctgaaagaaccgatgggaaaattgagaagcgaaggaagggatgaaaagtgaaaaagagacgaacgaatggaagtgaacagaatgc

SEQ ID NO: 94157 - DNA, 456 bp, Heterodera glycines
tatacctcataagtcatttcacaaagtcggactagagtcaagctcaacagggtcttctttccccgctgattattccaagcccgttcccttggctgtgggttcgctagatagtagatagggacagtgggaatctcattgatccattcatgcgcgtcactaattagatgacgaggcatttggctaccttaagagagtcatagttactcccgccgtttacctgcgcttggttgaatttcttcactttgacattcaaagcactgggcagaaatcacattgtgtcaacaccttttcaggccatcacaatgctttgtttttattaaacagtcggattccccttgtccgcttcagttctgagttagctgttgattgcatagaggatctcccacgatccgaatctcgccagtcctgccgtccacagttgcccgcagccagcaagacagcttgaaacttcacgta

SEQ ID NO: 94158 - DNA, 477 bp, Heterodera glycines
tcattcattcgatcactttccaatgaaagaggcgttaataaaaattaacaatatttaatgtttaaacacaatgatttattctgattaaaaaatgaaaaaatgtaaaaaagagtctcctatcattgggcgatcatttgttcgcgcacccattcattaattaatccattcattcatcttggatcatccatccatccgtcatcactccgtcggatttgcctcgatgtgcttgaaattcgactggttccttcttccatcggccattggctgaccaacagaggagagggataaataaggacgaattgtttgttaccatttgtattgcaatcacaccaaatcaatgcacatttaattatgctaatgagctattataattaacaaatcgaagggatgaagttgtcaattctcacaacatttctgcttctgctgctgacaattgccttcgcttcgttcacagcgaccgatgggacagaaaacatt

SEQ ID NO: 94159 - DNA, 537 bp, Heterodera glycines
agtcctcaagtcaaagtcaatttgctgctccatgcgcatttaatgcgcattcagttgagcgccgagttgaccaaagacactgattggattgtgctgaaaacggtgcgccttgttcaggcgtgtgtcgatgtgctttcgagcaacggttggctttcgcccgccatccacgcgatggaattgtcccaaatgctcactcaagcgatgtattcaaacgagtcgtacatgaagcaattgccccactgcacgcctgaactgcttgaacgttgcaaggaaaaaaaagtcgaatccattttcgaactgcttgagctcaatgatgaggacagagacgagctgttgcaaatgaatcaggcacagcttgcggatattgccgtcttctgtaacaattacccgagcattgaagtccgacatgaaattaccacgcaaaagtcgacagtgggacaacccgtggaaattcggattgatttggagcgtgaaaacgatttcaacgggtttgcaccgtctgtaattgctccgttcttccctcgttatccttacccg

SEQ ID NO: 94160 - DNA, 515 bp, Heterodera glycines
ggatggtcgggcacaaacggtgggcacattttgaacggatgcggcaccgtttggacacattgcgggagcgtttcaactctttgcactgcaccgtggacagatggaacgcacgggtgccgggcctgaattcgtccggcaaaggcacaactgtccgttcaacccaatccatgctggccaaacatcccgaactgcacatcgatcggctggcccaagcgtggcccgaactgtttgccgactttgctgatgaccaaaatttggaggaacggctgcgaaatgaacatcgatatgccagccaggagaaacacgcgcgtgcgcaaattgaggaattgcgcaaggaaatgagcatggcgttgccgcacgatttggactaccaaagcatggaattcatgcggcccgaactccgcgacgcaatggacgagcgcaagccgaacagtttggcggcagcagccagagtccccggaatcaacgacacggctttgcattttctgcttcgttacgtcaaaatgcgtcgtcaa

SEQ ID NO: 94161 - DNA, 511 bp, Heterodera glycines
aatcatttataatttttacaaaaatgcttctttttctttcttttccacttctttttacgttggctttgcattgctatgctttcaatggggcgaatttggcaagcggagacattgagccactgctcaatgaattgcgagaaaacagcagcgaattgactaattcggctgttgaaaaaggatgaaattgaagaaaacacgacggaaatgaacgagtttggccaaattgtttcacaaatttgccacaaaaatggaatggaaaatggccaaatggttctgagaaagatatcgacccttggccaacaaattttggcacaattaaaaatggcagagaagaaaacacagaaattcgtttatggacaaaatcgtcagcaggaagcaggattgccattagccaaatttggcactgaaatgatggcatttgtcaagagattgcccgataaaatgccggaaaagagtgctttcgtcgataaattgaaagcaatggaaactaatttgtcattgccaagcgatg

SEQ ID NO: 94162 - DNA, 525 bp, Heterodera glycines
acaaataccaaggccgatttggggactctgacaagaaagtattgacgttgcttatcgaatcgtttccgatcatatgcgagctgtgaccgttgcattggcagatggaattggttttactaatcaacaacagaaaaagagctcgcgtaaaattaaggaattgtttaaacgcgccacgatttatggttctcaaatgctcggaatggaacggatgagcatgcatttgatggtgccggtcattgttgaacaattgggtgaaacatttcctgaaatggcgcagaacaagcacaaaatcgccgatgctgtcagaatagaagaagaacgactttggaagcagagagacgatggaatgcgtcatttggaagaattgtttcgtaaccatccgccgacgagcaaagtttttccgggcaaatttgcatttatcattgtgcaaaactatcggattgaattggaattggtcaagcgaaaggctgcgcagagaggtttaactgttgatgaggcggaataccaacgattgcacgcccaaaa

SEQ ID NO: 94163 - DNA, 447 bp, Heterodera glycines
attaattgcaattgactgcgtcattgagttcagcttgtcctcccgttaatggcttacaaagtgcaaaatgctgtcagcaatactcttcagcgtcgccaattctcagttttggcgtgtgtgtttcagtcgctgttcgttgttctgttcgcctcttttggcgagttccacaaccacgaggaggacaagcacaaccgtgtccatgccaactacccaatgttccaggacatccacacaatggtcatcatcggatttggcttcctcctttccttcttgaaaaagtacggcttctccgccttgtccattaaccttctcctcagctccttcttcccctctttcaatgccggctccatccctcactctacgcccgaaatgcggcaccgtgccacccgcgatttgcgcacgcaggcattcttccaacttgccgggttggcactgacttttctgatg

SEQ ID NO: 94164 - DNA, 21 bp, Heterodera glycines
aatgaaataaaaattgaaaaa

SEQ ID NO: 94165 - DNA, 222 bp, Heterodera glycines
tatttttttctcatctttgcacccttctttctctgccatcctacataattattgatcgtaatttttgagttaccgtctctctcctgtcggattatggtaatccctctccaatcaccggccttatctactctatatttgcagctttgagaatacctttctacttcatttctttccagttttatatgcttttttcaaatttattccaagtaaaaataatgatgt

SEQ ID NO: 94166 - DNA, 475 bp, Heterodera glycines
aaccgacggtgcgacaatatgtggaaagtcggccgagaatcgatgcccgtccgtggcaacaaattttcccggatatttccttcccacccgacttcgtcaaagagcgcgttaaactcgacgctctgttggcccgagacctcctctcccaaatgctcgtcatcgacccaaataatcggatcaacgtgcaagaagcactcaaacatccctatgttaatttgtggtacgatgcgggagaagtggatggtcccgctccaacaccatacattgagccgacacatggtgcgaatttgaacgtggagcagtggaaggagctcatttacaaccaaatcaaggacttcgaacggactcgtgacattttcggcatcggcgtaacaatgaatggggacggcgaaatgctggacgaaacctgagcacttttttgggcgacttccttaatatttccgttctgtcatgttctcaaattacacccttcagc

SEQ ID NO: 94167 - DNA, 421 bp, Heterodera glycines
acttttaaaatttcaccccgacaaatatggaaatgacgaaaaaatggtgaaattggcaaaacaagcattccaagtcgttgaaggtctatataaggaatgcaataaattgttgctgacaattcaatcaaaagcagcaaatcgtcttaataggtcattctcacaatcggcaacatcttttcaccgcacagcatatgagtccgccattaatgagcacaactcatccaactataaccatagaaaatccgtggatgccacctcctcctcctcatacttttcccagactgatatgaatgcaaaaaaatcttatcagagaagcaattcagcaattcccacgaatcaaaatataaatcgtatgtttacagctgatgaataaatgacaccatcaagaaaatctgtggatctaactcattctcatcagaca

SEQ ID NO: 94168 - DNA, 368 bp, Heterodera glycines
  unsure (1)..(368): unsure at all n locations
aaatcatcatcagcaacaaaaacagcaacaaattcatttaaattcccacaaataattaattaattaattattttattttctacaaaatgatttccgtccaattttcccccatcgttttgctgctgcttctgctcactttgctgcacctttcttcaccggccaatgctcgtccccaatggtattacgccgacccaatttcgatggccaacaatcgtggcactcttttcgacaatttgtggggacggaagtgatttggcactcaaaaagaccaacaaaacaattgtcaatttgtgcataatattgtgtaaagttttgtttaattttgttttaataaatgccattaattcaaaaannnnnnnnaagaaaaa

SEQ ID NO: 94169 - DNA, 504 bp, Heterodera glycines
ccgattgcattcgacagattgcgcagggccggggatggcaagcggcgaccgcaaatctcagaagccgatcaagaatgtcggaatcaaagtttgtggtcactaatcgccgttacacaatgtcttcttcgtccgggtctcctttatccaagccatccttctcatttttcttgaccacttcaaacaaatgtatcacaacacttcgacgcacattcaatcaaaatgccactggcgacattagctgtgacattttgcaacaacaacaggcgatccgtttcatggaaggccacgatctgttcctctgatcagtggtgctttatctccctaacattagtggcaaaagcgtgccctgatcatgtgaattttagccaaatttttaagaattgtagttgattatcacaaaatttagtctctgcattcaaaaatttttccgggttcgtccctgatattgtttgcatgcttctgaactgtctaacatatttattgtgatagagtttcactgttacg

SEQ ID NO: 94170 - DNA, 553 bp, Heterodera glycines
gatgaccatcatcaacgaccaatttgacttggaggagttcgaagcgttggacgacgattgtgtgcggattatcggctatttcgagccgggcagtgccgcgctgaaagaatttgaggaggcagccgaggaattcatgggagagatcgaattcttcgccgttgtgacctcatattgggccaaaaagaccgggctgaagcggatcggcgaagtccaacttcatcatccgtttgaagatgaccccatctacgcgccgtccagcgtggacacggaggaggaatttgagcaatgggtggagaaacatagggagccggtgatgcaaaagttgcagttggacaactatttcaatctgtggaaagacccggaagaggacgagaagttggtgttggtattctgtgatgaggagacgcgcgaaggccgagccatgttcaaactgatgaagaaattggcggacgaaaaccaagaacacgcgggcacgctggagatcgtgctaattgacccggacgaattcccactgatggtggacgtgtgggaggaaatgttcggcattgacatt

SEQ ID NO: 94171 - DNA, 538 bp, Heterodera glycines
ttttccctttcgatgtttcctctcttcacacaattgcctttcccttctctccttttatttttgtccaattttccatcttttgccatttcctttcggcttcaaggcgttggcgttaagggcgttttgttgtgtaacggcgcattcgcagcacacactaatttggccatttttgacgttgatcggaacccgggagattcggatgatttactggacaaaggccataccgatggcaaaggacgctttgttttggatgggaccacacgcgaattgagtcaaattgagcccgaattgcgaataatccacgactgtgcggacgatattaaaccgtgccatcgcctttttgtgatcaaagtgccacccgaattcattcatagcggcagagcccacaaaatattcgacattggcacattggacttggaaaagaaaagagaggacgagcaaaggacgtgccaaaacaatttttgatcaaccgattaataaattatgatggatggaagaacaaattctgaaatggcatgtcattacttcgttggcttat

SEQ ID NO: 94172 - DNA, 543 bp, Heterodera glycines
gtggataacatttgcgtttatggcaacccgcaaaaggactatctgatcgcacttgtggtcccaaatcgcaaaaacttgcaagcacttgctgaaaagaatgccgtcaatgagtcgagttgggaggcaatttgtgccaacaaagaaatggccaagcttctggaaaaggaactccaaaactttgtttcggggaaattgcgcagggaggaaatcccgaggaaagtcattatctgtgcggagccgtggactgccgactcgggaatgctgaccgaagcactgaagttgaagcgcaagaacatcgagagaaaattcgcggaggaaatccgacagctttatgaggggaaatgattgggttgttaattcccggaggctatttcgcttcaatttgatctcgaccatcaaatcaagcagtttcattgtgccgtaattgccatcatcatgagctttgtacccccaattatacgcaattaatttttgttcggttttcattggtcattcttctgtcagtgcgcgtttatttatttttgatattcgttagggcttttg

SEQ ID NO: 94173 - DNA, 450 bp, Heterodera glycines
atttgtcgcagaatgtcccaagtgcgtccaaattcttacctttcgcttgagggctttcccgaagggcaagggtactgtgcccgtacgcggacggtgcccgacatgacaggccatgtgcgaatgcccgaccgttataagccccactggggcaaataccgagacgtatgtcccaagagcaaaaggaaagcgtcgttaccccccggggcgacgtttccttcacaaaacgttcggtctgttgcagaatccgcaccggtccaatgcgtacttttacttctccccgctttactaccaatcattgcattccgaacgttatccgcccaccgccgatttggcaccgttcaaatacaacacggactgggcactgtacaagggaccatggttcgattacacggaatggttccactacaaaagatggtaccctccgttctacgacatgcacgcgtaccatgc

SEQ ID NO: 94174 - DNA, 458 bp, Heterodera glycines
tgaaaatccactcactgatgatttgcccaaccttttcctttattttcgcttttgccttggttcgcttgtgctttggaaataaagttatagaggtcgatgggtcaatacaagagaagttggtcttaaagaaagtgaacgtctctgaggattatgtacattattttaataagtttgggaagttgggacagaattatttcatcggaatcaatgaaaatgacgaggcgacgaaatcatatctcccgtacataaactgtcagaaatataataaaaatgactgcgacaagggaagaagtgatgggtgtatgaaaacggtcaaatgcgttgtgactgacccaatccgcggctcacagcaattggcttgcatggctaattattacctacgcgacgcatcgccaaacaaaagcttttctgagggcgacatcattgagccctctctgatggactgctggcagcacgag

SEQ ID NO: 94175 - DNA, 197 bp, Heterodera glycines
ttcattcttcctattgtgccgtcgtccttcctttctttatgatgtgctctgtagaaacagatttacagattactgtagcttaccatttcatttcccttttgccttccctttccctttgctcaaatttctctcatccgttcacaatgcttaaaattcaaatttggcgtttcgtccacacaaataaagcgataatttac

SEQ ID NO: 94176 - DNA, 521 bp, Heterodera glycines
ctgaatttatttttggattcaccggtgatgactcatcaaaatacaacggtccctataaacttgaattgtttaacggtttggaaacaattgaccagtgcatttcgtccgataattcttctgtcgtcttttcggacacttgcaaagcacagtatccgcctgaggttgtcgagtcagcgatagcgttgctgcacattgtaaatgaacagagaaactcatcatcaaaagccaagcagcagcagcatcatcatgcgcaagcactgttttccgtgttggccgcctatttgtgcaatgttgggaagggagaaacagaaacaaatgcttgcagggagaagcatttggacaaagcgaagcgaatgtacgaaaaaatggggaacaatgaggtaaccgaaaagcagataatggagatgcaaaaagcgcgccaaacagtgttcgatacgatcatcgcttacaatgacgccaaaacgggcgaggcggtgcacgaggcgattgtggcggtccgtaaggcagtcagcgcaagtccg

SEQ ID NO: 94177 - DNA, 144 bp, Heterodera glycines
ttctgtatcaaacgaatattacagatgattgaaaaagaatcattcatttctccacggattcattttttcagagttgtcttttaatttaaaaataattaatttatcactaaataaaggttgttttttaaaaaaaaaaaaaaaaaa

SEQ ID NO: 94178 - DNA, 541 bp, Heterodera glycines
  unsure (1)..(541): unsure at all n locations
caaaaaaaaattaaatttttaaaaattaataaaagagaaatgccaattacatatgtgaagccttacaaattgatgaacagctgtcgtttttccacaaccagtctcgccaaccaacagcacgggctcgtcacggcgccatgcttctgcgcataaaatgagcatgcgacgcatttgcgcggtcaacacaatggcggaggacagctgaatttaaacaaaaatgctgatcattttggcgccaataaatcgaatgagccaaattgaggaaattcagtgattaagtgtgtgtcagggacattgctcatctactgactcgtattctcattttttgtaggcgcctcatttcgtgtctcgtattttagtttcatatttttttttttgaaatagaaaggccaccaaattgggcgagttggtaagaaaatagtaaatttaaaagaaatctttgccaacatactccgggcagtgcagcggctgatggcatgtacggtgagtcgacaccgaacgntcgggggatgtcaatttgtcggnccaccaagcgttgcaa

SEQ ID NO: 94179 - DNA, 489 bp, Heterodera glycines
aaaaatttaaaaataaagaaaattcaagagaatttatgcattttatttgatttttctaacttagaggaaaaaatttcccagaaattctagaattttcgttaaagctatttttctctcaaatttcatctagaatttgcaaaaaaaatttcccggcagcgcctatcgcactgccggaccctctgttcccgaaaagtttttgaaaaaggcgcgccgcaaaaaacaattaaaaataaattaattaaatttatggattgaacccattaacaatttatccggcgaactctctctaaccctctggcccttaaaaatcttgatcaacccattaaccccttttcacgtataccgtcagcctataaaaaaatcttttttaaaatggccatgtatgtttagttttttggagattttcaaaacattttttgccgcttacaagggaaccttgcgaactgttagtcggaaaatgcatatatgttatataccattggatagagc

SEQ ID NO: 94180 - DNA, 70 bp, Heterodera glycines
tccaattttgtcatttgttctttttaaatattatgttttgtctgataatgagaataaaacttgacaacac

SEQ ID NO: 94181 - DNA, 545 bp, Heterodera glycines
gggcttctgccacttcttacgtgtcaattgtttcccccactcatttgaaaggcacgagccaacacattttggcacttctatttaatggacttggccgtggcgttggtccaatcattggtggctttttcatccggcaatacggcactcgcgcacttttcctttccatcgcttttctcactttgtgtgttttggccgtttattacgcggttaatttgaaactgaaaaacgaatccgtcaaatattcgggctttgacgcgttcgacgaagacaccgccgggggcgaaactttggcccctcaaggccttccgatgcatcgctttggcggcaataagattacggaggcattcaatcagacggcagtgacaaatcagaattatggtgccattgaagcgaacagcgaggaaaaacaaagggacgacgcttatgaccgatatgtgacgggacaatgaaaacggaaaaggaagaggaaaagcaatagccaaacgaaaaatggccaaaatacgcgcataaatatgcaaataaagtgatgaaatatgcacaaaaaa

SEQ ID NO: 94182 - DNA, 517 bp, Heterodera glycines
cccaaattggttcagtctcgcgacaggactttacgtggaaagtcacaatttcaccagcgattttatgtttgcgccaaattcttcgatgcttttccaacgggacattggtgccaacgactcgaatcccttttggtggactggcaatcgggcaccattttggtacgcggttggaaaggcgggcatcgacgtgcactgctattggttccccgcttgtcataaagcccacgtcgatttgattgtccaagtgccgcaaaatcgacggcattctttcaacaattccaatagcatcgatctgctgccacatttgccaaccattgtcaaacatatcaaaaaatatcagccctacagacaacagcttgtccttctacgatacaatgggttggacaaggcacttcgctcgggcggtcagtcgtcaagtcaaacacgacaagcactttccacggtcgacaattacctgcgaaagatccaagaggagttggacacgatggaccttcaccagtcgaccaatttggtggtg

SEQ ID NO: 94183 - DNA, 511 bp, Heterodera glycines
gaatttttattttaaatattttaatttttattttaaataaaatatttaaatttaagaaaaaccaattcttttaaatgaatcaaattaaagtagatcaggaagaaagcaccaaactttgggattggccattgcaagtaaaataataattaaaatatttaaattaaacgcagaaaaataatttttaaaaatttagtcccatgacgaacttgtgtcaatctacgatggtcgtgacagatgggaagttggcttggacaccggatttttcacgcccaacgaaatcgaagcatgctaattaattgaataattagtccaattataatgcttaattatctaattacccaatgtatatgtagatagtcaaaaggtccttaatttattagtcgaattgaattaattatttaactcgctaaataatgaattaatgttgaggtgaatgccaagtgcaatgtgttgacgatcctcgaacggcacttggttcacatcgtagctgcagttgtacaattgttgatac

SEQ ID NO: 94184 - DNA, 127 bp, Heterodera glycines
aaaaaaaagtggcggcgccagcgttggcccatcaaccgaatgaccgattgaagcagccgatggaagggacgaatgatctatttattcattcattcttttttgtgttttattattgtgctgttataaa

SEQ ID NO: 94185 - DNA, 167 bp, Heterodera glycines
  unsure (1)..(167): unsure at all n locations
aatgctgagaaaggcgcaaatggcgacggacaaacggccaattcggaaatatttaattgttttttttcactgtgcatttttttgtttgtttatttcgttcgaattgcacaattaaatttgactctgttcnaaaaaaaaaaaaaaaaaaaaaaaaaaaaaaaaaaaaa

SEQ ID NO: 94186 - DNA, 292 bp, Heterodera glycines
  unsure (1)..(292): unsure at all n locations
cgaaaccaggagatcaccttccaaatgtgcaagtggatggtgatcctgtccgtgttcttcactgcgcacaactttgccatgatgttgtacgggaccaaggagaagccgttgtggccctacacgctgttcatgaagaagagtgacggagcataaagaagctctctcgacgacacatattgtttttgtgtgtattaggtgtaaacaaaattttcatgttttatggacggaaaatgttagtttggatgtttatgttccatggataaagaaagctgggctnnnaaaaaaaaaaaaa

SEQ ID NO: 94187 - DNA, 270 bp, Heterodera glycines
acaacattgacaaagtagcgcttcttttggagctgtttgagcggcgacacttgcccctgacaaacgaagactttttccataatcctgcaattttgcgggattttggtccgaccggaaaatgtgctgtgcgagcatcgccgttttactacccacttgcaaattatacggatacgtgtacggcttcgtactatttttcgggttcattcatccatgcatgtgaatcgtacattgtttatttttttgtgtgatgaatggcacattttggaaaaa

SEQ ID NO: 94188 - DNA, 406 bp, Heterodera glycines
  unsure (1)..(406): unsure at all n locations
gaacgccggaggggcgaattggattggaaattgctgtcccatgccataaatcacacgcaaatgtttgagcaactgctcgccaaacgctttccgagcaaaaacaattacaatttcgacagggtcatttggtccgttttcgactctcacatggatatttttgtgcaagaacagcgcggaaaattgctgagatttttggacgaatgcgcacttcgaattcgcagcggcgaggaaaagccgcagagggaaacgatgtgcgagccgtcattgcaggcgatgaacaaaataaattggtcaaatgtcgaccaagtgggcgatgagtcaccgtatgtttcgacgatccgaaaaaatctgagggcatccgttcccctaatacgcgactacnttttccgaacgtcgaaaatatttc

SEQ ID NO: 94189 - DNA, 523 bp, Heterodera glycines
gttctgtcattgctctgctgattttcggcataatttgcctttgttttggcattttctctctcatttttgcgcccaaattggtcaacaaagcgatcagagaaaatgtttttgttggtcggtttccaaacggaagtgataatttcgcaatggaacagtacagagacccgaaatacgacgtaaagtgagtgaaaaagtaaaggaaacaacggcagaagagaagtctaaccaccggcggcggtggtttgttcatctaccgtacccccttccccgccccaaacgaccgtacccacgcgccaaattaacacatttattattattcattaattaccatttgctccattaaatcaacagccactttaggatgcagatttgggtcttttctgtgcaaaaccctaacgaaattgtgaataaaggagaaaaagtgaatgtgacggagttgggtccgttcacttacgatattcgaatgcacaaaaacaatgtgaagtttggctccaatgactcgcgactgttctaccgaaatgtc

SEQ ID NO: 94190 - DNA, 500 bp, Heterodera glycines
tttttgtaaataaacaggcgaagcacttcgtctgctcatcgctgagccggaacgaattgaacggttgcactcaaatgcaattgtgttgcatcagctgatccggaatgctctcgagggcacaaaatttggactgatcagtattgactgtgccccgcagaaacacatcgaatatcgaacgaaggacggggagggaagggaaattgtggagcagaaattggaccgaatggtcaacaggcttctcgaccatggcattttggtgactcgcgcccgataccttctcgacaaagaaaaattctgtcccaaactgacaataaaagtttcgtgccgtgccgatttgaatggcgacgaattggaaaatttgggacagaaactgcgtctgacttttgccactttggaattttgacggaatccatcactttttgaaatacatatgctcaattgtttgtgataataaattcgataattgaaattagtatacaaaaataaacgataaaaagtta

SEQ ID NO: 94191 - DNA, 515 bp, Heterodera glycines
cgtccgttgccttttcttttgtctcgtcgcttttgtggcgctcagtggccaaaaatccgacgacaaattaattaattaaagtgatcggtggcggcgaaccaagcggggctttttctttacacctctaacactctgtgcagcagcagatcactcacggcttaccacaaaatgaattaatttgctaattgccagccgatgacttttccttgccccccgcgctgctccccccgccactcggctgatcgtcgctgtttttgttcttcaagaatttgagcattgtgcgctcaaatttgttggatgaattggtttagcagtgatcaaaatgccagccgatgaagtcgaaagttgcggcaaaagtgcgcaaatttgcctccctctttctttctttctctatcgccgcaccgtttcgcttagttttgtcaaaggatggggcgaagggtacggacggaggacaatcaaagagacgccatgttggattgaggtgcaacttcaccgacctcttcaacttctcaatg

SEQ ID NO: 94192 - DNA, 539 bp, Heterodera glycines
tgtatccgcatttgaaccgtggtgatctgtacaccaaacagggcattttgtccatgttacagtcaggcatcaaagtggaaccactgttgttgaaggattggagtgccgtcatggattgggcaccacatccagaacataagggcgaatatttgcagttgtggggcaaccacaatttggacagggcggtcgcccaatcgcaagcattcatcaacgaatgccggcgtgcccttggcctgtcaatgaaattttgggtggcagaaatccacgagattgtcaaaaataccattcttcattactctgaaattcgtggcaaatgcaatgagttgaacgatgcactcaagcagttagacctcacggctacaccacacaaaattcgcacaactcccagcaaacggcgttcattcatcgacatgcacgaattgcgtgacaagctgttaatgcgcggcggcacttcaacagagggcggcgcgggcaaaggcgctaaaaatggcagttccgtttccgttgcaagcgaagaagctcatgcgcaagcgatggtc

SEQ ID NO: 94193 - DNA, 519 bp, Heterodera glycines
gggcggtttctccatgaaaaagtcgatgattgcgcgtaaaatgccccagcaggtgtccaggttcagattcatgttgctggccgattcgtttggacgaaactgctgggtgccgaggatgatgtgttgagtgctattgcgtgagttgacgcggctcacataactgatgattttgggtggtaaaagcaaaacaaaacatcaaaacgacgcaccccaatttaatgtaatccgaaccgaccaaaatcgcctgcagcgtccacttggccaatttaaaagaattgttacgcatttccgtcgccagcactgcccccttttgaatgtccagctttgaacgccaatcgacaccaccgcttagctgtttaaattaatgtctgttccacaattgaatcttccccatgtactcaccgaactgtcccattcattgaatgccttcacggtcagtttttgtacttctttcgtgctggtccccgccagcatcaccgcgtcgtgttccgttcgtgccaccaatgttatcgcagttcc

SEQ ID NO: 94194 - DNA, 65 bp, Heterodera glycines
  unsure (1)..(65): unsure at all n locations
atgctatttggtttctttgtctgaagtaaatgtttttctgttaaaaaaaaaaaaaaagtactctn

SEQ ID NO: 94195 - DNA, 286 bp, Heterodera glycines
  unsure (1)..(286): unsure at all n locations
caaaaggtggtggttatttgacgaggtcatttaaccatggttatttgacctggtcatttgaccacgaaatacgagaaaaacggtagcaaaagaagatagtaaattttctgctggagcaaccaccagtcaccgttttttaaccatgaactaacttcttttgctataccaccaactttctaccacgaaatttttatttacatatatatattttgcttcttttcatggaaaacaagaagtcaataagttgtttanaaaaaaaaaaaaaaaaaaaaaaaaaaaaaaaaaa

SEQ ID NO: 94196 - DNA, 351 bp, Heterodera glycines
gggaggaagagggaaaagagggctcttgacagagcggtccgcgagaccatcgacgaagcgacagagaaggccaaagagttccttgaagaaaattggagcgcatttgagaaattcgctattgtgttgcacgagcgcaaaacaataagtgcggatgaagcagaggagtaattttttcccccataaattttataaaaaaatagtaaaaaaaaacaaatttaggatcttggcctattatctctagtcaataagaatttgtagaaagtaataaataggcaggtctctttgttgtaaattattgttttgcagagaagtgtttgtttgtgaataaaaagtggctatttaaaaaaaaaa

SEQ ID NO: 94197 - DNA, 162 bp, Heterodera glycines
tttgccaaattatttaaatatgtccctcctccactttttcgccgctctgctggtgttctgcgccatgttcagcttggacttggcacaaattgccggcactgttggtgtttcgcccggtggcgtcgctgctggccccgcggtcgttcagcctgccgccgctgg

SEQ ID NO: 94198 - DNA, 524 bp, Heterodera glycines
acaaattttcagaatgtcaaaaagtttcataaatattattattcaatttttatttctgctatgcttattttataattttgctaaatcttttggcgaaaaatccgcaccaaaccctcagcaaagtcctaatttccaacaaattccatccgatgtcttgtcagttttgtcaaaagatgttgcggcacaactggaagcaatacaaaacaatggcacattgactgtgcacgaaaaggcggaacaaattgaccaaattatgactgagcagcccagcgaagtgttggacaaaattccggacccgcccaattttggcactcttccaatgaacgtgaaaaatcacataaagcaaatactccgtcaaaaaggaaagtcgttggatgaaaaagaaactgaattggaagaatatgttcaatcattgcaagaggacaagccaaaagaagcatgaacataacaaaattgccccctacggcagtttccatttgttgaatgtgaatataagaccatccaaataaataatatatatttaa

SEQ ID NO: 94199 - DNA, 439 bp, Heterodera glycines
tggacacggcacatttggaggacacttttctgatgagcggtgtgcttggccacgaacgcgagtcggacccattgagccgaactcaaccggtggaagagggaaaaggcgagagggaggaggagcgtaagctgaactccacctacccgttgaccaccccgcacaacaaggtatatctgacggaacctaaccggacacagaccattgaagatgggccgactctgctcaacttgacgcaccccgtggccattggggggacggcaggcgaagaaccgccgaaacagcagcagcacaaacagtcgcaagaacacactgacgaggagcagagagacatctctgcccttgccggcgttgttccataccccgttacggatgattcttccctgctgctgttggacccggcattggccaccgcctgtccgctgatcaacattatcgattc

SEQ ID NO: 94200 - DNA, 285 bp, Heterodera glycines
tttacacactcgtcgcactcattcttttcgtcgtagcatttgcgctgatgctatggaatttgttggagacccattcgtactatggccagaccaaaataccggcgacggtgtttattggcatccaaatggccctcttcatttgggactaccgaattctgcacggccaagcctaaacaaagcgaagaaaagatcaaattaaatgataattaatagaatgaatgatcgttgaaattatgccaaaattcctttttattttatttgaaattcgcataaaatttaaaggca

SEQ ID NO: 94201 - DNA, 296 bp, Heterodera glycines
tttggccaacaaatttactcagcccgtccgtcgagaattgcttcgccggttcactgctcttgctagtcgcaaatgtttttctacggaaaggagaaactcgccatgtccattgtctgatacgtactctctgtcagatcacgaagccgaatttaacccagaaaaggattaaacatattgatatgttcttttgccatgtttttgatttttgtccgtttctcctccccaattttctctgaagctttagacaattttgtcagtgcaactttttatgagaattttagttaatatgtaaatga

SEQ ID NO: 94202 - DNA, 148 bp, Heterodera glycines
gaaaaccgcaaattttggcttttttgtggataaatctgttaacaaattgcattaaaaaagcaaaaattgtccgggcggcgcctatcggcaccgccggcccccctttcatcgtaaagtgaattaaaaaaaaagttgaaaaaaaaaaaaa

SEQ ID NO: 94203 - DNA, 88 bp, Heterodera glycines
aggcgatgatcattcatcagcggaattgtctttggcaatctaattttgaaaaaaaaagatctcaaaatcttaaaaaaaaaaaaaaaaa

SEQ ID NO: 94204 - DNA, 550 bp, Heterodera glycines
acaaaacggcggcatcggaaaccgtttgaagcagaccattttcgggagtgccatccgtcgtcgggtgccaacctaattagaccaaaaaacgagagatgccgaccggaccaccgatctgatcaaccagccagtgatcgatgatcagctgccgaggtgccgcaatgatcgacgatcaaacaaacaatcagtcatcaattaattaattaattgcccttccccaattgattgccatccattcatgattattttattaaaattgcataataagcgcccaaaaaatctgccaaagccaaattttgttgctccccctttttgcactcatcaaaactgctgatcaattagtcatttcgttatcattatcaccactatcattagcatcatcgtcacaaattatgtgattgtttttgcatacagtatctgacgacgatggtgaatgtcgtgcattttgtacagtatccctccaaaaaaccaaaaacaattttttatattaaaatatattttgtatggaatatgcctatgtattgtaacaatatcatcatctgctcaactc

SEQ ID NO: 94205 - DNA, 81 bp, Heterodera glycines
taattgccatataaaattcaattaaattatttttattttgcaccaattttttgtttgccgtttttcgattggaaagaaggc

SEQ ID NO: 94206 - DNA, 274 bp, Heterodera glycines
  unsure (1)..(274): unsure at all n locations
gacccaacgaccagaatttgtctgagagagagagagaggtgccgaacccgaacaaaggatgccatggcgaatggacgaattgtgccaatgccaaatgttatcggatttattaactttaaatatttttttaacgacggtcgatttatgctgttctgtttatctttatttactcatttattgctgttatcaattattttcttatttgatttaatattacgttttctttaanannnaaaaaaaaaaaaaaaaaaaaaaaaaaaaaaaaaaaaaaaaa

SEQ ID NO: 94207 - DNA, 316 bp, Heterodera glycines; identical to SEQ ID NO: 74738

SEQ ID NO: 94208 - DNA, 59 bp, Heterodera glycines
ttgtgttttgatcgctgtttgtaatttggacttttattactgataacgaacgcgggttg

SEQ ID NO: 94209 - DNA, 464 bp, Heterodera glycines
cgcgacgccaacgatgagaacgcgttactgtgcgcagtccgatcacgcaatttggtcgtgattagcatggtacgccaagcaggcggccaattagtggttccacggcctcgcattggtgtcgaactttgtctgtccgccggcaccggcggcttggacgcactgaaggcatggcacgccgccggtgccaatctgtccaccccggactatgagggacggactgcgctgcatattgctgcttctcgtggctttgatgaattgtgcttttggctttgtgagaatggcgccgatccgcttctgcgtgatcgtctcggacggagcccagccgaagatgcccgtgccaacattgatgagcatatggtccagggattgttggcaccgaatttccagcgcatttttgcctttttcggcacgccatggaagggcacatgaaacaaaggatcagaccaacacaaaccttgactttt

SEQ ID NO: 94210 - DNA, 553 bp, Heterodera glycines
aacacgaaactcaattctgtcgagaaattgctcagcaaaactgaggtggccaagtcgaagatggaacagttgtgccgcgagctgaacaaagcgcacagagaggagaaagagcagaaccaactgaggtgcaagcaaatgcaaaatgtgcacgcggacactgtcgaatcattcaaaaagtcactggcggagattcaactttcggtggaggagaagcgggagcacaacaaaagggtggcggatgtggagaaactgtccgaacatctgaaccaactgacttccgactacgaaactcgtttagcagagctgaaaaaaattgtatgatgaaagagaatcgaatttgggcgtaattgccaaaaccaaagacagcgaattggacacactccatttgcaaatcggggaaatgcaaaagcgcgtgcagcaagtttttgcggagaatgtcgaactgaagaaagagcctttgtcgagtgaagatcgtgtgaagaaatcgatcgaatcggagattggaatgcgcaaatttgtggacgattattcggagaaatattccgaactcacc

SEQ ID NO: 94211 - DNA, 417 bp, Heterodera glycines
ccaaaagaagcagttgaagaagaacacggagaagaggaagggcacaataacattcattttatgtacagtatcactctggaccattaccgtacccgtccccttgttacagtgtccactcatagcgtccaaaaaccgtcgtttgtttctttcttcccatttcagtgccgtcctttgtttttgattcgttcattcgcctccatttctcttccaaagcacaaatctcgtcacaatccatcccatccgaattcatttcttttcctttttcccctcattttctccttaattcccctcccccctttaaatgccttaaccaacccaaaagatttccaaattttgttccattcaaactttaaatttgctaataataaatgcataacaattaaaaaaaaaaaaaaagaaaaaaaaaaaaaaaaaaaa

SEQ ID NO: 94212 - DNA, 85 bp, Heterodera glycines
  unsure (1)..(85): unsure at all n locations
attattgtatttgcttnaggcgtaaaatgtagatataataaatttgaactgctaaaaaaaaaaacaaaaaaaaaaaaaaaaaaaa

SEQ ID NO: 94213 - DNA, 541 bp, Heterodera glycines
taattaattaactaattaaattattaaaggctcattaaaaatatttatgaaatttacagaaaagacaaaaaagtttaaattattggtataattttgtatagaaattttaaaaaaaaaatactgatcagtaaaaagaacccttatcatttaaaagtatgtgtcttaaacgaggttaataaattatgtataccccatctaaatacggactgattaattggccatatcaaaaattggttcataaaaaccgaaattaattaattaaaatttgtgactccacaaaaaaatgatcaaaagaaaaatatgaaccgtatagcaaaaaataatactaattagaaaatgtgataatgatccggtcatcagccctgcttttaattagcgacaaaataattcgattcattagtttaattgactacccaccaaaatactgttcagtggccagatcaaggctgatcggctccgacacaaccgacgatgttgcggcggatgatgagcaacaatttggggacggcacccgttggggcggtggtggtggcatcggtgg

SEQ ID NO: 94214 - DNA, 536 bp, Heterodera glycines
atttattcgtaaaattcaacaaaaaatgcttgcttgaatttttcttatggttttgctgtttttacgctctttctgatcactgatcactctgtccgatgaccgaagctgttacaacctccctatgataaacccgttgcattgcatggcctgtcaatgtactgtagccaatggataccgttcgccacataacaattcgcccacactagattattttcttttgaacccctgacgagaattcgggcaaaaagtcgaaagttcaaaggatgcgcgattacatgccgaggggaatccatttacaccgtatttgtcacagttccatgcgttttaatattgtttttatacaacaaaaatggacaatgggcgctgtgaaattgagtgtttcgaaagccttcgcggccaatgaaattgtgccggacgttgtgtccaaagcaccagaaaagcttgtaaccgttgaatacgctgtcggagtgtgcgcgaagctaggcaacgaattggcacccaaaaatttaaccaatgcaccgaagctttcgtgggac

SEQ ID NO: 94215 - DNA, 515 bp, Heterodera glycines
catttcacgttcgggcatttcaatgattgcttccggaattgccaccgaactgttggcttctgtccttcaacacgaattgggcgcagaagcgcccgcccttttggccgaagtggacgaaaacgcgagtcaattgggcgccactccgcaccaaatccgcggttttatgtcacgctttcatctgatgatgcccaccgtacgacggtacgaccgatgcacagcgtgtgggcatacggtcaaacagttctaccggactgagggatttgaatttttgaaccgaatcttccaatgtcctgccgagttggagcaaatcaccggattagccgagttacagagacaagcggacgcatttcaatcggaagttatcgaaatggacgacagtgaaagcatttaaacaagtgcattaacgggtggccatcattcacaatttgctttggaacaattttggcgacgcaaaattttatttttatattttaattcattttaaaattgattactaaattttaattgactttgtg

SEQ ID NO: 94216 - DNA, 134 bp, Heterodera glycines
caacgcatttggcttcgctccctgcacatttatgtttcattcatttccctcggtttatcccataattgcgcttacatcatttttggatgataaatatgactaaagaaaaaaaaaaaaaaaaaaaaaaaaaaaaa

SEQ ID NO: 94217 - DNA, 444 bp, Heterodera glycines
gactgagtaattccatcgaagtttggtcttcctctccaagtcaacagaacaacaacggttcacccgctgaaactgttggagaagcaccatcacttcggcaaatgcaacttcaaaaaaacatcaaaatgcttgccctacacacactccatgatgtggtcagtgttggccccgatttgcccagtgttgagcaatatgagcagaaaaagttggacaaccagcagagggcgatggtggcgatgagacggcacagcggcgctgtcatggcaccaacaaacaatcaacagcaacaacagcatggcacacctacagcagaccatgacgatttggtgagaaatgctcaaaatcccttcatcaaaacggcgtcaattttaacgcggaaaatggcacgggacaggccctcctcctcctcattctccgaatttttgtttggcgatgaaactgctt

SEQ ID NO: 94218 - DNA, 426 bp, Heterodera glycines
ctacatcagaaatttagtttatgacatccaatttttcatcattttctacgcggattggatacgaatttgtggtcaaaggcattaatcgcgagtggtttcgacataaattgccaactgacgacattcccatcccacccaaagagatcccggaccaagactcggaactcaactatttgttggaggcagacgaaagccgttggcaggaccaaagaccgcccaatttctgtttcgaacaccgacacgcgtgaccgatggatttacggcgacaatttattcttcagcgatgggatcttttcctgacgacaattgcaacggaagagtcaaatcaaacggaaacgtcccccgtcccttttccaattgactccgccactttgaccgcttaaaagaagaaaaaatgcgtgcccaattggcccagtcgcttctcga

SEQ ID NO: 94219 - DNA, 559 bp, Heterodera glycines
attcctgatgcactctttgaaattggcatttttatgccaactttgcgttttgctgattggcaccgcttctgcggcattctataagagtgccgatgtcagctgggtatcacaacaggaaaagaatggacaatccttctacgacagttcgggcacaaaaaaggatccatttgtgttgttgaaatcatatggagtcaacgctgtccgattgcgcgtctgggtgaacccgtccggtggatggtgtgacggtgccgatacattgcacaaggcccagcgcgccaaggcccagggtatggccataatgatcgatttccactacagcgactcgtgggccgacccgggccaacagaacattccagcggcatggaaaagccattcattggcacaacttaacactgatgtgtacgagcacacttatggcatattaaactacttgaaaagcaatggcatttcagtggcatgggttcaggttggtaatgagatcaactccggcatgatgtggcccagcgggaaagtgacaaactcaaattttgccaaactggcaagtctgatcaacaacgga

SEQ ID NO: 94220 - DNA, 455 bp, Heterodera glycines
gctggagtattccaaacggaatcgtttcaattcatcgtccacattttgactgtccttttcagcatactgtacaaatttgcttacagtagtctgtccaacgctaacccattcaccgctcagcagctcatgaatgagagcaatgacgccaagatgtgagactaacacaacgtgtttggcatttttgtttgtccttagaatatgacgaagtgtttgctcaacaacagaattgcattcattttccagttcttttgctttttctttttccaatttgattgctttttcattttccagttcttttggctgttttaataaaggtcgtcccatgattccaagctcaagcaaccttttgttatatacagacgaatatttcgagttggaaaatttaaaaagttgatacgaatcattttgatgcaaatattcaattttttgttgacagggtttatagaactcagtta

SEQ ID NO: 94221 - DNA, 175 bp, Heterodera glycines
gaacgtaaaaaatggattcattgctttgacaatgtgaatgccatcattttcatctcatccctgtcggaatatgatcaaacattgcgggaagacaattgcacaaatcggtcaaattaaataataataaaaataattgttttcaattttatggccaactaataaaaaattttgatct

SEQ ID NO: 94222 - DNA, 494 bp, Heterodera glycines
tttatcataaaattcttgaataatcttgggatttataattgattttgttggggatctcatcaaaggattggcggaaaaagagaatcgtgagctcttaaagaatttctttcctatccacgtttttgtggatgttaaagaaatcagtgtccacctcggcgaattgaaagtcaatatcttattccgcaaaattgccgctttgtttggttcgcctgcggcttcttttgaccaaatttgtgttgatgggtcgccaaagcgaattcagaaagaagagaagcaacttgcactgttgcttttgtattcatcccacaactttggcaaattgaaattatttaaatgcgatgactgactgatgcgtagaaatatttagatattaatcactcatatatttggataattttcatttttaactgactcatatatttggatatttttattttttaactcatttaattgtttcattaaattgtagttcatattgttaaatttatttttta

SEQ ID NO: 94223 - DNA, 507 bp, Heterodera glycines
gaaaattcccattcccaaccccgaattggcaaataccgtctatgttgttgagcaaaaatcgcatgcaaatgtcgaaaaggtagggcacaatttgcacatcgcccgtcgtttttcgccttcccgcataaacgcgtttcttttctttgggcgctttgaacatgtttatgttgaggtcggtgggcatggatatttgctgattgtttggttggggttgggctaacaataagttagcattcattacttgtttccatttaaccaaatttagaaatttaccaatggacggtccaaagttcgatggattcttcaacgaatccaacaacgaattttgaatgctttctgcggagggcatcgatacctttttgggctttttcggtaaacttttttgtactttgtcagcagcggcaagttgggaggcgaaggcgtcgattggctgctcatcctcgaaagtttcgcagtcatcgtctgaaccggactaatcttatcaaattatatggtttatacattccc

SEQ ID NO: 94224 - DNA, 224 bp, Heterodera glycines
  unsure (1)..(224): unsure at all n locations
gatgacaaattttttgctcgtctgtggcctcaatgaacgcagtgtccgtttgggtgcgctgttttttgatgtcttttggcagttcgtcaccgatttttgttccacgaccttcgcctttttggtgacccattgccttatcattatgttgaaattgtgtcacctatttattgtttcatttctttgatgtcacaaaaacccgaatgaatgctcaatgatannaaaaa

SEQ ID NO: 94225 - DNA, 533 bp, Heterodera glycines
aagttgaacgcatcgacgaaacgggcaatgttttgctgtttattgtggcaaataaatgcgacctgaaagaaatgcgaatggtcagcgaagaagaaggacggcaatttgcggaaaagcaaaacgcacattattgtgaaacatcggcgctcagtggcaaaggcattgaaacggttatgtcctcaattgcggaatgccttttacaagaacagcagcgactgctgaaaagtgccgagttgggccattcctccttcgacttggccacttcttcggtcgcggaggctgtggacgaaaagggggcaaagaggcgaggagaggaaaaaaagaacggaagcggcggaaatgccaatgggagggggtgctgcaccattttgtgacggatcggcgagtgccccccctcccgcctcaaattgagcatatcaccgggttcttccactcattcgaatccaatgtaaatgtctgattcactgttgaaattgccgaaacgttacttccttcaaatcacaaaatgtacattcattctttgatcggagatg

SEQ ID NO: 94226 - DNA, 512 bp, Heterodera glycines
gcactgctcgtcaagtacaattcttccaaaactgcaccaccaccgccaccatcaccgtcgccgccgtttgcattggatgcacagaaagaagagtcttcggaggaaaagcaagcggaagcggtggtggtgggcgaaccggaacaacatcaacagcagccagtgctggagacgatgccgacgacgacggcatcgaaacaggaggtggcaacgcaaatgccgggcgaagacgatgacgaaccgccaccgccgccgccgatgccgaagaaaacagcatccaaggaggcagagacgcaagtgccggatggcggtggtgatgggccatcaccgctgctgccgcaagtgccgccgaacaccacagtgaagatggaagcggcaacccaaatgccgccggacggaccgccggcagcggaagaaatgacggcggtggtggtggcgattgtggcgatgattttgatgtttttgttcgaattcgtgtctgcagttcattagaatttacgtttctacatttttta

SEQ ID NO: 94227 - DNA, 553 bp, Heterodera glycines
aacattttcacatttattttcatcgccttgctgtgccaataccaccgcagcaaacatcatataaatgctggaccattggacgctgaaaaatgtcggcataaatgatttaataataataataataatttttatgttttaagaattaacgttttttttatttctgtcagaaataatttaaaaaaggaaagctttttgaacattttgaaaaaaatataaatttaattgccaccaaaaaaaaacacgggagaaaaaacagataattaaaaattgttaatgttaattataaatttaatagagttcttaaacaaaaataatctgtcaaattaagcgccttcaaatggtgaaggaatccacaaatatgaagcggagaaattgaaaattggagaagttgcaaaattgaatcatggtgaaacaaaaactgaaatggatgaagcagatggccatagacattcattgccaaaagatcgtggcgatattgtgcatccaaaatctcaggacggagtgtgcaagattcatgaggatgtgaagcttgatttcaatgatgacattttcg

SEQ ID NO: 94228 - DNA, 554 bp, Heterodera glycines
aaataacctttaaaagattttatttacatattacatatttggggatttttgtacatatttaatacatattttagcatttcttatacatattttatttacatatttcgcgatttttcttacataaaaaagaagccatgtttattactaacttttgaggataatttttttttttttttttgtataaattttgtttgattgcagctgcgcagacagctttatgtacaagcaaagaaaggcaataaaaattgcaaacctaaatgctatgtacaaattttcttccaaatttatattatataaatttaatttaagttatattatatatctatatataggtattttatatggttaacaacgagaaaatctgtcacgagtttcgtgacaaatgcagggttgactcagtcgtacggtgttcggggagatgtgacatcgaattgggagaggtgaccaagcacaatgtcatgcaattaaagcgtcttaatttgtccgtcttcccggtgttttacaatgacaagttttacaaagaagtagtcaatactggtgagctcgcaaagtta

SEQ ID NO: 94229 - DNA, 512 bp, Heterodera glycines
tctgctgttgctgatcgacgggtgcatctcgtgcattcgggacaccagtaatgatgatacggacggcgacgatcctccgatcagtgtgatcatgaagatcagctatacaatgcccgaggggtcctttttcagcgcgtgctctgaacaaactttggaaaatgatctcttttccatttccttcccgtacaatgcgagcatcacaactgcaaaagtggccgaagcagaactgcccaaaataatggacaacgaaattatcattggcccactgattggccagcgcacttttgccattcccatcttgttggtcgggcgacagtgccggggaatgttcagcgaagatgcgccgattgggggatttggggatgtgaagctgacggtggagcacaattgcactgccgacaaaactaatcagcaaattgaccaacaattgaccaaaaggctgcaaatcaacacattcaagcacaatgtcgctgagcttcgccgcgtgcacgtcgatttgggggagcacagag

SEQ ID NO: 94230 - DNA, 441 bp, Heterodera glycines
ataaaaaagaaaagtagaaatttcggaaatcattcagaaaactttaattttaaaaaatgaggaaacttccaattcttgctcttattttctgcttgttgctacttacaacggaaggaatatttcgccgaaaaaacagaaagaaaaattcatcgagcagcgaacaaaaaacccaaagaagaaaccgagggtatggccgaagtcgcactttttcaaatggcaatggcatgtatggccaatcgaatggattttcaaatggcaatggcatgtatggccaatcgaatggattttcaaatggccgatttggcggctccagtgtctattcaaatagcggccggtcgaatagctttccaaatggtggatttggcggctccagtggcttttcatcgatgggacataactcgggcggacttcacggctttgggtccggcccaccttctggag

SEQ ID NO: 94231 - DNA, 484 bp, Heterodera glycines
tgattcatccagaccaaaccgactttaacatccaatgatgggtagtgtcgttcagttcaagctatcatgacattaaattcttccaaatcacctctgtattccgtagttcagtgacgtacggtcggtcttacacgtaaacataaaattagtttttattttttcccaatgacttttacgtctctgctttcatagtcgttaaacatgcaaatcctatgtaaaatcggtagaaacttcgatctgtgtgatcatttcatttccagttgttttgacaatataaagtcccactttagcattttccatggtttgcacccttttatttgtcttgtttcccccacccaacatttttcatacaaatgggactgccagtcccttttcatttacatttttggttaatctaagcctatcatgaaaaagatattcaaagattgaatcatcttaaagaatgaagccaaagaaaagacaaactgacaatgagactcaatgt

SEQ ID NO: 94232 - DNA, 97 bp, Heterodera glycines
atataaaacagtttaaaatccgaaaagataaacagctccatcccgttgtacacaaacagcacaaagtatgatagcccagagcagataataaacagtc

SEQ ID NO: 94233 - DNA, 212 bp, Heterodera glycines
  unsure (1)..(212): unsure at all n locations
aaattaatgaaaatcaactatcaaattgagatgaatctgacgaatgcggggagtttgaagaagaatacaacggaagttctgatgccgttttttgctcggacgaagcacaaaatgcagaaacacaaatcaagcagcaaaacccgatcgaaaaaattcacaatatgtgtcaaacttatttttctttcgtacaataaaacaaaagctannaaaaa

SEQ ID NO: 94234 - DNA, 457 bp, Heterodera glycines
ttcccacttttggtcgcaacgaaattaactcaatacgctgcagaagatgcaaatctgttagtgcttgatgccaaaagctacgcacgacaagcagtgaatataattggcaattatcgaatttccacgggatgttttatgcacgacatgcagatagcatttggcagttttattgggttcaatttgttcaaacttttttacgttcccttcggcattctcggaattcacaaaagaagaatcgatgcatacaacagaaagaaattggcaaacgaaagaaacagcggaggaaaaggagaaggaataaagtcggaatgaggacaaatggacaaagaaaggaaccaacaaaagttaaaaagagaaagtgaaggcaaagaaaggcatttgctaaagcaattcaaatggaaatggaaatgatcattgaattgtgattgattgcttaacaaagcaaagggattgaatg

SEQ ID NO: 94235 - DNA, 437 bp, Heterodera glycines
tgtggacccaaacttaatgagtacccgaatttgggtccgggataggaattggtcgaaagggatgccggattcgtgatcactgatcagcgaccccgaaaacccctggaaacctgttttcacgacttttgaaaacaacaaaaaatttcttcaaaaaaggggggcaaccatcggcagtattaccgaaaattaatgctttttgccttttaaaatttgtcaaaaaatggtatttccctcggattagtgttgtcttagatttcattttttcgcggtgtggtcgagtaatccctattagccagtctccggtgcattgcaatttttaccgattttggtgatttttttttaaaacctaattttcaaattgtccagggaccgcctttgactttgcgttgaagcttgttgagctgttggtcgacattggcaaggctggcgaaattcgc

SEQ ID NO: 94236 - DNA, 462 bp, Heterodera glycines
gttatgctcgacgactcgatttttttgaaacccctgactatgaatattgttatggtcttttcaaaactgtgcttgaaaggactggtcacacttatgattatgagtttgactggacccataagctcaatcaggcggttcgtttccgttgtcctcctttattctcgtggttatctcagacaaccccaagtggttccattcacaccgccgttggcgtggaaggaggcgaactgcgaaagacgaggaccgattacgcaaaacgtgcatcagtcccaaaaccgcgtaactcggacgggctgttgaggagtggacagcaagtaaacagcacgacaaccggaggtgccatcggacaccacgggcctggcttcggttccacgcaggtggtaaactcaaacgcaggagagatggaggaaagcgcgaggcccccagccccaaatcgtcaacaggaggaagagcacagcgaag

SEQ ID NO: 94237 - DNA, 510 bp, Heterodera glycines
ttattagcataattgagcaattagctagcgcattctatcattagaaaatccataataaatgctactgaaatgccgaaacaatatttgtccatcctcaataatcctaaatatttaaaattagttgcatctatatgaccattactgtaactttagttacggtatattatttcatatttcttacctcaggcaaagctcgttcttcctcgcatcagctgttggcattcccgcgccctgcactgaaatgtgccgtcaaaaagaagcgcgggccgcgcgaaaccgttgaaatgggacgcgagcggaaggcgtggcgcacgttggccatcattacggtatccatttttagatactgtaacgcgcgtgtcaatgaaatataatcgactaaaagtgatttggtagtaatttgtgttgtggaatttatttgttttagtagattttaatttattttctttttgtccctcagggctctttcatcgcctgttggatgcccttttttgtgctctctttgtatcg

SEQ ID NO: 94238 - DNA, 404 bp, Heterodera glycines
  unsure (1)..(404): unsure at all n locations
tcaggtgtcgccagagacaatgaatcagtgtccgacaaagaaggagagcagcatttagacaatcaacagaacgaacgatgcccatggagcagtgatcattcatctccagccttgcaatgcgggcggacgagcgctgttggcgaatttcctgaatcgtttggatggacaaacagtcacacaattcattttgtccctgttcgatatgtaccgtcctcactgattgtacaaatttctcgccatttgtcacgtctgtatcatttttgtgccaaatgttcccatttgacttttgtgtagttcgtttccccatttgtgtcaatttaattccacttatgaaacttgtacggcaaatggcattttaagaaaaaattttttgaacccnnnnaaaananaaaaaaaaaaaaaaa

SEQ ID NO: 94239 - DNA, 494 bp, Heterodera glycines
catcatcgatggaaaatgcgcaaacaagtcacgaatcagaaggactttcccgacagggccaaggacgcctttgcccgtctgccagtttcggaaactttaccgatcctttgatgataccaccaattgctttgcaacatgtttacgccaccgctaatatggtcacacaagcaaatgtcgatcagagtaacaaattggacttggaccgtcttccgcccgggtgggaagtccgtctcaccgaagatggttcttaccgatattacgtcgatcacaacaacgggcgaacccattggatccatccctttgcgcccgaagttttgaagccaaattggacaaaaatatttgacactgttcatggcgttgtttattataaatcatgttgatcaacggtcccaatttgaccatcctggatttatcaatggggcatttttaccaacaattcacggttcgtcttctttccaatcgctgttagaaaatgaacaggaacaaaattgcaa

SEQ ID NO: 94240 - DNA, 553 bp, Heterodera glycines
gggattgggaacagcccgacacttattggcgctctaaagaattccttgcgtggctttataacaaaagtccggtgaaggaaaaagtggtggtcaatgaccgttggggcagtggaatagccggaaagcatggcggttttttgacttaccaggatcattacgttggacaaacgttcgtggggctatcgtcgttatttgaagccctccgatgttctttcattggccgaattgatcaatcaattagtgcgtacaatttcgtgtggagggaatatgctgcttaatgttggccccgaccacaccggtcgcattgtgcccatttttgagcagagacttcgcgaatttggtgaatggatgaatgttaactcggaggccatttatggaagcaaggcatggatccaccaaagcgatggcccaactatttggtacacaagccaaatacgaaatgcgaccgaattgagcccaagtcggatgttcaaccctcaggacacatttaaaacgattgtttatgcctttgtgctttccattcctcggtctggtcgtatcaattttccctctg

SEQ ID NO: 94241 - DNA, 159 bp, Heterodera glycines
aaattcgattctgccgatcttccgcttgtggagggagccggcgatgatttgcttgtggtcggtggtgacgatttgcacatggatatttcatcatgcccgggaacgccgcagatttctcctatggtctctgctgatgaaggcgacggggacgactaattg

SEQ ID NO: 94242 - DNA, 242 bp, Heterodera glycines
  unsure (1)..(242): unsure at all n locations
gcaaaggcgactctttcataggaaggattggattattaatccgctttgcgcggagagtgaactgactgatcgacacgcgatgctccgattttatcaccccacccattcattttcggttattttcgccagtgcgatctctttccctttttgttgtttattttgcgatggatttaattgatttcattccccgtgttgttgaaatagggttttttanntttnnnannaaaaaaaaaaaaaaaaaa

SEQ ID NO: 94243 - DNA, 466 bp, Heterodera glycines
caaaggaacaagcgacagacaatgcgggaaaagagcgaaatagccgaataatccaccatttccagttcaccacttggccagattttggcgttcctgttcacaccgaccattttttgaacttcttggaggaggtgcgaaacgccagagagaaattgcctgagccgggctcagaggcaggcacggtcggcccagactctccgattgtttgtcattgcagcgctggcatcggtcgtgcgggtacctttgtgatcgtggacagcattttgagtatgttcgaaaggaaatggaaaggccaacaagtggaagagggcgaaaagaatggaacggaaaatgatgaaagggaacgagctgatcgaacggtggacgaaaagatggactctttggaggcattggtcgtgttcatcaggcggcatcggatgggcttaatccaaaccccgcaacaattgcgtttctgctggaaaaccat

SEQ ID NO: 94244 - DNA, 119 bp, Heterodera glycines
acaaccgcatgagaaaaacggaagaatgtgaaaaaagacgacgattgactagccgagtgtattataattttttgtatttgtgacgatttcatttataaaccaagtcagaacaaaaaaaa

SEQ ID NO: 94245 - DNA, 455 bp, Heterodera glycines
tcacacaaatcgtatggaaatcgaccagagaggtcggagtcggtcggtcgacaatgcgttcattcccacaacagatggaaaaggacgagaaaattacaaatggacactcagaagaagcagtcaaaaaagttgtggtcatagcattttataggcccgcggggaactcaaatcgaagcggccaatttgagcttaatgtgccgaaaccaattgcgcaatgagttcattaattaaaacggaacaactaattaagcgaataaataattatttatgagcctatccatcattttttactctgtacaaacatagcaaaaattcacctaatccaagcaaatgaacaaaggtttttatgcggtcgctaaagtttcctttatttcgggatgacactccgcatatttcgccatgcgcctctccaattcaggacgaaaatgtcggatcagtccctaaattaagaaatt

SEQ ID NO: 94246 - DNA, 486 bp, Heterodera glycines
cattctctctatgggcgccattatattaaggacaagccggtgaaagagctaaaggatgacgagtacttgagcttcgttagggctcaaaaggacggccttatcgaaatcgatttacacattaattcgaatgaggaatcggagaacaaatgtttgcgtgcgtgcatggaaaacgatggctgtgcgacttttaagcgtaacgaaaattcggaaattgtggaagaatggaacaaacttcggaaccttgttcttacgatttgcgtcaacaaaatgttaattcctgtgctcagaagggagtcgcatgaaaatttgattgaggaggccaaagaatttgtaattatgaaagcggctgagcgattgcatggtctaatagagactgagtcttacaagccacagtttagctatgataatcaggacgatgacttgcacgatgtggggacccgcattttggctgtttgctattcttcagacattgcggatgcttctttt

SEQ ID NO: 94247 - DNA, 474 bp, Heterodera glycines
gcaaaaatccgaggcccggcttcgatggggcggtgatggatgctgagtattctgctttgatggctgaacttggcgaaaaacctcccatttctttggaagccggcactgcaccaccgttagtcggtgggaagccgatccccgggttccccggcagtggattacgcccgcgtttcgcgctgcccgcgcccactcctattgtgcgcgttaatttggcgaagcaacaaaatacgcctcaacaacagtccgtctcgggtggcggttaccccgggtgggatggtgctggcttctatggcttttctggacttcctggccaagacccggccgcagccgcggctgcctgggccgcttggcaggcgggtcagagtggatttccatcgccagtgcctccaccccctggtggcggattcggacatgccaacatggaagcagcttcgacgcccggcacatcggccggcggactggcgatgttcccgc

SEQ ID NO: 94248 - DNA, 383 bp, Heterodera glycines
  unsure (1)..(383): unsure at all n locations
gctctttccacgacgaagacggcgaagtgatacagcgcatttcgcaggtgtgcgacgatggcggagattacctttatttggccagttttgaaaatgattacatcggccgtatttccaagaaaacggaataaaaagacgcaaaataggtcattcattcccatagttttcgcaatttcagcttttctcttaatttgcagtagtaatatacaatattttaatgtcctatcaaaacttttgtcattatttccttttacaagcgataagaaaagcatttgttgtagtaaaagttaaattaataatttatttattattttaattgattttaactttttgttanatgtgcttaaaagagacggacaaataaattgcggacccacccaaaa

SEQ ID NO: 94249 - DNA, 94 bp, Heterodera glycines
  unsure (1)..(94): unsure at all n locations
cctacgggtaatttacccctcactttcctttccgtcactccacagatattttgttatttaataattgtccatttttaaacactgagtttcccnn

SEQ ID NO: 94250 - DNA, 443 bp, Heterodera glycines
ggatttggcaccaaacaaagacctctaatgatgaagcaacggatttgccatttgacagcaacgcacaaaacgactaaaagaccaggcaaaccaaaggttagaacggcaatacaacgcactgaaacaccggacgaaggccatggaaaagtacaaggcgaaagtggcagaacacagccaaaagataagccaaaggaaggaaagcgaattggcggataagcagaaactgttggacaaaattcagagaaaagtcggaaatttatgaaaaggaaaaatgaaagaaaaattcagcaagaaaaagggacggaaaattacgaatagtgcaaagagcaagtgagaaggagggccatggaactgtgctcgccacgacccacccatttgtgggcacagactttggccgactttggccaaatgccctccgatttggcacgccagcagttggccat

SEQ ID NO: 94251 - DNA, 464 bp, Heterodera glycines
gcaacttgggtcacttttcgcgtgagacgattgttcgtcatttgaaggactttcacaattcgcacgaggctccgatggacaatcgccttcgttttgcacaagaaatcaaagattccattcgcgattgttacccacaactttttatcgatgcaccgatcccgacgaaagaggacatagaaaaactgagagacagtctgaatctgagcgaccaagtgttggtctgtgacaaagacggggaagtggaggagggcgagcacgaggaggacggcgaagaagcggcgatggacaaagacaacgcgaatgaggacgaagaagaagacggagaggaggatggggaagacgaagaagaaaaggaagaagaagacgtggagaaggaggaggaggaagaagaggaggaaacggaacagcagtcgaccgccaacgacgaagaagaagcagaggaaatgataggcgagggggaagaa

SEQ ID NO: 94252 - DNA, 433 bp, Heterodera glycines
tatatacccccgaccctttgccgtgtctcagcaaacgaaacgccacacttcaaatgcttcagcaaattccatgcgatgcctttaaaaatgagtgttgggccttcgtcgccctttccccctccaaaatcgttttctccgttcgtggcactcgcacaagtgcgcaattgatcattgaactcatcgagacaatgacagttttcagctcctaagaaatcgtttcccgccggtggctctgtccagcattacttttacacgtcgctcgacgcactttggagcgttgggttcggcaggaaattgagagaattgaaaatgttgaatcctcagctgcccattcttttcaccggccattcgttgggcggtgccatcgcttctttggccagtgctcggtttgcatttgaaaaccgagactttgttaagtcgtccgaaatatttt

SEQ ID NO: 94253 - DNA, 72 bp, Heterodera glycines
ttttaaattaatttcagatagattcataaatacaaacataaaataaattgaatttaaaaaaaaagaaaaaaa

SEQ ID NO: 94254 - DNA, 392 bp, Heterodera glycines
ctcaatgaatggtgtttggaaaatgtcgcttactgtttttcttacggtgcgaaacttttgctacaaattgctttcgctgatattcgccattcccttggcggtgctctttggcattctgttcggacttttttccatgctcagtgtgttcgtgtttgtgccggtcggtcgtctgctcagcatcccattcggttggcttgcaaagttttgggctgttctgatttcggctgtttgcgacccattgtgccgttcatttgcgctcacttttggcaacgttaaagtgaccagatacggaatcaaccaggatccaactgccgtgggtgttgagctcaacttgaatgaatgtgtcaacaaataaagaaacgcactactgcccgaatatggaaaattgcaaa

SEQ ID NO: 94255 - DNA, 365 bp, Heterodera glycines
ctttgaatacttccgatttattcctttcgcctccttttggtcttccattgtttccatttatttctttgagtgattctggcgatttaattgagacaaattttgggccaaaattcgaatttgaccccgcaaaagtccagcagcaggcatcttcaaatttccggcaaaattattgggatgccaatttttgtcatgagaatctcgaaatcattggcaacaaaagtctcattgtccattataagaaaaattcttatgatgcatggcgttccgtcttcgctaaatatccgattttgctcaacaaggattcgtctaacattttttactacgaaattttagtcaaaaataaaaattattggttcattagcttt

SEQ ID NO: 94256 - DNA, 267 bp, Heterodera glycines
  unsure (1)..(267): unsure at all n locations
acgcagcgagatcagctcgaatttcgtgcacaacatgcgagttttggggatcaaacatacaatgatgatgaaaaaattcgtaagctaatgacggctcttagtctccagttcgtgggaaacgcaataaagtaaaggaatatgaaatttggaagaacgaccattctttccattagaattgttcattccatgttttttttaaacttgttattcgttcaattttataaatgttcattgttttnnnnaannaaaaaaaaaaaaaaaaaaaaa

SEQ ID NO: 94257 - DNA, 308 bp, Heterodera glycines
  unsure (1)..(308): unsure at all n locations
agcaggtcaccggtgccacaatgacggtgaacggaacgcgcgaaaacttccaagcacagctgagggacggcgacggtccgatgggagagcccaaattcgaacaatttgaacaacatccagattttgctttatggtgacaacaattgcatggggcctttgtgtccactagcagaggatcaaatcaacgcaaaagattgtctgccaatgaatcccgggcccaacggtcagcggaaggaaaggtgaaagaatgaattgagaaatgatatcgatcattctgaataaatttaaaggttaccnnnnnnnaaaaa

SEQ ID NO: 94258 - DNA, 542 bp, Heterodera glycines
ccaactcaaagtgagccgtggcgaacggaccgatcggcggggagagacattcccccaaatgccaaaccgacattttcagaatgttcgagaagttcgacgtattgcggcactggtttctactgcaaactattccaacggaattcgggcaataatatgcgtttttgttgtcggaggagccgtagaagcggcggaagagtaaacggaaagagtcaaaggtacagcgacaaaatgcaaaaggcgaagcagaagaagcaaaagcaaaaggacaaaccgagaagactgaaaacacagagagcgcagggacacatcgatgacgagcagtacagggagaagaagaagaattacaagcagaagaaggacaagcaaaagctgaaggcacgcaaaaacaaacgcaaactgaacaatgggcaccaacaaatgtggtgaaaggagagaaaggaagagaggaaacaaaagttggagagacaaagggaagtgaagagagagagagagagaggagagtgatcgcatggaaaagtgacaggacggaagagtaaccggag

SEQ ID NO: 94259 - DNA, 449 bp, Heterodera glycines
tcgtcaaaatggtggatagtgtcagtggtttggctcttccgatgatgcgaatatgcaaagttgaaaaatgcaatgggacggacgttgtggtgatcaacgacggagacagcggggagcaagtcagccaactgcacaagtgcggcttccaaatgctcagcggagcggagagtcggcctttgtttatgtgtttcaacggcgaaaacatagtgcaacaagacgtgggcaatgatcggagttttgtggcgaatgatggccaatttatgacggatcgaaggtatccgatcagagacggcgcccaatggacaattatctcgaccgatacaatccaataccgtttctttgaggcactaaggccagttcagaatgaggttgctcctgtgccaattgtcagttcgctggacatgcactcgactgacccgacttcgtcttccggcgcttacgttgagctt

SEQ ID NO: 94260 - DNA, 465 bp, Heterodera glycines
gtgcatggcatccgtcgcgtgtctcattcacagttgcgcgtgccggtcagaaaggtcaaggctttcccgaaggatgacccaaagaaacccatccatctgacggcgttcatcgcctacaaggctggcatgtcacatattgtgcgcgacgtggacaaacttggctcgaaggtgcacaaaaaggaagtggtggaggcggtcacaattctcgagacgcctcccatggtcattgtcggtgtggtcggttacatcgaaacgccgcgcgggccgcgtccgctcaaaaccgtttttgctgagcatttgagcgaggactgcaaaagacgtttctacaagaattggtacaagtgcgagaagaaagcattcacgaagtatgccaagaaatggcaagacgaggcgggacagaaattcatcgaggccgacctgaaataaataaagaaatactgtttctatgtgcgcgtcattgctcac

SEQ ID NO: 94261 - DNA, 482 bp, Heterodera glycines
gccaaaagcaatcggcggatgaacaatccgttgttgtcagccatgtacaaataacaaagcattggcggaggggagggcgaattaattgaccgaatcccgtaaatcctcccaccccattttggtcatcaccatcgggaacaccagcgcagactttccgtaatggacgccgccgcctacggcactcatcggccgtttcgttcggcttccgccttcagcacttccacccggtactacttggacgccgacattttgaaaagacttcgaaaccgaacaggactgatcggatggtggtgtgagttgtggacggtccgctaccgcgagaagagccgtcgcattgaccttctcgcgcgcgttctcttcccgcttttcttcgtcctcttcaacattatctattggatttgctatttgaggccatatttggcggaggaaatggaggaaaactttgccaaaggaaaagcaaacgaaggcacaacaaattgagg

SEQ ID NO: 94262 - DNA, 349 bp, Heterodera glycines
gttgggccatcgaatgggccaattggagatggaacagcacgaggcactgcagatgaagtgatcatcgaagtgcggtcgggtagtgaagccgaaaacaatggaagtgccgtggggacagagatggacagtgccgaaactgacaatgagcagagggaaagggcgccaaatggacgcaacaacggcacggataattggccaaattgacgaacgaccgaatgaatgaaggggatgggaaaatagggggcggggggggaagaccaccggacaaattagtcgctcaactacaatataatcattattatgtgagtgaaataaatgtcaatttctgcaagacccaaattatgaccgt

SEQ ID NO: 94263 - DNA, 273 bp, Heterodera glycines
  unsure (1)..(273): unsure at all n locations
aattaaaaaaagtaaatcctctttaaaaatgaaactttcaataattttattgctttccttggccttttgtgcgttaatcatcgatgcatatccatcgggaaatggtaaagatcttgaagctgacaacgaaaaaacggaagtgaaggaagagaagatggaaaaaagagaagcggaagtggaggaagggaagaaggaaaagagaggaagtggaggtggaacatggggcaacggaggaagaggaaacgagggaggaaacggaggangaggacacgg

SEQ ID NO: 94264 - DNA, 520 bp, Heterodera glycines
cacgccgttttgccaaacatcagtctttttaagaaattcggaaaaccgccggacgaatgccttttgatttcgctgaccttttccgcctttgccttcttttgcttcggttggcatgtccatgaaaaggacccaacatttatgcagccattcgctttgctttacgtggcctcaattttcgcgcagttccctctcttctttacgccgtttgaatgctttttgaaatgggcgttcacactttggcattttgctttttgccaatttttggccaattttgtgtggtgcattcgattggccgaatttgcgcagtttaccgtcgctaaatttgcactttttcaaatggtttcggctcaattttatgccgatttttgtcatcggctgatttttggctcaaattttgcgtttttgccgatgatggtcccttctgttgcctgtgctcttttcgtcttttttgcttatctccatttcattctcattgtttttgcggaatctgttcaaatccattttttcaaatttcgttgtc

SEQ ID NO: 94265 - DNA, 548 bp, Heterodera glycines
ctgatcttaacaattgttatacctcatttgaacacaaagtgttggacgaaattttgcacaaaatcacaccctctgacagtaagtttgtagttgtcagtgttcaagtgaccagcaaaatatacaaatatcgaaaaacgaagacagaagccgggcttagctatgacgacgcattttcacgcatcatttgtaaaggaagcgaggaattcaattctccattcaaaagcgaaataagcagtgtcgaatttctcaaaatgatcactcaatttgccatgcgtaccctaatcagagaaccattctgcgcattaacttcctctgcacaaaaccggcccttacgacaacgattatttgtcagtggaagaggaattggccaggggagctcactttcggttgccttgtgcaatttgtatttgggttgggtcgagcgacaaatttgccttcattcgccggaaatggggctgacaaattgcgctattaccctgttttgctgtcgttacatggacgattatctaatcatatccaacaaaagggaacgagttgaaaagttgatt

SEQ ID NO: 94266 - DNA, 569 bp, Heterodera glycines
gggataaacttttaaaaaaaagaaaaaatcaagtaatgggaaatacttgcggctgcgctgacaaagctaacgaggctggaaatatccaggtcgatgatagaaagggtaacagacatggtaatgatgacgccgccttcgacaacttcgaacaaggtggtgccaagatcaccaactatggaggcaaaagagatgtaagaaatgcccttcctgaagaaaatggcgctacttccagcgaacatgctcctaatcctagcttcgctactcttctctctcagatgccaaactattctaacccaaataccactgctactctccaaagaattggcccattcgtctatgaccaagatgatcatgaagacggttatcttcctcaacttggcccttatgagctcgaaaactcagctgtctatattggtcaatggaagaacggtatcagacacggaaagggaaagcaaatctggagtgatggctctcaatatgaaggatattggaagaataatatggcaaatggcaagggaagacttatccacgctgatggtgacgtctatgaaggagaatggttcaacgat

SEQ ID NO: 94267 - DNA, 532 bp, Heterodera glycines
agttttgttggtagcgttgcgcagccaaaatccgatttgacggcacgggacggccgtaaccgcacgccaatgtcatcggccatttctgacattgatggctgacaggtgtcgttgactcagaccgagctcgaactttgtccgggttgcaaagaatgaacagagtgccgatgccgaaaatgcaactcaaatattccgaagtttgagtggtgcgacaatgcattcggcgtccgttaaggcgcgcttgggcatccccgattgcaaagagagtggagccgtccgaatttgggacttggaatttctgcacggtgtttttgagcaggttgaacagctccacgttgagtacgcccgcacttccgcttttcccttttctgcgtttgtcgcccgtctgtcgtcgcacgaagccgtgccaccgtcctttaaggatgccgaagtcgccctcccggttcagcaccagaagcactcgctcatcgggcgaagacaaatgaggaagaaattgcaaattggagtccaactgttccttggagggcaaaga

SEQ ID NO: 94268 - DNA, 478 bp, Heterodera glycines
gaacttttttgcggtcttttgggaggcgcaagttttggcaaaaacgtgcgatcgtggcgagaagtgcaaaaggcagccaacctgggccaatgcttcgtggccattgaccccgaatgctttgctccaacatttgtggacaatttgcagttgttcctggaccaaacgcgtgggcttaagccgcgcgacccctccaaatcggtgttagtgcccggtgaccccgaaagaatgaacagcgaacggagcgcaaaggctggcggagttatttactcagaaggacaaattcgggatttggagaaattggcaaaaaaagcaaaacgttggcatgttcccttacaaggcaaatttgtagcagaacaaaaaaactgttttctttttgttccaaagcgatgactttcaattgaattggcattcatttccattattgaacaattaattcgttcccatttgctgctgctgataaagaaaaaaagaatgaaaa

SEQ ID NO: 94269 - DNA, 339 bp, Heterodera glycines
tgcaccatttcacgttcgggcatttcaatgattgcttccggaattgccaccgaactgttggcttctgtccttcaacacgaattgggcgcagaagcgcccgcccttttggccgaagtggacgaaaacgcgagtcaattgggcgccactccgcaccaaatccgcggttttatgtcacgctttcatctgatgatgcccaccgtacgacgggacaacccatgcacagcgtgggggcatacgggcaaacagttctacccgacctgagggaattgaatttttaaaccaattctcccaaagccctgccagttggaacaaatccccggattaccgaattaccaaaaa

SEQ ID NO: 94270 - DNA, 381 bp, Heterodera glycines
  unsure (1)..(381): unsure at all n locations
cccgaccacatccaggtcaaagagccaccgattgacgtcgcgccgaccacgccgtactcggagcaccgcgaaaccgatgaccactggcatgccgccccagacacaaatgccgcccgcccatcgcaacagcaacttgcgaatggttggccagttgccgccccccgaacgtttttatttgtaagagaaaacccttgctgatggccctaatggataaatgggaaaatttccattaaatttgtgatttgggggggcaccggccccaaaccccctttttttgccggaaaaaaatttttgggggggtttttgtttaaaaaattttttgtttgtcgtgaaaaaacctcttttaaaatatttggggaaaatnnnnnannnnnnaaanaa

SEQ ID NO: 94271 - DNA, 481 bp, Heterodera glycines
actgtgacagtagtgaaaaggcgaataatgaaccgccgccactcgccggtttacaagcatcagcagtagaagaagcatcattgccacgcctgatgatttcgacttgtaataacgacattgtggacgacaattctgagttttctcaagatttggatggtgatcatcagtatacagtgaagggggaggacaacgatgattactgtggtgacgtaaactcgttgaggcctggcgacgtgtacgtgaccaaccattccaatttatcagctgttcaggtcgtcttccacgttgtcggcgatcgtcaattggttgagcaggacatctcttcacgccatccgtgcatcaatgcattgcgaaatgtcatccgtttggcaccccattctggcatcaatcatatcacatttccattacttttggttgagcacatgactgaggtgtttttgcatagttttttatattatatttctccccgaccctcggggta

SEQ ID NO: 94272 - DNA, 469 bp, Heterodera glycines
tttcctttcccgactgtctccatccgcttcttctctctttccccccccccaaatgcccctctttccctcccttaatccctcccctctgtcaattcattcgatttcccattccaaagaactccaaatcagatggttcggttggactcttttgaccatttggctgttaacagtaatctgcatgactcgagagttttggcgtatcacaaacagcggaagaagaggcggaggaaagcaatcggaagaggaacaaaatgatggaagaggaaggaaatcaggaaatgatgaagaggaagaacaggagaggaaggaagaggaagaacaggagaggagggagaggaagggaatagaggaagaatgaaagaggaggaagaggaagaacaggagaggaatgaagaggaagaacaggagaggagggagaggaagggaatagaggaagaatgaaagaggaggaagaggaagaacaggagag

SEQ ID NO: 94273 - DNA, 451 bp, Heterodera glycines
ttctgctcaaacgattctcagaatgtatcttctcattctacaaaccaaattgaaattgaagcaaagaaaacggagcacggttctgctggtctctcaattctagaaattctacttttgtggctttctcgtttctctgttctcgaaatcgtactttgggcgcttgtccctgtcgttatttgcgtttttgttgttgtttgtgcctgtgtgatttcaagaagaaggccgagtttgcgaaacgaattgttgcgattgatcgaccttggacaccaaattcaggttgttgatgaaaatatctatcgttggaaggtgaaaataccgggaccgccaacatcgctttattttgccgaagaattattgagagaacgaacggacagatagccaaagacgcattgataattaggagaagcacggaataattaattgttagtcaattatttaactatatttcttc

SEQ ID NO: 94274 - DNA, 71 bp, Heterodera glycines
caaaattttttctaattgttttatttttttgatttcgcttaaacttcttctctataaaaaaaaaaaaaaaa

SEQ ID NO: 94275 - DNA, 51 bp, Heterodera glycines
cttctgtatcaaacgaatattacagatgattgaaaaaaaaaaaaaaaagta

SEQ ID NO: 94276 - DNA, 554 bp, Heterodera glycines
ttcattgcataaaataaaagaagaaatgcgggagaatttgcatttcatttccaaaaatcattttaaaaatatcattttttgtgcatttccgtttaattaccctttaaattttttccatcggttcgatttgtttgaagtgcgcggccaaagagtggcggcgcacttaacaatggcaattatcgatttgcggaacgaatttaatggaattaaatatttcattttaaaaacaaaataatttttggtttttaaaaaacaatttaccagaatgattgacaggtggcaaaagaatgagtaatgagaggaaaaaagctttaattgtgtccgtcgctgtcgtctcaatggcctcgcttttgctttgactgcttttaattctctgtttttccattttcaaaactgctgaacagcaacagcaacccgacgaaaaggaccatcgacaattgctttttgttcaggcaatttggcggcatggcgacagagcgcctggcaaattgccttaccccggtgaccaatactacgataaatattggccacgtggatggggtcaattgacaaat

SEQ ID NO: 94277 - DNA, 74 bp, Heterodera glycines
  unsure (1)..(74): unsure at all n locations
ccgtgtccatcgattgaccactccatcagcgagcaatctgatgattttcttgaaaaaaacagttatacnaaaaa

SEQ ID NO: 94278 - DNA, 466 bp, Heterodera glycines
ggagacttaggaagagatctcaataaagaccccgcacgcttagtagtaagcgagcgaaaatcgctagttggcacagttttgagccctaacacttcaatggatgaatcaaacaaccaggaaaaactcattctacacataaaaaagaacacaaatccgactccaattccaatagaccttattccatacatgcattttagaatagaagatcttgtaaaagtaacctgcgccccagaagttgatgctaacaaggtaataaggcttatctatcaaggtaagcagctgaaagatgacgatcgagtcaaagacattaaattcaagccagagacagtaatgcatatctttatcagtgaaccagttcagaaagatgtaaatataactacaataagtgctgagctctatgagcctgagagaagaggttttgataaattcaggccattggacttgatggaagaagaaattattttgt

SEQ ID NO: 94279 - DNA, 447 bp, Heterodera glycines
ctccgttgatgcccaactgacgaacaaaacggagcagttcaatgaagtcgaaatgcacccaaagtttggggggcacaaaattcccttcggacgttagcatcggataaccgtccggtcacatcttaaaattccaatgttcaaccaacccgaacattccctgggcttttcgctgtgtctttttgtttctgctggacaccgttttggacaaggaacatcgaatgaggaaatgacaaatccgctttggctgtaaaagaaatgaaatatttcatgaaattccatccccaattttatggtacaaccgccaagtttccgttgctgcaaattggcgagttgcgattggcacacggattcactgttccgcaatgtttccaatttgatgctcacatctaattgtgaggcaattattggcagaaatatgtaaattattttgggtccgataaaacccct

SEQ ID NO: 94280 - DNA, 84 bp, Heterodera glycines
cggagaaatggcgaatttttgaagcgacgatttttttaattgttgtaaaaaactcttgataaaacacatataaatgctcaaaaa

SEQ ID NO: 94281 - DNA, 394 bp, Heterodera glycines
  unsure (1)..(394): unsure at all n locations
gataaatttgaggttggattagacgtgcaattttttgctccacaagaaattgaggtcaaagtgtcgggccaagatgtgatcattcattgtctccacgaaattcgcaaagatcagcacggaagtgttaagcgcgaaattcaccgtcaataccgactgccaaatgacgtcgacgcggcaacattgaaatctcatctgtccacccgtggcgtgcttacattgacagcctcgaaaaaggactaactgagaaggaaaattgagtgaatttgatgggaaattaggacggaaattttgctcatcttgtgagctgctgttgaaataaattgaaacaaattgctaaaattaaaataaaataaaatgctccaaccaaaaaannnaaanannaaannnnnnnnnn

SEQ ID NO: 94282 - DNA, 55 bp, Heterodera glycines
tataattatattaaagtgtaaaatgtgacaaataaatgacaattggaaaaaaaaa

SEQ ID NO: 94283 - DNA, 68 bp, Heterodera glycines
aaaatcttttttaatggtttttgctgatgactctatatttactcctgtttttgtgtatgaatgttcgg

SEQ ID NO: 94284 - DNA, 140 bp, Heterodera glycines
aaattgaaaataaaaattgaaacaaacaaaaaagaaggataaaacaaaaatgtgaaagcatggcgatgatgggagaagagaaaggaagaaaatgaaaaatgggatagataatacaaataatgcaacggaatggataaaaa

SEQ ID NO: 94285 - DNA, 218 bp, Heterodera glycines
tctgactgcccttttgttggtcggtttttccaaggatttgaacatgagtggtgagtttgggttgggaatgcccgtctttttccgtttgtcgtctgcaaatacaaaccatcgtcgactctgatcatcatcaaacatttccccgtaaactattaatgttcgttgttttccgaatatttgtcctgcttttatcagaaataaattataattgcttcctaaaa

SEQ ID NO: 94286 - DNA, 439 bp, Heterodera glycines
aagccggcggattcagcggacgattcgctgtggagccgataccatgatcaaaatgcaatggaagagttgttgacctgttttattttctgaaatatttctacggaaaatgcgcgtttggtcgaagaatgtgctcatatgtacatctccgaagacagaaaagatgctcaatttccgtcttatttaaaattttaaaaaaattataaaattattatggaaaaaaacatttttttagatagattaaatttttaatttataattgcttcttcttaacatacgattcatctttttaaaatattttaattaacagttatttatttgtaataaatattaatctctgaataaattaaaaaaaagccttaattcatttactgataaaatttaatatcatttaagaaaataaaatatttttataaaaataattaattctatgaatctttca

SEQ ID NO: 94287 - DNA, 493 bp, Heterodera glycines
cagatagttgagcatctaacaaaaagcaaaatccatttagaaaggctgcaataagtatagtatatgcacacccctacaaaaaaattaaaaatttttagtcgaaaataataggaaaaaataaaataaaaacctctttttaaaccaaaagttaataaaattcttaataaaatttacagtgtttttccctaaaagtgacaaacgtaccgcatatttttggttgatgaccaaacgctgtaaaaaaatgcacaacaatttggacgtgtccttcactgtgtcagaaatttggttggtttgtccatcggcaacataaaaacgcgaataatactcgtggattgggtgcagcacagtcagaatgtcaacctaaaaagaaaacttttgtttacaaaaaaaaactatttaataaactttttcaatcctggtcggctcaacaattgcgtcagtgaatttggtgagacatttgcggaccaacgatgacaattgaccgccaggatca

SEQ ID NO: 94288 - DNA, 132 bp, Heterodera glycines
tatgggttgaccaggcaaattcgaatggactgattgagaaagaagcgatcagaaagtgatcgaagagtgatcgatcagaatcgattgacacaatgataaagctggacagatggtaaaaaaaaaaaaaaaaaa

SEQ ID NO: 94289 - DNA, 253 bp, Heterodera glycines
  unsure (1)..(253): unsure at all n locations
ccagagaatatggtagacagacagagaagaggaaggacgagagatacgcttctggtggagaaccaacgcggaggagtgggagaaagacacgggaaaagtgaaggccatagcaaacaaaaagaatgatgaattgatgacaacaccgtcactttcaaacataaaatggaaggaaaaacaaagagcaacgattcatcctattctcttatttatcacagcgattaaagcgaacnattaccnnnnnnnannnnaaaaa

SEQ ID NO: 94290 - DNA, 445 bp, Heterodera glycines
gacggattaccgattctgaggacagagagggagacaaatgcaaatggttgtccgagtcactggccaaagtcactgcgcaatggctgagtgccatgcgaccggcactttttggggacaaagctatggacacgaaggctctccatttgctcatccgtctgaatgcgcgcaaaataaaagtaggccaacgctgctcaaaattggacagtgaactgaatttggcaccccaagagcctaaatacctttacagagctggtcgaccttctgaccattttattcttctcatcgaaggaaatgctgtcgcccatttcccgaagaatcagatgaaatttgacgttggagcatgggaatgtttcggtactgaaattctcgaccaaatggaggcacagatggttaacaattatcagatggacaaaaacatcgggaaaatgcaccaccaaaagacagt

SEQ ID NO: 94291 - DNA, 439 bp, Heterodera glycines
tccacatatactcgtcacaataacttagcaataattctcggcttgtcccggatattgctttgaacttcatttttaagttcttccaaaagcattcaacgtgatttgtgtgggcgcctatgatcgtgttatactaaaaatacaaaataaaaatgaaaacaaaaaaataaaaaaaagacaaatgcaaaaatgcttttcgacatctacatttatcgggccaggacgttttcgcgtggccattttcgcgtggccgttttcgcgtggttgcatataaaagagaattcataactcacatttatttcatgaacgctgcgcatgtggaatgtcagcgacttgtaactggactcaagcgacgtgctgctgagacgtgctaagcacctgcgactattcgtgctcaagtggtgcaaaacacatgcacacctgtactagcagcttttccgag

SEQ ID NO: 94292 - DNA, 206 bp, Heterodera glycines
ggggagaaggacaaaagtagaggatgaagatgagaagagatggatgagctacagattctaaagtgcaaaattgggtaacaaatttaggcgaataaaactgatttgtgagtggctttagaggagggaggaaaggctcttttaaggggaaaaaggaacacaaaaaaaaaacagaggggagagaaacatggaaaaaagaaagagaaaaa

SEQ ID NO: 94293 - DNA, 553 bp, Heterodera glycines
caggcttgaacgtgatggaaaattggcagacgctcatgccaagtttggccaattgttggcactgtgccccgaccaccagggcgcgctggacggcatcgcacggttggacaagaatgatgacaacatcggcggcacagacattgaactcgtcgagctgagcgacgacgaacacacggaccatgatgacgacaatggcagctgttgcgtcaacgattggatcgcattcacaggcctcgacacgacctccgccgaactgtccgtgttggagtccatcttcaaattgggagacgcggcaccgagcgcaatttccaccgatttgcgcgacactttgatagaatcgatgctttgaatgacaaatttcaaaacgaaggcggtggaggacagacacaaaaacgctgacattttttccgaaatttggagtcagagaacgtagatgatcttagagcgtcatgcgagcgaatgtcggctgagttggaacaggaaaagaaggagaaggaggaagaaaagaagcaaaaggaggaggcaaaagcccgtgttgccgagttggagaatg

SEQ ID NO: 94294 - DNA, 479 bp, Heterodera glycines
aaccgcacaacggcacaagcagcaacatgggcaatggaacagcaatgcttcaggggaatttcgaagtaattggcagtgccggcggaattgcgcactttgcgagcagtgccggcggagagtcgaactgctcgagcagttcaagttcagtggttgtgcacaagggaaagaaaagcaaaaaggacaagccggcacagcgagtgcggacagtgcttaacgagaatcagctgaggatactgaagcagacataccaagggaaccaaaggccggacacgaacaccaaagagcagttggtgaagatgaccggactaaacgcgcgagtgatccgcgtttggtttcagaacaaacgctgcaaggacaaaaaggttttcagaaggcaaattgaacagcgcgagaagcagcaaagtcaggaaaaggaccaaacgattcgcagtgttcgcgccgtgggcgtcggtccgatgatcgcccggttcgccgggccc

SEQ ID NO: 94295 - DNA, 485 bp, Heterodera glycines
cgtaaaggttgtccgtgaatatgaaagagctgtcattttccgattgggccgtttattgcccggcggagcccgcggcccgggcatttttatcgtaattccatgcattgacacctaccgaaaagttgacctgcgagtgctttcatttgacgtgccaccccaagagattctctctcgcgatgctgtcaccgtagcagtggatgttgttgtctattttcgtatttcaaatgcgaccatttcggtaaccaatgtggaggattcaagtcgatccacaaaattgttggcccaaaccacgctaaggaacattttgggcacaaaaacattggccgaaatgttaagcgaccgcgaacaaatctcgctgcaaatgcaaagcacactggacgaaataacaaagtcggaaatataattcaaggattgggatatatttcagatggactccataaaaatagcaattcttaatttaatttatttttaaatgcctccctaac

SEQ ID NO: 94296 - DNA, 495 bp, Heterodera glycines
aacaagggcacaacatttgtctagcgcaatctttcgccaaaaacatgggtctttacggtgagcgtgtcggtgcgtacaccgtcgtctgtaaggaccaggaagaagcaacccgagtgatgtctcaactgaaaattttggttcgtgcaatgatttctaacccgcccattcacggcgctcggattgcctccaaaattttgtcggactccaaattgcgtcagcaatggctcgccgatgtgaagggaatggccgaccgaatcatttcaatgcgtacccaactcagagaacaactggccaaagctggttctaagcgaaattgggatcacattgtcaaccaaattggcatgttttgcttcaccggaatcactcccgaacaggtcgatcggctatccaaagaatttagcatttatttaacccgcgacggacgcatttcaatggctggaatcacatcaaaaaatattgaatatattgctaatgctttgcacgaagtgacgaaat

SEQ ID NO: 94297 - DNA, 529 bp, Heterodera glycines
cctcgaactcgcgtcggctcagcagtccatcgtcgtccaaatctgttaggtcaaagatgttttggcagcgaaacggggatttcgacaatcatttaaaatgtagcaaatgcagcatatttattcccgactatttccaaacccaccgaacatgtcaaacagattcatgagcatgcatttgaacggtttgtgctcggcagaaacggactctggtcaaatggtttccggccggcaccgacacccaatccgtggtgcatttctgtgatcagccgacggtcacaatatttatcattttaatgatgctgccttccactcactccgttttcctttcgccgcgccaccgcgtggacgcgcgcgttcgactccaattcggaggacatgagaatgccgaggacggagttgtggaagcggctcagagagtgatcgactgaccagcccgggggagggacggacaattgggcacggcacccgacaaaacaacaactcactggcttcgttgacgcaaatggacagacgcatttgcggggccttt

SEQ ID NO: 94298 - DNA, 473 bp, Heterodera glycines
attatctgttccaacaggacaaaccatatgatgtcagctacgataccggggacaaggcgatgcaatgtgggcgacacaacgacattttcaagttgtggcttatgtggcgttccaaagggatggaaggttatcgacgtcaaattaaccaacttatggaccttgccaaatattttactgataaaatcaaacgcactgaaggctttgaaatggtgctggacgaacccgaattcttaaacatttgcttctggtacattccgccaagcttacgtaaacaaattgacaacaaagaaaagatggcgcgtttggagaaggtggcaccaaaaatcaaagctcgaatgatggagcgtggcacaacaatggttggctaccaacctgacaaacaacgtccgaacttcttccgaatgatcatctcaaacccggcaatccgagagatcgatttggactttttgatcaacgaaattgtcacactgggg

SEQ ID NO: 94299 - DNA, 588 bp, Heterodera glycines
tcttttatttaccttttttcttacattttgtacatattctgatgaggctttaagaataattcgctttttcagcagtgctttcttattcttaatattattagctgcttttttttctcaacatttattcacttcaaatgttttggtttcgtttttcccattttcttttctttttgacctttttctcttttttcttttacattttcggcgcttcaccgaataaaatgtgagttcagttgtcagttctgttcttgccgaactcagtgattcttcagtcaagcaacgcctgtcgatgccaaaaaaatggttgagagcagaataaaatgttacgtgtgcaattccgggacgaaagggcaagccgactgcactgaggacgaccacgacaagttgaagacgttcatcaaacaatgcaatccgttaacttttgggacttttgccggagagaagcgaaggcgtgccgaaaagtgcgccaaacgggtggaggacgagacgaccatcgtgagggaatgcgcttacacgggcgaggagttggacggaaagcgacggaccggcacaaaggggtcacagtgctcatcgaacagtgcatcaacg

SEQ ID NO: 94300 - DNA, 543 bp, Heterodera glycines
ggcaaagcggtgattattcattcgaataagtgccgtatttttcaacaaattggcttcaattagtcaacaaattttgttgttggtataagtgttcgttttttgtgctgtcctttctccaacttcgtaccgacaccgcctcagggctcttcagagaatttcggtgccaattcgagaaaaatctcggcttttcgagttttatttcggtaaattttcccttccccatgggtcatttatttatttattgactcggtttatgccaagaatatcacattggctaattattctctctcgacctttagattggctgtccatcacttacccaatgggtaatttgtcgtcaagtttgcgtcgctcaatgccatcagtgaattcgtccgccgatggcaccggtgccggtgccgaacacctcgtccagcgggtgggcaccgcccggcatagcagcttctccacggaggatggcgccgccatgtgccaaaaagagaagcaacaaaattcagttggcattgccgactccgaaacaaagtgcgagcaattaacgttgat

SEQ ID NO: 94301 - DNA, 466 bp, Heterodera glycines
ttttaattagtgatgtacgtccgagagttggaatctccagatgagcactccctggttttattcaatccgcttcgttcttgctttcgtcctactagagatgaattgttttcggcaattgcctgtcagcgacgctctatcgcccgtctggacactgaaagggcccgattccgtcgtttgaacggagctcagttccgtgtggttgtgcgattgtcaggaggcttcttgccaaactttgctgctgttatgccacagcaacagaacgtggtcaatgtgactgcggttatcgccaatgccaatcccaatggacagaattataaccgccttcagcgtttgcacgctgatttgacggagaccatcgcccgtttaactgtagaaatttctcagttgggatatatgtatgagcaattgacggaacaacttgaacatctcacggaagtgcctccgaatccgaattttaatccggctt

SEQ ID NO: 94302 - DNA, 100 bp, Heterodera glycines
tgacggaagaagtctttgaggtggattgaatccggtgatcttttcattccccaattttgtgttatatgttggttttaaaaaccagtgttgttattaaaaa

SEQ ID NO: 94303 - DNA, 469 bp, Heterodera glycines
attcttcaaattctcaaaattcgcccttcgccaatgtttccaaacacaaattccttgtcaaattctccccattcggattctttcaatagaaattcaacctcaaaaaggtgggaggaaacaattgcttgggtcactcacggaaagcgattgtcacggcgaattctaaatccgtcaaaggatttttcggacggagcgcttgttgcggagattatcgctcaacatttgcctcgttatgtgttatctttgaattcttttccccaagttcattcgttggctttgaagaaatacaattgggagactttggaaaggaccgttttacgccatttgggcatccatatctccacagagcatatcgaatctttggcaaatgccgaagagggaaccatccaaaatttccttcccattcttcgatcccaaattgacgatgccatttccaaacggcactttcgaccctcttccaccagcagca

SEQ ID NO: 94304 - DNA, 454 bp, Heterodera glycines
gatgcgcaagaaggagcacaaggttcaaatcgatgacaaacacaaagaaccgtttagttttcttgcttcaattggtcgggtttatacaagtgatcacgaggaaatgccggttcttcggaacgcccttcccttggaaccaacttttctactagtcagtatgaaacggcggatgttggtgttggaaatcagaaaagcatttgtttttttgttaatgctgatactcccactattcgttcgtatatgtcttcgtttcggagacatcaaaaagaggagactttgcgcaaggaatgggggaaaaagcgagagtcaattgttaagttttataaaaaagaaaggaagtctgcactccgatatttaaagaaacgggcacaagaaaagcgataattttatcagaccgatttttgtccgtgtacatgttccatgcgaggtttaagaagccacgactaaattttaa

SEQ ID NO: 94305 - DNA, 147 bp, Heterodera glycines
aggcgactctttcataggaaggattggattattaatccgctttgcgcggagagtgaactgactgatcgacacgcgatgctccgattttatcaccccacccattcattttcggttattttcgccagtgcggtctctttcccttaaaaa

SEQ ID NO: 94306 - DNA, 511 bp, Heterodera glycines
  unsure (1)..(511): unsure at all n locations
gtccgctttaatcctccaatccgtccgtctccattcatttccaaattattcaaatcctacaataacaatacataaaaaatggagcattttccttctaaatttgttctctgcttgctcattgcattcatcgccgttccatgctctgttttggcactttctgctggcagccgcgtgtcgatgctcgcgtgccacaacaattaccgctcacaactggcaaaaggcactgcggacaacaaatcggtctacaaaaaaggtgccgcgtgcagcaagtgttcggattacaatggggcgacctgtgacagcgccagcggactgtgcaaattgccataagtgaggggagaatgcttggaagaaggattttttaatttgatttatgaatattgtagaatgggagtgaataaatgggcattaattattaaatcagggcttttcatttgaaataatgttaaatggnttattttcattattatattataaataacaaaaaacggcgcataaattttggaaaatt

SEQ ID NO: 94307 - DNA, 72 bp, Heterodera glycines
  unsure (1)..(72): unsure at all n locations
aaaaaaccntttcccaaancccnttttaaaattttaaaaggggggggggggggggggggggttttttttccc

SEQ ID NO: 94308 - DNA, 165 bp, Heterodera glycines
aatacaacaaaaagaattggtgaataatgatgatgcttatatgtatatataaatacagataataatgctaaaattcgaatatttcataagggcgaaaggcgccctgagtgagtgatggtattgtggcgcggtgatcagcagaaagaaatcttagagaagagagca

SEQ ID NO: 94309 - DNA, 468 bp, Heterodera glycines
caaagccaaagggaaagagaaaagccaaatccaaacaaaaagtaaacttccaatccaaggaccttgtgaaaagccatctcatctacgcagttcgtgatgagattgaactgttacgtgcgcgaattgtccatttggaggcgacggttgatgggaaagggggggggcaatagttaaataatgggttggttgccgaccgtaggggttgggtcggggtcatcaaggtcggggttgaccaaatcgttcagggtcgggttcgaggttttaattttttttttttctttttccgtatttttttttaaattttcttacttcaaaatttaaactcttaaccatcaaaaattttgaccacttaaaatgtttttttcaagatttaaatgtttcctacatcaatattccacggaagtacaaaacttttcgttttgttttttggggttttcgatttgttgcttcatcgactccgaaataata

SEQ ID NO: 94310 - DNA, 249 bp, Heterodera glycines
  unsure (1)..(249): unsure at all n locations
cttgaccattgataaaagaataggctggagaatttggcacatgacagataaaaacgaatataccaaaatataataaaatttctatttatttcccacataattccccatcggtttgcttgttatgtttgtcgttctattctctctttttccccaaattcgcttaaatggaagatttataagaaacttaataaaggattgattcnttanaaaaaaaaaaaaaaaaaaaaaaaaaaaaaaaaaaaaaaaaaa

SEQ ID NO: 94311 - DNA, 166 bp, Heterodera glycines
tgagaaggaagggaaaaacgttttgggaggggcaaaacgtttgctgaacaggcacagcatttgctcgactttctcctcagaattcgccattttccgttcatcgacgacgaaagttccgaaggatttccatttaaaaagaaatcgaaggacgaaacgaaaaaaaaaa

SEQ ID NO: 94312 - DNA, 436 bp, Heterodera glycines
agtcaatcaactccattaacaaattcctttataaatgtctttcggagcagcagatagtggcgatttcgacgattatgacaaaaacggagcggatgagaaggaatttcggtggccacccgagttttgcagtgattcattatgcatccaaccaaatgctaccgccccgggcggcgcttcttttgtgcttttgccgctgctcacccattgtctgcaagacgaggccctctcccaaattctgccgcttttcctcctcgtcactttgcccattttgtgggtccaattgtccgctgcacggcgtgaacagcgcgaaacgcactgcgaccgttccctgccgcgtggcattctgatcaaaatgagaaaaggtatcacaattatgttgtttgttctgaagtctctgttgctggtgagaaattgctacggttggctttgggggaac

SEQ ID NO: 94313 - DNA, 506 bp, Heterodera glycines
tttggcaccaattaccaccgtttttccatgtgaacgaatttcatttcctttcagaaaaggagttaccaggggtaaaatgtaattttcacccatccaccattcttgtggacttgtgattttggccaaattaaggtaaaggagttggttaagcataattcgacctggactgatttcggttaattgccgggcatagatggtttgggggcgaagcatttgcgcagaaatgacggtggctgatctgaaatccccacctctgtatcgttttaagtcggttacaaaaccgggttgaaatgaaccaataaccaattttatcacctccacctttatggcaacagcttgaacgttgatcctgccttgtacgaaccacgagcgcaacgaatcgaccgggtttaagtcataggacaatctttcaaatccctccttccactcaaacttactgaccacaactgtgtctcccatttgaaggcgtctctcggcacttaccaaagtatcaggaattcccataa

SEQ ID NO: 94314 - DNA, 259 bp, Heterodera glycines
tttcctatacaccttgaaagctctcctagtgtgtatcaacaatgaagatcgcctccggatgatttcaatgacagatgtgggatatgtgggactggtgctggagcgtctcataaagggagtcctcggcatcgaatccactgctccattatcacgagacgaccgtcgcgcctgagtgaccttctgtactaccacctggataacaactgatcgctctactgtgcatatcccactacccaatatctgggcaaacccgacttac

SEQ ID NO: 94315 - DNA, 101 bp, Heterodera glycines; identical to SEQ ID NO: 84621

SEQ ID NO: 94316 - DNA, 484 bp, Heterodera glycines
ccttcacttattacctaaatgtcgcacggtaaaattcgaatttgcctgaaaagaaccttaaattcaacaacttttttaacaacgacagaacaaagccaaaacaaaatagcaaaaggagacagtgaagtgtttggagaaggaatggacaatgaacagcagaagaaaacgcatagagaaagaagcaaaagccagtaaagtgccgaatgtttggttatgtgccctttgcatcattcagcaacgattggtccgcccaattctctcctccgtttgctttgcccacccaaccgaaaagtcgtccctcgtcctccaattctcccccctcggcagcagaagaagatgaaaatccgctgccagccgcgttcagaattggcaatgagtcggagagcagtgacgagagcggcgcggaaaggtcggaacacgaggaggaagtgatcagacgaagcaaacagatcaggaatcgagaacgatgggaactgctcaagta

SEQ ID NO: 94317 - DNA, 394 bp, Heterodera glycines
atcggcgtcgactgtcagtgccgcttcttctcgcgcttcggcctctttgatgcgttcggccagtgccgtgccgtccgccggcagcggcggcgaagcgacacgggccatcacgtcaagatcacccgcaccagcagcagcatcggcacagaggtcgagaacggtggtggacagaaacgcgagtccggcggcgatgccattgcagacttctgcatccctaacttcgttgaccagaaaccgcacaccaacacggaacagtaccaatgcacgaagaccgtacggtctaatgcgtgtgcaaagttcgagcaatgcggtggaacgtaaaccggcacaaatgtccatcaaagtgatcagtcttacatgattaaacagaaatctgcatgatcacaaaaaattc

SEQ ID NO: 94318 - DNA, 281 bp, Heterodera glycines
tccttattttttgtggccttttaaatctcattgcccaattctttctctgaatgattttataggcttgtgaggacttatttttagtttttttaatttctattcattatttttatcttttaacattccttcccatttaaaagtgcaatattttttcattttcattaattgtgattgttggaaaatgtgttaagttggagagataattttgttaattcaattttgctcattatttatctttaaatttaaaaaataacagaatggcataaaaatgcgtatttgtc

SEQ ID NO: 94319 - DNA, 90 bp, Heterodera glycines; identical to SEQ ID NO: 61246

SEQ ID NO: 94320 - DNA, 380 bp, Heterodera glycines
cccgaagaaaagcctgaggcacctgccgaaggcgtagccgtagtgccggaagcgaagaaggcggaagagacaaaggaaaggctgaagcaggaagagaaaccagtggaagtaccaccatctccagcagaaaagaagagaaaagaggctgaggagaagaaggctcagaaggatgccgaggctaaagccaagaaagacgcagaagagaaggctcagaaggatgccgaggctaaagccaagaaagacgcagaagagaaggctcagaaggatgccgaggctaaagccaagaaagacgcagaagagaaggctcagaaggatgccgaggctaaagccaagaaagacgcagaagagaaggctaaaacggatgccgaggctaaagccaa

SEQ ID NO: 94321 - DNA, 438 bp, Heterodera glycines
tgtgaggaggacggaataaaagtgcctttccatttgcacccattcaccatcaaagacttggacattctgtcgatggcctcacgtctccgaacgtgtcctcagcttaaagaaattcgatatctgcacccggacttcgacaaagaagaaatgcttgcctacttcgaaagtgaggagcagcggctgcgagcgaacgaatcaacgacgggatatatagaatcggagattgtgatggtggccaaaacgacgggaagcaaattgtgctcggcacttgggagcgattcgccttcgccaatgtccaaccaatggtcgccgggggacattcagcagggcaattccatggaaataagcgacgaaatcgtgtcgatgctcagccaaaatcatttagaggcgcccaacgtggagagtcttctcggcggcttacaaatcggacaacgaatg

SEQ ID NO: 94322 - DNA, 478 bp, Heterodera glycines
caaggagaattacgtccagatggaatcaaaggacgaagcggtcttccagcagctgaagggcgatgcccagttgggaggcacctactatccgctccagggcatgaccaacgacgtccaaaatcagctgattgccgaccacttcttgtttaaagagggcgaccgttttctgcaggaggccaatgcttgccggtattggcccaccggactcggaattttccataacgccaagaaaacctttttggtgtgtgtcaacgaggaagatcacctccgtatcatgtctatgcaaaatggctgcaatgttggacaagcgctggagcgtctcataaacggagcctaggacatcggatcgacaagtccgttatcacgtgacgaccggcttggctggctgactttctgttctacccacatggggacgactgatcgcgcgaaggggcatattcgactttcgaagatcagcgcaaaacccgacttcaagtca

SEQ ID NO: 94323 - DNA, 186 bp, Heterodera glycines
  unsure (1)..(186): unsure at all n locations
cgagttagccaagcggaaaccggtccaaatgatccgccaaaaagtgcggggacgaaaccgccagcgatccttccgagaccgacagaaatcgctgagggcatatttgctacgtcaacaggggaaaaaagtaaaatgattttgttgttattttttttctttcgaataatgggaaagtgattanaaaaa

SEQ ID NO: 94324 - DNA, 240 bp, Heterodera glycines
  unsure (1)..(240): unsure at all n locations
aaatgatgatgccgaagaagtcgaggaggggggaagaaggnagnggnnnnnnnnngnnnnnnnnattacagganaaacaaggcaagcaagaaaaccaaacccccacccgggccatttgggaattttaaaaattaaaaaaatttatttttaaaacctttttaatggttttttaaaaaaatttttgggaataaaaattttaagcttaattggaaaaaaattttttttggcccagggtttaaa

SEQ ID NO: 94325 - DNA, 554 bp, Heterodera glycines
tggttttaagggttggataatttggggtttattgcatttttcttcggctgggcgatatccctgaaattcacacaaaacccattttaggcattgaggctgaagtctcttccgactccgaaggtgcttccgttgcgctacagaagacagaaacggtggatgccattgtgtcccaaactgattgtgagctttacgaatgggaaacgacgcccttttgccagggggccgaggcgcgactgttcgcgtgcactttcctccgtcgtcgggcagtgatgaaagagcggtttgtgaagcggtacagacacgcggaattggacgcgcggctggcgaaggagaggacgcgggccgaactgaaggccatcctcaaatgccaagagattggcattcgcgtgccatccgttttcttcgtggacccgctcaaaaatcggataattttcgaactaatttgctcgtctggcagcagcgacagagcaccgaccgcaaaacattttctggacaaattgcagcgggacgaatcggcgtcgaacaatggcgaacaatttgcagctcaattggcg

SEQ ID NO: 94326 - DNA, 417 bp, Heterodera glycines
tcggacagcgatttgtggggtcgaaaatgagctgaaagaatacaaaatgttgctgaacaaatttaacagtggcgctactcgtgcgcaacttttcaatgaacacgcttttcgtcgtgtcgtttaccttaacaatttaactcctcgggccatttgcccttcgatatttaacgttgtattcaatgccgaatatgtcgccgggaataggaaaattgctcgcgctcagatcattcattttgttattcgtgaggttctggcattgacgagaaatgcttgcgtcgacatcgatatttatttggatactttgttggattatttgtcttctaaaatcaaccgaacggaaattgtgattttccttaaacagcgcggcattcaaaacccgcatcattttttgataactcaacccatttcgcttcgacg

SEQ ID NO: 94327 - DNA, 484 bp, Heterodera glycines; identical to SEQ ID NO: 85131

SEQ ID NO: 94328 - DNA, 233 bp, Heterodera glycines
ataagcatccatgagcaagtgatggagaacacgaaacgaatgacctttcgctcgcaacaagtggctttacaattggagaaaattcgaattgatagccgaaagggggccacgtggaaaaaaggcgagcgggaaattgtgtgagaagtgtaaaaagaaagggagatgctcttattgtccattttgtgtttcatttgtatttgttttgttgaatgaataatggacttgcttctttc

SEQ ID NO: 94329 - DNA, 410 bp, Heterodera glycines
atagttttgtcaaaaatccgcaatattggattcatattgcggctaatgaacaaaatagaagcgaatttatggtgatatcgctcttacaaaaatacagaagagaagagcgacgggtcaaattgcaaatcggattctctgtttttcgtgtgtatgaatcatcagaatttttgaaggccgagaattttccattgccggtatatgctgaaactccggctttttcgagagtaagagaggcaacacatcattttcaacttgaagctggaaattatgtgattataccatcaacgtttggaagaaatgaagaaggggagtttttattgcgcatttttacgacagggactattggaatgtacaactcaactcctaagaatttgtgccctgagcaacgctataattttggtgttcgggaa

SEQ ID NO: 94330 - DNA, 394 bp, Heterodera glycines
  unsure (1)..(394): unsure at all n locations
cgtcgaaatcactgagcgtgcgatggcacacagcggtaccgccgaggtgctcatcgtcggcggggtcggctgcaacgagcgactgcaacaaatgatggacacaatggcgcaggaacggggcgccaaactgttcgccaccgacgaacgcttttgcattgacaacggcgcaatgattgcgcaggccggctgggaaatgtatcgtgccggactcagagcatcgcttgaccagtgcacttacacacaacgttaccgcactaatcaggtgaatgtgtgttggaggaaatgatattttattactgcttttttgatgttttttaccaaattttccgtcacagattttttgtcttttttgttgttgtttttctcctttgaattaaacaattatataagaana

SEQ ID NO: 94331 - DNA, 525 bp, Heterodera glycines
cattttcacccattcaccgcatttatttggcgcaggaaaggatgagcagcggcggcgctaaagtcatccccggcggcgttgttgccgttaagcgtttttgcccgcgggcactgtgtgccgccattggctgctggcagtttgccgctgtttgttgtgcccttctcatggtgcaagccagcatcgttaccagcatgcacatcaaagacacgcagaacgacgaggatgtgctgagacggcatttacaatttcgacaacaacaacagcccatttttgcccttccattggatgtgtttgatgccagccccaccgcggtaattggtcttaagccgtttgctgagcatttggtgttcgagaagcggtttgcgccacgcgagatgggcaaacgagagcgtatcatcatggatgctatgggcggaaacgactatctgatcaaacgttcattcggcagaaaatgaattagccaaatgatgatgatgataatttggcagcctttattttgattggggtggcatggtcaaatcgatg

SEQ ID NO: 94332 - DNA, 51 bp, Heterodera glycines
ttaatatgatgagaattgcctgttaaattttagcccaaaaaaaaaaaaaaa

SEQ ID NO: 94333 - DNA, 485 bp, Heterodera glycines
caatgtgcatcaatcaatacccatcagatcccctaagaaagaattattctattttttttaatttctaaaaatgcatcggattccattcatccaacttttcattctgttgatcaacatgatcggaattgccaattctaaggacggaattaaaaatttatttgttgggaaaaagaacaataatgactatgataagtgctctgatcaattccattatgaagtgatcgaagatggcacaacagaggaggaggacatgaaaaaagcaattcaaattggcaaaacattcttttggcgagaaatgatagcaaaatgggaatgtgaaaatgaagatttgtataataacccgcaaaaaattggaaaaaaatccatcaaaaaattaaaaagaatttgtgaaaattggaaaatgaaagcattgtcagccgatgcattcgtgaaaagtttaaagtgcaagaaaaagcaaaaatattttatggtcacacttttaataa

SEQ ID NO: 94334 - DNA, 436 bp, Heterodera glycines
tggcaagatcgaaccggccaacggactgaacacggcgatgtgggccccgcagggcggttgggtggtggtgatgggggtgaacacgtccagcggaattgtgagcttcatcgacgcgacgggggcagaggcgaacaaagctgaaacgattgagcatacttcactcagtcagggttcttgggacccgaccgggcgatactttgccacgtgcactttcgcgggaaagagtcgctatgagacgggctatcgcattcactcgttccaaggacgtgagctgcgacgtaaggcggtagacgccctgctgcgactcaaatggcgtccgcggccacccgtttcattgtccgagcaaaaagtgcgggagactcgcaaatcgttgaagcaattgtcagcgaagtttgaggaggaggacaaaagggaaatgctcaaagtttcgaaggaa

SEQ ID NO: 94335 - DNA, 396 bp, Heterodera glycines
agtatgatgccataatgagggagtgtgtgagacgcaagtactttttctggagaaatgtgctcaaggagcgtccagaaaccaaagagaaacaacagtctaaggaacaagtcgttcaggctgttcgtgggtataagcttccaacacaattgtttttcactgctgctggtattggtatcgcatacatgctgggcctgtacaataatcctatgtcatacagaattatttgccttggaacaggtctgttgtttggaacattttatggagaattcaaatatgctactgagatatttgattctctaccaaagcttcctgataaagctctagagaaagaaagacaagatatttacaactattgcttcagtttggatgtcagactgattgcggatgctttggcta

SEQ ID NO: 94336 - DNA, 457 bp, Heterodera glycines
gacgaggaggtcagcccgtccggttcatgtgccgaagaagaggaggaggaggaggacgagcagcagcatcagggcggcaccgggccgcccatgctgaacgtgttggacgaattggtaggacagttggagggcctggacatcgaccaacagcaagaacacaaaatgggcctctctgaccacctgcaccagcaacagcatcaccagccgatgccgccggcgccgcgttatgcggactcttggctggacaacatttcgcttgtcccctccgactccgggtccgcttgtctgtacaccggtgccaacaatgtctgtgccgccgccgtgccaatggcgtcacctttccaacagtccctgcctccatcgtcgttggttgagccgccctgctccgactatatgaccgtgccgccaatgctcgcctcggtggaccttgcgatgccagcggagccgtccccattgg

SEQ ID NO: 94337 - DNA, 116 bp, Heterodera glycines; identical to SEQ ID NO: 52452

SEQ ID NO: 94338 - DNA, 521 bp, Heterodera glycines
tcgtaaattgccgacgacggcaactgttggcctgttaattactctgaaaagggttgcaaaaccgttaactatgaagaataacctagaagaagggttgaacaccgaacagcgcaacaccaatcaacgaaaggaccaaagttcaagtacagcaagttcatcgagaagtgagcagacttcaaaaatcgaggaaagactgagccctgatcaaaaacatgacaaattgaataaaaatgatcgaaaaacaagcacgacttccaaaaaggatgagacaaagctaaagattaagccaacatttgagcaaaatcaagatcaaaacgcaacaagaagctcttccaaaactaagcagaaaaaaggaaatgaaaagccgatcaatgatcaaaggcctagcagaaatttagagcaaacaacaagcattgcttcaaatagtgatcaagcgaagtctaagaaagaaattaatctggcaaatcgccaaggctctggtcaaattagtcagaatgcaactgcggcttcaaagagtgatc

SEQ ID NO: 94339 - DNA, 258 bp, Heterodera glycines
  unsure (1)..(258): unsure at all n locations
gacactttgctgccactgatcccggcacggaaaatggagtggacaagttgaacagaaagaaaggggaaaggtgcgacaatctcttgttgttgatgttctggctttacacgcgcatctcttctattttctcaaattgtcaaataaaagcgggtctttttcacacaatcatttccctctgttaatattttatttcccttgtttttttatttgcaataaatttgtttatttttttannaaaaaaaaaaaaaaaaaaaaaaa

SEQ ID NO: 94340 - DNA, 611 bp, Heterodera glycines
ttttaagtattaatctataattttatcgtaattgaagtttgtccatcacacaatataaattttccatctcaaattaatttaaaaatgtagtagtttgtgtcttcctaaattggtatattaatatgtccagattagttttttaagtcagtgagtgattagcctttttactgattgattcgatcatacataaaaactgataatcacaaaacaattgggtgcatagttttcttttctcaattagtaattaattaagggatttgccattttaaagtgcacagccaccaaaagccattcgtaagacgcccgcccaatgccaacttttgcagaacttttcgaactcagcgcaacgggcaaatttttggcatttaattaaatgatgtttttccaattgtccctctgcagatgtcgtcctcgttgttctgttcgtatacgtcgtctacaaattgttcttcgctcgtcgccatattccgcctccccccgacgtgccgcaagtcgaaccgttgggagagcaggacatgacggtggagcagctgagacgctacgacggagtacaagacgaacacatttgcatggcaatctgtggaaagatttgcgacgtgacaaaggggagg

SEQ ID NO: 94341 - DNA, 431 bp, Heterodera glycines
aatattaatctgtttccacaaaatcaaaatttcacaaaatctcgaaaattaggggtgcgcctaccattttccatcatgaaaaacccggtactgaagtgtccaccttcaacaggactaaaccgtccgacatttaaaacagcgggatacgcaaatttgaaatttccggtctctagtgaaaccactttttagccaatttttttttgggattagaataattatttaattatttttttagaaaacgcttctcctcctcctatcatgaacgtacacaaaattgtgttgttccttttcgttttgttgagtttctgtgctgcaggcgttcattgccattctgataatgatgaaagaaacaaacctaagtcagcgctaaaaaaacaaaaagacaaaactaaaggtggtaatccccatactccaacgcgtagaaaaatgaa

SEQ ID NO: 94342 - DNA, 573 bp, Heterodera glycines
acaaaagataaatttgaggttggattagacgtgcaattttttgctccacaagaaattgaggtcaaagtgtcggttgccggcacaagtttggaccgacggacagctcagcttaaccatgtgatgctgcaaagggccggttttcagccggcccccgaagatttgcctgaaaattggccagacaaagcgcaaatcgaatcaatcaaaatggcatgggaagcctataacaaatccgatgcaattgtggtgattttgatcaacgaaatctcggagactattttcgatgcaaatttcttcgagactgagttggaccgactctcaaatggacgcattaaagtcgaacggattacattgaatgattgtgcacacagatgtaaattggatgaaaatttcgcactgcgtttggacggtcgcgaagtggcggtggttaagtcgcgctattccgtgcttggattaagagccaggggcagcgaattgaacatattgaaaaatttgcggttgatgctcgaacgatcactcgcaatcaaaattccgtcgactttcattggctttagctgctcaaagaaagtgccacag

SEQ ID NO: 94343 - DNA, 598 bp, Heterodera glycines
gcagaaaaagcggatcagcaaaactggggagggggaggaagaggagggcgaggaactgatccagcaggaggacgacttgcaaagtgtggaaagtcagaatgagaattgtcgcgctgacttttgccttgatcgtcatgatcatcagcagaatgggaatgcagctgatgatgatgatgatgatgatgaatgttgtgatcaggaaaaactcaaactgattgaacagcaggagacaatgacgacggcagaggcccccctcgaagcaaagggtcgtccccgtccagcaatgttacaaattcacaccgttcagccttatcagtcggcggagaaagtgaagagtccagcacccaatgctgctgctgacgaagcctttcttggccaaatgcgcgaaaaaaaaaagtggccggtctgatcgcccgtttcaatgcttttgcgccgacgacggcaacagctgtgaataatgagaacgctgctgggtggtggtggttcgaattcgaaaaaaatgggtgggggccgagccggcaaaagtgggcgaacttcgccaaaaaatttatttgagaaaaaattttaatttttgcggggaaaaaataaattgaaattt

SEQ ID NO: 94344 - DNA, 501 bp, Heterodera glycines
ttacgtgtgtcagtcctaatgaagtggatgccaatgagacgctcagctcgttgaattatgccaaccgagccaaaaatataaagaacaaggtggttgccaatcagaataaatctagcaccctgattacggatcttcgcatcaaaattcaactgctagaagctgaactccatgaatggaagacggggaagagacgtaggtctgggcacattgcagttactgagcctgaggacaaaaacagtaccgaacaagtttttggttgcttggcgagattggatgaggaggaggaagcggaggatgctgacaatgaggaagaacctggagagatggaacacgaacgaatctgtacggacttggacaaactgcaggagaatatcagcagcaaagagcgacttatggccaactacgagaaggaactcgagaagattaagcaggaaatcaaccgcttggaagagacgaagaaggaaaacaaacaggaaatcaaccgcttggaagagacgaaga

SEQ ID NO: 94345 - DNA, 490 bp, Heterodera glycines
gcgccggaggggacgcagcaatgcaacgacaacaccagcaacaacaacagcagcagcagaacagcctttgtccgcaacaacacatggggatgatgtgcgagaacggatggagggcgagtgacaatgccatcggcgacccatccttaccattccccaccggacaattgggcaaacggaaccgagcagtacatgaaattcacattccctctggctcgggtggtgctccgctgctccattcccaactgcgaaaaatgcggatttcaactggtgcatcggttccatcgacaccaaacccaacaacgagtgaccaaaacagtccgggtccgaccgaaaagagggtcggcggagttggcactgttttgggaatgtcgaaacgaatttcgctaccggaaaatttggaattccaaccgcaaatgctgctcaatttgaagcaatcaattcatgtggaaaaacagttgacgagcaactctgacacgagtgattccgcctc

SEQ ID NO: 94346 - DNA, 36 bp, Heterodera glycines
aaattgttaatgtagaataaaaacaaaattcaaaaa

SEQ ID NO: 94347 - DNA, 154 bp, Heterodera glycines
  unsure (1)..(154): unsure at all n locations
tcctccgtgccctccaccatgcccaccaccatgctgttgctgtggaggcggcggcggtggtggtggcggtagaccaatcattgtgaactgcggcggtggtggcggtggatgcggtggtggatgtggtggtggcggtggnggatgtggtggnggn

SEQ ID NO: 94348 - DNA, 427 bp, Heterodera glycines
aaaaatgcgtcggattccttttgcccaactgttcattctgctgaacattataattgaaattgtcatttttgtggatgggatggaccagtcccaatttgaaatgattgactattatggcacaacggagaagaaagacattgaaaaagcgaaacaaattcgcaacacatttgtctccattggcattgtgaaattggaaaaatgaaaaatccagaagaaattggtgaggaagaatccgctgaagaattggttaaattgtgtgaaaaatggaaaatgatggcattggcagtcgatgcatttgtggggggagatttaaatgtgaaaccacaatttgaactggtggtaaaacagcagctggacagaacccatcatcaactcctaatgagctcagcaatggaagcgatcaaaacaattattttggtaaatgaga

SEQ ID NO: 94349 - DNA, 406 bp, Heterodera glycines
aattaaaataaatacaataatccacataaaataaaacaatgaacaaatttgtgggcatatttgtcgctgttttgctccaatttgtttcgccattttcggcattttcccgcgtgccaacgacgaccaccgaacgaccgataatttatgacccaaaagaaatggtggaaatcgaagtgaatttggtgaacaacaccaacaacaactgcacaaatgatgttcttcgaaaataccgtgtggagatcactaattatgtgttctttttggtgtgcgatttgaaaattcaagtccaattgccggaaggggcaaccttggagaatgtcgtcaacctgaaaccgttcaatggcaccaccgatcaattcatttttcccgattccttgcgctacctttacgtttccaaaacgctcga

SEQ ID NO: 94350 - DNA, 456 bp, Heterodera glycines
gcctatcaaattgagaggacgacgacgacgacggatcggcaattaaaaaaacgccaaaatccgatggcggactatgattatctgatcaaattcttggcactcggcgattccggtgttggcaaaacgtcattcctgcaccggtatacagataattcgtttacgggccaattcatttccacggtgggcattgatttcaaggaaaagaaagtggtgtacaaaaatgcccgagggggcttcggtgggcgaggccaacgaattctgctccaactttgggacactgccggccaagaaaggttccgctcattgaccacggcatttttccgtgacgccatgggcttcattcagatctttgacatcaccaatgaacagtcctttctcaacgtcagggactggctgtctcagctcaaaattcacgcctacacagagacgcccgacatcattttgtgtggcaacaat

SEQ ID NO: 94351 - DNA, 484 bp, Heterodera glycines
aaagcggacgaatttgggtcaccgcttaaactaaaaagacccacggacggctacacaaagttgactcacgaaagagccgatgagacgcagagttcatccgctggcaatggcactgagttcgggcggagtgtgccgtcctcctccgatttggtccttttggtgcgcgccccctccccttctcttcggcaacttccgtttctttcaccggtcaaaaactggggaggttttctttctccaaaacaaactgttgaaactgtgagtgcgataagtgaattctctgccgatttattcaaaacgccgtcgcccgcgcggttgggaaaacggccgattatttgtgcaaatgtgggccaactgctgaccccagaaaaatcgacgatttccatggccgaaaagagcgatgagagcagccaattaaatgaaaagggagcagaaacagaaatggagagagaattggtggagaagaaaaagcgaacgcaacggaaga

SEQ ID NO: 94352 - DNA, 528 bp, Heterodera glycines
gaggaggaagaaaagtgatcaaaagaaaagcggaggagaaaagtgatcaaaggaaaagcggaggaaaaagtgatcagagaggaaaaacggaggagaaaagtgattggaggaacggaggaggaagaaaagtgatcaaaagaaaagcggaggagaaaagtgatcaaaggaaaagcggaggaaaaagtgatcagataggaaaaacggaggagaaaagtgatcagagggaaaaaatgtgatctgaggaaaagcggaaaagaaaaaaaaatgattagaggaacgatggaggaagaaaagtgatcaaaggaaaagcggaggaaaaaagtgatcagataggaaaaacggaggagaaaagtgatcagagggaaaaaatgtgatctgaggaaaagcggaaaagaaaaagaaaaatgattagaggaacgatggaggaagaaaagtgatcaaaggaaaagcggagaagaagaaagatagcaagcaccacatttgatttcatttgcactttcaccaaagcatcgtttgttttctctatta

SEQ ID NO: 94353 - DNA, 441 bp, Heterodera glycines
tacttgcagggcggccttcaaggcgttggattgaagacagccgaagaagtgttcacaaaggcatccagtcatgccactctaccgagtgtcctcgttcgtctgcaattgtacacaaataaacgactcaaagtaaaagtggacgctgattttgtggacgcctttgttcgcgcggagaacacctttttataccaaattgtcttcgatcctttaaagcgagaacagagaccattgaatgcctatcctgagacaggggaagaaaaggaaaatttgttggacaatgaaaagaagtcgtttctccacggaatgcccttcgccttgccttgggaaatgacgacctttccaagtcgtcgcttgaggatgaatttgttttgcccagtgaaattcccgtgtcgtcaatttggaacagcaattacaaaaaagtgttggaaacggaaaaggacc

SEQ ID NO: 94354 - DNA, 282 bp, Heterodera glycines
gcgaacgatgttggtgccaaagccagccaaatcaacgaagacaccggcgctggcaaatttgttgaagagcgtgtccttccgggcgcaaaagaattgacggatgaagcgaccaaatttgtccacgaacagacaacgccataagccacggcggaaggatgaaaagccgaaaagaaagagaaacaaagtgaaactcgaaaggcacggccaatgaaatgacaaaaagacatattaattgctttaaactttgatgaaatgtgctttttgtttataaatggaagtgcc

SEQ ID NO: 94355 - DNA, 422 bp, Heterodera glycines
ttggcatttttcttttttaaaaaattatagttcggctcaaacttgtggggccaaccgtggtaggaagaaaaagaaattgaggaaaagaagcgagcagaggaagagtaagaaaggaggagcgagaaaggaggatgaagagagggaggaagaggaagaaaacaaagggaggaaaagaagcggaggaggaagaggaaaaaggaggataatgcagtagggctgtgcgagaagtgatttttaccgggaaccgagaaacgagaccgagaaatgaccccgagaaacgatacgagaacctagaccccaaaaaacccgagaaatttctcgactcgggaatcgagaaccgagaaatctaaagtgacggcattttttttgcttttaaaaacgtttttgctgtttttccaaaaaatttttgtaatttcttaaaa

SEQ ID NO: 94356 - DNA, 478 bp, Heterodera glycines
ttgaataaaaattaattaatcaatgcattcctttcttgtactgaccattctttttgccaatttggcaacaaatgcctttgggcaacaatggccaaaggcaactagtgaagaaactgttaaggcaacaatcaaagtttcgggaggcgtcaaagactttggcttcaaacggttgaccgcctcttcggcattgggtagcggtgatcagtcggagggccaaaaagcattgatccgtgccgaaaagaacgcagtgatcaaaaatttgatcattggccaaaacggggcggacggtattcattgctatgacgggtgcactctgcaaaatgtgtggtgggagaatgatggagaacacgcggccactttccggagcagcatcgggtgcaaggagtacagtttcacggacacacgcggcggtgtgaaaaatgccaaagacaaagtgttccaaatgaacggcggtggcactttgacgatcaaaaatttt

SEQ ID NO: 94357 - DNA, 347 bp, Heterodera glycines
tatgtggcctattgtcggaattcggatgacctcgattggtacgagtttgacgatgcgaatgtcacccgagtgaacagcttggaagtgctttcccaagaggcgtacattctgttctacaggcagaaggagactttggaagacgaggaagcgatggaggaggacgaagtgttggaggaggaggaggaatgggtggaggcaaattcatccgacgaaatggaaactgagggcggcaacggcacgtgaaagcactgcggcccccccccccttattgtgattattcattatctttattacatgtagtaattatttgccgatttcgccaataaacaaatggacggaaaaaaaaa

SEQ ID NO: 94358 - DNA, 405 bp, Heterodera glycines
aacaattacaatgtgatcaagtcgggaaatgtgaaaatgacgataactaatccgaattatgacaagccgctttgcttgaaagggctcagccaatacgaggcgttgccctcctcgttgtgcaatttcgatttatgcaattttatcggccgcaatttgtgcgaattgttgcaaaggccaggcaatcacacggtgcgcgagatggagcaaaaagcggggtggaatgccactgttgtgatccccgaatcaccacggatattcggcatcccttttgtggaccttttcgctggcgagttcaattttgaatttctaatgaaaacggacgaaagaaaagaaagaaagacagcactaattgaaaaccaatgagaataataagaaacaaaatatttatcaaaaaaatgcaaataa

SEQ ID NO: 94359 - DNA, 75 bp, Heterodera glycines
tcctgtatatcaatgcatttattctttttattccatttatcatttttatattgtagtgatttttgtacataaatt

SEQ ID NO: 94360 - DNA, 364 bp, Heterodera glycines
ggacggcagcaatcagagaaacgatggaggaggccgggattgacgtgaacaaattgcgaatccacaaggaatttatgtacgaaatgcgctatttgtcaaaatccaccaaatacggggaggaacagaagaaagtcacttattggcttgccgaatccacagacccggaagtgatagttatgttgtccgatgagcatcaaaattggaaatgggccgagcttaaaagtgcgcttgaattggccaaatttgatgagatgaagaaacttctgaacaaagctgagatgtttattgccgagaatctgtaaaagaatgcaaaaatagataccctaattatcaattttattggaaaataaattataccttggtc

SEQ ID NO: 94361 - DNA, 419 bp, Heterodera glycines
ctttgttttggccttgtgcaaacggtgcgcgaggcgttcccttcgctgatgcatattgtgaaggagcaccgccaaaggaaaatgaacattcaccacgccccccagggggtggggtccccctgagaggccccgggggacggagccgggacaatccggcactttcggaaacaaatttttttctattttggttagcctttttcccaaaggtcccaactttctttaaatgtaatatttctattgatcgcaaatcgattcaaatattacaaaaatattattttcatattattgtattaattaaatttgttttgtttacataatttttctttgggttatttttctgcaattcgctaattccctttttctgtctttgtttttcttttcgtcttacttatctcaggattttttttttgttttattta

SEQ ID NO: 94362 - DNA, 455 bp, Heterodera glycines
tctctctcattaattgttgcacattccccaattttatttcttccttagtaagtagtattggtgcacaatgcgcacttttctgttcatagccgtagtcgggttgatgttggccgtcatcttggagaatgtaaatgcgactgggaaaaattcgccgtcaaagggaaaaccgtcttcagacagtacaaaccataaaaaagaccataaaaatgagcatccaaagtatgattccccaattttagccggttcatctggcagtccgaaaaaaggaaaatcgccgaatgccgatccgaaaaaaagctgcttcacaccatgtgccagtaacaccagggaaagtatgatgagcaaagtcttaaaatggtgaagaaactgtgtggaacgatgatgccaaccatgaacaaacccaaagctgttgtagtagatgtagaaaaaaaactgtggtatcatcacgcttttat

SEQ ID NO: 94363 - DNA, 369 bp, Heterodera glycines
acaaatgcctgaagcgcttctcccactccggctcttactcgcagcacatgaaccatcgctacgcgtactgtaagccattcatgcagcagagacaaagggccgaggagagaacgccgtcaaaggatgaaaacacagagtgaagcaaagaaagaacagcaagcacagtgcaaaaagagcgtgtgagaaattaaaaacgtcgcaaatccctcaaaagccaatcgaataaataacctctccgtcccttcaatgatctttagtatttaatttggtcgctttccctttttgcaaaaccttattaaccactttgacccactaaatgtgacttttggtgctatgcattcataaattaacataaccaaaaaaaaaaaa

SEQ ID NO: 94364 - DNA, 154 bp, Heterodera glycines
acaaaaccaaaacatgaaattcgagacttatttctccttcggaccaagactaaaaaacccgagacttttcccgagacgctcgaacaatattgtaaatgataaatatttggtcaatatatcaaaagatatggtgcctcccgccagggcgtaggcc

SEQ ID NO: 94365 - DNA, 423 bp, Heterodera glycines
ttttgcctttgttctttgctccttttccttctcccctcggctcttttcgctgatggcttttcgtcgtctggccaaagagttgttttggcccgggtgatcattttcaaagcatccgaaaagcaggggacgattgcttctcaacagtgtggtcgggagggcattggtcgtacatgagaaggcggacgacatgggcaaggggggcaatgaggagagtgggaagacgggcaatgcgggaaaacggatcgcatgcggagtggtgggagtgatcagagaggaaccaatgaaagtgaccactgatcagaccaacggaatgtgaaaacagcgatcagcagaggaattcatggacaatgaagaaatgcaatgcattgagtgttctattatttacgtcttttaattcatataacttatggaaataaagagcaa

SEQ ID NO: 94366 - DNA, 119 bp, Heterodera glycines
aatttgaagatgtatgtctatttggcataatgggacggcacgggaaaagagatgtgatcctcgatgacaacccattggaaatggctatttgataaattttgatatgaaaaaaaaaaaaa

SEQ ID NO: 94367 - DNA, 433 bp, Heterodera glycines
  unsure (1)..(433): unsure at all n locations
tggcaccgttcattccatggttggcttttcccgggcggaattgcgagtcaaaaagtaccgtatcactgtgtatgatttgggaggatcggctcgaattcgcgaaatttggcccatttatttcgccgaggtgtttggcgttgtgttcgttttggatgcgagtgccgccagtctaatcagtgagaacaaaaagatggtcgactctttggtcggactgcccgaccttctcggcaaacccattctgtttctgctcaacaaaaaggaccttccggaagcactcgacgaaatgcaattctccgaacgattcaatttgcattcaatggcaaaacagaacagaacggacattcgcgtggagggcatttgcgctgtcaaagggacggggaaagaaattgatcaggtcattgtggaaggattggaatggctgatcgagaangtg

SEQ ID NO: 94368 - DNA, 319 bp, Heterodera glycines
  unsure (1)..(319): unsure at all n locations
aaggtggttctgatggtggtggtgcattgagtcaacaaagcacgtccacggcgcccaacagaagcagtgaggaggaaagcgacggtcgtgttgatgcatcatcatcggaggaaagcgacggtcgtgttggtgtatgatcatcggaggagcacaaataacttagttttccactctcatttggcgcctttgtttcactaattgaaattgttttatgcgcgggtgcttttcttttctcaaaaacctcattcatttcatgctttttcgatgaataaaccgagttagcacaaaannnnnaaanaaaaaaaaaaaaaaaaaaaaa

SEQ ID NO: 94369 - DNA, 453 bp, Heterodera glycines
tgtttactgcattttttgttggaaaagtttctggccacaccataaataagtgattaattttcatcacaacgctttgaacggattttgagataaagcaaaaaaaaaaatccgctgaattatagagaattcatggaattattggagcagacaaattgtatctatcagaccatgtctaattcagcaatttgcaacacgacaagaatttttgtcaacatacaaaattgggtggaattttccatggtttgcggttcgtttgtcgcaatcgccatgaatgtgttgatcatttactgtgcactgcgcatttttaatcgcaaaaatcgcgacacaattcatgtgtatataatcagcatgacgatgggcgatctgattcttgtgatttgccaatttctcgagtcgatgaaccgcttgacacccgtccagttcatctccagctcttattatgcctgttttttg

SEQ ID NO: 94370 - DNA, 475 bp, Heterodera glycines
atttgggaaaaaagaaccccattttattcaaaagcgaatgtctgatatattttaatgatttcttaatggggattgaattctagaccggctcaaaaattgttgaaaaactaataactaattcgaatgtcaaccatcccaatgccaccaccaccaacacaagacgaaaaggaccaacaagtgccataaatgaatgtaattcaaagtaaaactgtaattaagaagaaatcccaatggaaaccgctggagataggaagtaagtctgagagattaaggaacaaagtccggaactttcagtccaaaacgagattttttgttcagcaacgaaaattccggacccagaagaattgcctttcggaattgtacagactgcattccgagcttcagatcggatgcgcacgacctcagaagattcggccgagtcttttgacgcctatggaccggagtgggaagggaagggacggggaattgggaacag

SEQ ID NO: 94371 - DNA, 525 bp, Heterodera glycines
agaatttcttcaactaaaatcataaacacattcaataagaaaatgatgcttttcattctactggtcataactttcgtccaaattggtcaactgaatgctggcatatgcacatttccaaatccgtcaaaaagtgttacggtccaatcgatgatgactgtttcatcgagtacggactataagaacactttgtttgtcggcggttccggcattttgaacggcgcgtgtgatgtgaacaatgacaaactgaaatatttgatgacattgaagaatggcgtgaccatcaaaaatgccattcttgacacgcccggtttgggcatttactgcgagggcaattgtgtgctggaaaatatttactacaagcgattgtgttaccatgctactgggttcgggtataagagcaccagcacttcatacacttaccaagtgattggcggtgctggccaaggttcacctgacaaatatttcacccaatcgggcaaaggcactaccatcatcaagaatttttgcgctgaagcaaatacggca

SEQ ID NO: 94372 - DNA, 527 bp, Heterodera glycines
cgcaatttcggaaggggtgccgggccaagaagtttcttcctcctcgtccgacatggtcggctcgtcctcttccgcttcgtccgcctcttcccttggcggcggcagcggcacggccattgtgaccacttctctgctgcgtccattcccttgtgcctcccttacgcatgcgcaccatcagcgaacccatttggcaaaggaaccgaaaagaaatgccgaagaaagcgaagggtgcgcgggagggacggcggaaacgaaatggcaacaggacgatagggacgaggacgaactgttctgcaagatcgtctaccggaaactgtgccgtattggggacgaacggctcaaagagtacgcgaaagcccgcataatcgatttgttggtcgacgttcagtacggaggaggcgcaggaacagccgacggggcgtaccgatgaatcgaaaacaatcgcacggcgcaaagaaaaccctggcgacgcattcagtggcaaaacgagtgccaatgtcacattcccatttgcaccttcgatttgt

SEQ ID NO: 94373 - DNA, 514 bp, Heterodera glycines
ggtgttcgtcaacgtcgatgagttcaccgactttcctcggcctctttttcccaatttcattttcatcggcggattggaactcgaaggaacacccgagctcaaagccctgcaggagccgttcaaaagtgagctgctgaaggggcgaaagggcgtcgttttcttttccatgggttccgccgtcaaaacggacgttttgccggcgccgtttatgaaaaatgtgatcggagcatttgcggaactgccggattggcatttcatcgtcaaaatcgagccggacgacgaacaaagccggaggatggctgagaacgtgcccaacattcgcctcacttcgtgggcgcctcagcccgccattctctcccatccccgcctccgtctgttcattacccacggcggttacaactctttgctggagggtgcacaaggcggcactcccgtgctcagcatcggattcttcgcggatcagcgaaagaatgcattggttgcgcagagaaacggatggggaaagagagaccgt

SEQ ID NO: 94374 - DNA, 369 bp, Heterodera glycines
gaggatttatcgccaaagttcggcggaatccgacagagcggcgaaaggcgttttatgctcccgatggatggcgatttcgtagtgcgacttcaccaacgaacgccgcctttgcgcttccgatttttcaatttgctcagtgtgccttcacaagtccaagccgaatccatagacaaagtctctcggattgctttccccacaatgttcgcccttttcaatattgtctattggtcttattatggacgaaaagcggctgagacaagcgccgaattgcattcgagcggaggaatgatgattcaatgaccaattgagacggggagaaagtgcatattgaatattcagattatatgaataaattgtgtattctgtcaa

SEQ ID NO: 94375 - DNA, 249 bp, Heterodera glycines
tgtcattgcgtgaaatttacagacggcttaagcttcttcgaaagatgcgacggagtcgacaatggtctcttcgacagttcccctaggccaagtgatcactgatcagcaacaaacagaagaaatgaattgattggttgactgattgattgatgcgattatgtgatcaaatattggattaggtattatgccatttgaatgtggttgtattgatttttgctcattcacaaatgaataaataggacttgttta

SEQ ID NO: 94376 - DNA, 491 bp, Heterodera glycines
ttggcaagttggagcagaaagttcgcgaactcagcgaaagatgcgcagaggcggagaggagaagcatcgaattggaagccaaaatggcggataaaacggaacagacaaagacgggacaaagtgaggccatcgtcgaaaatgtgaccgttgcgaaacgattccgagcctttgaccgacaattgttgcaacaaaagtccgatgtcgaccccatcactgtgctttgctcggaaacgttttcacttggccttcaaaagtccgacaacggcgaagggaattccgacccttcggagtgtccgagggaattctccacgtctacccctgtgccttccttctgctcaaagtctgaatcctccgtcagtttaaacattctccaaaatgctgacaccgattgtgaaatccctcacataatggcgaacgaaggaaatctctgcgatttttgtgtgacttcacgcaaagaattggattacttcaaatctctgcttggacattta

SEQ ID NO: 94377 - DNA, 434 bp, Heterodera glycines
ggaaaatccatttcaatctctcaattctccggacgatgattttatggtggaaatcggtgacagaaaggtggctttgtccgcttctcggcttcgctgcttctccccggtgatcgatcggatgctaagcgtggagatgagggagaagcagcagcgatcagtcactttgaacgaattgagcattgacatggaccaatttttggattttcttttgtacatttcgccaaatgctctgagccaaccaattcttcccaatccaaaaaatgtgcttactctgctcagtttggccagttacttccaaattgattggctgaagtcgcgttgtgagacgcttttgttcaattgtgtggaggttccgttgatcgaccgcgttaatctaatcgaaaaatatgggcttacaaatttgaaaaatttctttttgaatttgaatgtgcaca

SEQ ID NO: 94378 - DNA, 196 bp, Heterodera glycines
cgactacaacacgggtgcaacgacggatgttcttgtttgcagaaccaacacatcattttagtctctcgaaaatttcgtgaaattttatatccatttattgatacaacacactcttgtttttactaaacaacatatgtatgagggaggacgagggtgatatgatgatgatatgattaaatgattaattatcccccta

SEQ ID NO: 94379 - DNA, 386 bp, Heterodera glycines
aaaacattgataaaaatttaaatttgttttttttgaattcactcacatgaaaaagaagtgggaatggtgcggacgaggtgcaggcgtgttgacaatcaatgcaagcgcatgagtggtcgaatttatccggcacttcgttgcatttgatggctgtcattgagcatcaccacgttgatggtgaacggcacatgggtgaccttgctgtacgtgccaatgtattggaagaacttcttcggtgtgcacagttcaattgaagtgccgcaaagaatgcttaacacaaaggccgtggacgaagtgcgcacctttaaaaagagaaaatttgaatttgtacgaaacaaaagttggaaatggcacaaattgccaaaaaaaaaatttttttttaaaaa

SEQ ID NO: 94380 - DNA, 450 bp, Heterodera glycines
gtatttacttcttctttccattttcagcgccgaccgcttccgtcaaaatgttgcccacttacatccgtgccattgcggtcggtgaggagcacggcgaattcttggcactggacctgggcggcaccaactttcgcgtgctgctcatcacgctgaagggcgactgccggtcgacgatgcgaagcaaaatttaccgtgtgcccgaccacatccaaaagggcaccggcacggcgctgttcgaccacatagccgcctgcctggccaagtttatggaggagcacaaactgacgggacggccgaagttgccgctcggcttcacctcctccttcccgtgccagcagcacgggctgaccagcgcgaggctcaccaattggacgaagggattcaaagtgaaagcgaatggatgggtggtttttggcatttcatttggggtgcgaagagcaaggcacgacg

SEQ ID NO: 94381 - DNA, 451 bp, Heterodera glycines
ggcaaccgctctgaagactttgatctatgagttgaacgaagcacttgcggtcaatgaggcggcaatgggcagcgaacggacagagtaccagcaaatgttgagacgatcttttgacgggatgctggagagattgccgacattttttgatggcgaaaaatttcttcccgacgtgacaagtcaagacggaaaagccgcacttggaggtgccaattctcagctggtgaacggagtgctcgaccgactcagccaaatcggcggaatggcggcagaaatgcacattttcgactcaatcagcggacttagcgaataaataacggcggagaacacagaaaaatgattagagtatttatcctctgttagtttttgaaagtgattttgtactttctgtttcaccttttgcctcacaatcaacttataatttttgtgctttcatcgatctcaacatcatttt

SEQ ID NO: 94382 - DNA, 510 bp, Heterodera glycines
ttttctgaatttgttcagaaggagggggatgagcatatgattggagtcaccgagcaaatcaaaaagaaagtcttttctctgcttagtggcgactatggcaaatacgccacttctgtgctcctctgttccatcaacaaaattaccgcgcctgaaaaggggtcgcgccatcggcacaattggctgatgccattcctcgaggaaattcagtcgaaaatgcgggaaattgtgaatgattcttcgcttacatttggcgcagaattctcttctcaaattgtgccttcctttgagcatggaattagagagctgaactctctcctgcagaaccatgacattttgaacataaagccggagggagcggacatccggatgaggaaaagcattcaggagaacacggaagacaaagtgtcctccatttgtgtgatgggctatctgttgaacataatcgacgacctcaacgagtacatccgcgaaactgcagctgatttgagcagagaaagcccggaaaacgca

SEQ ID NO: 94383 - DNA, 439 bp, Heterodera glycines
cccaattaaaaaaagtaaatcctctttaaaaatgaaactttcaataattttattgctttccttggccttttgtgcgttaatcatcgatgcatatccatcgggaaatggtaaagatcttgaagctgacaacgaaaaaacggaagtgaaggaagagaagatggaaaaaagagaagcggaagtggaggacatggaggaggacacggaggaggaaatgacagcagcggcggaggtgatgattagaagccatagctaaaaagaagaagcataatatggaactaagaaaagaacgagcacaaaatgcttttagtcgcttattttttgctgcatttaaaatgttaaattttaaaaataaaaataaatttttgtattttttaattcatttctttttacccgcataaaacaaaattagctcttccgttcttttgacagtatccctgaa

SEQ ID NO: 94384 - DNA, 83 bp, Heterodera glycines
ggagtattagaaaagaaccatagatgtgttatatatatatatatatgtgccgttatttctatgcgatgaaaaacaattcatac

SEQ ID NO: 94385 - DNA, 124 bp, Heterodera glycines
acgatttagttatatattggcataacctatctataaaatatcaaaatctagctaaaaaacaaacatcaaggttcgtagatctgaggctttagcctcattttgtggttttttgttaaattttcca

SEQ ID NO: 94386 - DNA, 429 bp, Heterodera glycines
aaatggcattggaaaatggaaggacgatgaacggaactcagcaaaacaataaaacagcgattcgaccgtcggagtttgaggatgacacggagagcagagactttgaaaatttgtccatgtcagtgtcggaggcatcgtcagaagtgggaagtgtgtccatccaagacggagcaatgctaaaccaaaatgaacggccaatgcttgaaaatggaatcacgaaaaggaacgtcagactgaaaagtgatttaagaatttcgcccgcaagttccggaagttgggagagggcaattcgtcccgtagtgaacaaacatcacaatgccaatgctgcgtccgttggacggcgacctgcggcgaatacccaacgatcttcggtgtgttggtattgtggtgtgaaaggacatgccgcagcccattgtcaaaaaaagcgca

SEQ ID NO: 94387 - DNA, 522 bp, Heterodera glycines
cgcaagtgcgagaagacgcacattttgaccaacaaaatcataatgacttcttgcggattttacggcgatgtgctccaattgaggcgcattctcgagctacgtattaaccacttcgagtttatctaccagaggcccatgtctttggaccagtgcggtgaaatgctttcccgtactctttactcacgccgatggtggccaaacgaatgccatgacgacgtggggagagggagaagcatcgcctggccaattcgagagtctcgaccaaattccgtccagggacacagaaattttaatcaaattgaatttaaaattcaaacccaatgaaatttatttgttattattgttcgtgttttcattcttcaaatatcaaaaatatttttgacatatcgcccgccaccttcatttgagaaaaaacaactgtgagtccctaattttatcatttaaattaataattcatatttatattttgtttgtccattagctcgttcattttttctcaattaaatgattaattaattttgt

SEQ ID NO: 94388 - DNA, 448 bp, Heterodera glycines
caaattcgtttagcatttttttatggaaactctgctggacaaaaccattttttcggtcatcgacccgcccaatttgcgcattaatttgccgcgatggtttacgttccccacgcccatgcaaacctttttcttcattcttctcacttatttcctcgtctccggtggcattgtttacgatgtgatcaacgaacctccgtccatcggttccacggtggatgaacgcggaaacagtcggccagtggccataatgccctaccgcgtcaatggccaatacattatggagggcctcgtcgcttcgttgatgttttgtctcggaggccttggcattatcattttggacaagtgcacccatccgttgactgccaaaaacaaccgaatgatgcttttcggactcggcttctccttactgtgcatcggcttcttcaccacgcgaatgtttatgaagatg

SEQ ID NO: 94389 - DNA, 400 bp, Heterodera glycines
atatatttcataacggttagtaaaattgcctatttaatgaaatgtggtggtacggtggcccgtttaattgtttatcattctctgagtacggtatttaattttttggtggatatttggctaattaaaaatgatgtcaattaaaaaggtaaataaagatcatagtttaaaactttgtggcggtctctgagtcataagacgaattttgtcctttacaaaattagtaaatttaaaatataataactttataaaagtataaatttggagagcaaacggaggtaaaagaaaggggacgagaaaatttgtgtgatgatttgtcactaattattacacacattttatcagtgaaaccatcgaagaaccaaccatcccaatccatcatcatttgttaacactcgcagca

SEQ ID NO: 94390 - DNA, 89 bp, Heterodera glycines
ccgaaaattccagcgcagtgaatggaggaaatttatcttcctgtctataattttaattgaataattttggttttattataaaaattcct

SEQ ID NO: 94391 - DNA, 499 bp, Heterodera glycines
acagattgatagctttttcatgattcggtggatggtggtgcatggccgttcttagttcgtggagcgatttgtctggtttattccgataacgagcgagactctagcctactaaatagttggctcattgcttctatgggcaaatctcatttcaggaattcttatgcattgcgagggcaaatccactttcattgtcattgaaatctgtgttcgatgagcttgacgttgatggcgatggatttataacgcgatccgagctgaggatggcattccaacagatgggccatgcgctcaatgatgccgatatcaaagccatttataaacgtgttgacaaaaatcaggacggcaaaatcaacttcaaggaattttgtgagatgatgacccgaggaagcactagcaacagtagcaacagcaattcatgatgataaatgaatgacggaagaaggaatacaccataaattgtccaattaacttaagccaattaatggttgcttaatttttc

SEQ ID NO: 94392 - DNA, 131 bp, Heterodera glycines
catctcaacccactcttccacggcggggcacgtcacttctgagaatcaaagtgaattgtgcgggatcaatcgatccattgggaggcggatgaataattgaccgtaaacatttcaatttccgcgtttatttc

SEQ ID NO: 94393 - DNA, 56 bp, Heterodera glycines
atccctaaagatgattagtaaacatttttgaaaaaaacccaaactagcgaagaggc

SEQ ID NO: 94394 - DNA, 163 bp, Heterodera glycines; identical to SEQ ID NO: 85129

SEQ ID NO: 94395 - DNA, 192 bp, Heterodera glycines
agggaaaggaaacgaattacgaaaaagggacgaaaggaaaagccaaaggtacgatggaaattaacagaaatgagctaattacaataacaaatgtcacattaacgcatcaagaaataaaaatagccaattgaaaaaaaaaaaaaaaaaaaaaaaaaaaaaaaaaaaatttttttaaaaaaaaaaaaaaaaaaa

SEQ ID NO: 94396 - DNA, 143 bp, Heterodera glycines
tgtggaaagaggactcggaagcgtcagaagattctcacccgctgctgtggcgtcccgaaatactcaaaaaacagcgtttttaatcctgttgttttaattttgcattatacatgtttttaattataaatgaacaaacccaaaaa

SEQ ID NO: 94397 - DNA, 452 bp, Heterodera glycines
agtagatgactcgcccctacaaggaattcctcgttcacggacaataattgcaatgtccgatcccaatcacggcaaatcttcaccggtttaccaacccctttcggggaaggacaagcacgctgattttgccagtgtagcgcgcgtgaagccccggacatctaagggcatcacagacctgttattgctcaatttcgtgcggctgaacaccgaaaatccctctaagaagttgtgcccacagaagcaatgagccaactatttagtaggctagagtctcgctcgttatcggaataaaccagacaaatcgctccacgaactaagaacggccatgcaccaccatccaccgaatcatgaaaaagctatcaatctgtcaatccttacggtgtccgggccgggtgagttcgtggatctgatcaaaaaagaatgagcgaagaacagcgactgatcggagggaa

SEQ ID NO: 94398 - DNA, 335 bp, Heterodera glycines
ccaccaattcggtgtgttggttcttctgttttaattaattaattatccgttgtttttttgatggtcaaatgaacggcagccgattaaacagcacggcccatagaatcgtggacagaacggaaaaaattgagaaagaatcgaagaatttttggaagaaagtgacctttggatgagcacaaataaatgggaatgacagaagaaggaagttgaaagcgaagagttattcatttgccacttctattgaatgaattgcattttaacaaataacatttgatctgctaattgatccccgatcataattattattcattaattatgagtgcttgggcgaatgg

SEQ ID NO: 94399 - DNA, 311 bp, Heterodera glycines
  unsure (1)..(311): unsure at all n locations
gcacccctgcccaaggggtcgctctcttcgcttccttcacccccaaccattcttttattcgttttgctggacttttcgatcaatttttttcaccattttacgcatttttaattcgtcgatcgcttctttaataaattttgtgtcnggaaaanaaanaaaaaattttttttttttaaaaaaaaaaaaaaagggaaaaaataaaaaattttttttttttattanataaaaaaaaaaaaaaaaaaaattaaaaaataaataaanataaaataattaaatatttattatattataattatttaaaaaaaaaaaaa

SEQ ID NO: 94400 - DNA, 117 bp, Heterodera glycines
aggcttcggccttagtggtgcacgggtgagtaacacgtgggaacctgcctttcggttcggaataacgtctggaaacggacgctaacaccggatacgccctttgggggaaagttcacg

SEQ ID NO: 94401 - DNA, 119 bp, Heterodera glycines
gcaactcggttctttaccggaaacactgtctttgtttggtaaaatacggttacaaggttttaatattgtaaaggatctgataaaagtgattttctttaaaaaaaaaaaaaaaaaaaaaa

SEQ ID NO: 94402 - DNA, 152 bp, Heterodera glycines
gacccgttgatgccgtgattgttcgcaataatgaaaccaaaagcagtccgtcaccattttttttgtttctgttattcactgaccattgtattgctttaaatttccgctttcatttcacttgaaaaaaccatggtaaaatgaatgaattttgt

SEQ ID NO: 94403 - DNA, 134 bp, Heterodera glycines
aatgagcacactcacaatcagcaacaacagcagaggagggcgtatatgcagatcaattcccattttattgcctctcccaattcgcgaatctcaaataatcttttttatgatgttccataaaatttgattgtttc

SEQ ID NO: 94404 - DNA, 77 bp, Heterodera glycines
ccaaaccaaattaaccaaaccgcacacaatgttcacattcagtaacggttgcttacaacgaaaaacaataacatcgc

SEQ ID NO: 94405 - DNA, 5 bp, Heterodera glycines
aaaaa

SEQ ID NO: 94406 - DNA, 293 bp, Heterodera glycines
  unsure (1)..(293): unsure at all n locations
gtgaacattctgttgaagtgaccgatttgttttgaagcgctttcttttcggactgtcatgaacaaacccattttaccgttgaaaattgtggtgacgtgttaaattccatttattattagtttattattaaacattttacaattagcaggaaatgattcctaaaattggtgttaaattgatgttattcactgttctgatttggttgcttcttatttttccggcatttgtaattcgcttgaaggcatttttctcattgtaccataaataccatctcatannnannnnaannnana

SEQ ID NO: 94407 - DNA, 73 bp, Heterodera glycines
accatttttaaaataaaatttttcaaatttgttaaatcagattaaattggatttaacggctaaaaaaaaaaaa

SEQ ID NO: 94408 - DNA, 491 bp, Heterodera glycines
tctgataaaagttccttccgtgcttttctccgatgagcagaaaccaaaccaagcaccccaaagtgaataattaaatgcacaaaacaaatggattaataaggttgcaattaattatttataaataattcgggcagccaaatggacaaaaacggggggggggggaattagacaaattaagcaaaaagcgactgatatttgcatggactgacaaatgagtgcggtaaatgggcgagaaaggaatgacggatggatgataataaacaaattggcattcactgaaacattccattcattcgtcagcatttaaaaatgttttaatttaaattaatttataattaacaggcgcaatttattatttgattttattaaaaacaaaacaaaaaaacatgctgagtaaagcgcgcatcattgtggaacagagcagttcaaaatttttgtcattttattataaaatgccacttatgtttctacctctttttaggcaacccctt

SEQ ID NO: 94409 - DNA, 263 bp, Heterodera glycines
aatctaataagtctaaatctaagttttcgagttaaaaaatggtccgccaacgcttccatataacatttgtttcatgtccaattcatccatatatagacctactcacgcacacagaaaaattaaattttagcacagaaaaatgaatctatgggtaagttcgatataaatgagaagatatgcaaggtaacaaataaataatttttttttgaccgtaaaataggtaggtaatttgaatttggcgctattaaatgtgatttatttat

SEQ ID NO: 94410 - DNA, 172 bp, Heterodera glycines; identical to SEQ ID NO: 65679

SEQ ID NO: 94411 - DNA, 386 bp, Heterodera glycines
aaaagtaaatcctctttaaaaatgaaattttcaacaattttattgctttccttggccttttgtgcgttaatcatcgatgcatatccatcgggaaatggtaaagatcttgaagctgacaacgaaaaaacggaagtgaaggaagagaagatggaaaaaagagaagcggaagtggaggaagggaagaaggaaaagaaagcagcagaagaggaggtagggaagaaggaaaagagaggaagtggaggtgatgattagaagccatagctaaaaagaagaagcataatatggaactaagaaaagaacgagcacacaatgcttttagtcgcttattttttgctgcatttaaaatgttaaattttaaaaataaaaataaatttttgtatttttta

SEQ ID NO: 94412 - DNA, 510 bp, Heterodera glycines
tccctccgaagtttcccccaggatagctggagctcgttaagcagctatactcggtaaagcgaatgattagaggacttggggacgaaatgtccttaacctattctcaaactctaaatgggtatgaagccagggttgcttgactctgaacccaggcgttgaatgtttgagctccaagtgggccatttttggtaagcagaactggcgatgtgggatgaaccaaacgtggagttaaggtgccaaagtgcccgctcattagaccccataaaaggtgttggttgatatagacagcaggacggtggccatggaagtcggaatccgctaaggagtgtgtaacaactcacctgccgaatcaactagccctgaaaatgaatgagcgctgaggaggccaaggagaaatacattgagacacttttggaaaaatttgacgatgctgggactcaggtggacatttcggattggctgtccaaaattgacccgtcaatcagaaccaatttggcgctgctcggcaaa

SEQ ID NO: 94413 - DNA, 367 bp, Heterodera glycines
agattttgcacgggccaacacattgaacattcaccagcgcattcacaccggagaaaagccataccaatgtcacttatgtgacgctcgttttacgcaggatggccaactgaagacgcacattttgattcacacgggtgaaaagccgtacaaatgcacttattgtccccaaaaatttacacgtgctggcaatttgataacccatcttcgtcgccacaccgaaaagaagccgttcatgtgttcccattgtggcaaacaatttgcagagtcaagcaatctgcaaattcatctgcttacacactacagaaaacgtaaagcaaacggacaattgagcaacagaatgaatgaattagtgcccccaaaaaatggc

SEQ ID NO: 94414 - DNA, 367 bp, Heterodera glycines
cccgttacttgtagcaccgtttcggcttcaaaagctccggatgtttctcatgcggttcgtttgacggttcccgaagtccaggccaaacagcgtccagtcagtcgtcgttcgttgtcgcaagtgcgcgagcaaacctcagcgatcgttcagccaccgatgcgttttggaaacacttcgcgccgaaccgtcatctcaaaagggaccagcaacgaaggcatgactgtcagcagcggtcccgttactcgtagcaccgtttcggctgccaaggcttcgggtgtttctcatgcggttcgtgggatttgcgtggtgcgcaatatgccgactaacaataagaagcaacagacgaaagataagcagtgatcggaga

SEQ ID NO: 94415 - DNA, 503 bp, Heterodera glycines
gcagcgcagcgtgcacgcagcatgcaacgccaaacgcaaaatgccgcagcacgacaaccaagtcgcgcacagcggcaatccgctgaagaacggcatggaagcagttcacgtgaatctaatataaatgccaaattggaaaaaattgaccaaatgtttgagcaaggtatagcactggaagtaattgaacgaacagtaaatgttccaactgttgaattgaaatgccgttttgcacgactttatttaatgaaagcattcgctttaccaaaagaggaatggaaaaagcatggtgtaattgataaaggtattggtttcgctaatgaggcgcttgcaattgacccaactcataatgatgccttaaaatatttatgcatgttaatgggactcaaaattggccaaatgcaaaaatctttaacaaatgcgaaaaaaatagttcaacttacagtggaattagataaattgttgcaacgagctgatcagcatgatcctgaaatacttcatgcaca

SEQ ID NO: 94416 - DNA, 79 bp, Heterodera glycines
  unsure (1)..(79): unsure at all n locations
acggacttcacaattaatattgtcagggtttttattctttnggaaattttatgtaaataaatnttgatgaatggaactc

SEQ ID NO: 94417 - DNA, 293 bp, Heterodera glycines
atcagattcggcttattgatgaaccttttgttggacaccttgaatgttgcttctgaactgattgaaacattcgcaatggctgatatttttttcccatctgaacattctttttgctctcccggtgccgtggtcggcgctttgttgaatcggtagcgaaatataaatggccgaaaatgactcctttgttataacattgttaaattaatatttgtttattaaacaggtgtcacagaatgccatttcttggcaacaaatttacaattttatgacagaatctgtataaaattttatta

SEQ ID NO: 94418 - DNA, 152 bp, Heterodera glycines
gatgcattttcaaattaggaaatcaaattgaagacggaggattttcacccaattttccattgtcttattgttttttccatatttatatttatgctttttcaataaataaaatattaatattaaaaaaaaaaaaaaaaaaaaaaaaaaaaaaa

SEQ ID NO: 94419 - DNA, 309 bp, Heterodera glycines
ggactgataaatgcggcgctttacttggcgtggcttgaagcgatgagcgccgaattgccgcccacgctgatgctgcggggcaaccagcaatctgtgctcactttttattcataaaacggacaaaggcgaaggaatggatggaattgtgaagccattggattaaaagattgatgtaaaataaacacatcatactcaaattgtttttcaataataataatttcgaattttaacattgtttttttatttctcactttatacaattgtattttaattttaatttcacagttaaaataaaaacaaaaaattttc

SEQ ID NO: 94420 - DNA, 552 bp, Heterodera glycines
gaaccgttgctgcaagcgaaggaaaattacgttcgacagggggcgttggtttccctcgcttttgtcctcattcaacaaacgacatcgacctgcccaaaagtcgcagactttcgaaaaactttgattaaagtggttggagagaagggagaagacacaataacaaagttcggtgccgttgttgcacagggcatattggacgcgggcggtcgtaacgtcactctttcgctgcacaaccagaacaaccaaaacgacatgccgtctgtattggggatttttgtgtttttgcaacattggcattggcactcgatgactcatttcatttcattggcacttcgtcctacttgtgtgattggcctcaacaaggatttaaaaatgccaaaaatggacttccgctgcaatgccaagcagtcgatgttcgcatatccgcaaccaattgaagaaaaacgcaaagaaaggatggaaaaggtggaaacggcagttctctcgaccacaaaaaagaaagcgaattttggacagaaagcagaagatgccgacggaaaagccgaagagaaa

SEQ ID NO: 94421 - DNA, 483 bp, Heterodera glycines
gcggaagagttggggaagacgcaccgcattttggcgcaattttttggatttaaatttttttccgaaaattccgaaaaaaccaacaaattttccaccccctcgtcttccgtgcaaaaatacggtctaaaataatatattgctgatgaatgaattttatgcgttttaatcattctttttttgccattttgatcagtagttggaccacatgggcttgcgaatccatcgcagacggaggccactgttcgtccgaattttgatggacgcggcctccgctgcccgtacagtgtccttgaccgactgcatcaaattctgcgcgttcagcaccagctgctccatggcctcctcgtcctcctctgtcccatccattggctcccatcaattaatcaatcctccaattattttcctgagaattaaaatttttctttttattttctttaaatttcggcacaatgaatccatcgatggatggcacggaacagccga

SEQ ID NO: 94422 - DNA, 145 bp, Heterodera glycines
ttttgctgaggttccctcccatttccggtcaaattggtcaagctaccaagtcgaacttctcgctttgctcatcatttttgtttatgcgctgaattacgcttacggaaagtccaaaaaccattccattgctcacaaatggttcatg

SEQ ID NO: 94423 - DNA, 367 bp, Heterodera glycines
tccaccgtttccgcgtccaattcgtcctcctcgttgcagataatgtaaatttgttgtcggatttcagttccgtgcaccgaaaaaaccctatcgaaagtgacactgtaattctggcggagcatttccagcactgttaagtccgctatttctgtcgcataaattactcccaattcgtccattctttcttctccattcgatggcccttctgttttcctccatttacctcctctccatttcgtccatatcttttcctcttttcctaagctaatttcaactaatttcgctctctctttctttctctttctctcgtttttgtttcacattgtaaatgagtttaataaattaaaagagtgaatttggcaaaaaa

SEQ ID NO: 94424 - DNA, 325 bp, Heterodera glycines
cgatcatttacaatacttatacttttgtgctgttttctttctgtactcagatggcatgcgcaattgttgtcgtgcctgccgccttcggcgctgttttgaggccggcatgcgactcgatttggccccaaatgcccacggcaacgattggccttacgctgagcttaagtccgccgtctcctcggccaattttctcgagaggccacggccaacaaagcgtgccattagcgatgccattatcagtgccattccgacgacttctttcctcagcagtccctctgcctttgatgctggcttattgttatcgcctctgccggtcactaatcga

SEQ ID NO: 94425 - DNA, 81 bp, Heterodera glycines
  unsure (1)..(81): unsure at all n locations
cggacaaatgatgaaaatgattaaatatccattcaattgtttcccaacgaagagtaaccaaaagactaaaatcgcnaaaaa

SEQ ID NO: 94426 - DNA, 94 bp, Heterodera glycines
attcatcggctcgtcatttcttttcaaatgtttgtaaatataaacaattcatttttcaatataaaataataatttaaaaaaaaaaaaaaaaaaa

SEQ ID NO: 94427 - DNA, 405 bp, Heterodera glycines
agtgcaaagcagccgttgtttctgacctggcgcaaccccgaactgttggcccacctgacaatgccatgccatcagctcattttcaaatgcggcgatgacatgcgtcaggacatgctaacattgcacgtcatgcgaataatggacgcaaaatggaaaagccaattacagcaggacttttgcatgacattgtacgaagtgttgccgatgggcaaaaatattgggttgatccacgttgtgcccgactgtcaaactctgttccaaattcaatgcgaatcgaagcgcaaatacaccggcacatcactgaacatggaggtggacttgttgaacaagcacatctacaagaagtgttgtgctaacgacagcaagaagtatttggagtgcgtcgatcggttcaccttttccctg

SEQ ID NO: 94428 - DNA, 300 bp, Heterodera glycines
tgaccgtattcagtcaaatgtgttccgttatatgggcaacaacatgttggcctatcggtcatgtgacgaattggcggagcttaacttgcgcatgtggatgtcctgttgtgatgaaacttgctcagcacgtgcgtcgactggcattgacagtgccaatgatgggaatgagcaaagcagaaggcgtaagcgcgctgttcatctatatgcaaatgggaataattaattggaaaatatgcacaactaaaaagatcaattctaccataaattgttgctttaaatgatgtttgatttacatttaca

SEQ ID NO: 94429 - DNA, 459 bp, Heterodera glycines
aacactatgggcggaatgccaacacttcaagcccaaccgaatgccatgggcggaatgccaatgtattatgccgtacagcaacagcagccatatgcccaactgcagtttgtttcccagcagcagccggcgacggtaagacttggcactccatcggcgtcagtaaagcctggcactaatcaacccatgatgcccatctcacccacacaatcagtgctggtacggattctcaaaaaacgcgaaaacatggacgaaaatccatgccctccgctgagttcgccggccgacgatttgaccgtgcatattggtaacagagaggttactgtgtctgctgcttggcttatgtgccaatcgccgatggtccgtcaaatgctcagcgtggaaatgaaggaaaagcagcagcgatcgctcacattgaacgaattgggcatcgacatggagcagttcatggattttttggag

SEQ ID NO: 94430 - DNA, 469 bp, Heterodera glycines
tacgatctagccaaaacagtcactgataatagatttgatcttgtgttacacaagccagaacattttgtcaacgccgaaacagatttgtggatgggcaacatctgggctgatctcacaaaaatagaaccaagttcaaccaaagataaagttggaggtatgcgtcgtatgtgtggatctatccctttgtttaccaatagcctcgagcacttgctttacctgatatttaatcgctacgacagacacgagtttcaacaagggatgtttctagtcaaagctgaatttgggcaagattggttcactcctattatgcagcaccctcattgtatactccgtcaacctgtgcgacaagtggcgcttagaagaaacagcactgcaggcacagagtacaagaatcttacacctaatgtacaccaatcattcgtattgttttacttgggacctaatgttccgcaattctgcgctacgtttt

SEQ ID NO: 94431 - DNA, 259 bp, Heterodera glycines
atcgacttaattttgccgtgcattttctttttgcttcgtccattatttgattttcccaccgattgtcctatcagaagacgaaaaaccgaacaatgcttccgccagactcagagaaagggttcaacttcagaaagcccgcagggggcacacaaccgtcggcagaatcactcagcactattcaaaaagtgatcagatacgccgagaaagacgacctcttactttacgtaacagcagcatttggcatctttatgcccgcggt

SEQ ID NO: 94432 - DNA, 393 bp, Heterodera glycines
tttcgtcccatgcttccgactccgacccatctgttcgtttttatcgtattttttctcaaaatctatctgttgtcggcccgggtttgggctcgtagtcaatgcgttttggcccgtgggcgcgtcatttgtcccactgaccccgacagccatttcaacgtgcaaattgagttgatggacagcgatgcattgccatgggaaacggacgatgtgatgggcagtgccaccactgatttgcttggaaatttctctgtgcgcggctgcgccagtgattccggcctttggaacgatccggacccttaccttctgatcactcaccgatgtccccaaatgggccacgacatttcggtggtcaaacgaaagcacagaattccgatcgaccgaatttatctgccg

SEQ ID NO: 94433 - DNA, 204 bp, Heterodera glycines
aaacgaaggactgaccattcaggcgaagcaggagctgcacaaaatgtgcgagcagaacagaagttactcgagcatgaagaaattctgactgtttttctttgttttgtgatttggtctaaatttgatccgtttttattttatttatttattttttggtcgcttttccttccatttccttttaaatattaatttatttgttaaaaa

SEQ ID NO: 94434 - DNA, 426 bp, Heterodera glycines
ttctttgctccttttccttctcccctcggctcttttcgctgatggcttttcgtcgtctggccaaagagttgttttggcccgggtgatcattttcaaagcatccgaaaagcaggggacgattgcttctcaacagtgtggtcgggagggcattggtcgtacatgagaaggcggacgacatgggcaaggggggcaatgaggagagtgggaagacgggcaatgcgggaaaacggatcgcatgcggagtggtgggagtgatcagagaggaaccaatgaaagtgaccactgatcagaccaacggaatgtgaaaacagcgatcagcagaggaattcatggacaatgaagaaatgcaatgcattgagtgttctattatttacgtcttttaattcatataacttatggaaataaagagcaaagttttgttaaaaa

SEQ ID NO: 94435 - DNA, 491 bp, Heterodera glycines
cgctggaccaagtgaacggactgccggacatggtcttcgcctgcaacagcggccttttctaccgcaataagctttacctttcccactttcgccacgctcaacgaatcggagagcagcggcacttcgccgacttttacaaagggctcggcttggagctgtacggcgccgattgcgcggaagtattcgaaggcggcggcgatgcgtttttctccgacgagcgaacgctttgggccggctggggagggccgaggacgaacagaaaggcctacgaacacatccgaaagatgggcgacttcgaaacagtgccctgcgaattggtcgacccgcgcttttaccatttggacacgtgcctttgcccggttggcattgactcggcgctttggttccctcccgctttttctgagaaaccaaaaaagaagcctacggcgtttgccgcgggcgatcgcagtttcggagaagaagcaatgacgtttgtgtgcaatgccatcaca

SEQ ID NO: 94436 - DNA, 446 bp, Heterodera glycines
ctccaatatttgggtgaaaaatttggtttggtgaacgaaacggccgaggaaaaggccatttgtgcgatgttggcacaacgcatcaacgaccattttgaatatttgaagccttacgttaattgccttctcggccttatcccggcgaacaaattgcctgcgttggctgagaaatgccttcggccgtgcataacggaggattttgggccaatgtttgagcggcaattggaggccaataacacagggtatttggtgggcgacaaactcacctgggtggacttttacgtggcgagttttgccgacttggcacttacatttggccgattcgacatcctcgaccgattcccccgcgttttgcaccactgccgcgcggtgttttcacttccgcaactccaacagcacatcaagaacagaccggacactctcttctgatggttggcgtaacaaaa

SEQ ID NO: 94437 - DNA, 525 bp, Heterodera glycines
agcctaaaaatgcaaatttcgtgccgccgcagggcactgttgcgcagtgccattgcagcggtgggagagagttttcgaatagttgaggttggcgcaagagatggtctccaaaatgagcagaaaattgttccaacagcgaccaaagtgactttgatcgacagactcagcgattgtgggctcaaaaccatcgaagcgacaagttttgtgtcgcccaaatgggtcccacagatggccgaccatgccgaagtgatcagtcgctgcaaaaaatttgccggcgtcagctatcccgtgctggtgccgaacctcgccgggcttcacaatgcgatcaaaaatgggaatgtgcgtgaaattgccgtttttcgtgccgcgtcggacgcattcacaaggaagaatttgaactgttctcgggaggaaggagaacggagagttggggaagtgacggaaggggccgtggccaacggactgcgagtgatccgctgtccttacgagggccaaattaaagcgaacacagttgccgctatggct

SEQ ID NO: 94438 - DNA, 476 bp, Heterodera glycines
gtcgaaactgaaagtgctctcctcctccgccgacttttcttcgttcctttttttggcccttctcttcgatttctccttctctcagcccaccattcaacaaaaatccatccaggaattgttgaacacgccgacgttcttaccaactgccgagaaacacgactacttcgtcgccccttttctacaacagcagaaacaacgttggctgtccgtccgacccttccaagaatttagaagaagtccccaaacggccgaccttggactcctgttgcaatatttggacaacaaacggaatgctccgtcgctaatggaagatgagggaaatgggagacacggcataagcgggtcccctctgggcacaatgcgattcggcaagcgaacgttcaactcgccattgggcacaatgcgattcggcaagagggaatacaacaaatctccgcctggcacaatgcgatttgggtgagaaaagtgacgacaga

SEQ ID NO: 94439 - DNA, 435 bp, Heterodera glycines
ggttgacaggtctaaaggaatacaaagataagaaattgagcctggccaataaaatttatcattatcagaaaatatgtcaaaatgagcgaaataattggaaaagggtaaataaaaagaataaaaacaaaaacagcggaggctaattatcgatcgtttgttgtttgtttgtacgctttcattgagggggacagagaaagaaagaaagaaaagccgaggcgaagcgaagtgagcaaaaaatgtgcaatttgtgcacggagcggaagaaattggaggagataagggaaaccaaatgaaaacagatggaggccgagagtgaggagatgtttggtttccaagcagaaatgaatgacgaatgctttgggaatcaaaaagagacggaaaattgctttttgtgggccaaaaatgtatacttttttgaattaaaggatttgccac

SEQ ID NO: 94440 - DNA, 398 bp, Heterodera glycines
cgaagcactgggaggaggacgaagaggccaatcgcaggacgagcagcaacaaatggagcggcagtggtcatcgggggccaaaaagtattcacttggccgctgacagccgaagtgatcggaatgatcagtcatcagcagcaagagtggccagcttgtggttgatcaacagcagggaggggaggaagcctgatgggattatcttttgatcagttcggcacacgccgattgattaattgatcgatcgacgaatcgcctataaaacgccggctttctctgatccgggcagaagcgaatgcgactggcagaaacacacttgatcgaattgtggagctcgacgtgtgtagctgtggcagacgatctgataggtggccaagtgatcaacttcacacagtcattac

SEQ ID NO: 94441 - DNA, 339 bp, Heterodera glycines
ggataattattatgtctcccgctaagccctttctgctgatgcttttcctctgctgcttttttggctttccattggcctccaaagacggacttttgaaggaggaaattgcccaacacgaggacaaaaaaattgctgcgatgcttttggatgtttttctgaacggttggagagaatgcatcgactggaaaagaggggaaccgtcaattcgctgtgtgccctttccggagaagaaaccggaaaaatgtgcaaaaaatatgtgggaaaacgcgatggaaaatgttagaaacggaaaaataaagaaatgctaaataggaaagaaaaggataaaatgagaagcga

SEQ ID NO: 94442 - DNA, 479 bp, Heterodera glycines
caacaaactgatggacaaatgccacgggtcgctgtcactaccgcaagtcaccacaccgaattggtgcaaaaggcattggacgcgttggtcgaggggaaactgatcagcgaaattgaacgcgtgggaggcgcgggctttaaagtgttgcgctgtttggagggggccactgcttacgtttttgcctcgaggggctgcaaaaaatgggacaccgccgcacccgaggctttgttactcgctgctggtggaactttatcggatatgtccggccgactgattaattacggcccctccgtacagttgataaacagcgggggagtgctcgcgaccgccccgggcgtcgaccaccaaagtttcgttgccgccatcccccaacttgtgaaggaatcgctgccagaaacagaaattgttggtctgtgaataccaatttgacagtgttgtgacatctccacctccgtccgggttcccttcccattttgata

SEQ ID NO: 94443 - DNA, 499 bp, Heterodera glycines
ttaataaccattgtaccccgatgaatgcaggcagcatcgacaatgatcatgatcattaccataattccatcaaaaattcttccccgaaattatcatatgactccgtgaattgttggagtatggaaagcgaagggagctctgtcaacaacgatgagaatccgaatccggaaatggatgatgaaatgatggaagaagaggcagcgcatcatgaggacgatcagctggtgttaggcagtgataggacgaacaggaggaccccaaggactacagaaaaggtggctaccaccctgtgcagatcggcgatgtgttcaaaaatggccgataccacgtcatccgcaaattgggatggggtcatttctccaccgtttggcttagttgggacatcgaaataaagcgattcgtggcaatgaaaatagtcaaatcggctgagcattacacagaagcggcattggacgaaataaaactgctcgaatgtgtgcgggactcggacccaaccgac

SEQ ID NO: 94444 - DNA, 517 bp, Heterodera glycines
tagaaactgtgagcaaagtgcaaaaattttgagtttggctggagccacgtgcacgggcaagacgagtttggccaattcactggtggaggagctgaggcggtgcggtctttccgttcgactgattggccaagaccgtttctacaaaaccaaagaaattgtgcgtacattggccaatgccgaggacccctccatcactttctacgattacgaccaaaccgacgccttgaatgagcatttgatattggatgaaattgccagcgcttcgaaagaccccgaattggatgcattgataatggaaggaaatatgctcactgacctcgacgccatccgctgggccgactgcacagttttcctcaccattgacaaggagagctgtcgtcagagacgcgtccttcgcacctacgacccaccggacgaaattgggtactttgaccaagtcgtttggccagcgtatgaacgaacgctgcaaaaagcaaaagaatttaaagagacatcgacgaggccattagcatttgtc

SEQ ID NO: 94445 - DNA, 121 bp, Heterodera glycines
  unsure (1)..(121): unsure at all n locations
aaatgcggctactttttgtgcggaaataagcaaatgtaatgttgttgtttttgatttttgagacataaaattgtgtatgaggtaannnnnaaaaaaaaaaaaaaaaaaaaaaaaaaaaaaa

SEQ ID NO: 94446 - DNA, 51 bp, Heterodera glycines
aaaaaaaaaaaaaaaaaaactctgacaaagaaaccactgactttaataaaa

SEQ ID NO: 94447 - DNA, 485 bp, Heterodera glycines
atcattcctagctgcttttggtttgatcacaaatgttcgtccaactcgtcctccttgccatcgttggcattacttttgtcgatgctgccgcaccgccgttcggccaattgtccctcaaaggcaccaattttggtcggctcaaacggcaaaaccggtgcagctgatcgggaattccttggtctgggaaccaccggtacccacaattttgaatgcccaaacagtgaaagggcctcaaatggcattggaattccaatgggctgcgccccccaattggcggggaaaaagggcggctatttgggtgtccggaaacccccccaacccacttgacggcacttggatttgagggcgccttttccaggggattttactgtatccccaatttgccacgcccttaacccaaaccgggaaaagggattttattttttccccaaaatttcaaaggggtggggctccaccccctttttgtttttaaaaaaagttttaag

SEQ ID NO: 94448 - DNA, 211 bp, Heterodera glycines
  unsure (1)..(211): unsure at all n locations
aaaaattatttcatcaatgtcctttttactttttgtgactattgcttttgccaatttggcaccaaatgcttttggccagcaatggccaaaagcaacaagtgatgaaacggttccggcaacaattgttgtgacgggaggctccagagactttggctacaaacggttgaccgcctcttctgcgttgggcnaccggtgatcagttcggagggcc

SEQ ID NO: 94449 - DNA, 408 bp, Heterodera glycines
  unsure (1)..(408): unsure at all n locations
catttattgttgattttgatgtttgttgataataaatgttttaatttgaaaaaaaaaaaaaaaaaaaaaaaaaaaaaaaaaaaaaaaggnnngaaaaacaacccctttaattaaaaaaaaaaaaaaagaaggccccccgcgtttgttcccccctgttttacaaaaaaaataaaaaggcggcctttctaaaggatccaagtttactaactcgggtgtgcgacgttatacttcttctatagggaaaaaaaattcaattcccggacctactttttaaaacgtcagaactggaaaaccccgggggttaccaaattaaatagctttgaacaaatcccccttttcaccagttggggaaataacaagaagagccgaaccgaccctctttccaaaaatttacccaccctgaagggg

SEQ ID NO: 94450 - DNA, 367 bp, Heterodera glycines
tttaattaattgtcgacaattaaaaatgtcctccccctctccccgttttcacatccttcttctgttggtcatctgctgcttttcagcctttttgtgtttggcattggcccacgttgttggcgaaagtcaaattgacacaactggtattcgcgctcgtcgccaatattatgaccaatggggcaactattggagcggtggcaataccaattggtggaactggagaaagaaataaatggaagagaatgggcgacgaagtgatcactaatgatcaaataaaaacattaaataaaatttaacacttttttgcaacttttaattagttcaatacaatgaattaactcaattctacagtatgcttaaatttatg

SEQ ID NO: 94451 - DNA, 498 bp, Heterodera glycines
gttagttttaccctactaaagacctgttgctatgatagtaatcctgcttagtacgagaggaaccgcaggttcagacatttggttcatgtgcttggtcgatggaccaatggtgcgaagctaccatctgagggattatgactgaacgcctctaagtcagaatcccgcctaggcaagatagcaatattcttgctccccggtgtcgggaggcactacttatgcgcctaccgactgacggcagctgtgattgaggcggccattgcacagggcatttacgtgatcgtcgattggcacgcgcatgagccgaacgaggacaaggcgattgaattcttcaccaaaattgcgaaagcgtacggctccaaccctcacttgctttacgaaacgtttaacgagccattggatgtgtcttggaacgatgtgcttgtcccttaccataaaaagggtatttctgcaattcgtgccatcgacaaaaagaatgtgatcattctcggcactcccaat

SEQ ID NO: 94452 - DNA, 303 bp, Heterodera glycines
ccaatggaatcgtcgtcgaaccggcgtgaagaatttttggaaatagaactcaaaaaggtccgtgaagaattggcggagtacaaacggagggaaatgtgtgccatcaccacgcccaaaaagaaaggaatacttaaaaaaaggccctccgctgaatatcgaccgtatgttttcgacaatttccacccaaaacatcgtcgaaacaaagccgagccgacttcctcctccactgccgcactggacatttttgacggtcagcaggacaatgccaacccaacaacaacaacgcttggctcgtactatgat

SEQ ID NO: 94453 - DNA, 530 bp, Heterodera glycines
taaatcctctttaaaaatgaaactttcaataattttattgctttccttggccttttgtgcgttaatcatcgatgcatgtgagaaaaaattaatataatgaattatttttaatattttaaatagatccatcgggaaatggtaaagatcttgaagctgacaacgaaagcttatgccctttttgccaacggttcatcagagacacactgttcaatgcgtacaatcgcttcagaacacacattaaattggagctggtcccttatggaaacgcaaaaacgaatggtactcatttcacgtgtcaacatggcacagaagaatgccgaataaacaaatttgaatcttgtgccatcaattacatgaatgacccaatgccttttgtgtactgtttggagacgttactttatgaaaatgtgaaatttgatgacgcaacgaaactttgcttcgatttgatcaatcctggaaaatttgtgcttgatcggatcacgcaatgttttgacggatcggaaggcatccttttgcaaaatttagctgca

SEQ ID NO: 94454 - DNA, 263 bp, Heterodera glycines
taatgcccgagaacccaacaaacacttcggaccaccagcgtttggaggaaatgttgtgccacttaaccccgcacggtgcggcggtgccgtacaatgtctgttttgattccgaccattgcctttgggttgcgtcaaaaaggagcctttttaattcgttgtcgggtctcctggaatcagtccaacttgtttttccttttaaaatgaattccccgagaaaatgggacataccctcaggtttttattttaactccaacattatattc

SEQ ID NO: 94455 - DNA, 51 bp, Heterodera glycines
aattaataaaacttccaaaattttatatcttacatcaaaaaaaaaaaaaaa

SEQ ID NO: 94456 - DNA, 526 bp, Heterodera glycines
ctgatctcttcggtgctgtgatcacccaacttggattgttggatatgctgcgcttcaacaaattaggcattggctcagattgggtgtcggagtacggcgacccggacaatgccacagacttttcgtacatttacaagtattcgccgcttcagcagctcagcgtcactcccgggaagcagtggccggcgactcttttgctctcggctgaccatgacgatcttgttgatgtgtctcacacactcaaatatacggcacaactgtatcatttgttgcgcaccaatgctgagagttggcagcgcaaccccgtggtggcaaagattttggtggaccaagggcacgcgttcaccggcacaccgaccgagaaaaaaatcaaagagaaggttgacatttacactttcatcgcgcgagcgcttgggctgaaatggaccgaatgattaagaacaaatccatctgtgtgatcactgatcagatcattatcgatgcaatatttttaggattttcttttcataaatttgcattccataca

SEQ ID NO: 94457 - DNA, 243 bp, Heterodera glycines
attatcaaagttctccgtgaagaaattgatgagcagcaccgagtgcacggaacgcgtgtcaaagtgtgacggatggccgaaccaccttgcgcctttcatgcaaatcaaaagttggcgttggttcatcggcgcttttctttatttggcgagcggattcggcattccgttctttgctgccgagttccaactcaagatttttttccactccccccgcgcggagaggaacacgatggttagatgaag

SEQ ID NO: 94458 - DNA, 258 bp, Heterodera glycines
ttcatccacttttacattgatcagaaagcattgtgttgttgctgtttttgttgtgttgatcacttgctggaccaacaaaatcatctgctgcagatgatcccaaacacaatcgccggacagaaaaatgccaattaattttcccaatgataattaccaatattaattaattatacattgatgatgctcagaaaaccttttttttctttttcacaccgttagatttattcgaaaattttgtttttcctatattttaaattt

SEQ ID NO: 94459 - DNA, 264 bp, Heterodera glycines
acgactactatagggggcgaggaaaagtgccgaaagggaggggaaacggagcaaaccgagcgaagcggaagccatatttttaccgatgacgaaaaaacatttgcctccggcgccgttcgaatacctttcgacgagtgaaagtgaaaatgaaatggaaaattgtggacaaacggaagcgtccaaattggcgcacaaattctccagcatattttatttgtcaccctcagaacgaatggcagccatttttttttttttccccccccc

SEQ ID NO: 94460 - DNA, 510 bp, Heterodera glycines
ctcaacgagtaattttttgacttttttttgaaaatgaaattacattcggccactctttccaaaaggctctttttggccggtggtccttcgcccttctcgtcctccttttgctcgttttgttgtcgaattcgcttccgacccgtccactcattcccgccactctcagaatcggccgtttcttgcccaccgtcgtctgcctttttctgttgtttctctgctgccgtgctcttcttctcgtcctccaaaatggtcagcacggcatcgggcaatctgaaaagtgagaaacaattggactagtcactcttgtaaccttttcttaattccgataaatgtttaatcgatgagaattcatactttatggccatgtgtcgaacatttcgccacgggtccgtctcaaatggctcttcctttggtgccgtcgttggtgtcgtccctccgccgccgtttgcgcttgtgccgttgtgtggaggtgccaatgtgctcagtttcttcgctatgctgaacagatga

SEQ ID NO: 94461 - DNA, 436 bp, Heterodera glycines
gaaataacttcttgctgactgatcagcattttttgaggaaagctcaaacgattaaacattgaccaaggaattagagggactccctaacccgagtaggcgaataactgatgccatagattaatctccaaattggtagaggtttttgtttatccctgattttttgtgccccgaaggtcgaggatcagctctaatttgtattattaatactattttgatccacatttcctgctaaataattgatcagcaattgctaggaaaattccaacactttttcttttattttttcgttttactttgctggcaaatggttgaaatcgttcaggtccaattcgtgttgcgaatgcacgaaataaatgcgttcaatgtcccagatcacttcgtctcgaaagggatgttccaaccaatcacaatgtgcctgaaaaggcgtgcggataaa

SEQ ID NO: 94462 - DNA, 458 bp, Heterodera glycines
cagttgatccaagtcgaagcagtcgagctcgacaaatttctcgatctcttgcaaaggttgaattatgcacaacaccccgaggcaactgcaggttttgccaatgcttttaagtataaacaaaaagcttttagcgattctcgtcattatacggaatatggaacccgacccggacccggctgttatgcgttccctgttgaggttcttgtttcttacacagccggacagggatttgttcacagttgatgctcttaaattgatcgttgattacagtgacaatattccaccaatgagcgattgcatcagcaaaatggtcaaacacgccattcacaatgacgaaattattgcgccatttggacaaacgaaattgggcaaggcacgtccaagggtgccggtggtggagaacattcttgaccatttggatcgttttcgaaggcattgtatcgacagagagtcaaaag

SEQ ID NO: 94463 - DNA, 389 bp, Heterodera glycines
ttcgggagccattcaacaaaattttgaagcaaatggaaagtgtccaaaatcgtgtcccaattgtgtcaattgatattccttcgggtaaatttgaacaaccgacggatttgtttttaataaaaggtcaacccaaaggttgggacgtggagaaagggccccctgatgaaaagagcggtttgcccattctgagccctttgttttttatttcactgactgccccgaaacaatgcgcacaattttttaaaggagaatatcattttttgggaggccgttttgtgccacctgcgtaaacttttaacaattttttcttgtgaaattgaacatttaagcttggtacagaaattcggacttgaaaatatgccaccatatgaaggatcttcccaatttat

SEQ ID NO: 94464 - DNA, 261 bp, Heterodera glycines
gttgcacattccccaattttatttcttccttagtaagtagtattggtgcacaatgcgcacttttctgttcatagccgtagtcgggttgatgttggccgtcatcttggagaatgtaaatgcgactgggaaaaattcgccgtcaaagggaaaaccgtctcctgacagtacaaaccataaaaaagaccataaaaatgtttttttttaagccccacccagaacttatatatgagcaaggaaaaccgtcgccagacagtccaaagt

SEQ ID NO: 94465 - DNA, 297 bp, Heterodera glycines
aaccaaacgtactcacgggcagtttggcatcaacccaaacatggccgtcaacagtggagcaagccgttggttcagcacgcgttgagtgaatcgtcaacttcttcactgcagcaagtccgtaattggaaaaagcccattgtccattcggcactaaatcttgaattctagcttcataaaggccatgttttcttgaaatttccttttacccctgacctttcttctctttctcttttttttgtttccgtttcgttttcactttgctttttctgtcctctgtgataaattatttttttggca

SEQ ID NO: 94466 - DNA, 405 bp, Heterodera glycines
  unsure (1)..(405): unsure at all n locations
aaccctttgccacattgatggtccaaatggagcaaacgccctgacgcttgcgcacctgcgtcgccggaggtgcgggcggaggagcgaactcgccaatattgccccgttcagctcgcatcggcggtggtccgccgcgctgctgctgctccggcgggtaataatcgccacctccgatgtcgggcgacgaccgttcacggtgagccgagtcctggaactgtggacgaccgccaccgcctcctccaccgccgcctccgtaagcgcgaggcgctcctccgcttccccctcctccatatcctccacctccccatcctccattccaaatcaattaataattgtaaacaatgcttttgtgttaaatgtgttttttctnnnnnnaaaanaaaaaaaaaaaaaaaaaaaaaaaaa

SEQ ID NO: 94467 - DNA, 469 bp, Heterodera glycines
tgtacggctcgtcacgcattccccgtccggctgatctggcatccaacaattcatcccgtccggccagccgtgcatcagatatgggctccgactttggcaccaatggtggcgtcaccagcgcgacaccctcacgcattccggcaccgcgtgcccagcagcagaagggggtacgattcgcgagcggaacggggggcagcagtgacgggagtggccgtaatacgccttcggtcctctaatgaatgcgtgtgcggaatgatctggcggtgtcggaatgtttcacccgctaatgaccgcatcaattaacaaaaataaaaaataaatcaaataaaccaaattgtgtcatttgcgtgtcttaatcattattgtctaacactttctttttcaattactttttattccaatttgttcatgcctatcatcatttgttgtcactattattacattttattcatcgtttcatcaaattgag

SEQ ID NO: 94468 - DNA, 304 bp, Heterodera glycines
tcctttacttcttcctcggcttgtttctcaccggcaatgactcgtctcgtggtgctggcgatgatgaccctttgttcgacccccgcgccaatccgaacataaaagtggccaaagaacggtgataaaacatacgagacaataatttattaatgggacactttttggtgaatcgactgttcaatatttattatatgtgaaaccaattatccttttgcttggacgtggggaacggatttgatccttttttaattgtgattttgccgtaatattttttgattagaaataaagagattgtgagtaaaaa

SEQ ID NO: 94469 - DNA, 390 bp, Heterodera glycines
tttttcgccgaccaccgacacgtcgttggccaaatttgttgtcctctcaagcagatttccaactctgccttcttcttgctcaatctcggccattcgctgtgccgcattcgttcgcagcttttttgccgattcggcaagttcgtcgctgatcgcctccaatttggctgcctctgctgagtccataagtgggcgaaggctatttaagtcagaatttagctggccaaatgccgtcgtccatcgcgcatcaaagtcggaaattgccaatttaagtgcatcttttccaatgagatcattgtgcagtttgtgagctgtgtcctccaacagtgatcggagtgaatcagtgtccgcgtcaaaccgtgctttgagtgtttccttgcttcgtgcctgatc

SEQ ID NO: 94470 - DNA, 221 bp, Heterodera glycines
aagagcgccttttgccgccgcctccgccgccgacaatctcaaaactgcacagaagctgcactgaagaatcatcggctcaaaattcggtcattctctactgagaaaggaaaagcgtagcgaaacgcaccaaatgcattcattcattttaattgtttcattttgcacattttccaactgacttgctcaagaataaagcacacattatttaaaaaaaaaaaaaa

SEQ ID NO: 94471 - DNA, 115 bp, Heterodera glycines
tgaaatgcttaggggaatttcgagcaattatcaaatggattgttaattttatttgttattatattttggataaaactgagatttttaaaaattaagccgaaaaaaaaaaaaaaaa

SEQ ID NO: 94472 - DNA, 122 bp, Heterodera glycines
attctttatattagcaataaaatatcatacaagcttatatatcatatgttatcatataagctttgtttataattttttcgctcttattacttattaattgaattattaattagaggtgaaaa

SEQ ID NO: 94473 - DNA, 320 bp, Heterodera glycines
tgggcttggccctcgcaattgcattggcatgcgttttgccgagttccaaatgcaagttgcgctggcactgattgttcgccgtcttcgcttctctcccggcccaaacacaccggactcagaaatatccgcccaaattgctctcttcggaaatgcttcgcaccgaacaaccacttgttgtgctagcagaaaaaatttgaatttgaaaaaacagtctccatcaacaattattttcttcaacatttaattcgcccattttctctgtttaaaagggattgatcagtttttttttgtccggcgattcaataaatttataaatttaa

SEQ ID NO: 94474 - DNA, 511 bp, Heterodera glycines
tacgaagcgagcacacagcctgacgacccctgcaacatccaatacacaagcggaacaaccggcaaaccgaagggggccacgctgactcaccacaacattttgaacaatgcctttttcgtggggcttcgcgccggttacgccaaccatcggacggtgatttgcatcccaaatccgctttaccactgcttcggctgtgtgatgggctctctcgccgcgctcgtccattttcagacgtgcgttttccccgccccttcttttgagcctctcgccgcgttgcaggccatccacgaggaaaggtgcactgctgtttatggcactccgacaatgtacatcaacatgatgagtcatgctgagtacccttcgttcgactactcatccatccgttcagggattgtagcaggcgcgccgtgccccgtcactctctgctccagattggtcaatgagttgggcatgaaggatcttcaagtgtgctatgggaccaccgaaacttcgcccgtttcgtttatgtcaa

SEQ ID NO: 94475 - DNA, 192 bp, Heterodera glycines
ttaataatgccaacaaatgaaattgccattgtccaattcgactcccgacatgccttgaatgccctccactgatgtatggaaaaggcacgcgaatgattcaccaacggtcgacaacactttttggcatttgcgcaatacatttttgccaattttattacattaaaaacaaatttttaaaattaaatgaaagaa

SEQ ID NO: 94476 - DNA, 466 bp, Heterodera glycines
acaaaaaatcgcataataggcagtaattagtcatagattatatttttcgtttttattgcattttaaggatttcccaaattccttaataggcactaaaaatggcgaaataggcacaaaataggggtccaggcattaaccacaaaaagtccaaaataggcattataaaagacatcttagacaccccaaacaaagtataataaaatgcttttaactgcgcaggaattttaggcatttgcctaaaaaatgaagcattaataataattaaactaatgaatatttttaataaagcaattaaaaatactaaacgtccgtccctttcccccattcctctcccaattttcagttcgtctggttggtcgcctttttcggcaccgctttcctcaacattacgttcggcttggccctttctctgctgctctccttggccatgttcggccttcgcaaattgaatgacgccatcgccaca

SEQ ID NO: 94477 - DNA, 200 bp, Heterodera glycines
tttgtttttattgcatttttgttaaggaattttccaaaaaatctcgaaatagtgtcaaaacgccaaaatagtgatttttcactattttagtgacaaaaccccaaaatagtgatttctagtgacgaaaagtgacgtccaaatgaaaaaattttaacgcagagatgcgttttttgagctcctttcttcaaaacaattgttgt

SEQ ID NO: 94478 - DNA, 383 bp, Heterodera glycines
acgactggcgaaccaatgggttcttcccaagggtcactttctgcgacttgaaaacgcgcgacattggccaatttcgagagcacaccgtccaatgtgtgctaatgataaacatgttcgccgaaaagattttcatcttcctttggctttggttcttcgtctttttaattatcgcttctttgaatttgctgttttggacctatcagattctttcaatgcgcagcaaagaaagaatgataattgatgcacttaggcttcaaaacatccgcccaagccgacaaattgtaaaagtttttgtttacaaatttctcaaattggacggaattctcgtccttcgactgatcgactcaaacacaggacaaatccatatggcggacattgtccat

SEQ ID NO: 94479 - DNA, 462 bp, Heterodera glycines
ggtgatggacatgctccgattccacaagtttactgtgggcagttattggatgaacgaatacggtgacccggagaagccggaggaatttgaatacatttacaaatattcaccattgcacaacatacgattgtctcgtggcactcaatggcccgcaacactgcttatgactgccgaccatgatgaccgggtggtgccaagtcatacgctaaaatatgccgcacaactctatcattacttgaagaagccggaggtgaaattaacccaacgaaagccggtgattgtccgcgttgaaaccgacgcgggccatggggcgggcaaacccagggacaaagtgattgatgaactgaccgatattatgagttttctgcagagagttattcagctaaaatggtacgacgattaatttcaaatgcggtactttaattgtttttaatttattttgtgcgaataaaaattgatttt

SEQ ID NO: 94480 - DNA, 486 bp, Heterodera glycines
ggacagatgttcgctaccactccaaccccgtcatcccaaattcccacccatttgttgacaatgctcgcccgcaatctccgcataataaattgtgtgccaacaactccaaggatagatgttttctcgaccctcccctcctcccaaccataatcaattcctctccaaaaatttttgatgtcattgacagcggaggcgattgtaccaccaatcaacaacaacaccaccaccaaagacgctctttggccgttccccccgtcagtgagagacgaaaattttttgagagagtggcagaatataacacccttttttgagagggaaagacacgcaattcgatgactgatcattcattccacttgtccattcactaaaaactacctgtgcacagctcacatttcctttttgtttattaatttgtcgtaatggatgggcatacaatcaacatcaaaattgtgaattgagcatacttcaccaatgtgataaaatgac

SEQ ID NO: 94481 - DNA, 458 bp, Heterodera glycines
atggccaaatcccaacgatggaaagtctcattgtcaggttgaactcgacacgggcgacgagcggccgatgatcgcttctcatgtgaagggaactctcgcttatttggctcccgaattcttgaccagtcgtattttgaccaccaaacccgacgtgtttggctttggtgttgaccttcttgaagtgtccaccggacaacgcgctttttctgtcagtcgcaacccacaaggaattgtcgaatttgtccttaaaatgtgcaccgaagcaaaacataaagatgatactaacttcaaaaacaaatgttattttgaattagcggacaaacgaacgcccaaaacggacgacgaaagaagtctgcttattttcaacaaattactttctgttggtatttcgtgcaccgaaaaggatcggtttgcaaggccaattttctcggagacttttgcccgattggatgacgaag

SEQ ID NO: 94482 - DNA, 269 bp, Heterodera glycines
ggcgtggccaaaatgtcagtcggtcagcgggcgaagctgaccatcagcccggacatgggctacggagccaaaggaatccccggaacgatcccagggaattcgacgctcatcttcgacgtggaattgatagccgtaaaataatggagagaaatgacagtgatgaggggaaggaccgactaattgagccgcgcatttttttttactgccccgccctcattccgtttttctttgtgttcactaagtaaatgggctttcgaaaaaaaaaaaaa

SEQ ID NO: 94483 - DNA, 535 bp, Heterodera glycines
gcctaagaacggagagaaacatttgggggcactcaccgccggaagacgcgaccattgggccaaagttaggaaggagcacttcacgggcaacaacaaaacgtcgctgcggcttatcgaaagatcagcctttgtcgtcgttttggacgaagagcccgtattctatgacccgaatgatacttcgaaattggaccgttgggcggagaaacttctgcacggcaaaggatacgatcgttggtttgacaaatcgttcaatttgatcatctcgcagagcggccgaattggcattaacacggaacactcgtggggggatgcggcggttactgcccatttcatggaatacgttgtgctccaggactattgcgttcagggctacacttcgtccggcgattgcaaaggcgaagtgtgccagagtgtcaaattggaaagaatcttattcgatttggacgaagtagtgcagaaacaaattgaagtttctcgccacgtggcggatgagttgatcgctgacgtggagatggcactgttggtttggacagac

SEQ ID NO: 94484 - DNA, 336 bp, Heterodera glycines
cgaagaggaaagagagggcgacaacaaatgccaatcggaggaagtgccatcggtggaggaacagcaaaagatgggcaaatttgagacggagtttcacgcggcattcagccacgagggcattttcaaagttagtccggtgcttgccaaactcaagttcgctgatgatgcagaaaagacggggaagggccgctgccaaatgccgagcgaagaacacattttcctgccatcactctctgtcgatgtgacgaggaaattatgacggaaggaactcaatttatcactttataaccttacgcagagattttcatataattctataagataaactacgaatct

SEQ ID NO: 94485 - DNA, 311 bp, Heterodera glycines
ttgatcactcccattagttaaatggcataaatatccgcggggtcgggttttctgccggacatttaacgaaattctcgatccgttccacgtttaactcggtttgtcccgaaaagcgaggcttttcagtgtccaacgaatccctgtgccgctttttgttcaaccttcaaaattccgctatccaaatctagtcttcttgaatggccaaattagttgggtctcgaaaatgccaatacggcgggtgggatgccacctgaagcctcaaaaacaattataaaatcgaaaatttcttaagtatgcaaaattttgggatt

SEQ ID NO: 94486 - DNA, 428 bp, Heterodera glycines
actaaacccgggcgaactcgactttaagggtacgaaacggaaaaaagggaaaacaacggacaaaggggacggggggtacaagaagaaactgagagtcattcattagagacgtaaattgtaatagagagagagagttttctttttgttgcccctttgtcattaagcactttttagagggccaaatcattcagctcgattcgcaaattgacgagcattggtttgagggcacagtggacggccggaccggctttttccccatcacttacgtggaggtgatcgtaccaatcccttcttcttccacgacggcacaacaataaactttgtagaacaccgaacagatgacacaaactgtgctttgggatggtcaacagaacaagtcaaacaaactcacctaaatttgctaataattccttaattttcactgtttg

SEQ ID NO: 94487 - DNA, 284 bp, Heterodera glycines
  unsure (1)..(284): unsure at all n locations
ttattacagcttttcaatgaaatggcaaaagctcatgaagtttggagaccaatacatgaatttttatcggtttggccctcaacttggtctcggcctttgtttgttcacttttgttggtgttgtgtttcatggcgagcatatgaagctttattggaacggaaggatgaggaaatggtggtacaattggaaggaggactaacaaaccattaattaattataaatgatcgtttttattttttctttgaaatgcaataaacaagccatcnncnnnaaaaaaagaaaaa

SEQ ID NO: 94488 - DNA, 510 bp, Heterodera glycines
attggtcatgtgtttatttgggatttaacttgccctgctcgccccacgtggaaattacatttcgacgattggaattctcctcctcagtccatttgctggaccgaaaaagataaaattgccatttccttccgtcgtcgtctttttcgtatttacggcctcattcctccgtccgaatctgaccaatttggttcgtcccatcctgttttggagtgcgacctgaacaaaacctgcggcgcaaagtgctgctcgcaaccgttgatctttcccggcctcatcagtttcgaatcatccactttttcctattttggaataacgcagcaggcgccttcttacatttgggtgacttcttcgccggacgatgagtctgaaaaggaccaaatttgtgccacaactctcatgcagggccgtacacttttgcacttgataatgcatgacaaatcaattgcagaaagcgaagacaataataagaatttttgcttctcacacgacgagtgttgtacttatcggagg

SEQ ID NO: 94489 - DNA, 460 bp, Heterodera glycines
cctaatttgaaccgcagttttattgatggaaacaatttgcagcaattctcaagaagtgcttcttgtcaacaatttacaacattagcgaagactgtgtctccaaaagtagtcctccgcctaagcagcccccgtccgccccgactcgggcatgggcagtgacgaactgtcgggtggatgggtcgggagatttatgtgccaaacattggacaagtacataaactcgatgaccatgctaatgagtccattctcttctctcagcattgtgcccgttttgcctgcctccctcccggcctcttctgtctgcaaatgggtcgacttcaccaacaaacatgggttcggcgtcacttttcgtgatggcactcggtcgttgctattcaacgatcagtcgtccctttcaacgagttattgtcaacgatactttacctatcgagcacaaaaatttgttggcaattttgtcgaa

SEQ ID NO: 94490 - DNA, 473 bp, Heterodera glycines
gcttgaggatttggacaaagtgcagacggaacttgacactttaaatgaaacagccagcgacgaaatattaaaagtcgagcagaaatacaatcagatgcgaaagcccttcttcgaaaaacggacacacttcatcaaacagataccaaatttttgggtgacagtgttcataaaccatccacaaatcagcaatatcctcgaggaagaagaggaagaatgcttgcactatttgacgaaagtcgaggttatcaagcccaaaacattaaatttactacttttatttcaagattgaggaaaatgaagacatcaaggccggttataagttgaaattttctttcgacccaaatccattcttcgagaactctgaaatagtcaaagaattcaattggactgcagcagaaccgaacagtgtgacaactgaaatcaaatggaagcaaggaaaaaataaattggctaatgggactggaagcgaggaa

SEQ ID NO: 94491 - DNA, 388 bp, Heterodera glycines
actcaaaagtaccgtaaggcgttggaacaaatcaaagctgagatggtaaaggatgcggattactgtaaggattgtgcaattcctaccgttacccaagtcttggcaacaccaattccgcttagtgaacaaaccaaagaattgatgcaaaaaggcgcaaaaaaacttgatgagaaatttaaaacatttactaagcgctcatgattttcaaaactgcgtcaacaaatgaatgatgggatatgggaacagtgaacggatattgtgtgatgaaatattcattattatttttaatttcaagcatgatgttatattatccaacgaaaaaacatgtttttagatgatattgttaagcttccggtttttatgtcctaaaaataaacatcaatcagcc

SEQ ID NO: 94492 - DNA, 260 bp, Heterodera glycines
aaaaaacgaccgccgtttcttcttcattggcacagcgcaaaattttgccacaatcggcactttgtagacaacgatataacgacgcttttcaagctctgcaaaacgcttacagttccaaacaacaaacagtgaaagagcatcgaaaaatggatgaagagacaaaagagcatccgacaaatgaagaggaattgacgcaactgaagcgcaatttggccaaccacagagagcggtggaggacggaggagttgaacgaggcctac

SEQ ID NO: 94493 - DNA, 398 bp, Heterodera glycines
ggctgcatgcctccgactgatgcgacggagtcccaagccgaaagttcgactcaggctgcctacgatgagcagtgtgagtttggctgggagcagtgccgaatcggaggaggacagcagcagcatggatttcgcagtcgtaccgcagttgcggcggcgctgagtccgcataattattttgcccatttatcaccacaaacgccatcttcgtctgcttgcgcatccgtgtcaacctttagctgcgaacccaacccaagcagcaacaacagtccgagtccaatctacccaaaggtccctagtccttgtctctcctcccattccacgttcattgatgagtttgcctcccccgccttcgaagatgaccagcacaatttcgtccattttcgccaaatcgattcgga

SEQ ID NO: 94494 - DNA, 549 bp, Heterodera glycines
ccggtgctcacccctttcttaactcggcttttatcaaaatggtccgacgttattctgagggcaatgcaataactttcgcatggatccgtcctttggttttgcctgagttgcgaattgtcgacagagtcgacgcggtcaatcgacttgttgacgtttacgactttatgggcgcgtacctttggcttagctatcgttttgaggaacatttttccgaccgagacaaagtccgcgagttgcaacgagaatgtgtgggatttattcagaaaagcatggacaaaatgttatctgagtatggagaggaggaggcaaagggagcgccgcgcaagggaaaaaggagggaaaacagcgattcggagtacgaattgagggcgatgggactgcacaggaacagctcgaaaaggcatgacgacactgtttccaaagtgcagaaggaaggcctccaggaacagttcaacgcgctaatttctaaaatgcggaaacaacggaagcaagtcaaatgaagggttcttctgcttaccactcattaattgttatctcattgataaattg

SEQ ID NO: 94495 - DNA, 514 bp, Heterodera glycines
tattcattttcgtcaattatatttaaaaatgaatttgtggatgttaattttaatgtttggccctattcattcagttcgaattcgaagacattgggtaaaagggcaactaaatgatgaagtaaacagaaaagactttgaacataatgtaaccgatcattcttgcgcaaatgccaatcattctgctgatcagattgcgaattttgtcctttctgatcaatcaaaaaattgtggtaaagacagaaatgtttttgatcaatcacaacaaagtgatgaactcaatgatagagatgaaaaagccaatcactctgttgatagtttggagagtgatcaatgtcttagcaataaatccaaaagtgagaggaaatgtaaatttgctgatcaccaaaaactcagaattaccaatcaatacaatcattttatcagtgcctatttgcgaaaaggaaatcattcgaaaaatgaatggggaaactttttgaagaaattggccaatgttcttggcgtaaaagggcgtaca

SEQ ID NO: 94496 - DNA, 188 bp, Heterodera glycines
ctttgcaattgattgaaattaattagaatagtccatgctttttgttttcgtcttgctcattcacatcccgtgtgctaattaataagtgagttggatcgctagatatgcttcatttatttcacaccattgttttatgtattagtaataaatgcatttaaataatgaaaaataaatttgtacaataaaaa

SEQ ID NO: 94497 - DNA, 414 bp, Heterodera glycines
ccgacgacttgtcgccaccgttgacacaattgaacatttttgcgcactgatggaccttcataacatcaaagataggctggcgttggtaaaggcggcgttcgctccgctgactttgttctgtgccgtctcttccaccgcacgggtcacccgtaaccgtgacattctttgcctctgcaatttcggctacgtcccgcgcggtgcccacctcagttacgccgagccatatcatttttccaatcgattggtggacagagcgctggacgaattggtggagccgttcagaacgttcaacttcaaagagcaaatgaacacgcaatcggcattgaactgcacgcaaattgaggaagaatgcggcggtcatctgttgggagtttctggcagatgcttccacaatagcggcgaattcccgccctc

SEQ ID NO: 94498 - DNA, 295 bp, Heterodera glycines
  unsure (1)..(295): unsure at all n locations
catttgcgggctgcccgagctgtacgattgggttctgaccgcaacacatccaaatgaaatggaaaatgaccgaatcccccgttacatcgcttttctgatttggtacccgggtgtcatcacgcaaatcgtcctcttttcttttgccgacaccccatcgcagaaccgttacgaacttttggatcgacaaatttcgcacatttctcgctgattctttttcattttccaatcctatagacaaataatgcttttaaataaacatattaagttttanaaaaaaaaaaaaaaaaaaaaaaaa

SEQ ID NO: 94499 - DNA, 521 bp, Heterodera glycines
tttctcgtaattttttggggtcatttatttccataatatttttcggtaataaattccatgaattaataaccctattaaaaaatattattatttgtcaaccaaaagttaattaatatcttcaataaacttattgatcggtagctgatcaattgaatgtttagtatgctcaagctgatcagaatcaaataatttatcacttcatcccaaattgagatgacattgatttgtacgtcggtggtttggtggaagagccgctgatcggtgctttggttggcccaacatttgcctgtataattggtgatcagttcaggcgtacgcgggacggggacaggttttactacgagaatcccggcattttttccagtgctcaattggccgagctgaaaaagacaagtttggcacgtctgctttgtgacaacggcgatcagatcagcaaagtgccgttctacgcgcttctgcttccatcagcgatcggcacagtgccatgtgccagattggcccagttggacctgcacaaatgg

SEQ ID NO: 94500 - DNA, 221 bp, Heterodera glycines
ttccggttccgggggaagtatggttgcaaagctgaaactgagtgacaccgtactccgcatggactacgagcaccgtaaccgacccgtgcagctgacggtcaattgggacgcggtgacgcacgacaaattggacttttaccacttccattggacaaagccggaggacgaagtgttggatcatttggaggatgccctaggaattggtaccgaaagcgatggca

SEQ ID NO: 94501 - DNA, 97 bp, Heterodera glycines
  unsure (1)..(97): unsure at all n locations
aaaggaagaaacggaagactaagtttgatgggagatttgtctgttttacatttcgtcagaattcaagtaaattgatcnatgaaaaaaaaaaaaaaaa

SEQ ID NO: 94502 - DNA, 175 bp, Heterodera glycines
gacaaaaattctcgtggaatttttaatggaaagagcgcggaaatttattcgtccgaagaacaaccgacagagtgtgcagcaacagattggactttcggccgagctggagaggcggagaaaagcgaagaaacagtgaaataaaacgggaaaatttattcgtccatccattttttgt

SEQ ID NO: 94503 - DNA, 119 bp, Heterodera glycines
aacgaaaaacaattagtatattttcatgttttttcttgtgatctcgtctcgttctatcgaataattacagtagtacaatacatggcacatgcaataaaaaataaataaataaaaggcca

SEQ ID NO: 94504 - DNA, 522 bp, Heterodera glycines
actgagtcttcaagtccgatcacttctccggacaacatttctcagctttgcactccgtcaaacccctcaccccctcagggcattttaagccttccggaatttgccaattcctaccaattggacattatctccgcgttgcgaggcaatgagcacgatttcctggcaaaggcagccattgcggacgcaattcgagcatttcaaagtgatgaggacaaaatggaactaattgatttcattgcgtcagaagaacacggggccattgccttaactttggagaacaatgcgtgcaaaatgttcaattgttcgccctctgaacttccgctggtttcgtccaattataagacgaaaaagcactttctgtccgaactttgcgagctgttcaccacctctctttgccagtcaatcccaacgcttttcgcaatgctttacccacttcagcactctaacccaaactttcaaatccgtaaaatcattttacgccatttccgtgaccgcgttctcatccgacttttggccaatttt

SEQ ID NO: 94505 - DNA, 73 bp, Heterodera glycines
ctggaatttttgttgataaaatgcgatgaatgtacgaaaacttcgaacctaattaaacatgtttaatttacta

SEQ ID NO: 94506 - DNA, 418 bp, Heterodera glycines
ttaaatttagagaacccgaagtgctaaactttacaaaatatttgaaccatcggaccggagatggtcatttttttgtgctttcatgttcatttttcggaatttccactggagagagcgaaagtgaaagttcattggaatcggacgacgaggaggaaggggaggagggggaatttggtgaggaggaagaagagggggaaggtgaacacgaggaggaagaggaacatagagaaggcatttaagaggggaaagggagagatgaaagtgacgcggaagaaagcaaacgatgccaatggatggggccacggaaagacagaaggccattgtccgttttaaccttctttatgtcctttccatgttaccttttgtttttcccatccgctgctttgacttcactcatccgtttgattgtccggttaac

SEQ ID NO: 94507 - DNA, 425 bp, Heterodera glycines
acatatgattagtttggtgacggaagaagtaagaatcttatcattggactattagttaaaattaacaacttttcagaaaccattgttttttctagtcacattttcaaatccaattaaatttactcattttacgctttttcaggttcaggaatacaccggacctcgaaaggcgatctgttcgttggtcaatgtggaaaaccaagctgtgaatgggtcaatcacgtttacccaggaaagtccggcggattcaatggcttttgagggacgcattaagggcattaacgccaatcactgcgatcttttcgtgcatgaatttgacgacctttccgaaggtctttcgtccgtcggtccggtcttcaatccgccacaaactctgttcagtgggcatcagttttttggctccttccataagtttcaaggatagc

SEQ ID NO: 94508 - DNA, 416 bp, Heterodera glycines
gagtgccattccccccacttattttttaatctaatccacttcctcatcgttaataaatccattccttttttgtctcaaatggcaccacttatcctccattagtcccccccgaaaaaataattccattcgcttttttgccggtcattccgttgttcaatgggcggctgttgcgcatgcctaagggaaattctgttgtaggaccaagcggccgacatcagaattaacgtggttgaacccacaacagtcaccaaggaaagagacggcacttcgaacgtggcacatggcggacaaatgtacggcacacaattggacgtgccaaaaaccgattaaacgattcagaacaatttatttcgctttagataaaaattacagaatagagatgccaaatgcaaatgtaataaaattcaaaaggactc

SEQ ID NO: 94509 - DNA, 504 bp, Heterodera glycines
gtgttggctctgcgaaggcaaaattggtggagaccacggggggaccatgcgtaatcgaagcagggggatggattttcaacaccgaagcacatcccttggacccggggatcgtttactgttgttcgaaaaagcatcaatctgacacggcactgctgcaacaatttgagcaagacatcgatttcatcccaccataatttgcaccattgtcattttcatcagcaaaaggtgcttcaaaggcaatgtccccggttggcgttgccgccgtgccatcattattgtactgctcgaaattgatggcacaacgccggccatggaccaacagaatgccgtcggcgccaatttcgagccgagtgcccatcaacggctggccaatgggcaccaaattgtgcgggtcctcaaatatttgttcacactttatgtcggcgcgttcaaagcgatgaacggatgcccagcagctgacttcggtcagtccgtacacattgaacaccgccatggggcacgtct

SEQ ID NO: 94510 - DNA, 266 bp, Heterodera glycines
aaataaaaaaacaaatttctaaagacttctcttggtattataaaaaaaaataatttttagttttttaataaattattaaaaaaaataaaaaaaaaaataaaaaaaaaccttcatcctccaatccattaaaaaaactaattaatttgctaccttaaaacaatcaccctaaaagggcctttaaaattaataatcaagaagcaatttaaaaaaattaaaaaaaaaattacccattattctaaaaaaaaaacttttagaaaaaaaaattt

SEQ ID NO: 94511 - DNA, 529 bp, Heterodera glycines
aaaagcaatgatttcggcccgttcggctggccttttgacagtgtccgcttcactgatcgccatggtgtccattttcttttatttgcctctgttagtgttcaaaatccaacggataaacgagcagctcaaagttgactcggacgaattcaaagcgatggcggacgaaacgtgggatcagctgatcaccgtgagaagcacgctaccgcaagaaatgctgctgaggaaacgaagacaggcttacgaactgcctaaggcgtatccgctgcacaacagttatgccaaacaggacgcatatgttcacgggcccacctgcgcgtgtaacccactgaacaattgcccagcggggccgcccggcccgccgggaaaaccgggagaagacggcattccggggacgagagggccggccggggggccgggactgcccggaaatgcgccacccgtcgcggtcgacccgaatgccgggtgccgagtttgtccacatggacccaccggaccagcgggtcctccgggagagtcggggccgaccgga

SEQ ID NO: 94512 - DNA, 124 bp, Heterodera glycines
atgactatttatttatttttttatttcatgagaaatcaaaattataatgtttttgttttatatattttgaaagataaatttttgacttctaaaaaaaaaaaaaaaaaaaaaaaaaaaaaaaaaa

SEQ ID NO: 94513 - DNA, 160 bp, Heterodera glycines
tgccaaagtcaaaatcatcatggccaccaatcgacccgatacgcttgacccggcactgctccgtccgggccgattagacacaaacatcgaaattggattgatcaatggaaatacttccctcgacgcgctgaacaccccatgccaccaaagtgttgaacat

SEQ ID NO: 94514 - DNA, 527 bp, Heterodera glycines
tggtccgaggacacgcccatttctgctggcccaatttttggccaccattcccacagaattggcgcggcaccaccaccgccgccaccgcagcacgctgcgcgtgctgcggtgggtgccgcgggcgcattggccaccgaccgttcggcacaacagcaaaggctgccctcccactacgaccgcgatggtgccaatgccaatgccaaccatgcgctgttggcacggggcgacttggccaacgacgacggcaacaacgatccgatgggctttggccaggcggaagcgggccaaacggcacgccatcggcgcgggccggcactcatccttctgctggtcgtgttgccgctggttgttggcgcatttacagtgctgctcgtctttctcaactaccactgcaacatgctctgatcattaatttggcacaaaaaaagagtgattgatagacaggatttatatagatatttttagcttttatctcgcctattcgctttttttgcactttaatttcgccattgtaaaattataaaaat

SEQ ID NO: 94515 - DNA, 514 bp, Heterodera glycines
ctggaaaaattttagtgatttttaatgcgatttgttaacagatttgtccacgaaaatggccaaatttagcgacttctagcatattttcaagaaaattaaggatttttaggtccggcggtgccgataggcgccgccgggaaatttttaaaaatttcaaggcaatttattaacagaaaattgtataaaaattgctatttttttgacaaaaaaatcaaaaaaaattccgaaaaattccaactttttatcaaaaatttcggaagtcggaaatcggaattccgaccccaaaaatgtcggaactggaactcggaagtccgtgccatccctggtatttatgcaggcagtttaggccacataaaaaatttttctgttaaaaactgtttttaggggtattcggggttatagttatgattagggctccaatttttaggcaaaagcctattttttcctgagctccccgtggcctgaaacgcacgaaaaacgtgttttttgtgctgttgttaagctacttttcgag

SEQ ID NO: 94516 - DNA, 88 bp, Heterodera glycines
tttgaattttgtaattgttacttttttgtttgattttttgtttggttttggcgcatacatttccatgaacgtcaaaaaaaaaaaaaaa

SEQ ID NO: 94517 - DNA, 542 bp, Heterodera glycines
gtcgagctccgccgagacggaccctggcattgtcagttttgccgaaatttggacaccgatcctgcaaaatttgggcgcaacattagtcggcattggtcctggtgaaccgtttgcctccaaatcgagcgctaaccttgaggaaaagatggaattctgttccaaaattgagcctcccgttgatgtgctgctggcggagacggactgccaggccgaggtggccgagctggtcgaggaacggggcggtttggccgtgtccagcgaatgggtcattcaggccatcgtcactgtgttggctgaatgaacatccacagttttggtggtggatgacggcggcaatggactttgactctacttgaacacacctaacaatatcataaaccattcgcttttttggaacgatacccggaaacttttctctttttgtcgcagaattatctgccctaattaattattattttattgtcccactgacattacacagcatacgaatttgacaataaatttgatgtttaatggataatagcgttgcttcgtctgctgga

SEQ ID NO: 94518 - DNA, 310 bp, Heterodera glycines
tttggtaaaacttttaattaacaaaagaatggcagaaaattattttctttttttagtgcgtccataaactgtttgagcgttaagcagaacaaatatatactatttataaagattaaaaccatttcgagcaagcaattggattggcctatttatgcgtgtctcacagtgaacccaggttaagctgaccaaacaaaaggtttctttttttatcctcattcaatgatttagcaaaattttattatacccaaacaaaaaatatttttaattattttctttgacagaagatcagtcacttcctttatttagtcga

SEQ ID NO: 94519 - DNA, 453 bp, Heterodera glycines; identical to SEQ ID NO: 74084

SEQ ID NO: 94520 - DNA, 414 bp, Heterodera glycines
  unsure (1)..(414): unsure at all n locations
ccgctaatattactcctatagggactccattttttaccaaattattaaattaacaaaatgtcccctcttcgttttctcgccgttctgctgctgatctgtgccatgttcagcttcaacaatttggggctggccaatggcgaggaaagcaaagacagccaagtcgctctccgtcccgatgttgctgctgttcagcctgacctcgtcgttgttcgcgttcttcgtggttactatggaggtggtggaggctgttgctttgttggttgcggaaaaaagaaataagcagccaaagaagaaaggaaggatgccgacaaagattaattatctttaattagtaaatgatccattcgtccattttgtaattggccaaatttagtaaaagacaaaatacaatgataaattttgtaaaaaanaaaa

SEQ ID NO: 94521 - DNA, 521 bp, Heterodera glycines
aaagtaaatcctctttaaaaatgaaactttcaataattttattgctttccttggccttttgtgcgttaatcatcgatgcatatccatcgggaaatggtaaagatcttgaagctgacaacgaaaaaaacagtgactgttgtcgttgtgttagcaggaattttgtgcgaaatcaaattatcaacaatgtttattattttgagaaattcttatcctatttttgttgttttttataaacatgggaattcataattccgaatgccttttaagccgctgcccatcaaaatgtccctgcgtcataatgtcccagcgtcataatgtcccagcgtcgaaatgtcccagcgtcataatgtccctgcgtcataatgtcccccaagccaaaatgagtcaaaatgtccccctctaaaaattagtgaaaaaactgaaaattatataattatatgccttcatacgatctgcttttaaaatttatgctttagcatcaatgtggaccgtaacaaaattgaaattctccaaaaaagtcg

SEQ ID NO: 94522 - DNA, 286 bp, Heterodera glycines
  unsure (1)..(286): unsure at all n locations
ctaatgaaggggattcaaattggagaaccaaaccgactggaatcactagcacagcggattcccagaacagttggcgaaccgtgtcaaagccagcggcgacaccgcaaccgacttcgcaagagactccggcagctggaggcggaaatgtgtatattccaccacacttaagaaaaaggacggagcagaagtgaatcgagatgccaatcagtattggattgttacgaaaaatgaatttatcagctcatgaacaaactgttgaaaatcataaaatgttttatcngaaaaa

SEQ ID NO: 94523 - DNA, 519 bp, Heterodera glycines
taattgttgcacattccccaattttatttcttccttagtaagtagtattggtgcacaatgcgcacttttctgttcatagccgtagtcgggttgatgttggccgtcatcttggagaatgtaaatgcgactgggaaaaattcgccgacaaagggaaaacagtcgctagacagtccaaaccatgaaaaagaccataaaattgagcatgaaaagtacgaagcagcttactttcaaagtttgttgtttttttatatgagcaaggtaacatacagaaccatgctaccggtaacacgtttattcagcaatcataaaatttttatctaaaattaacatgaaaattagaaaattttataaatatatttaattattttatataacatatatatttatcagaatggcataacattttactcaaataaaagtaaaatttctgttatttttttttgtttcgctccaaatgtgtccatgaccaaaatggcggtgcataaatggcaccgaatcattaaaataaaatttttaacg

SEQ ID NO: 94524 - DNA, 455 bp, Heterodera glycines
ctcattaccacttccatcatttggccttttttaaaacaaaaaaaaatgagaaaccttcttctcgcagcgttggcaattgcggtaatgcttttgtgttgtgcggaagccgttccaatggaaaacgaaaagtatggcaattaatataattaactgtatattaaagcaagcattcttcatatgcatacgcataattcgtttttaaaatttgagtaaaaaaaggtcagttttcagacggcaaaaagtttttcatattcaataaacagaaaggttagagaaataaatagtatttattaattaatgaaatgacaatttaattaaagtattttcgtatttgttttccagtcaacttgttcgccataagcgttggggttacggttacggtggtggttggggcggcggatggggccgcggcggatggggcggtggatggggtggccgcggatggggcggcggct

SEQ ID NO: 94525 - DNA, 475 bp, Heterodera glycines
tgcccacgcctttctccgcttcgatacgattgctttcgacaaattgtttacggttatcgcaacttcgagacgattcggcacggatggaccgttgtttatggggacgattgcatttggcagcagcacgactatttgtgtgctcggcccaacctgacgcagaatcggatccgtgccattttcgtcgacgacggattcgccgacgggggtcccttttcttttcctttggtcccaaattcgctggtccttttcatttttcggttgcgtcagtggccacgattgggccattgttgagctcgaagtgcccattgccttctccgaccgcgtccttcccatttgtttgcccgcttcgcccgcccttcagcaaatttcggacggcgaagtgctgacagtgacgagttggggacggcgcgatgccttccataagggtgaccctctgatccgtgagattccgttgcggcatgacgcgggatgcaaa

SEQ ID NO: 94526 - DNA, 490 bp, Heterodera glycines
ttacgtcgagatggaatcaaaggtcaaagcggtcttcgagcagctgaagggcgatgccgagttgggaggcacctactatccgctccagggcaatgttggacaagtgctggagcgtctcatagagggagtcaaggccatcgaatcgaaagttccgttttcgcgtgacgaccgtcttggctggctgactttctgtcctaccaacttgggaacgactgttcgcgcgagtgtgcatatccgacttccgaagatcagcgcaaaacccgacttcaagtccacctgcgacggcctgaaattgcaaatccgcgggattcacggcgaacattccgagagcgctggcggcgtttacgacatcagcaacaaggcccgtcttggtctcacggagttcgaagcggtgaagcagatgtacgacggagtgaaacacctgatcgaattggagaagaaagcataatgggaggaccgatctatgatgatgactttatattgcgtaatg

SEQ ID NO: 94527 - DNA, 194 bp, Heterodera glycines
aattgaaaaataggcattcttttggacattttgaaccccaaagaattttagtgccatacaatgaatctgaaaaaggtttttatttttataaaacttttaacattttcgaataaaaattatttaaaaaaaaaaaaaaaaaaaaaaaaaaaaaaaaaaaaatttaaaaaaaaaaaaaaaaaaaaaaaaaaaaaaaa

SEQ ID NO: 94528 - DNA, 441 bp, Heterodera glycines
gagaccaatcaacggatgaatgtggcccaatatttttttcaatttattaatattcatccttatttttggggctcttacggaggcacaaaatcaacagaaaatagaaactaaaactcttgttagcgatggacagtcacacaccttggaaatttcgggactctatatgacgatgacacaagaaacactgtccgatgggacaattgtgctgagatttactgggaaaaacattgacgttgaaacaagtaaaagtgatgataattccttgacgaccgaagcatctttaccgactaatgaagtgtcgtcctccacagctaaagaagcttcgacattgaactgtgcaaaagaggaggaggagggggaagaagcccaaaatgccgctgagtctgatgatggctcatttagcatgcctgacgaatcagacgattcaatggccgatcgcgt

SEQ ID NO: 94529 - DNA, 390 bp, Heterodera glycines
catcagaatgtctctcctcccttctgatcattcaattgtcaccgtttctgatcagtcaccgatttctgtgtctgatcactcattggtttccgtgtctaatctctcactgaatgcccattttctccattccctcatggccatatctcgccagtttgaataactcacttactcgcccaattcccttcatataatcactcgccttccaaaaatctctacctcccagctaaaacttgattgatccttaactccgttcttcgcataatctaaaccaattaaacaacttaagtaataaatatttcccacatttacattcagcagaagcattgttatgtaaatgtggtggttcactctttacacttttatttaccattttcttttcttcttcaaatt

SEQ ID NO: 94530 - DNA, 89 bp, Heterodera glycines
gatccgatcgatcgatgatgtcatttccaccatggtgatgtgccaatgatgtgtgctggtggcggacattttaaaatgccatggatttt

SEQ ID NO: 94531 - DNA, 306 bp, Heterodera glycines
gcaaattgcgcttcattctttccttattttttgtggccttttaaatctcattgcccaattctttctctgaatgattttataggcttgtgaggacttatttttagtttttttaatttctattcattatttttatcttttaacattccttcccatttaaaagtgcaatattttttcattttcattaattgtgattgttggaaaatgtgttaagttggagagataattttgttaattcaattttgctcattatttatctttaaatttaaaaaataacagaatggcataaaaatgcgtatttgtcaaaaa

SEQ ID NO: 94532 - DNA, 477 bp, Heterodera glycines
cggctgctggacgaaattgggactcaattgcaacaaaatatgataaatccgatgaatttgaagaatttaaaagcattgttggtccaaacttggccaaatttgtccattttttgtagtattgtagcgaaaaaaattgagacaaagtacggcacatttttcccttcatggataaaagtgtgccgtgcaatgagcgcgctaaaggatatggaaaagaccaaaaacaacaacaacaacaaaacaccaagaaagggaaaaattcaaaaagaaaacaaaaaggaggtatcaagtaacacagaaggacaaggatagtaagaaaaaccgaagatgaataccatgattatcatcgacgagaagaaagaggtagtggtgatctttctaatttcgatccctttttatgtctttgttttccgacctttgcatcactgtcttataaaacacgttgtttaaacattgaaggcaaatgttgtttgaaatatt

SEQ ID NO: 94533 - DNA, 235 bp, Heterodera glycines
  unsure (1)..(235): unsure at all n locations
tgataagatcaacaagggtcaattggatggcattgccatgtcatttagttcgattactctcggcaccaacggaccacatgcgaccgcctcgtcggattcgatgatggtcgactcgaactcatgaacgcgaaatcaaatttttgtttaatgaaaacccataattatttttgataccaactatattttatattttaatgaattatctaaaaacccnaaaaaaaaaaaaaaaaaaaaa

SEQ ID NO: 94534 - DNA, 541 bp, Heterodera glycines
caccgatttggaggagagcaaataccaacaaatggagccaagactgtccatttacgggagggcgaaggacgaatgggacaaattggcacggtgggccattggacacgatgtttggtccccaaatgcccgttggataatccaagtgccgcgtctcttcgacatttaccgtaccaataaaattttgaaaacttttgacgattttctcgacaatctcttcactccgctgtttgaggtcaccaatgaccccaactctcatcctgatctccaccgattcctccaacatgtttccgggatcgattcagtcgacgacgagtccaagccggaaaatgtggcatttacgaaggattcaccggagccggcggattacgacaacgaccagaatccgtcctactcctattacttgtactacatgtatgccaatttgacggcactgaacgccttccgacggatgcgcggactgaacaccttcgcgttgagaccgcactgtggcgaggcgggcgctgtcggccacctgagcgtgtcctacttgacctcggaaagc

SEQ ID NO: 94535 - DNA, 453 bp, Heterodera glycines
agcagcattcctcgcttggacaatgtgcgagtgttggtgatgggagtggcggaggactgttgccccaaggtcactgccaaaattcacatcgatcagtttattgattgcattgctcaacactgtccacagctgactcggttggagatccgctgggacgatgaaacgcttcgcttctctgataagtccagcaaattcatcgacgtcctccgcatgaaatgtcccaaattgcattcgctggtgctcagcgatggccaatactatgagctcgtccgctcaaatttcgaaagagccgaccgactctctgtcgtcaggacgacagaaatgtgcaagactggccttttgcactgctcgaaatatttcaaccaattgctttttaactagaaattctgtatataaaatgcttattgtattgcaattttttaaatataaaaataaatgttaatattttaaaaa

SEQ ID NO: 94536 - DNA, 346 bp, Heterodera glycines
  unsure (1)..(346): unsure at all n locations
cttggttaggtggatagagcaccaatgggttcttaagaaaaatggttttattttctgccaaatgagcacgagtgccgagttattgtaaggattattagacgcatttccctcatttaattatttcccattggccattatcaattcaattacatttatccttttctcacctttttccttttctcattgtaatgtttctccgcccattctcttcgcattttctccttccccagtgatcagtcagtcagtagtggtgatggaacagacttcaattatttattccgatttctcgcttcgtataaatccaacaacgaatgaataaagacatctttaacnnnnnanaaaaaaa

SEQ ID NO: 94537 - DNA, 511 bp, Heterodera glycines
agtacctacctattctaattaatattttaattcaactttgacttttcattcaagaatgtcaaacattgcctttataagaattcaaaaagaatgcaaagaaatcattttatgtaaagagttacaagaaaatggtgtaacaattgaacctgtaaatgagacgctttttgaaatcattggaaagatacgaggtccaccagatatcccatacgaaaacggaatatttattttggacgttagaattccacaagaatatcctttccaacctccgaaggttaaatttactactcatatttggcatccaaacattagttcgcagactggtgctatatgtttggatattctcaaggaccaatgggcggcatctatgactctccgaacagtgcttctcagtgtgcaatcgttgttactttcaccggagccaaaagatccacaggatgcaattgttgcgaaacaatgcttaagtgatcctgcattattcagatccactgcaaaatattgggcacaacattat

SEQ ID NO: 94538 - DNA, 530 bp, Heterodera glycines
tgcgaagaagtatccggttggcgatcgaaacggagcgatcaatgctttcatccgaaaggcaatcaagaagctcgtcgaacagaacattttgatcttagtcgaaggtgcaacccagaagtcggctcgatatcgtttggcaccagaagttaagcagcacatgaaaaaagttgagtcgaagactattccaacatcgccaaagcccaaatcggaagaagctaagaaggctggcgaggcaaagaaaaaaacgcaaggtgtctgctgctaagatcaaggatgtcgaaggaaagaagaagaagaagacgggtgtgtccaagaagaaggttgtgatgactcgtaaaccggcacaagaaaagactaacgtcctggcaaagcctaaggtaaagaaatcggctaaaaagaagacgccaaaggctgcaattaagaagtcggcgccggctgcagcatcggtgaagtcgtccgtgaagactgacaaggcctaaggatctagttttataaatatgttattttgttgatgttttattgccttgtca

SEQ ID NO: 94539 - DNA, 317 bp, Heterodera glycines
tcgctttattaaaggatttactcttccaagaaaagaacacccaccaattaaccaaattggctgattcaactgaacccgtctttgttgtcgccaaattcgaccaaagaatgctcttccattcattcgttggcattgtgtgaagaatggcatgcgcttgctgaccaacggaaatttatttaaacaatttatttgttttcgtgctgatgttcttttattttgtcttggaaagttaaataaagtataagtcccaaaaaaaaaaaaaaaaaaaaaaaaaagaggagggggaaaaaaaagaaaaaaaaaaaaaaaaaaaaaaa

SEQ ID NO: 94540 - DNA, 188 bp, Heterodera glycines
caaaagagatgataattgggagaggacagaattatgagttatcaatcaaagcaaaacaaagaaaaactgtttttagttcaatttttttggcgatttgtgtgaattttttgctttccaattttttcaatgcatttaatcgaaaaaaaaaaaattttttttaaaaaaaaaaaaaaaaaaaaaaaaaaaaa

SEQ ID NO: 94541 - DNA, 383 bp, Heterodera glycines
  unsure (1)..(383): unsure at all n locations
acccgaataaatttaccaagtgtatgacattgtgctcaaactcaaagaaaagcgacacgaagtcaactcgctgttttatggttgattgtcttagaggaagactgtcgagaaaaaggaagaaactgaagttcaacagtccgattgagcccaatctggaagtgattgtatgcacattagttgagcggactactagtggaagtgaaaatccaagcgagaaatttatcaagtcaagctgaagcaacagaatgaatgtgatagcgaaagaatggctgaaaacaataatttttttgctttaagcaaaaattttgaacacttttttggtttaataaatcattggatttttcnnnnnannnaaaaanaaaaaaaaaaaaaaaaaaaaaaaa

SEQ ID NO: 94542 - DNA, 483 bp, Heterodera glycines
aatgcacgccgatgcgaacgtcgactgggccaagctgttgggcacaatggacggcgaaaacgaaggggaggacgaagacggacaagagcagcgacaagcggaggaggaatggcaccagaaacgccttcaaatgatcaaatggcgggcggagcaggaggagcggaacatacgggcgaagaagcggacgcggcaggacgacgacgaggaggggacgaacggacgtcggagggacgcggacgacgaaaaggggccaatcgtggaactgttggaattggactcgccgctttttgcgctcggcaagaaacttctgtgtgccgccaaagatgccaattccgcttcgccatcgtcgtcccgtgtcgtgccctcctcttccctttctgccgcctctctgtttgccgatgtttccattccgcccccagcaaaacggcgcgattcgcttcttaactcgtacctccgtcgaactgatgctgccactattcgcac

SEQ ID NO: 94543 - DNA, 460 bp, Heterodera glycines
cgggcaatcgaattgccacggcactgttttacttttctcagcccgaaaagggcggcttcacggtttttactgagctgaaaacgccgcaaaaacccagcaaatacgacgcacttttttggtacaatttgttgcgaaatggcgaaggcgacctcagaacttgtcatgccgcctgccccgttctgctcggagtcaaatgtgtgtccaataaatggatccacgaaaaaggccaagaactgctgcgaccgtgtgccctgaagccatccgtccaggaacgttatgtgggcgatttgggtgggcccgagccacgagggcatccaaatgtcagtccgtactgcaaaacggcattgtactgcgagtagatatgatttttatgcattcttacgttttcacaactgttttttgttttgtctgtttgttcccccctttccgaattgccagtctttgccatttgacacctttc

SEQ ID NO: 94544 - DNA, 531 bp, Heterodera glycines
catttaaaattcatttctttaatttaatgtcgacaatttttcttcccttttctcagcccccgaggggacgatgaataataataattagtgacaaattaattggggcagcacaatttgttggcaaaatcaccggccaaatgtgcgtataaaagtggtgatcaaatggctgtcaaatcaccaaaacattcattcattttattattttattggcccttttcctaaaattcaatttacaaaaatggtttccaagcttcttccggtcattctctgctgcttgtttttggtatgtttaagcattcggtataaaatactgtaattcgagtagaaaatcagggagtacggtatctatgatattattaatttctaaaacagggcttaaaaaatccgtgaactattttaaataaagattaagcttaaactttactttttaggcttctttcgccctctgctcgcccaaggctgctgatgtgctggtaaatggctcatttttggcattatggaaaatccaaataatattaatatcttgagacc

SEQ ID NO: 94545 - DNA, 381 bp, Heterodera glycines
gcaatttcatttaagcaggttaaattgaaatgagtttttcattgagttcaaaagacatcaaaaacccgcagtgcgcatgttgtgaaaaggaagtgccatttggtgacaaatttagtgtcgatcgattgacgagttggcattttttgtcattaaacttcttttttaaaaatctataaacaaaaaaaaatttgctattttttttttcaccaatcacgcttcaaatgtgccatttgcgacaaggcgcttgaggttggctcttgaacactagaacgtggcctgtcgcggtacggaccattgtggttttgttgggaacacatgtgagaataaaaaaatctaaaaaataagtaaaaaaacaaaattaaaatttttgcataatttatg

SEQ ID NO: 94546 - DNA, 554 bp, Heterodera glycines
caattaatcacttccgaaaatggcaacacccattcatcggaaagaatcaccggaatacaaacagaacgaagtgcctcgaggaaacgaaaagagccgagccgacgaccccgtggaatcaaacagaaggtggaattcgccatcaactgctcatagtcccacctgccataattcgcattgtcaacttcacaacgttcgtcctcttacttcttccagtccgtgttgtgcttgcaagtggtggcaataacaatggatcggttatcgttagaatggtgcaaaatgttgcgcgtcttcgacccaactccgtacacatatcgttttcctttaaaactggccaagtatttgtcatggttgggaaaatgcggttggagatgccatggtttgtcgtccttaaacgggtgctcattgttaaataatgggaacgaaaggtcgaaatttggtcgaaaattctgcaaattcgaactcgcccacgcgaccattgccttgccaaagtcgaagcccaagtcggtgttagcgtagtcggggaaagtgccaaagtataaattaaacaccaaatg

SEQ ID NO: 94547 - DNA, 335 bp, Heterodera glycines
ctccggtttaattgtccaatactataacgcttttttgaaaaggaattacgtggtcagctggcagtgcttggacatcatccgcaaggacatggtcgacccgttgagcggcaagcggatggccgagtcggacatcatcgaactgcaacggggcggcacgggctacgcagctacaaacaagctggacgccaagctgatcagaccccaattggaactgcaataaatggatgattgttcatgttgctgacttgatcatggatttaccaaatatttgctataatttctgtgtttgtaccattttacaatttacaagatttgatgaaaaaaaaaaaaaaaaa

SEQ ID NO: 94548 - DNA, 488 bp, Heterodera glycines
  unsure (1)..(488): unsure at all n locations
tatttttgtctccaatggtcatcgtgatgagtcggcttctcctcctcttaatgccctctttgtccgactttctcctctttgcccaattcctctcggcttcatcttccgttttggcaattcgtccctccccctccctctttccctcctccttcccatcctccgatagcccaaacaatggtcgaattcctgccgcacttcagttcaaccctgtctacagacaaatgctgaagcaacgcctttgggaaacggtgcgaaggcgtcggcttactttggtggcccaccaccaacggaactgtttcttctcccccattaattgccatttgccaccgacagtgggcacagagacatcgaccancagcagaaactagtgaaaggaggcaaaatgcagcagaagaagaagacacganaaatgggagcagtacagagagaaggcagaagaagaaaaaaangccaaagccaaccaaccaattcattaattaattagaaaa

SEQ ID NO: 94549 - DNA, 359 bp, Heterodera glycines
cgtcagccctgcgtggtgttcgccggccatccgtcgttacgaattggcgaaattgtgcaattgctcgatttgtggggcggaatgtcgcgcaatgccatcataatgatcgaccctgactacccgctggagacttactacgcaccgtacaaatcattggcaatccgcgcatattattacccaattgagacgcggttggacggcacgcaagtgctgaacaaaattatcggcgaatgtggcccaaagcaagtgctttttccggaagagtacgcaagtgcctttagcactttgcaggcactgcccatgcaggcaatgtcatttcgccaaaatgagtgcgtctcgttggactcagccaaaggatc

SEQ ID NO: 94550 - DNA, 469 bp, Heterodera glycines
  unsure (1)..(469): unsure at all n locations
caacggtcgggggggacgaaggagtaaactcactgctccatagaatttcctgagggggaactcattcgaattttttgatttgttgcaatttttagaaaagctcatatgattttctcaaatcgtccttgctgattatatgtttttactcaatttaaattttgcaggagttggacgaggatcaggacgaaatgcgcgacgatgcctcatttgccaactcagactggaattgacttgacacaaatggcacttaattctcacctttttgtgcacaaaaacactcaaaatgccaatttattattttattataccattaaatcaagaagaagcagcactttttaccttagctttttaattgtccttttattttagttaaaattaaccaaaaaangacaaaaagtacaaccatttcattcattcattctttcacctttaactgtaattattgttctcaactccctttcctttcaac

SEQ ID NO: 94551 - DNA, 511 bp, Heterodera glycines
  unsure (1)..(511): unsure at all n locations
gtgaaaaaataaaacattttttcccattgcccatcagttattatcgggaaaacaaacgaaaaagagatacgtattacgaaatggcttcttctgtttcttcttcatcatcactggctcatcaccatcgttctcattttggcattttgcccactaattgtttcgccgcttttncctctgncctgtcaatttntcggcacccgatgcccattccnncatcgacggggttgaccgatgccgcgtttcagnccctttcagcagcgacaacccgttcgcactctttgccgtcgcgcaggaagcggacgaaaatggcggcattggaagtgcttcactgatggcaaaacggcacctgttcgaagcattggcacgccaaggccgttcgccacgctccgcttcttccgcaacaatgcgaaacgcgctcgtgcgtttcggcaaacacgctctcttcccttcngtggcattggatgataagcacaaccctccacaaccattcatccactttggtcactcagca

SEQ ID NO: 94552 - DNA, 381 bp, Heterodera glycines
  unsure (1)..(381): unsure at all n locations
cgggtcgcccgaatgggagcaggtgactgaagagcagaaatggcgacttggcatcaccgttgacgaggacggagagttttggatgccatggcatgagtttgtccgttacttcaccgacatttgcgtttgccaactgctcacaatgggcacanttgaccgaatgcaaacagccgcaacagaaacaggcacagagaggggtcagcttgaggaggaaacagctgagcatgcaactttcgaacgtcacaattgggctaacggagaagcggtggagagaatggactttcttcaaccgctggtcctcaaacagtgtcaagtcnggcgccccaaaaaaccatgccggaggcantgtccatttcccggcaactttctgctataatcctc

SEQ ID NO: 94553 - DNA, 579 bp, Heterodera glycines
attcaaataaataatcattcctagctgcttttggtttgatcacaaatgttcgtccaactcgtcctccttgccatcgttggcattacttttgtcgatgctgccgcaccgccgttcggccaattgtccgtcaaaggcaccaatttggtcggctcaaacggcaaaccggtgcagctgatcggcaattcgttgttctggcaccagtggtacccacaattttggaatgcccaaacagtgaaggcactcaaatgcaattggaattccaatgtcgtgcgcaccgcaatgggcgtggaacagggcggctatctgaatgacacaaacaccgcctaccgactgacagcagctgtgattgaagcggccattgcacaaggcatttacatgatcatcaattgacacacacataaaccaaacacaaacaaagcaattgaattcttcaccaaaattacgaaagcatacagctccaaccctcacttactgtacaaaacatttaacaagccattaaatatatgctagaacatttacttatccctgaccataaaaaaattatttctacaattcataccatccacaaaaacaattgat

SEQ ID NO: 94554 - DNA, 788 bp, Heterodera glycines
  unsure (1)..(788): unsure at all n locations
gactctactataattccgtccgtccctttccttttaacttccaccaaatgcccctcgtgcacaattgcatcgctggcactcgccattccctcttaattgttttgggcctcattatgataatggccaattgtggacaagcgatgcggcagcaggcggtggccgtacgtggccaactccgttgtgggaacagacccgcctcgggggtcaaagtgaagttgtgggacgaggacgacgggcccgaccccgacgacgtgcttgacgaggcgtttaccgactcttctggctccttccaaatgaaagggtcaacacgcgaactgacaaacattgaccccgtgctgaaaatgtatcacaactgtgacgatgggataatagccaaacaacacaaattgaaactgcacatccccaaccaatacatcacaaacagaaggttgaccaaacgaacttttaaantcgaagtacttaattgtaagacagtctttactgaagaagaaaagaacttcatttgaacatagaaaacaagaagaacttgcgaaataaaagctaatttattatcacatacagtataatcagtcattccatttaatattctttatataccacatttatattcatcaaaataatatacaaacaattataaactatacaatgtatcaaaacaactataactagaggatctcgatngatcgtgggcatagaaaaatagaaaaagttcccttcgtttttaccacttatgctagtagtgtatgtagcacccctctaaaagatccaacttacttcacttctgtcga

SEQ ID NO: 94555 - DNA, 582 bp, Heterodera glycines
  unsure (1)..(582): unsure at all n locations
gaacgtcagcgacgggaaatgctaagagcggagcacgacagaagacagagtcaattgagacacaaaatggaacacatgcgacaaatgaaacacgaaatgttgctgaatgagcgtcagctagcaattcaacgtttccaaaataatgaacgccaaattatgcagcnagcgaatggctggtacaacaacgcgcaacaaanttcatcagtaccaaatgccacctatggtttcgccctaccctcatcaacagcattatcagcaaattccgaattccatgccaccaaacactgctgttacaatgaatgccattccatctttgccacaaaacatcaccacgcctatgccaccaaatgaaatgttgacgaatgtaaatcttgtgggaattcgagcttttcaaagcaacgaacaccagattatgcaacaacaaatgatgggacagcaaccgcaaatgcatcaataccaaatgccgcatttggcgtcgccctaccctcatcaacagcaaccgcattatcagcaaattccgaattccatgccaccaaacgctatcactgctgatgagcaaaaaaatcaaatgaccggcgtaca

SEQ ID NO: 94556 - DNA, 461 bp, Heterodera glycines
  unsure (1)..(461): unsure at all n locations
gcgtgttcaagtgttgtggaacggaaaacaccacttttacaaatttagtgcttcattcgaacgaaaaagttacagcctcgagcatcgttcatgtgccagcttggggaagccgcttgagactctttgctttgtccattgtgccagcnntcaaaaatggccttttttaacaaacacttagttgggtttgtgttcactcagcccccttctctgagggagctttgcttttggacggtgcancgacaactcgcggaatggcgccctcgggggaaaatatggaggggcggaaggacccanaaagaantgcaagccatgttcaaaataantcaaaccattcaaattgttcattgaaaaagcatggatataccgacccataaatcaaagctataaactataaagttttaacatcaaagttcattattttttaatcaaaatctgttaataaattacacctaaaaaaaaaa

SEQ ID NO: 94557 - DNA, 461 bp, Heterodera glycines
gttgtcgtgtgaatttcggacggaccgaaaagtgaaagaggttaaagcggaggaagcgcaccgcccaattcaacgaccgacaattccctttaattagcatcgaattacgggggctgggaaaaggaggacaaagacaacagccacaattggacttctaaagttgcgtattgtcagcttctgagatggtcgagggcggaatcactttggtcaaatacctcctcttcttcgccaacttcgtcctttggactctcggcttggcctttctaatcgccggtgtcgtacttcaactcaagtacacgggccttttggacattcttggcgatgaacggctcaccacccccatgcttctgttggccatcggctgtctgtgcactttgctcggttttgtcagctattgcagcaccatccacaagaattactgcttaacagtcagcttcactattctactcacacttctacta

SEQ ID NO: 94558 - DNA, 498 bp, Heterodera glycines
  unsure (1)..(498): unsure at all n locations
aaaattccaaatatttgtcctggcattattggtcttgcttcggtttttcaatcctcccaattgccaggccattgtcaagctggtggagacgttcagtgctgctgatgagctggtcggattggacttggagagcggaagccgtgtgttcctcaggtgtgtccccagaaatggggggacaacaaatgggtcgggtcataaaaagtgaacactttcattcattcccttcccccgtttagggcgtttgggacaatgtgtgcgtgaagcaggcgagtctgaacgcctgtcanaacatcacctccaatctgctggaggtggacgaggtgatgcatgccggcatgccccacttgaangggggacagtnaaaatgaaccgaacggaaatgaaagaacaacaccaataaatcacaaaatgttaatggctttttctttattaaactctacactttattatttaaatcagaccactactatttgtactttttcaatctcgctttcttta

SEQ ID NO: 94559 - DNA, 367 bp, Heterodera glycines
tactcttctgtgttgtgattggtttcattagaggcgtcgatatggaggcgataatttggagcaaaatattcaaaataatcgttgtaaggaagttctgaaagattgaaagggttctaattatcttcaaaattgctaaggtcgttatgttttatgattaatgtgaacgaatgtcaaagaacaaccgtcggatatgtcaatgtccacggccaacgacgtctcatacgtccaacatcgagcaacattccgaggagtgtacctttttcaaaaagcaaactgtcaaacaaaaatcgcagtattacccgccgccgcctaataacatcaacagcaaattgcaatcacagaaaaatgtcacgcattttccatgtcc

SEQ ID NO: 94560 - DNA, 479 bp, Heterodera glycines
  unsure (1)..(479): unsure at all n locations
gcgcccctctgatcagttgtgccgcctcttcgatgatgccttcgtccgtcattccctcgggctcttcggcgttggcccatttgggtgccgtcgactattattctgcggctgccctccagcaacagcttttgcaacaacaactgactgcattagcagcagcaaatccggcactgtccgtggcagcggcacagcagcaacaacagtacgctgcggccattgccgcggcggttgcgtcgaattcgtccattggccagcagtgcgccgtgccaactcagtccaatgggtcagacagtccctcggccggcggttggtctctgtcantgcacaatttggcctctgaagtcagagaaccaacactgtggcaaatgttcagaccattcagtgctgtcctatncataaagttatccaaaagaaaagaacaggcaaccattagcataaccaattataaagaaacaattataacagcaaatacactaaat

SEQ ID NO: 94561 - DNA, 493 bp, Heterodera glycines
  unsure (1)..(493): unsure at all n locations
ttttgtacaacttattgaataatgaaatattttctaatatttttcatttcttttttaatatttaatgactgtcgccctttccccggtgatgaaaatgaaaacgaagaaaataatcgccaggaatctggcgagtgttctcgtacaaacacggggcgaggcaaaagaaagctacccgaagaagaaaaagcaaaaatactcaaaaatttgaagatgagcgaaattcgtttaatactaggcaacaaaatctcagagaacatgccaaaaatgaattgctgggaaaaattctaaaggcaaaaaatgaatttatggaaaagatcnaaaacgaaagggcccaaattgcggaaaaacttttttgcaaatttggaagacgaagcgatggcggagcaaagcacanaatcaccgggggtcaaccaaaccacagataatcaaatcacatactaacaacctaagccagtgccaaatgaaaactgatggatatggatgttataattat

SEQ ID NO: 94562 - DNA, 447 bp, Heterodera glycines
ttttcagaaatgcatttcaaattctctctcatttctctcgcctttttgtgcctaacattttgccttatcttccaaatgccatgccaaactgaggctgctgttgctggcgctcacactgtgctgaaagtggctggctcaaagccggggtcgatggcactaaacactgtggcacccggtctcggcacagctgcccgggtcgccaatcgtgtggtcaatcattagcctcgtcattgagcactgccgtaggagaccggtggaaagaaatgccaaacttgggaggagtggagaagtgccggaattttgttgcaaatccttttcatatttgtagtttgttctttttttaattctttttcagcttttgaatttgggctatatattttcttcaacacaaaaaaaaaaaaaaacaaaaaaaaaaaaaaaaaaaagaaaaaaaaaaaaaaaaaaaaa

SEQ ID NO: 94563 - DNA, 275 bp, Heterodera glycines
agcggggttggtccgactatccacgaaatcgacgacgatgaagcggactcggcaaacccgaaacgtcgcaagggcgtgttcggcaaattcctcggctgattgtgagagccaattcgatttggcattggcagcgatgtaaacattaactgattgcttttaactgatcacgtagtacccgacaaacttttgtcgcccaatgggtgattggtatgaatcccaaacttgtatcacaaagggatttttataaatattttctaaaaaaaaaaaaaaaaaaa

SEQ ID NO: 94564 - DNA, 391 bp, Heterodera glycines
  unsure (1)..(391): unsure at all n locations
aattaataaattgaataaaaattaattaatcaatgcattcctttcttgtactgaccattctttttgccaatttggcatcaaatgcttttgggcaacaatggccaaaagcgactagtgaagaaactgttaaggcaacaattaaagtgtncgggagggcgtcanaagactttttggcttcannagcggttgactnngcctcttctgcattgggcnagcggtgatcnagtcggagggccaaaaagcactgatccgtgccgaaaagggcgcagtgatcaaaaatttgatcattggccaaaacggggcggacggcattcactgctataacgggtgcacgctgcaaaatgtgtggtgggagaaggttggcnaanacncnnccactttccgcaccagc

SEQ ID NO: 94565 - DNA, 493 bp, Heterodera glycines
tcatttgcttgccgatgttcgtcagaggtttcttcaaaagggcgggcgtttggcgctttgccgaaaaatggtaccgtttcggctgtttgatgttttcttctgcctcgaagttttcacattggcgaaagttcggtgtgcttttgttgcggctttgaagggcaaagacgcgccgtccctttctctcaatgacgacacaactccgagcttgaatggttcggggtcgttcctggatgttacggccgacgaaaacttcaatcgcttgatcccggcgagcagccaattggagaagagagacattgccatcggcgttttgagcagccaattggacgttttgaacagccaactggagaaaaaagacatcgccatcggcgttttgaacagccaactggagaaaaaagacatcgccatcggcgttttgtcaattgctgtcgtcgggatgggcgctacaatcatttatctgttgaaccgtcgctgagttaacgctaaccttctg

SEQ ID NO: 94566 - DNA, 354 bp, Heterodera glycines
catcgattgaggagtacaacctgggccaggtgggctattacctggacgaagaaaacaattgggcgctggacatggacgaattggaacgggcattgaaggtagtgagcacgatgtgaaggcgattgtggtgatcaatccgggcaacccaaccgggcaggtgctgagccgagccaacattgaaaacatcatccaatttgcgcacaaacaccgactgtacatcttcgctgacgaagtgtaccaagaaaatgtgtacgcggagggtgccgaatttcacagcttccgcaaagtgatgttcgaaatgggtgcgccatttgacaaactcgagttggccagcttctactcctgttccaaggg

SEQ ID NO: 94567 - DNA, 269 bp, Heterodera glycines
atgaagttggttaccctattgctattcttgaagattgtgtttgccgacaacgacaaagatgactgtgacgatgacaaggataagagtttgaaggatttggattatcgcgaccaaattggatttgttgactgcggatgttcaaccatcaacggcacggtagtttgtgcttatgctgatccattcccaccttaccaaatgaagggtggattcgactgtcaaagttaatccaataaaaataccattttagcgttaaaaaaaaaaaaaaaaaa

SEQ ID NO: 94568 - DNA, 526 bp, Heterodera glycines
tctcttaaaaaatcaataagatagtgccaagaaacaaaaaagttctttgctttcactaattacccatttatttattttaattaattactcgcttttattgccaatatggccactgcgtcgaaagcgtcgcgcgtttttagcattttggaaagggccaaattggtctgttggtttgaagagaccaattcgtacacccaaacagcacgaagatttcggaccgaatttggaatggacccgccgccgcgagaacaagtcaaaaaatggcacgacacttttctgaagacgggcacaattgggaagaaaaacggagagggcaacggcacgacggacggccaaatggcactttgaccggcggaagaatgggccgcgaaaggatgcacaatttgtcggcactttgcagtgatcgccccgcttggcattcaattttagttgtggcgttaatgggacaatcagtgaataattgaagtaacaaaaaacaaacatttgctcaccgaaccattggaatttttattatgaatttattttg

SEQ ID NO: 94569 - DNA, 753 bp, Heterodera glycines
  unsure (1)..(753): unsure at all n locations
gctttttccacgcttaaagtcccattcattcctttgcttttgccgatcgatcgatccgaacaaaacaaaatataatcgaggtccaagagaagacgacgtaaaggaatgccttcgggaggcgacgatgaacaacagtttgaggaggcggtcaaaccggcattggagtcccttttggcggatttgcaaaagaccaccgaagttcttcggcaaggcaaacatggcaaaggccgacggcaacagaaggaggacgaatccgccgctttgttggacttgaagaagcttcggaactctccccgccagcgaaaccaatcgccggcagcggtcgccaatttgcgaaacgggggaagcgaagagctgcaggcttgccgtgacccgatgcttgagggcgacanattgggcatccacaccatacccgagggggactgtgctccgtgcaaccaggcaggtgatcggcccgcagcaatagcactgggcaccatactacatacagaggtacgtccggggggctatcagagtgtgggtcgccggtgccactggtgggccgcgcccacgcgcaggcgacaggagcacgcggcccagcgaggcacacggccgcgcgggancgacgcagcaccacggcgtgggcgtcaccctgcgcgccgcatgcgcgtggcgcgcgacggcgcgctaagggagggcgcgcggaacgcggccgccgacgnagctgaccgaccggcgcaggcgcacgtatcaggcggccgggcgcgngccccn

SEQ ID NO: 94570 - DNA, 393 bp, Heterodera glycines
  unsure (1)..(393): unsure at all n locations
tgactgtgcttccgaattgtcaaaatcattaataatttatcgcaaaaatggccaacaaatttttaattgctgcttttattttgacaatggccatttttgtcaatgggcaaagtgaggcgccgaacaattcgtcggaaatggcatncggaggagagcaattncggaagagtcgggcagtgaggagcagcagttcaacccattcaaatttcggccattttttggtccttcgtcgtccaacagttcggcaccgccgcccttcggcttttggcccttttttttgggcaaatgccattgccatttaaccgccccgccaaccgaccgccgtctgacaattgatcactttntgagtgatttttgtccgtcgatcagtgcgaaatgaaacggatgatgagc

SEQ ID NO: 94571 - DNA, 456 bp, Heterodera glycines
gtgttgcggatcgtgagaatgaacgcatccaatgcttctcagctggcttggaaggcacaactcacaaccgaagggcgtatgtgccaacgggcacatttgtgaccaaagcagaaaacattggccgaatttatgccataagagagaaagaacactttctggttggagtaaccagttgggaccgaagtggccaattggaaccgcaagtgttcgtgatggacatgaacacggggaaggcgaacagtttcgcgaaggggttggccaatgcccatgcggtcgctctcagcaacggcggcgacattttcgtgtcgcaattggagccgcaacaaatcgtcaaattcagtatcccttccgccggtgatgcgcaatgaaaattggaaacagagagaagcaaaacgaagaaaggggcggaagagaaactaaatcagtgaaaaaggctaatggaaaacgaaaccaaaa

SEQ ID NO: 94572 - DNA, 264 bp, Heterodera glycines
ccaaagttcagctgaagtcgcaactgttgatgaacctcgaaatgcgcccagtccaattcgaagatttggcaagacaaatgttggcccatggacagaggaaaacagctgacgaatactcggatttaatcgaccgagttgagaacaccgacatcattcgcatcgcccacaaaatgttggacagccgactttcgattgttgggtatggagacttgagaaacatgccgacgtacaaaagcatcgagtcaaggctttgaacactcagat

SEQ ID NO: 94573 - DNA, 337 bp, Heterodera glycines
tcggtgatgcaggatcccaggaagtgattggaggcatgatttcaatgaagttcttcgagagatttgagccatttacttgcttcagaatagtatatttcacatcactgggagtgtttttcattgtgcacttactgtgagccacggagcacctcctgtaagccttatattgttcattggcttgacaatatttgcctggctaaataactacaaattctttacaattcagtcgtaagtgttcatgcaaatggatattaaaaaatagagtttattcaatgagaacaaaaaccttcatagctttagatctaaaaaaaaaaaaaaaaaaaaaaaaaaaaaaaaa

SEQ ID NO: 94574 - DNA, 160 bp, Heterodera glycines
gcgaagctgatcttctgtgtattcgtgatcgtatttatctgtatttgtatgtattgtcatgtattcatctcgctgttgtcatttcattcacttgtatatttcaaattaatataggtaaatattgaagttgataaatttacatgtaaaaaaaaaaaaaaaa

SEQ ID NO: 94575 - DNA, 522 bp, Heterodera glycines
attgttcactctttcctcccatttttgaaaaggaatcgccaaaatgttcttctgctcgcttcttaagaaagacgaattgccggccgatttagccgcccttttgtcttccaaagtcgtagcggatattaatgcattgctggccaacaagtcgctggactgtgctcagaaattggaaaagatcgacgaactgatgaaaacggtgccggacgaagtgatggaaaagctgccgatgccgccgcatttggcacaacttccggaggaagtgcaagcccaaatcaagaaattgtgcctagaaacgaagcacaaatcggtggaagaaaagaaagaagcattcaaagcgtacgctggcactttgcccgcggaacagcgagcgatcatttgcaaggaaaagccatcatgtggcaaatgatagaaccgatcagaaatggggacggacggaggacggaaaagttatcagaggaaaatgcgatcagataatcagcccaatccattgtagtcaatttttagtgtaattaatccgac

SEQ ID NO: 94576 - DNA, 519 bp, Heterodera glycines
atcgtcgatgggaggagtcactcaacggtccagcatcgccactgccgatttgatgctgccccggcaagtgtccattgttacggtcggaacttcgacgagggcagcggaaaagcgcaggaaccgaacgacagtgcttctgatcgcatggccggctcctacgccgtcctttggcttccctttacgttcgtttccattctgatcgacttggattggcttggcgtggagagtggctctccaattgtcgaacgcattgatcaaacttgcaaattgttgtccatcacctcaatttgcgtcaatccctttctgtacggctatttgaacaccaatttccggcacgaattcaatgagattttcctttattgcttcgcttggcttcccgcggtgaaggaaagtcggcaaagtgaaatttcaagctcactcggcggcggtgggggaagccatcggagaagcattccgcaatattcggcaattgtcagcaaaacggatgggtcgactcaacaatccaacggagtaaaagtg

SEQ ID NO: 94577 - DNA, 195 bp, Heterodera glycines
tacgcctaaatttacggaaaaataaataatacgcttaaattaaaatataaaattaagtttaaaatacctgcgttatgtcatgcactcgctcatgtgcctttaatgtcgtctaaatattaacaccaaaaaaattaattaattaatgcaattatttggctaatttttttattaattattaaatatacaccgaaaaaa

SEQ ID NO: 94578 - DNA, 539 bp, Heterodera glycines
atcatttgcagcgcacctcacgtcgcaaattggctgatgaaatcgcggctgtaataaaacgggacagatcacgctcagccagccgggcgtccctcgaacggatcagtcgggaagttcggcacaaatttgctcattacacgccacagaagaagaaacaacaactgccaagataaaaaaaaaaggcttacagacgactaaaaaacactattcgcctgatcaatgccaaatttgatgtgttcccgccactcgaaaaactgcttgacatcaaacgccgcatctgtgggtcattgcaatacgcaccaattgagactagtgcaggtgttggatttgtgtgcactggatgtgagggagctctggaggcgcgtctttcatctgccaaggacaatctgatcagatttggcgacgaaatcttcataaagctgagcggcgaccatggccagagttgtacgaagattaccgcctcattcagccaggctgctcggtcaaattctccatcaaacaatttcgtctgtgccgttttccctacaaaggatagccgc

SEQ ID NO: 94579 - DNA, 422 bp, Heterodera glycines
  unsure (1)..(422): unsure at all n locations
acggcaacctaacttcctgtccgatgtggatcgaattgcaattcccacggccattacaaatattggacagggcactgatggaaagtgccagcgaaatcggcatggaagaagtgcacagcttttcctgaccaaatcaattcgtgatcagtggtgccttcggcataccgaattattaaaacaaagacattagccgtgttacaatccaaccgatcatttttcatttttattgaacaaaattcacttttgactttcgacccaacaaagtttaagtttggtaacacgggttgactaacacaagctttgattaatttatttgattcatataatcagctaaataaacttgaattattgcaaaaaaaaaaaaaaaaaaaaaaccananaaaaaaaaaaaaaaaaaaaaaaaaaaaaaaaaaaaaaaaaaa

SEQ ID NO: 94580 - DNA, 520 bp, Heterodera glycines
taatttgtttctgttaccccggagcagaagatcagaacgtacaaaaaaccacagaaaaagtcctcaaaattgcagcacaaacagacgaaattttgctccgctaaaccaattgtgtcgctattctgtcagcccatcacgaattcgtacaaaggaagaaatttgggatggattcagacgattcagagcaggagacatcgtcagaattatcgacgaagacgaggggaagggatattttgcgcaaacagttgcatttatcaccgatgactataccaaccaatttgcgatggtcatttggcttcttccgaaactcagccgcaattcatttccaaaaccatttgagtttaatgccgacagatttcagcatggctttgccgaagaacgccccgtcccaatcaaagcttgtgaatttataagcaaatgtccgccgttccctccttacaaaagaaaatggacgccaattaatcaaatcttagctcagaaacgcagcgaaatcactcgaaggattgaggaaatgaacctc

SEQ ID NO: 94581 - DNA, 468 bp, Heterodera glycines
ttgaagaacaaattcaaaggactgaagaagggatgctacccaaggccaacgggtagtgaaaaaaaggggaaaaaaggggagggatacggtggacgaaagtacaaaagcctactgtaaagggatgggacaaaaagcatacggtaggtgtatttggggaaaaacagttggaaaatttaattgagtctataaaaaacaattaattaattaggatgcctttgcgtggtgggcaaagactccgccgggcgggagataacggagagacgccggaaggagacggactgcaaatgccaaaagggggaacggtcggcacaatgtccagcggatggggcgtaagcactgatcgatcattggctttaattgaaaatgatcggacatttcataaaatcggcttaatcttccgatttttcttctgcgtttgtccttttttttatcatacccataatattaaatgtccacaaaacccaaaaa

SEQ ID NO: 94582 - DNA, 355 bp, Heterodera glycines
tgtacggcacaacgcaacggcggctgttcccacggatgtgttaacacggaaggctctttttactgcgcttgtcccccgggaatggtcgttgatccggcacatccgcgccaatgccttcccatcgacggcggactgaaaagggcggccgatcttttttcgtactgggcaaaaatgtcaaaaaaagccggaaaggaggcgatgatgaacgtgtgtagagcgatggataaacgattgctcagacgtgtattgatcaaaacgaaaaattgatcagagtgatcagtcggccccattttatgtatttgcaaatcattactttacaacatttacgcaaaaataaaatttacagctgtaaaaa

SEQ ID NO: 94583 - DNA, 479 bp, Heterodera glycines
ctaaccctgtggtggtcactgacatttgtgccgtgccatttaaggcgatgttacgctttatttacacaaacaatttgagtgttttggacggacaaaatgcaatggctgtgttttatgcggccaaaaaatatgcaatcatcggtctgatcgaagcattcgccgactttcccatttcgaaattgccaaatgttttccttgccttagccgaagctcgtcttctgcaagaaaatgtacaaaaattaatttttgaattataaataataatttcaatcacttttattttgggactttgctggtcgttgcttggcttacattgacaataacatggaaaaattgatcaaatcggatgattttttaccaattgatcaaaagttattcctggaaattctgagccgtgatcagctcaaagttggagaagaaagtcacatttggcaggccgtatgaaaaaagaaaatttaacaatatgaaacattgatttg

SEQ ID NO: 94584 - DNA, 210 bp, Heterodera glycines
aggaaggcgaagggtgactgcaacacattttaaactatacatagttttattgttgttaattcataataagtttaagaaagatatgtataatctataaaagagcataaagcttatcaagttgacttgctaaacaattaaaacttataaaattgctttttatctaggcattatttgtattaaatctgattctgaggaaaaaaaaaaaaaaaa

SEQ ID NO: 94585 - DNA, 530 bp, Heterodera glycines
ttacttgtcgcgcctgtgccgcgttctttcgtcggactgtttcattaaagcttcaatattcttgcaagcgtaaagaccattgcgaagttgacaaagcggcccgaaatatgtgcagggcgtgccgctaccaaaagtgtcttaggcagggaatgcttacgacggctgtccaacattctcgggacggaatcggcaaaaggtcggggagtgtccaacgcgagagactgctcgtcacttccactggcacttccggcgaaaccaaaatcgcccgcggcgcatcggatgcggtcagctcctcctcttcttcggctggtggccctcaagcactaattggaatacaacagaaagcacaacatttactcggaacagcatacggcagaaacagacccctttcgccatgctccagcagctccgcacttctgttggaccaggcagcaaatgctgcgaccattgtccaactgaacgcggcccccgggcacagctccgcgcggccttcggccctttctcctctcagcatcactacgccggcggcg

SEQ ID NO: 94586 - DNA, 252 bp, Heterodera glycines
tcaaaaagtataactgaggagccaaaaaaacccaaaaagcctaaaacccaaaaaatcaaaaagccccaaaaataaaccacaaaaagccgcaaagcatcatttagaaaaaatcacaaaaagattcctaaatcctaccgtaaagtccatgttttcttgacatcacctttacccctcaccattttttttctttgttacttttcattttcactttgctatagtatgccctctgtcataaaattattttttggcaaa

SEQ ID NO: 94587 - DNA, 427 bp, Heterodera glycines
tggatcgatgaagaacgcagccaactgcgataattagtgcgaactgcagaaaccttgaacacaaaacattcgaatgcacattgcgccattggagttacatccattggcacgcctggttcagggccgctgtgtttaataattcattttaggataataattattcaaaatccatttccgtttataatccatgtccattcaacgtcaaatgaagaaggcgtaatttggattatcagagtcaggaagcgacaccaccacctctacccactaaaactacttaacctttgcttcgttttcactattgtccatctctgccttttcactttacatttttcaatgtgctcatttctcccctcatcagttctaattgtgatataatacttaattccagcgcattaagataactaataatattatctcgttaaattcg

SEQ ID NO: 94588 - DNA, 534 bp, Heterodera glycines
  unsure (1)..(534): unsure at all n locations
tctttcaaatattaatctgtttccacaaaatcaaaatttcacaaaatctcgaaaattaggggtgcgcctaccattttccatcatgaaaaacccgaaaacgcttctcctcctcctatcatgaacgtacacaaaattgtgttgttccnnttttcgttttgttgagtttcttggtgctgcaggcgtnntcattgccattctgnnataatgatgaaagaaaccaaacctaagtcnagcgctaaanaaaaacaaanaagacanaaactaaaggtggtnaatccccatactccaacgcgtagaaaaatgaatgcccaacagatacaacaaacacatggaaacgaatctaatggctgatacggccagtgatggcgaagaattccttccaccattttggtgttgttgcttacatatttgtgggaaagagcattttaagtatagcatttgttatttaaattttctaaattttcatggcatttgtccgtatttatttgtcttacatttatttgtcttattatttttgggtataaaaatttcttg

SEQ ID NO: 94589 - DNA, 508 bp, Heterodera glycines
  unsure (1)..(508): unsure at all n locations
tgcttctttcctaagtaattacagaaacctacagtaatttacaataaaatgggcaacttaaaaccaaaaggcataatttatacggccgcacaaaaaggtaaaaaggggcagaaaatgtccgaagcaaacggaaagtcaccaaagggcaanaaggggaccagaagaagtcncgtttcaagtnagttcattcttcaagggggaagggaaacggaagacaaannagtggcaaattcaaagaaaagcggctattanttggcagagcnaaaatgaaattaaatgaattcaancttttgttttcaattgcccggaagaatgctcttcgaaaagattctcattaaatgattaaatgagccattgacaatacaattgactgaatatataatatttttcaaatgcattagttttttctgagaattttccactcggaaaaaattgaccgtattcatttgttaacatttaacaagaaatatgattcaccaaaataataaatttgtgagttgtcaaataa

SEQ ID NO: 94590 - DNA, 586 bp, Heterodera glycines
aaggcaaaagcattcaaatcacttcaattttgaattggcatttctctaatttaagatgcgcttcgttctgtccctcgcccttttggcacttttcgtcgtccaatgccgggccgatgactctgaggctgaagatgagcagcaattctctcccgctgatgagcaaggacaaggagcaccaccaagcgacgaaatgccggcagattttggcgatcgccgcaagcgaagcgctttcggcgattttttcgcgcgttttttccatcgaaatggcgcgggaacgcgccgccacggtccacccccgtcgaactgcacagaaattccatcaaatcagaatgaagaggaaaaggaaagcaaaacggatgcaccggaacgggagaagcgcagccttggcaaatggaaaaagcaaaaaggaggaggaaaagccaaaaagggacgaggagaacggccaaagggattcccatcgaccgtttcgccgacggatgaataatgaaaaagagattggcaactgattgcgaaagtgtggcgttgaaaattgaaatgtataaaaattcaattgaattcattttccgaggatttgcttttggctatg

SEQ ID NO: 94591 - DNA, 482 bp, Heterodera glycines
ttcggcactggatggcgcaagaatcgcgacgaggccaacaaaccgatcttttgggatgggaagaatgagggcgggaaagtgatgatgcacattcgccatgagctgaaggccaaacactcatggactggtccacaggaggaagaggagtccaatacgaaagttgcgcgagatgatgcggaacgtgtggcgccgcattgacccttcgaaacgtgccatgttcggcggtggccgctcggccggggtgctttcgcacgacggaggggcgcgtggcgggcgcggcggtggaaactttcattatcgcaaccattagacgaaacatttggcattccaaagaagagctttttattattggacattttcacattattcaacgaaaggatgagccaagttgtcaccacattatgttattttctggtcaaagactgactgttcaaaacgaaaactgctgaataaactgtgccagggaaaaaaaaaaaaaaaaa

SEQ ID NO: 94592 - DNA, 393 bp, Heterodera glycines
  unsure (1)..(393): unsure at all n locations
tcattccttccattttcctgtgtcctaaaccttcatcaattaaaaacaatgcctttcctccgctcgcttcttctcccttccgttttgcttcttcttcttcttctgcttctgtccgtgtctctttgctccgcgggggtcttcanctccgcntgcgtatgaaagcgcccaattcgattggtttggcaanttcgatgggtgccgcgtggncgccggcttcggagggccggatgggtgtnncggcagaagatgaaaccgttaaaggcgccaaccaattaataaaataataatgcacaataataataatatttatttcatttgcccccgattccccattttcaaatgaataaattatatattcaaaaaaaaaaaaaaaaaaaaaaaaaaaaaaaaaaa

SEQ ID NO: 94593 - DNA, 633 bp, Heterodera glycines
actctcagccgtcgtttccccgcgccttggccccgctccaatcgatcgccggcaatttgacgtttgaatcagcaagcgaacgaagcacaaggaatttcactcgtcatattttgacacacattgctttgtccatccatcttacattccaacagcagaaaaacagcaatggcatatgcaacaaaatattacgactatcagattgccgttgtttttgccattttactcggcggtcttttactcctcgcgttggtagtcacagccatttattacatttgtgtggtcaatatgcggggcaaaaagggcggcattacgcgcgttccttccggcagaagtacagtaaggaccaggatgaatccgcaacagtactcgccgtctgctcaaccgcaaatattccatcaacagtacccacagtattcgccgtacggtgggatggaagggatgagcagccaacaaacgcagcagcagcaacaacaacaacacccattccaagcgcaaaattatgagcaggcgggggtcagagtgagggaaatgcaaccggagtatttccaacagcagggtccaatcagttacaccaattatccctatgatcagcagccaccaaaattatcagcagacacacaagctgcagcaaca

SEQ ID NO: 94594 - DNA, 176 bp, Heterodera glycines
cggcgaaaattgtgacgacgaagaaatgttagggaaaagacaaagcgcaaaatgggaggaaaagcatgagaaaatgaaagagtggagaaaaagaacaaagggaaggaaagacaaagaattaatgattatgataagagacaatgactgataaagtttagcataaaaaaaaaagaaaa

SEQ ID NO: 94595 - DNA, 435 bp, Heterodera glycines
atcagcataatccatccgccgactgatgtggtcgaattcatcccggcacttggaaggggcgcatcggaaagaatgcgtaaagtaaactcggcaccgtgccttcaacaaatgctttgcaccaccgttcggaattcgttcacggacggaatgccaaaggaataggcgggcagcattttatggcggactgacggacgaatgttgcggcagaagatgaaaggaaaaaggaaaggaaagggaggacaacgtcagtcagcaaaaggccacccaatcacttctgttgccatccacttccactgatctaattaattgatatgctagtcaaatgcaaatttttgaatacgtttttcatgtacaaattttttttctttttcgtacaaaagtcaattatttccaaaattcattttgaaaaataataaaaagtttgtccattaaaaa

SEQ ID NO: 94596 - DNA, 507 bp, Heterodera glycines
tcgcagaagcgccttttttaccctttaaaactgagggccaacatttcggatgcaaaaaaaacctaaaaatgcgctatccaatcttccaaatctttctgattatgtcttttatttgtcgctttaaatcggcggtaatcttccgatcggacacaatgaatcagacggattatggcccaatggttcttgctcataatggcacatctccgagtgatcaggataaaattcgagatgaagagactgatcactggctaacattaacgcaaactgatcaaacaacaactgatcagaattcaacattgagcatcgattggatgagcaacacaataatgaaagccgatcatgacgcaactttgagcttgggagaagaccatggacagactttggaagccaaaaacgatgatgaacccaatttggaaaatggtcattatggcacaactccgaccgattacgagccaaatgaggagaaaaatgcagtggataatgctgatcataatgatatggcagtgg

SEQ ID NO: 94597 - DNA, 544 bp, Heterodera glycines
  unsure (1)..(544): unsure at all n locations
gttacgaaaggaaaagtatcgacgaaaattcgttgagtatgacggcgttaaaagcattcttttggcattgaatggtcgtgccaattttcaacttcaataccaactcattttttgcctttggtcggttgggttttttcgcacttttaanctcaaaaataatccntggaaaaagtttgttaatttaatttccccatttccttccgaaatttgttggagaaaattgacaacagagagatggtgcgcgaatcggcactgcaaatggtccaatgcaaaacgctgaaaacccttgaattgatggacgccaaaaagtttgacgacccggacttggtggacgacattgaatgataaaaatactcatcaaaattctcgagaccagcagcgacccattgccgctcagtgttgctgctcatgacattggcgaatacgtccggcattaccatcgcggaaaaacaattgtcgaacaataccaaggcaaacaagcagtgatgaagttgttgagtgcagaggacccaaacggacggtaccacgctctgttagcaatcca

SEQ ID NO: 94598 - DNA, 607 bp, Heterodera glycines
  unsure (1)..(607): unsure at all n locations
cattaaatattacagcataatattagaaagaatattcgcgaacgaagtaaatgggaggaacaaccaacagaagcagcagcaagatgagggcggacctatctaatccaaataaatcctacccccactcttttcaataaatccatcttctctttcccttttcaatctttttttttggtgctgttcatccattgccaatgccttggttaagcaaaggtcgctttctataaatttaaatgaggatttccggagtcgctgatcatgaaaatgacattcatttcgacaaattccggccgtaaagaacaggcaaaataaatttaaattttaagacgaaaaaaattatgtttttgaaaattagcatttgaactttgaaagttggcatttccatttcttttccttttttgtattttttgtcgccaaatgtgggctttgacagacagagagagagcaattttgcgaaaagttataccaacagaactttcaactcatttggtttctcttccgtccagcaacaaatcggagagcatcgaagaaatntgcaagcgcaatcgtttgagtgcagccgatgtgtcggcaatttacgacagtttgccccccgaaattgaattct

SEQ ID NO: 94599 - DNA, 592 bp, Heterodera glycines
  unsure (1)..(592): unsure at all n locations
gcttgatcggatgccgatgtgacactaatgaggagatcatccactgtgatgaccatgtgctgcgcaaaactgtgccgcttcccccgcatgggacgcatttgcgcggcttcaccgtcctctcgttgaccaacaacaacattgacgagttgccggatgaacagctgttgatgaccaaatttcccgatttgaagtcggttgatgttgaagacaacaaaaattttgattgtgacacactgaagctgttcaccaagctgaacgtgctgagcgattgtggcaaaaagaacgggaaaaaggatgatgaccgtgttcacgtccatgggccaaacagcananatgatgagccaaaacatcggggaaaaaatgaatggaaaaaatgtgatgacttaaaacggcgtcgcaatgatgaccaatatgtcggctgcctttgggaccaactccatgaacggcttaatgaaatctcggaggattacggcctgaaaacgttgatcgatgacattggcaaaatgttcaacgatgttggtgaacggatcaagaaaatcacttaatctgatcgaccgatcatgattaaaaccatggaattgatgcctataat

SEQ ID NO: 94600 - DNA, 278 bp, Heterodera glycines
  unsure (1)..(278): unsure at all n locations
aatcatagcgagttgcgactacgatgaggcagatagcgaatggagcgatcggagaagggtagcagccagcgagtggctagggccagcgattggtgactacaaggaagaggacatggcgatcgaagaaccaacagnagtgggcgatcactacgagtgctgggcggggcgaccagcgattaatttctctctctcacctcacatgcattttttgctttgatcagtcaatcaaccaatcccaatcaaaagtgcattttcgataaaaatttttccattaaaaa

SEQ ID NO: 94601 - DNA, 724 bp, Heterodera glycines
  unsure (1)..(724): unsure at all n locations
aagaaggtccattttggaagaggaagtggtcagcaaaaaggaaggggacggcgaagaagcagacgaaagtggggacacttctggcagaatggacattgccgacgaacaaaaggcggaatgggagaccgttggcgagacggcggcgatggtttctgggcctgttcctcctcctccccttcccagcgaggaaccgaccccagcccaagttgaaagtccgacgccagtgaagaaaaccaacgtgacgacgttacaacagaagcaagtggtgccgttgtcgaaactcaacggagtgttccaagaggaagaggaggatgaagtcgatacgttgcatcagatcaagaaaaagataaagcccttcgaaataacgcgagaggatcgattacaatcgatgacaccggaagaacggaagaagctgatcaaggaccttatcacgcggattcccaccgacaaagccaaacttttctcttttgaagtgtgttgggaattcgtggacgaaaatctgatggaacggcgagtgaggccgtgggtgaacaagataatttgcgaatacattggggaggagggacaatcgcttgtcgcttttatttgcgagaagatagcgaacctatcaacggcagacgaaattctgcaggacctttctatgggtcttgacccacgaagcagaagtttcatggtcaagttgtgggagataattgtgtacgaangagaggcataccggctgggc

SEQ ID NO: 94602 - DNA, 488 bp, Heterodera glycines
ctgactagttgttgcacattccccaattttatttcttccttagtaagtagtattggtgcacaatgcgcacttttctgttcatagccgtagtcgggttgatgttggccgtcatcttggagaatgtaaatgcgactgggaaaaattcgccgacaaagggaaaacagtcgctagacagtccaaaccatgaaaaagaccataaaaatgagcatgaaaagtatgaagcagcttactttcaaaccggttcatctggcagtccgaaaaaaggaaaatcgccacatgccgatccgaaaaaagctgcttcacaccttgtgccagtaacaccagggaaagtatgatgagcaagccttaaaatggtgaagaaactgtgtggagcgatgatgccaaccatgaacaaacccaaagctgttgaagtagatgtagaaaaaaaactgtggtatcatcacgctattattgttgtgtaaaaaacgatccgtttttacctcttttcg

SEQ ID NO: 94603 - DNA, 127 bp, Heterodera glycines
gaattcggacccattacaaaccgattgtacggatagaggacgatgattcggcacagttcggatgttcggaagcagagcgatattggatgggaatggcggtgggtcatttatgctgttaatgagttaa

SEQ ID NO: 94604 - DNA, 67 bp, Heterodera glycines
cgtcgccaatacgaggagacggagttggagaagcggcgcgaattggaactcgagactagttctctct

SEQ ID NO: 94605 - DNA, 176 bp, Heterodera glycines
gcgggcgaatgaaatgaaagagtgtttcgccgacggcaccttcagcatcacaccgatgcctttccaacaagtgtacgcaattttggcacgtcggaatcgctgggtcatcccagtgtgctactgcatgctgtccaacaaaacgcacactacatacgagcgtggaattcatgacaaaa

SEQ ID NO: 94606 - DNA, 266 bp, Heterodera glycines
acttccgaagcacccaattatgcattgtatgaacatgcagtgggttacacactattcaagatcaatgaatatgaagacattggtcaaatacaaccagaggtgcaaagtgcgatgacagatgctcagcgttttcaaacgattgtccaagttcatgcatttgacccattcagaaacactgaggcggcgcttgaaaatgcgaatagcattgcggaagggattatccacgttgatttgctgaactttttggaggctaatctaccgaaaaa

SEQ ID NO: 94607 - DNA, 160 bp, Heterodera glycines
ttcaaattgtaaatctacgaccaaaacaagcagtagaagtgcaactgatcgttgaagaatcggaggaaaggcttacggaggagcaagtcgatgaattagttgagacaatcatcaacagtttacctcggaattattaatggacttttaatattttaaaaaa

SEQ ID NO: 94608 - DNA, 207 bp, Heterodera glycines
ttgtccaacgacgcactaaaatcggtaactgacgttggcaacaaaatcgttcacatactgcgcctcaaagaagcaaagatataatgtcttttctgggttgaagttaccttaaacgggatatcgtggtgatggtcccttttcgttttgtgtatcatatcaaacacgatgtcctccacccttaaatcaataaatcttcatattagaaaa

SEQ ID NO: 94609 - DNA, 58 bp, Heterodera glycines; identical to SEQ ID NO: 56848

SEQ ID NO: 94610 - DNA, 61 bp, Heterodera glycines
ctgaagaaaggagaagaagctgaagaggaagcggtaaacagtgaaatgggaatattcaaaa

SEQ ID NO: 94611 - DNA, 203 bp, Heterodera glycines
aacctttcgcagtttgttttattttttattttctttgtcggcgccgctgcgccgccaaacgaaaaaggaaaagcagacaaatcgcaaagccaagggacaacggcagaaaaagctgagctcactttgactttgactcttgaggaaatgttccgttttgaagcggaagtcgtcaaagtgttaagcgataaatttgaaacgaaaaa

SEQ ID NO: 94612 - DNA, 200 bp, Heterodera glycines
tgtacatgatgggccaacaactgttgatgagcgtcgtccgacttcaggcggtgtcgggggaattaccaactatgagagcataaattccatgacccatccattaccacccacttaataccattgattgaaaagttatcctgacattttcgaatctcgtatattcggaaaatctgacaatcaaaaagcattcaaatcaaaaa

SEQ ID NO: 94613 - DNA, 102 bp, Heterodera glycines
tgtctgaccagaaacaactgtttttattcggtcaaactcttcccggcaatcagagtggacttcttgaaaggatgaaagaatgtgcggacaaacggaacaaaa

SEQ ID NO: 94614 - DNA, 71 bp, Heterodera glycines; identical to SEQ ID NO: 64340

SEQ ID NO: 94615 - DNA, 187 bp, Heterodera glycines
tcaaagtgacgaaaaagtgtgctcgacacctccgacggggcccagttatcagcggaatgattgatatttaagaaataatgaccgatctttttgagctatgatgaattggattgattgattgatgatatttttgtttgctctttaaactgcctattgacgctgaccattaaaaataggaatttgaaaa

SEQ ID NO: 94616 - DNA, 259 bp, Heterodera glycines
  unsure (1)..(259): unsure at all n locations
cnagtcaacaaagcacgtccacggcgcccaacggcagcattgagggggaaggcgacggtcgtgttggtgcatcatcatcggaggacagcgacagtggtagtgatgcatgatcggaggagcacaaataacttagttttccactcacatttggcgcctttgtttcactaattgaaattgttttatgcgcgggtgcttttcttttctcaaaaacctcattcatttcatgctttttttgatgaataaaccgagttagcacaaa

SEQ ID NO: 94617 - DNA, 211 bp, Heterodera glycines
gacgaattcatcttttgatcaaatgatcggccataaaagtgaacgaattgacggacaaagcaaagcgaatgtgtgagaaaggcgagacgaactcggaaattagctgaaattgccggattgagaacggaagaaagcatcggaattgatacaaatttctccataattttttgactcaaaattcgaaataaatgcaaaaaaaaaaaaaaaaaaa

SEQ ID NO: 94618 - DNA, 54 bp, Heterodera glycines; identical to SEQ ID NO: 58510

SEQ ID NO: 94619 - DNA, 143 bp, Heterodera glycines
tcccccccccccccccagggggtagaggataggaacgctgatgactgcaactgccatcgaaactcatttttttcaccctccactcaatcgcatcaattgaataaaaatggaaaactttgaattatttttggagagatcactca

SEQ ID NO: 94620 - DNA, 98 bp, Heterodera glycines
gtacggtgtgccaatgttggttggatgttgcgccattctttggatgttttgggaccgattcaaaaaaaaaaaaaaaaaactcgagactagttctctct

SEQ ID NO: 94621 - DNA, 119 bp, Heterodera glycines
tttcgccgcggtgccttacggcaatgccggcctcggcacccgacatttgaggagtgctggagtgctggagagagagataagacattaatagagcgacatgagagaaagagataggaaaa

SEQ ID NO: 94622 - DNA, 161 bp, Heterodera glycines
tattatcacatggaatcggtgataggcaaaacgccgaacgaacagaaggacaaacggacggatcttttgcaagagtgcggatgtttttggaggataccatcgctgagtttggcatgtgaaaaataaaaaaaaaaaaaaaaaactcgagactagttctctct

SEQ ID NO: 94623 - DNA, 257 bp, Heterodera glycines
agtaaaaaaacacaggaaagtccattgcaaaggcgttggaggaaaagtagctggaaaaatgtgctcaacactttgatcacgcccgaccacacaaagaaggcctacgttcgcttagccgcagattatgatgctttggacgtggccaacaaaattgacattatctaaacacattctttttttattccgcgctttgttgattttcgggaataaattgttgtttgaaaaaaaaaaaaaaaaactcgagactagttctctct

SEQ ID NO: 94624 - DNA, 222 bp, Heterodera glycines
gaatttgtcacctgaagttttgtgcttggggcgggggcggcgttcgctgtgttcgttctttggacatcgaagttcgttcgaggagcaactaattaaactacaaagtcaaattgtgctgattatgaccatttttgtctcgcatataaatgacgaaattagaatgctattaaagcggtccctttttaaaaaaaaaaaaaaaaaaactcgagactagttctctct

SEQ ID NO: 94625 - DNA, 69 bp, Heterodera glycines
agcgaatttaattcttaatggaatcgcccgttgaaaaaaaaaaaaaaaaactcgagactagttctctct

SEQ ID NO: 94626 - DNA, 183 bp, Heterodera glycines
ggaaagccggcacattgttatccctcagaaggcatttctctcaaaaccatccattacgatatttgctgcgactaattctcttattcgataaattctctaaaccattcgtagtttttccctggtttcttaatgatgaactttgttttccaaaaaaaaaaaaaaaactcgagactagttctctct

SEQ ID NO: 94627 - DNA, 149 bp, Heterodera glycines
tttgtgggatcaaattcgtctcatttacccatgtggaattttgactttttgttcgaattcggatccggggtcgaaattggtcgaaatgaatgtcatattcgtgatcagcgaccccgaaaaccccaggaagacgtttttgacgaattaaa

SEQ ID NO: 94628 - DNA, 102 bp, Heterodera glycines
agctcaaagcaacactaatttgacaccaaattcaaaaaatgggacgtgaatacaacaacaagcgaactcgggattacagccccgcgggcgacgaatgccaaa

SEQ ID NO: 94629 - DNA, 125 bp, Heterodera glycines
tcagaagaagtgaatgtaatgaatgaattgttgagaaatgaccgatcattttgaattatgtaattttgtcctgctcatacataaaaattgtttctttattgtagagaaaggcaaatcaacaaaaa

SEQ ID NO: 94630 - DNA, 110 bp, Heterodera glycines
ctttaaacggagattccgctgctcctactcccgcgaattgttcttttccctccatgaaaaatgtgctgcattcgcctttcccctggcaaaacaatgatttttgcgtgaaa

SEQ ID NO: 94631 - DNA, 153 bp, Heterodera glycines
tcaatggacggccaatttttgggatgtctaagtccgctgcaaagacgcaaaaagtgacgacaacaaaaggacgaaaatggacaaaaaagcaaatggaaaaatgcggaacatttttaatgtaaatgaacaaaaacaatttattcaaataaaaaa

SEQ ID NO: 94632 - DNA, 68 bp, Heterodera glycines
cgaatttaattcttaatggaatcgccgttgaaaaaaaaaaaaaaaaaaactcgagactagttctctct

SEQ ID NO: 94633 - DNA, 72 bp, Heterodera glycines
gtcgaataaacgcattttgggaatattttaccggattaaaaaaaaaaaaaaaaaaactcgagactagttctt

SEQ ID NO: 94634 - DNA, 269 bp, Heterodera glycines
ttcaaacagttgtcaaagcattcctgcaaagatggcgaatccacaacagtctcagcgaatccgaccaaaatcatttggggaaaacgacgaaagcccggcacaacggagggttggcattggctgaagggaataatacgaaaatgggcatttgcattttttacccggctctactggcatataccgtatctcctgtatcaaatacccaccgttcctctggttaatactcataccgtatatatcaaaacaaaattcaaattggcacaaaaaaa

SEQ ID NO: 94635 - DNA, 112 bp, Heterodera glycines
acccactcaccactcctccttctatccacagactcaacaaaaacaatttgttcaaaatgtattaatccgaaatttaaccgtcggcttcttccccccatccatccattcaaaa

SEQ ID NO: 94636 - DNA, 181 bp, Heterodera glycines
gtgaacgccttgtgctcggcgctttcgcatttgtgccattggctttcggatggcgccacacatttgctaattgcgctgcgaataatttcgtgacaagcgaattggtggtcatttgttggtgtttgttgtgttgtgccccttgcccatcagcagctgattttgaagtgcataaattccaaaa

SEQ ID NO: 94637 - DNA, 159 bp, Heterodera glycines
gtggaaaatgggaagcaacggcaatccggaggaggatttaattaacttaacagacaaattaaagaaaaaactcgcaaagcatggagaagacgaagaagaagaagccaaactgaaacgaagaaaatcgaaaaaagggattttcgatagaacaattcaaaa

SEQ ID NO: 94638 - DNA, 211 bp, Heterodera glycines
tttaatcgagagtcattgccccgttaatcatttgtaacggtacccactcgggcaaataaccttctcggctacaggtgtctaaattcaaatgaagccaaaagatttttcaatatttcacagcctttacaattaattttatgctcgttgattttgaaaaagatgaaaaaagactgacaaaaaaaaaaaaaaaaactcgagactagttctctct

SEQ ID NO: 94639 - DNA, 145 bp, Heterodera glycines
aaatgaaaattattttcgtcaaaatattcactgccggcactttgttggcaatgctaacggtggcggtaatcgtcacaaaattttactttatcgaggaacgggaggagagaagggacggcggaggacgccatcgaaacaggcaaaa

SEQ ID NO: 94640 - DNA, 134 bp, Heterodera glycines
atataatggcccgtggtcaccaaaaggcgctgtctcagcaaaagaaccagcaaaaacaacagcagcagaagaagggtcagggcaacgatcagagagcggctgccgccaaagcactgacattcaaatgctccgtt

SEQ ID NO: 94641 - DNA, 217 bp, Heterodera glycines
cctggtaagactcacaatgtcgtcgattttgagaatgctgcgcacacattcggctgcctgtttgacggcgaacgaactgaccaaaagaggctgcaccacattttcttcgcgaatgtccgtaattgcaccctgaaaggactcaaacatgtcataataatgagaaaaccataatttgggcaacagacagttcattaataaataaactgaaaaggtgtaa

SEQ ID NO: 94642 - DNA, 49 bp, Heterodera glycines
aacgctgtaatatcaaaaaaaagaaaaaaactcgagactagttctctct

SEQ ID NO: 94643 - DNA, 52 bp, Heterodera glycines
cgcctatgagaaatgaccacaaattgggagaaacttagaaaggaattaaacg

SEQ ID NO: 94644 - DNA, 285 bp, Heterodera glycines
gtgcctaagaatggctcttcgcgttcttcccatcgtcattttggcactgtttttcatttttgatggcacttttgcaaaaacggaggatgaaattaagcaaacgcaactgctgaagatcttaagcacaaaaacaacgaaaaactcttctgtgcaaacggaggatattgaagacgcaattgcgtacatgaaattgacaaacgaagaaggatacgaatcgcggatgacgaaaggcactggtgcaaaacagggtgatgaagcgacccgtgggcgtgtcgaacagcaaaa

SEQ ID NO: 94645 - DNA, 211 bp, Heterodera glycines
gatttgatgggccattcggaccgcgtgctgtgcgttgattggacagtgccgagccgtatttgcagcggttcggtggactcgacggtgaaagtgttctcacatgggaccgaagaaaatatctaattgtttatcgtgatatcatttgttgttttattatagttaaaatttctgtacaaaaaaaaaaaaaaaaaactcgagactagttctctct

SEQ ID NO: 94646 - DNA, 223 bp, Heterodera glycines
cggtacggcttgcgtggtgacgccggttggccgaattctgtacatccgccagggcaatgggcgtgccggccgaatggaggacatgcaaattccgatgccaaattcggatgaagaaccattgaacatcatgcagagactgtacaaagcaatcaccgacatttattatgggcgacagaaacgcgaagaatggactcggattgttgtctaattatataattaaaaa

SEQ ID NO: 94647 - DNA, 167 bp, Heterodera glycines
accgccactaattgtcagaaaaccaccgacggaaatgcgagtgatcagcggaaagggaatgccaatcgttggtggcaaaacggtgatgctttcaaagccgcgtccccttccgatgaccgacctcactttgtttggaggaggaattgggccaagacgctattataaaa

SEQ ID NO: 94648 - DNA, 246 bp, Heterodera glycines
cgaaaatcactgattttattgaggcaaataatgtacttccaaattgccaacatggctttaggagaaaacactctgttacaactcaacttttggaagtcattgatgattttagtttggctttggaaaacaaaaaatcaattgatgttatatattttgatttagcgaaggcatttgacactgttccacatgaaagattagtttctaaacttaaaaatgttggcataaatggtactttgcttaaaaaaa

SEQ ID NO: 94649 - DNA, 128 bp, Heterodera glycines
gatccgcctcaatttgctttacatttgcttccgtttcttattttaattattagttgacaattcgctgttaaataaatcattattttccgaaaaaaaaaaaaaaaaaaaactcgagactagttctctct

SEQ ID NO: 94650 - DNA, 120 bp, Heterodera glycines
ttctcgaccctttgtgcgtctgccttaattggctccacacaattttaattgtacattttccattgatttgttcgttttgtccctccatccgaagcatttaatcataacctttcactaaaa

SEQ ID NO: 94651 - DNA, 219 bp, Heterodera glycines
ttcaatcacatcacattgttcgtcaatgagcaccagcaacaaattgcgtcgcaaaaacagcagcagcgcaacgccctcctccgcctcactgctgcacatcaatgatgcacggattgcgggactgtacgacttggagcacaccattggcaagggacactttgcggtggtcaaattggcacggcacgtgttcaccggggaaaaggccatgatccctcaaaa

SEQ ID NO: 94652 - DNA, 109 bp, Heterodera glycines; identical to SEQ ID NO: 54000

SEQ ID NO: 94653 - DNA, 413 bp, Heterodera glycines
aaatgcacgaatgcggccacatcacgatttattggttcttccaggacagtgatggggttgataatgccgaaatggagtgcaccagggtggcatctgactattttaaccccatgcatgatattaaagaaaagcctgagttgaaatgaagggaagaactcattgaattagcaagaagggaagtttttcaaagaaacggctgagacaaaaggcgcggaagaaaggagccaagaggaagaagggaggaggtgactcatcgtccaattcatcggaaggagaggaggaggaggcgaacgaagaagaagagaagggacaaagtcgggagggagacgaatgatcgtgttggtttatgggactgcatttactcagtttattaaactcattatttacgagcaaatatatttttgtcactaaaa

SEQ ID NO: 94654 - DNA, 364 bp, Heterodera glycines
acggcaatttttgtcctctttatttgctttttgttcattgtcctccccaccatcgcccaaatgaatcagccgcagggaatcgcattggtccgtcgggacagcgactacgacgaactgctgaccgaattccgctccaagggcagtcgaatgcgtttcggcaaacgatcgcttggtccgtcaacggatgccattggccttccgtcgtcggattccttttcgaactcggcggaccctaacaatttgatgtccggacatttcaattggaactgatgaccgaacgaacagaccgatctcatcatcatcatcaatcacatccatttattaagcattcttccaacgataaacttcgagaaaattaaaaaaa

SEQ ID NO: 94655 - DNA, 504 bp, Heterodera glycines
tccaagggtggggcaactgatgccggaggaacagaggacggacttcaacatggacagatggttggacgcgtacgacgaggacatcggtcgttgtgcggaagtaatcgtcgactatttgaagaatcgaagtgctgtcggattcgatgatttggaaagcggcggagactttttcgcgcgtccttccgcacgtcattattgcggagtgttcacccagtcgaagcttcgaaaggattgggtgaatgcgtatgacaacgcaattgttttcgtcgagacgggcgtcgccgatccgaacatggcggcgcgagtgacccgcaccggcgacttcctccgcgagttttttgtccactgcgaattcgggtggaggtgaagaacctgagcaagctgatgaagatgaagctgcgagcagcctttcttttaatcgactgacaaaacggcacaaaacgcatttcctttttttgtgaattttggcacttccatcgattgctctgtcacttttcaattgtt

SEQ ID NO: 94656 - DNA, 513 bp, Heterodera glycines
ccattctttcttccgatggatccctccactgctgctcttccccctatgcgtttttcttcgacctctctcgtccccgacccctccgtccaatttttgctcgatttggaaaccaatgcgcgttccattgcctgtggcattgacatggcattgcgcgacttgcggggctctctccgtggaatgagtgatttgacttgtgagtctgcaaatgtttttggctctgtggtcaattcgacttgcgattcggtcgacgcgtccattcgatcgatgtatacgatgttagcgaagactgaggagcttgacgagtctttgcggagcattgagaagctgctgcagcagatcaaagacaccaaaagacttctggacaaattcgaagagcacattgtcgtaggaaatcagtgatcagaaatgatttggcattttgttttgaatttttatccatttttatcgaacaaatcaataaatggatgaaagggaaaaaaaaaaaaaaaaaaaaaaaaaaaaaaaaaaaaaaaa

SEQ ID NO: 94657 - DNA, 417 bp, Heterodera glycines
ctttttgcactcgaagtgcacccatcggctggcgatttgattttctttttccgtgagaaaaacggcgatcggaaaacgaacgccgacaaaaatgaaaatacgcaggaacgcgatgcgatctgtgaggtgtcgagcaattccttcgcggatgcatttcacgtcggaataattgtggagcggcgaacgcaaaatcagtgggcggaggaggacaaaacggagagaattgtgcacgcggcacgggacgaggcaagcagagaagcagaaaattaagctgaagacgcaaaaacacaccaaaacaacgaaaacacaaattaaccatttaaaatgaattccaaatttttgagtgtttattttaattttcaggctaaaacattattctagcacaaaaaaaaaaaaaaaaaaaaaaaaaaaaaaaaa

SEQ ID NO: 94658 - DNA, 327 bp, Heterodera glycines
ataaatgacttcaattggcagagtacattccatttgaagtgcttcaaagtccttctcgttcaatttcggcatgatgatacagatttgacatcaccattcgaagcaattgccccagtcacagccacaccttctttgactctttttccaagtgctaacgacaaaaatgaaatggccgcggcgaggccgccgctagaccctcctttgtttgatggcttctgaaaaacgcaagaattaaattaaaatatatttcatggccaaatcgcaaattagcgattgaaagtgtggacccgaaatcttttaaattttaaataaaatgtaatacggaaa

SEQ ID NO: 94659 - DNA, 554 bp, Heterodera glycines
tcttgtgacaattaaaatgtgcagctgcaatagttgcacaaacaagtggatgtgttgttgcggctgtcatgtgacatctggttctttggtcattgcttggctttatttggtgtccagtcttctgactttaccttccgctttttctgctttagtcagccaatatcatcttgttgcgcacaactttatgcatttaacactgacacttttattttgcttctgtgctattccgatcattgttggagaaatgtgcacacaaagaacgcatcacatgtatttgccatatctgatcataaatcccgtggcactgatagtggcattatttgtcgcaatatttgctccatcaactaatattatgtcaagagtgccaaatcaccaacaacatgatgttgcagctgtttttgttgcaactttaatgctttttgcgcttattctttctctaaacatttggatgtattcagttgtgtatcgggcctaccaatttgttaagcgctatggccaggaagaatagaagaaaaaaactgatgatgaaaaatgccctgcggcacataaattgt

SEQ ID NO: 94660 - DNA, 467 bp, Heterodera glycines
  unsure (1)..(467): unsure at all n locations
cgnggaacttgcanacgncagcgtcttgacttcttcgctggtacaatttctcctgttcattcgttttgcaattattacggatgctgaaatgntcaaacgaatacaatagaagcgtgcacatgacacantgtgcgtgctttactcaaagcagaacgttgcggtcgtggaaggaccnnacaaagtaacagtaactttcacagataanncttgctactgtaaatggnaagaaccagcggatgnnctgtttcggagaaggggtgtgtaccacgtgaacaaatccgcagatgaaattacgctttacggtcgcaccggaatatgaagaaaacaacagcagaagcaacaggcaaagaaacctgaacacttccactgaccaagatgatattttgacattttcggaatgcaaaatttgttgcgatgttatgccatttatgttacatttgttagcggataaaaattgttgtcttaaa

SEQ ID NO: 94661 - DNA, 513 bp, Heterodera glycines
ttttcgagtgacaaattattttaattttaccaaatttaacaatcgaaaagcaatggctactccagtgggcgatttggaaacggaatgggagacgtacgaaacggaattcaaaaaagcggagaccgagcacttgtcctacactcaacggcacaacgaaaacggcaaagaactgaagcgaaaattgtcagagcttgttcggaacatcggacgtctcttggcagggggcggagtcagcgacgacgacaaaggcagattggaagctttgaagacgaaggccgaaaaagctggcctcaaactttcggaaatgtttcgcgacgaggcgattgaaaaactcaagacgagctacaaggaagcaaagaaaaatcccttctggaataacaccatcagtactgcttctctgttggttgacgactcggtcttccgttttctttcagacgccgtgaacttgtgtgaaggtgagccggtccgtttttccagtactcgccctgtcactggatcgctttgatttcttct

SEQ ID NO: 94662 - DNA, 575 bp, Heterodera glycines
gcgtgtatggcatttaccgttcggcgtccactgcgcgaatgccaagcgaatcgcgcgggactgaatttgcggctgcacttgccccgttctcgctctaacatcgacataccggcctttggatgtgccggtgccaattatatgccattcactggtttttctgccgtcaaatcggatatctaccgtgtgaacccattatattcattgcgcaattacatgtccgacaaatattaccatttttcgcatcgctacaagcgtacacaattccatcgccattattaccacggacaaattgaccagtacccgtatgaatggaacttcgaagggcgtggaacggcaacgggacaattttactttgcccgacgtatgaaattcaacccgtggcagttcgggtggaatcgcttctacgacccgtacagacgctactacgacccttaccatgacgcgtacatcaagctgtacgactacagaccacgtctgattgacggcatttattgaccaatcacacaattgatcaaagaaaaagggatgggacagacagaaattgatgagaaaaaaatgccaatgacaactgccag

SEQ ID NO: 94663 - DNA, 502 bp, Heterodera glycines
  unsure (1)..(502): unsure at all n locations
acattgacgagaatgccgacactttgatcgaatcggagggatttttgcaaattgaccaaaaaatgttgtgcgaaattttggaacgcgacaaatgctcagtgtggacatgtgggagaagcagcagcgactgatcactttgaacaatttttgcgtggacatggagctgttcaagcactgcggagggcgacgcgttggatcagttggggctgcgtcactactgctgcctttggatgttgttgtcgcacgtggacctgatcgaaaagctgcccagcaagcataatgtngaaacggaaatagaggttttcctggacttgccgggaacgacggttgcgacacagaatgcttttacgcttctaagggaaattagtgagttttatcagttaatggcttgcagcagcaatcaatcatactaaacattcaataaaactttattaatgaaaaacgtacaattaaaaagtgtgtttcaacaaataacaaatgtttctcttttcttcgaatatta

SEQ ID NO: 94664 - DNA, 665 bp, Heterodera glycines
ttatttttttggccttcccccaacaaaacctgtccttccgcttgtcccaaacacaacaacaatttacaagcaatggcaatgtttggcgtttggagggacaaaaaaagcgaaaaaaagagaggaaaataatggacaaaaatggaaacataatgacaattgtgaaaggcgtcggcgaatttttggtcatttcgccccgagggaaagagcgccaacgaaacgcgaatgaatcttcggcgcggctggtcaattgcacaagggttgggtggatggatcatcaccaacgctgatggacagtgcaacgcaccgcacaaaaaacacagacgttggtacgcaattggaagccgtgcagcagtgtctgtgaagaattagagagatagggcgacagtagcactagagggtggagtagggagggataagggcgaaggagagggggagaagaggagagcaggagagaaaagggggcggaggggggaaagagagagggaagggagggagaagagaggagaggacaggggaaggaagggggcggggaggaaggggggtgggagagggaggagggagagcagagggaagggcgaaggggaggtgaggagggagaaggggagaggggagtagagaagagagatgggggagagagagaggagagaggagaagaggaggggagg

SEQ ID NO: 94665 - DNA, 396 bp, Heterodera glycines
ctattcaaatggcattcaaattggcattttttttcatcgcacccgtgctatgcttgtcaattttaatgatcggccaaatgccatgccaaactgatgccgttgctgttcatcccgctgttcgaacagcggtgagacttgccaatacaaaaggcggacagattgcacttggaattgtggcgcctagtgccctcccagctgctcggatggccaagcattttgtgcgttagcgtacgctgaggcaatgtgccaccagtgactgatcagagaaaggcagcaaatggctcgagtgatgggaaggatcggaattttgttgtaacaattttttcccaaatttgtagttttttcatcatttttaattaattttcggctttttattaaagttgggttggacaaaaa

SEQ ID NO: 94666 - DNA, 530 bp, Heterodera glycines
ctcgctcaaattgccaaatcgacacaaaatgtgccgcccgttgctgctgtttgtctgcttcactgtcgcttttggcattctgtccattgtggcgccaaatcaagcgctggccgagccggtgataggaggaccaccaccagcaccaccaattgaaggagtagcagcactggcaggagcagttgatccagcggaccaaccggttgcttctggtgttgcaccaccgaagcaaccagttgtagtggaagcgtcacaagtggagcaagcggaagtcgatcagctgccaaaaagttatggccgaaaatgatcagtgtaatggacaatgggcgaagtgatcagagcgacgatcactgctgatcagagtgattgattgatgatatatgctcaagtgaccatgattgaaagaggccggatttatgaccacagccaatttaggtacatattccgaacaattttggcgctttttaagttttacgccatttgagtccggtctcaaatgacctacacattcattgaaataatttgctagaatt

SEQ ID NO: 94667 - DNA, 379 bp, Heterodera glycines
tgatcagctttatattgttcgtcaaagcatttggaggaggttcaccaaagaaaaacaaaaaaatcaacgatggattggcacaacgcatgagcaaattgttgagcacgggcgcttatgcagatgtacaatttgtagtggaagaaggcgacaaaaaagagcttctgctcgcccataaggcaattctttcgcatgcctccgaagagtttgctttaattctcggttttgacacacaaaattcatcacattcaaatggaaaaatatctgctgaaacaattaagactgtgctggtcacagatgttacaattggggcgttcaaagtgatgctgagctttatttatacggaagggttgaagggtgataaattgagtgtttgcaaaaa

SEQ ID NO: 94668 - DNA, 206 bp, Heterodera glycines
ttattattttaaaatggctgcattggaagaattccgaaattttacattgaaaaattgcatgaaaaactagctttgaattctcgactcccggacccagtgatcaccggaagaagaagtgatcatttgagaaatgactaattaattttgatttattatcagtttctgttgatttgtatcagttttaatgaacaaatgaggcgaaaaaa

SEQ ID NO: 94669 - DNA, 259 bp, Heterodera glycines
aaaatgtccagctctgaagacgaatccaatcactactcgaaaaaggaaattcgggaaaaagaacgaaggcaacaaaagaacaaaaagaaaaatgaatccaaaaaggctaacaaaaagaaccgcgaagaaacgatcatcacattgggtgaagaaaaagtcgaactgcctgaagcggtgaatgaaattgatagtggatttgaagcggaaggagggacaaatgaaacggaggaggaaaaggacgtttcggaagtggtcaaaa

SEQ ID NO: 94670 - DNA, 462 bp, Heterodera glycines
ccttcctctgcttttcccaatggatcggccgcttttccgtgcgcgagcattgccccaactttccgcactgtccgaatatcagttgcggacactgctcgcccactcggactctcagccggaaggaatctctccgaatgtgatccttttccaacgtggtgaatctctcagctgctggtacttacttttgtccggccaaatccaactttatctcgaccactgttcagctgctgattataatcaaccttcctcttcaattagtcaacttaaactgattgttcccggcaccttttttggcgaacttcgcaattatgccgatgcgactcattgttgctcggcaaaagttatccaacgggcggattttgtgcgcattgatctccgccattttatggccctttataataaatgggcagaacagttgcaaaattgcataatgccaatggaggatttggtggcggaaactga

SEQ ID NO: 94671 - DNA, 342 bp, Heterodera glycines
  unsure (1)..(342): unsure at all n locations
tgtttttggtttcttcgggtcgtcaattatcttcattcgctcatctctttgtgccaattaattgccggatttttgcgccgaatattcgaaccatgtcgacaaagcctcccgctgataatgagtccaacaatgaaggtcaacagaagagcagtaactcactcgcacgagacgggaattatgaagatggaaatatgaagaatagagacaaacaaaaagagttcggaggacctgctggtccggagccaactcgatacggggattgggaaaggaagggacgcgtnagcgatttctgatcttcttcatgattttgtaattacggaataaaataatttaaatataaaa

SEQ ID NO: 94672 - DNA, 438 bp, Heterodera glycines
gctcaaattgccaaatcgacacaaaaatgtgccgcccgttgctgctgtttgtctgcttcactgtcgcttttggcattctgtccattgtggcgccaaatcaagcgctggccgagccggtgataggaggaccaccaccagcaccaccaattgaaggagtagcagcactggcaggaggtgttcagagtgattcgctggcgaatgtcaataatttagcagttgatccagcggaccaaccggttgcttctggtgttgcaccaccgaagcaaccagttgtagtggaagcgtcacaagtggagcaagcggaagtcgatcagctgccaaaaagttatggccgaaaatgatcagtgtaatggacaatgggcgaagtgatcagagcgacgatcactgctgatcagagtgattgattgatgatgtatgctcaagtgaccatgatagaaa

SEQ ID NO: 94673 - DNA, 507 bp, Heterodera glycines
  unsure (1)..(507): unsure at all n locations
ttcgtctgcattaaacccgaatccgtccgaaggtgcctcgtaggaaagatcattgaacgctttgaagccaacggctttcggctaattgccataaaaatgatcgttgcaactcgcaaacaagcgatggaccattacgtcgcttgtgccggccaaccctttttccccaaagtgatcagttatatgacctcgggtccggtggtggcaatgatctgggaaggtgtcggtgttgtgagaggaatncgcaaaattttgggtgccacccccgacaaagttcctccgcccggcaccctccgtgccgattaccgtaacaacagcgacgtgggcaaataccatgacacggtttgccacggatcggactccgcggaggacgcacagcgcgagtttggcatttggttcgacaaaagtgagatgccggcacctctctcgagggtatcgggctgatgtgatgggccgaccgatcgaacagaaatggacaaaatatttgcaaattcgaaatgctattcattg

SEQ ID NO: 94674 - DNA, 276 bp, Heterodera glycines
gaatgaattcctgacagaaaataaaaaacagagaatgacatcattggcattaggcggaattgggctcggaatgagtggcaatgagtgaatggcccgccacaaaaacattctccgcattcatttgattattctttccttcgctaatgctaatgcatcatttttgtccctaaaagtccattttttgcttatttgccctttcttttcctttttttgtcattattatttttttgagacaaaaaatttcaataaaatattaaatcgaaaaaaaaaaaaaaa

SEQ ID NO: 94675 - DNA, 587 bp, Heterodera glycines
cgaagtgcgcaacacggtgaaggcgaatgccgattgtgagatggacccggaggagataacccccgtgcctgatgactatttgacgaaatgatagatcgaatgcacaggatggaagtgcgcaacacggtgaagtcgcatttgtgcgatgatgggacgagctcgggcatcagcactgtgccttccgactactataccaaataatttgttaaaatgttttgtgttaggataaataaaattgtcttgtcttctgccgtttttatacttacatagttttactcgcgggggaagtttggacatcaaatcaaggattaaaagaaattgtgaaaaaattatgtaatttaaaagcttaggtcgctgatcacaaatccggcatccattcggccaactccgaaactcggacacgaattcgaacatttaaaatgagaaatgagggacggacgacgcttcgtatgaaaaatctgagcaaaaggggcggaagacgaaaaacggacgcatttgtcacttgcgagaaattggactatttctcgagaatcgcctttcccgcaatttacacgctgttcaatgtagtctactggacttattacatg

SEQ ID NO: 94676 - DNA, 77 bp, Heterodera glycines
aatgtttattattgaataaatacacaaaaaacaaaatatgcgaaatttgtcaagaataaatccgaggggcttaaaaa

SEQ ID NO: 94677 - DNA, 510 bp, Heterodera glycines
aatgataccgaatcaattgtgtaccgattggatgagaggtgaacaacttttaactggttatgtggaacgaggagaccttgtagaaattcgccgtggatcttacatgcattgggctgtctttatcggacatatcagtggacaaccgcttgtaattcatatttcgacagagtcatccgatatgggaattagcacaaagaaggaatttgtccggaagatggccaagggttgtgctgctattgtaatgcttctcacatccatctgttcaaccttacaaagactcgtcctttctctccgtttttcatttctcaatttgttcaaggtccgcagcgacccttttctgaatgttatttcgactgacttctgtcgtgtcaataattgtttggatgcaaatcgacgaccttttccaccctcaattattgtcgaacgggcattgactaagcttggaactggtgggtataatctcatcaaaaacaactgtgaacaccttgctaaatggtgtcgttatgctct

SEQ ID NO: 94678 - DNA, 425 bp, Heterodera glycines
gcccgtcccacaaatcgcgtgctaaacgaacggacggagtacggcaaacgaatgaagcgattgtcgcagcgaatttttggcgagatcacacgaccgactgatatcaaatcgttgcgcgttgctgaaattatggcctccgagccatgggagcagcaagccaagctaagcgagaagtactacccgaacacgccaatgctccattacctcgtcaaaatgctgaaactgcacggcctgtacttcgacgagcatctcgtttggcgcgaagttcagaatgaaattcgtatttcaaagggtaaaatcatttacccgccaatcggtgcaggaaaacagaagatgaaagccaaaatataaagcaaaaacgttgtcggcgtagctctttttctgatcacatttgatttaaaataatgttttgctatgtgtttttt

SEQ ID NO: 94679 - DNA, 471 bp, Heterodera glycines
ggcacacttcgaaaaggttttcctggcgaaatggcacagaaattatccacagaagcggaatggataggcaaagcattgctccaaaatgcgcaattgtaccgcgtacattgggaaaacttccattttgactacccggcattggttctaattgacgaaaaagcgacagataagtctgataattttgttgtcggcgatttggttcatctaaaaaacgcagaacaaagcattaaatggttggatgcctatgaggaatgcggagaacagttcaaccaaccaaatgaatacattaggaaagaagttactgtccaactgatgaccgatcaggaggcctcacaaaattttcttgcctcaacttatgtctatggttggcccattaaagactctgatggtaattttgttgcccctgttcgtgagattgtagttgccggtgattggctaaaattcgtgcaaaaaatattgaaaactaaaaaa

SEQ ID NO: 94680 - DNA, 360 bp, Heterodera glycines
gtggaaatcggggacagaagggtggtgttgtccgctgctcggcttcgctgcttctccccggtgatcgatcggatgctcagcgcggagatgagggagaagcagcagccatcggtcactttgagcgatttgggcattgacatggaccaattcatggattttcttttgtacatttcgccaaatgctctgagccaaccaattcttcccaattggcaaatcatgaacatttgatgacttcgatcggcaaagaatttttgggagatttgacttggcgaatttgttgttgaatgcaaattgaattttatcttatcacagacacttttcaatttaaaaagaataaatagttgttcttaaaaaaaggaa

SEQ ID NO: 94681 - DNA, 466 bp, Heterodera glycines
ttggccgtcctttcaatgtcccgagtgattgtctcctattttcgtcagtattcgctcaaggattggcgcgattattttctgtccacccatttttggggtccggtggccaattggggccttcccctcgcggcgatcgttgacttccgaaaggacccagagatgatcagtgggccaatgtcctgcgcactgacaatttactcgtccgtttttatgcgatttgcttggcaagttcagccgaggaatatgctccttttcgcctgccatttgacaaatttcgtagctcaacaaattcagatcgttcgcttctccaattaccatttcctccatttgtacaccgaccctttcgccaaaacggttaagaaattgtaaaggggacaaaatacgaaagtcgagcaaaggcattgcgcattcatccattgtttgtttattgtaacctttttaccataaaattagttgattaaaaaaa

SEQ ID NO: 94682 - DNA, 563 bp, Heterodera glycines
cgccatcgtcgctgacgatacacaacccaaacatcgaccaaataaacaaccgagcagagaatgagcgcggcgaaaattgtgccgatgagcaacggatccgtcgacggcacgacatgccattggagaagcaatgtttcatcactgtccatatgtagaaaattccgatgggaaatatgtgcaagaattgtcacatctgcacaaagcattaatccagcagaaaggagcgcataagttaatgactccttaattgataggaagagatttatggctaaacaaatggaatctttaaaacgaaatttgtcattagaccgggaattttgggctaaaccagaaccagaaaagccatgaattttcaaaaaaaattttaaatttttttaaatttatttgttgttcgagtgaaaaataaataaataaaaaatattttgtttttaatttaagaaaaaaaaacagaacaaaagtgcagaactcgtaagttcggtattttgatgaataaaaattgtataaattgaaattgaaattgtcttttgttaacagatttcaccaaaattgtaacttttatgaat

SEQ ID NO: 94683 - DNA, 524 bp, Heterodera glycines
tttgtcatccaccgaatccaaagtcgtgaaggccagtacaaactgtgcaaggtgaagaaacaggcggtcggtgacaagcaagtgccgtacattgtgacgcacgacgcgcgaaccattcgcttcccggacccacacatcaaggcggatgacaccgtggtgattgacattggcactggcaaagtgacggactacgtgaagtttgatgctggcaacatttgcatgatcactggtggacacaacattggccgtgtgggcattgttggacatcgcgaacggcacccgggttcctttgacattgtgcacatcaaagacaaagttgtgaagggcagtacaaactgtgcaaggtgaagaagcaggcggtcggtgacaagcaagtgccgtacattgtcgcgcagacgcgcgaacactattcgctacccacggacatcaaggttttctcgatgcaacattggtgcccaaatcctgcaagttttgcagaccacccatgcacttgttaatctcacgcatccgatcagcacgataat

SEQ ID NO: 94684 - DNA, 204 bp, Heterodera glycines
ttatttaaaatgtcttcgcataatacttcagttattgatgaaaatcgacgatggagtgacttacgctgtttaacagatagggcgtctacatttgccaattcaggattcgtccctggaatcaaggtaaaattttgtgtaatagtttagatggtaaccatcctttttcaaaaaaaaaaaaaaaaaaactcgagactagttctctct

SEQ ID NO: 94685 - DNA, 263 bp, Heterodera glycines
cgaatccatccaagctttggctgaaggcattgaagacttcagtggcggtgttgtgatggtaactcacgacgaacggcttatcagagccacagactgtcgtttgtgggttgtggaggatcagaaaatctaccaaattgatggcgattttgacgattaccgaaaggaagtgctcgatcaagtggagaaaagtctgacttcaattggctaacatttagcctttcctgatcgtttattgttgttgataaatcttatgatttggaaaa

SEQ ID NO: 94686 - DNA, 452 bp, Heterodera glycines
ctctcttccgttttcatgtggggaggttacggtggtggttactacgacggctatggctacggtgggtactacggttcacagatcattttggtcgtcgttctgctgatcgtcggctgtctctttctcacttgcgttgtcgccggcctttggctgctttattcaagacaacagaaagaaaggggcgaagtgcggcaacaacagcagtattacccccaatattacactcgcaacggcggaccatacgcaaccaaagaattgagcacagaatttccctaaaaatggcattgatcagtcgccacaattggcattttaatcggacaaatgaaggcgcaaaaaaattgaaaattcaaaaaaaaattagcaagaaatgcgcatttattgaacgacaatgaatttagcatatcattaatatgtacatacatataattttatctgatcaacaaccctcgtca

SEQ ID NO: 94687 - DNA, 500 bp, Heterodera glycines
attctttggttcgcctcgtccatgtgtcgtcttctgccgttgtttctgacgctctttgctgtcctcgtcgcactttgtgtttctgtggaggggcagcagccatccgccgagcagcctcgcgcagtccttttggatctgatccctaccgaacttgtggagaataagcgatcgccgcgacactttgcctttgccaaacgcgccagatcgttcgcttttgcgaagcgaaatgccaacggatggggaagggcttttgcctttgccaaaagaacggcggaattgccccaatggaatgaaaaacgctttgcttttgcggacggcggcgccagccgaaggttcgcattcgcaaagcgaaattatcgaaatttcgcattcgcttaacggagagagaagggaaagggcagaagcaaaggacggcaaactgagaaggacacgcgccgttcttgcaagcgataatatccgctttaatctccacttttatcccctcgtttatccgcccttct

SEQ ID NO: 94688 - DNA, 408 bp, Heterodera glycines
cttacaaatgttagcttctttacccgctccaaaaatggccaattctgttgcgccttcactccaactgtctcccgtttctttcgatccacacgctggacattgcggccaagtattttgtggtcgccgaaacggactcgccggctgattatctcctcaaatttcaaattttgattgtgattgacaaaaacaaccacccatttgagcaaatgcgcgatttgaattctctgctctgtgcgaaattgaatgccgcagcggccacgatggctgacatttatggtgcactgcttctgcatgcgattttcgatggcagcaaagattacaccatggtcagtgttagcttccgtcgcgagcatcagccatttctgtcggagtttggggcgttgtgtaccaacctcagacatttactgt

SEQ ID NO: 94689 - DNA, 466 bp, Heterodera glycines
cttttgcaatttgcttcaccgtctttaaacatgctgtcaattttgatgtactccatgcttttgtatgctgcccttgttctgttgataagtccagccacagttgtggccaacgaagatgtggttgggttggccatgcgcggcactcagcaattctttagacgaaatgccaaatggattaatttgccatcgggcggcggatcattggttagtggccgtggaaattttcggcccggcttccattctttgcatcgatcacgtactcagctggcggaacctctgtttatcacttttaaaagatctcccacaaatctcgcttcaatgatggttcgtttgcagaaaaacccgagacacaatgatggcacaaactgagaatttaagtgatctggataactcgaaaaatgtggaataaattaaatgcattggaattgataaagataaaagcaaaaataaattcttgcagttttaa

SEQ ID NO: 94690 - DNA, 490 bp, Heterodera glycines
aaatttactttgacttcaataaagaagaaaaatggcttcatctggctttagcgtctatggtaaaagttctttcaaaagttgtagctttgagcacccttagaactgaatccaactgcaataccatttacggaatttcagtctatgtttacgtaggagcttttttgtacatgggtttttctggacataaataatcgacagagcatcttaaatcgcaaaatcgatggagaaaatgaaagcggcagaaaattatcgatgtgtcggtctaaattatacaccgaaagctaccaccaccaccacaaatcggtgtgaatgatgtgtggttaaagaaagctgcgcagttgattgggaagaagttggcatcattccgtacaacgcaactgaagcggacattggcaatttgtttagtcagtgcggagtggtcaccaatgttcgcatggtgtacgatcgcaagaccaatcgctaacagggcttctgttgctgtgaattccag

SEQ ID NO: 94691 - DNA, 587 bp, Heterodera glycines
aagagtcggtcgagcagagtttgaccgaattggagcagaatgcgatggtgcgaaggcaaaggcttttggaatttcgaacgcaattcgtcaaaaaagcccaacagcaaaatggcgagaaagaatcgagcgacggagaagaagcaatggaagagccgatttctttgttttttcgctcttacaaaccctcaaaaaaggcagaagaggcgccggacgtgcccaatttgggcggaacgcataaggaaatggacaccttggagaagcacattcctgatcagctcgaggccagcgaagacacgaaaatgcgtgacgaattggacctgaagacgttggcaccgcggaaagtggactgggacttgcgcagaggagtgcaggaaaagttggacaaattggagaggaggaccaagaaagcgatcaatcagctgatcagacagcgcgtgaacgaaggggcggaagaccaactcgccgcagcagtggattcagtgggcgacggacgatgagagaaagggaacgaacggacagagaaaagagacaattcgtccgtctgatatgtcttcattgatcaaaaaggaaatgaatcggatggaatg

SEQ ID NO: 94692 - DNA, 524 bp, Heterodera glycines
tttcctatggcacttttactaattgtcgatgcatattctgctgcttttgcccacccaattcacaacggtagacctactaccgctattgatggaaccaagctgttgctggtgccatcatcggcgaacttcgccaaagtgatgatggcaaatgagggcaccgccaccaaacattttgcatattcgccacggcaaaatggtggcgaagcattgtttttccggaccgcaaaagcatcgccacaatcagcttcttctgctggaattttcccttatccacaatcatcatttgacttccaaaatgatggagaattgatgaaaaatcatcgttttgctcgggacgtcgccgccgatggttcaaacggagtttttgttcgatctggtggtggtgccaccaaatttgcgtttgccaagagaagcggcggcacatttgcagcaagggcaaaccgatgggatgacgaaagcgcagcagcccaaggcggacaacttttcgctgtggagcccattgaatggagtccgttgagcagtga

SEQ ID NO: 94693 - DNA, 454 bp, Heterodera glycines
cgtttcaatgcctatcataaattttgatcggttgcccgccgcaatgcgtccccagcgtcgtcgtctgcgggcaatccaactctttcaattggtccttttgtctctgtttggcattttgctttttgcaaaagtcatttataaaacggaaatggattcagaaaagggcggcatcgtctttttcgctatttttatgttcatcataatcattctttgcattcgcgaagtttacaaaggttcgcatggccaaaaatggcacttccatggcctttgtgccctcactttgttactctttcttttgtacggatggtattatggcctcttaaagcatgaaccagccatcagcgcaatttgggcaggaattatgtgcgaattgtttgcatacattgtgtgaaacaaaattatatccgttgatgaagagcatcgaattgaggaattggtgaatgagacaaacaaa

SEQ ID NO: 94694 - DNA, 263 bp, Heterodera glycines
acgggacttttattcaatcggagcaaaacgaggaatgcaaatggggacgatctcggcgaatcatgactcatcagttaaattcgaactgatcagttccgatttaagcctatttcccatcgaatttatctgttgtcccatccctatccttctcaattgtctggctcaactcccgctatcaaatatgaaaaaatccagttttggacaaagtgtaaattttggtgaaaaaaaaaaaaaaaaaaaaaaactcgagactagttctctct

SEQ ID NO: 94695 - DNA, 169 bp, Heterodera glycines
gaaatgccgcataacaaaaaaaccccgagagttatttcttctaagccattgtcggacgacgccgacagaagtgccgaagggagcagtaacactcagttggtgcaggcatatgccaatgagaacagcgaaggcggagctgacagcaagaaaaagaagaagaagaacaaaa

SEQ ID NO: 94696 - DNA, 144 bp, Heterodera glycines
catcattatgttcctttgtgagataaaagaaaaatgaaaacgtatagtaaagtaatacatagtaagctgtggttgtttcctttcatatgttcgcttattaatgctgataaatttctaatcgaaaaaaaaaaaaaaaaaaaaaaa

SEQ ID NO: 94697 - DNA, 86 bp, Heterodera glycines
aatagtgactaatgtttcatgctcaccagttcgttctcgtggtcattttggcattgtccattaacgaggtgaactgtatgccaaaa

SEQ ID NO: 94698 - DNA, 774 bp, Heterodera glycines
  unsure (1)..(774): unsure at all n locations
gtcttctcgagacaaacattttgccagattcttgacggaaagacgagaaatgttgcagggcattcgcattttgcggcaagaacccgtcgagacgcttttcgcattcatttgctcagcaaacaacaatgttccgagaatatcaaaaatggtcgaaaaactttgtcaattttatggcgattctgtcgaggtgaacgctcaacgtttttacgactttccgtcagttactcaaatggccgcacatttaaattgtatggaacaaactctcagagatgccgggttttggttaccgggcgaaaagcattgtgaaaacggtggaaatgttagctgatggtaaattgggaaattctgcctacctttggctccattctctgcgaaatttgccataccatgaggccaaattggcacttatgaaattgccgggggttggccctaaggttgccgattgcatttgcttaatggccttggacaaacatcangtggtcccggttgatcgtcacgtgttcaatttggccactgagatttacacaccgacatttttgaaaggttgtaaaacattatccactgggatctacnggccaaattggtgcctttttcgttgatcctcacggcgattatgccgggtgggctcactcccgtttggttagcacgcgtggcaagcctttttgaatgaatggatgggagaagaacgagaaatgcctatgtattaaattatgggtctagtgtgtntcggtcatatcatcttccgtgtctgctcacatctggtgcgtcagnnaa

SEQ ID NO: 94699 - DNA, 421 bp, Heterodera glycines
gaccacttggactgggagatccggaaagcaaaacattaagcaaagtagaccaagaaatagttattcccgatttgatgggtaaacaggttcataaatctgaatgcctccaagaatttactgcttttgtccaatgtttgcgtgctgaaaattccatagtaggaccacagaaatgcaagccgtatattaatgtttacgaagactgcaagttgatgaagttccaagacgatgaatttcgtaagaaagtgattgatgagtatatggacgaacgttcgaaattcatagaggttggcttgaaccaaaaacaaaggaagttttatgaatatctcaattggaagtctgctcacatagcgaaccaaaacgagtcaacagattctgttgatcaatttggatgatagtaaacggttatgttatagattttgaa

SEQ ID NO: 94700 - DNA, 311 bp, Heterodera glycines
tcgcttttacaatttttctgttcatcgttttgcaattaacggatgctaaaatgtcaaaaaacgattatgaaaatacgtgcggaaacacatgtggtcgtttcgcgaaaaaaggtgattgtgctggtaaaagtccgataaatacgtgtgtaacggaaggagattgctactgtaaatgggaaggatgcagagcagactacgaagagtatgttagtaatccctgatctgatgtcatttttgttacatttgttagcggaaaaaaaatttgttgtcaaaaaaaaaaaaaaaaaaaaacttcgagactagttctctct

SEQ ID NO: 94701 - DNA, 187 bp, Heterodera glycines
ttcggcccaagcgcacaatgttttgtcggacattgacaagaagttgcatgagaacaatgcgttgaccaatctgctgggcaaaattgagaccagaactggcctcaaacgatttcacatatttggagccttggtagggcatcacatgcttcaccttctgcacggtcggtgggctcaactggcatgtaac

SEQ ID NO: 94702 - DNA, 548 bp, Heterodera glycines
catatgctttcactcttctcgaaaaatgattgccttgcgcccaaaattggccgtctaaaggcaatggccaacggatggcgccggaggcgcaggcgaaacattatgccaatggggacaacaacaacgattgggacaacaatggcacgaatgatcgtgccatttttggtgatttcggcagtgacagaggcagcatcagcagcagcggcagagcaaacggcacgagcaattcgaagagcagatcccggcggttttcgagcccaacgaatttgctatcagtgccaaatgccaatgcaatgccaatccggcttctgttacggcgatttttgcgtgaaatcgatggtggctggcaaatatgtgagcaaagggtgcgaaaatcggacaatttccgcctcaaatgccgcattttatacctccgccaatccgtcaaaagcttcgcagagtcatgggcctcgtaaaaaatttcatatatttttaaattttaattacccccccgccccttcccccgttttgctaagtgtacgcccgttcagcagaggcgatgggcgaag

SEQ ID NO: 94703 - DNA, 652 bp, Heterodera glycines
tggtgtcggtgaccgtttcttatttgctctaataatttcaacatttgcctacaaaatattaaattttccgcaatttttcttctgtttcatcgcagttgttgctgcatggattttttttcaatatcaccaaaaaaagcattggcaccgtttggacgtgccagggccaaatgtgaacattttctttggcaacacaataaagcaaattcgcaatggcagcattgatgttgaccgagaaaatttctcaaaatatggaaattcatttggttcttttttgtttgatcgtcgcgaattttgcaccaaagacccggatatgatccgacaaattttcatcaaagaatttgcgcacttccaaaatcgctttgatttcatccccgggcgaaaagaggacgcgcccaaatcattgacgcgtaacatgatcaacatgttgcgcgacgatgattggaagcgggtgcgcaaccgcgtaacgcccgcattcaccacgggaaaactgaagaaactcattccaattttatgcgaatgcactgaaagactctgcaaggtatgtgaagatgaatatgcgtcgaacaagaaggagattctcttaaaagatctttacggccgatttctgttggatgtgatcagtcgctgtggattatcgttggatttgaacact

SEQ ID NO: 94704 - DNA, 522 bp, Heterodera glycines
tgcgaagcgggcgacgcgcggacaacgccgaatttatgaagaaaacaagcagactttgttatgctatgtgctggccagcatttgctcttccgttttggtgttctctctcaattactttctttttctgccgcaaaagggcgcgtggattggactcgcgttaagctctgccagtcaagcattttctgtgattcttatgtctatgatgatgaaaaccgtgcggaatgagcgtaatcagttggtcgatgctgggttggacctcaacgatccgaatgcgtttggagagtaaaaaaagctttaacattcgccacaactgcggtcccttaaggtactgcaaagacatcgtcattctgagtgtgtctgcacagcttctgagtctgatttggaccggcttcttcttcgtcctgctgtccattccctttttcacactttacaaactttggacgaacattctcggcccttggttcttcagaccgactcttgacgacgatgagaaagaggacaagaagaagcagaaaaaaccca

SEQ ID NO: 94705 - DNA, 482 bp, Heterodera glycines
tctatagttttgtgagttttacatttgcggaatttattgacgaggaaaaaatgactgaaggggagtgccgattgactggtttggattctacgaatttgaaatgttccgcttgccgattgttgggccagttcaatttggaagaaatcttaacagattgtctgagatgttgtgaagagataaaaattgcggaagagcgcttcgcttatgctgaaatgcatgtttgtgagtgcaatttgcaccgatttccgcaagttgcagcctttgtacgtagtgaaatgaaggaccaatggggagggaagctgaaggtcaagcaggtccgtggagttttgcctacaattttgctgaagagtggcgatgggcaaacgcacaaaactctcagcattgaaaaatgggacacggacacgatgactgagtttctcaacggggctttgtctttgggatgatcttcgatctctcattaactgttattattattctttcta

SEQ ID NO: 94706 - DNA, 334 bp, Heterodera glycines
ctttcgaatcacgaatcgtgggtcgctcagacgcacctttcttggcttacacgaccgagattatgatgccaattgattgctctgttacgaatcgattagctccaaagagacattgacgctgaggtgtattcattgattgcactgggactgcttagattcgcgggctcatcatttgcccaagaccacggctcccgccgattacagatggccaacttgcttgtaatgcttgttcccatccgataacgaatcgacaccagttgttgacaaactcagggccaaacttcagacagtcaattggagtagctgtggtcttggacttcccaggatcatcgaa

SEQ ID NO: 94707 - DNA, 254 bp, Heterodera glycines
gttcccggtggaagtgccgctctcgaaggtgccagcgtagccggtgtgaaaagacggacggaggcacggacgaaccgaacgaagctgaaaagacggacggaggaacggaagaaacgaagagagccgaacagacggatgaaacaaatgactgggtgctggatgaatcgccgtgcactgccacttaaagaaacacattttacaccattgaaatttcattcttaaaatttaaaaacaaattttacaccattgaaaaa

SEQ ID NO: 94708 - DNA, 249 bp, Heterodera glycines
cactgacccctaaacttctccggccttttcgggtcgtcgtcgctgcgaccgttttgttgcttcacgatgaaaacgcataaggtgttcactaaattggcgctgaccggcgaattgcttcttacaatctgtgcgacttaaatgaaagatgttataatcgaacctatatccgcttatattatccgcattacttccaagtaatttgccctcctctattgacgacgaacatttcaataaattgacacaaaaaaa

SEQ ID NO: 94709 - DNA, 265 bp, Heterodera glycines
acgtgcaaccctttgtccagtaaacatatgccgtatacacactatcctcaaggtctcccaattcaaaatgggtaatgagtccacgtttgcgcaaggaatactgtacgttatgaccgaaaacaaaagaggttatggtggacatacgaatcctgattgattccgaaaatcttagacaacaaaaaacattgtactgcggatggaatgagttgactgctgacattgcgttcatatagctagcaagcgttgtaagcacttcgagttggga

SEQ ID NO: 94710 - DNA, 545 bp, Heterodera glycines
aaatccattcactaagccgccagcattttatgatttcatctcggcatatttgataaatcattcgttttaatttttgataaattcctaaaatgtctgaagagcaatggagcggcgagtcgagcaacagcaacgaatcggagggagtgcaccacagagaggacccccattttgagcaggtcgaggaccaaatccgcgacattcagacccaagctgaccgtttgctcttcggttcagtatttttgcggcggcccaaaggattggctgaaaatgccgtcgtccccgaaacgccgtcggaagtggcggatttggaggggacaacgcgccaaatcgcagagacaatcgaacgcatcgacgatttggaggagaagctgagggaattgttggagcacaaagacaacgcaatttacgaagaccaaattgacgaataccttcgtgaattggaggactcgcgaacgttaaataatcgtcgtccgcaactttggcataggcaatcactttgcgccgttgtttagccagacaatttgacttataatttcaaatttttg

SEQ ID NO: 94711 - DNA, 243 bp, Heterodera glycines
tcttgaatcgacgtggcagaagttcaagcagcaacacaaaacgagatttggcacgcaaagatcacttttttccacataaatttctgattttttgtggcgtaagcaatttggaggaccggatattttttataatttgtggacccaaatcgcggaattttacccaataagcacataaatcaccttctgtttgttacttaaagcaattctgataataaaaaagaaaaaaaaaaaaaaaaaaaaaaa

SEQ ID NO: 94712 - DNA, 366 bp, Heterodera glycines
atttttgcatatttttgattatgtccacatcactgaagcacagggattttgtgggtgaaccgatgggcgacaaggaaatcaccgctgtcgccggaatcggcccggtttacggcaaaaagttggaggacaaagtaaaaaaattcacggagttttcgggatcgttaatctcgaattttcaaccaattcaaatccctgaaaaagggtccatccctttttggattttttcgggtcccaaaaaagtaaaagtgcctccaattgttaatttttgttttttttttcagggtttcgaccaggcgtacgtgttgtttggacagtttttgattctgaaaaaagacaaggaattgttcacagaatggctaaagggag

SEQ ID NO: 94713 - DNA, 489 bp, Heterodera glycines
gctaaaagtgctcaaattccttaacatcgacaaattgcatcaatcagcggaaatttgtgagcagcgagagacgtcggaacgtctgaacttggaaagtcggccattcattcgaaggaacgggtacagccaaagtcgaacaacagacagcggacgcacagctcggaattggcctttgctgacgacagccgtaggaaacacgaaatagcacacactttgtagagaccagcagagggacatacaccaagagacaacgcaaaaagcacaatgttctttctggacgataagaaacgaatgggagggagcaaatggaaagaattgcgccacaacggacgacggacacaaaatgccaaaggaggggccgaaaatggcaacagcacggggagcgaagaatttgaagcaattagcctttgaggttgaaagatttgttgcggccaatttgactgatgcgaatgagcggcagtcggcggagcagcgaatggttgttgcctt

SEQ ID NO: 94714 - DNA, 488 bp, Heterodera glycines
ttctgttccttgcgctgctcatgaagacaatgttcagcaacggctttgttgtccaacagcaacaacagaattttaaggaccttaatggatttgctgacaatgacaaacaattgccgcctttacccgctgttcaattggtccgttcgcctgccaattcactcgacgcttcccaccgattgctttttgaacgattgtcgtcggaggcaaaggatcggtttgcgcacaaacaaatggcaatgggagaagcgaaagaatgggacgaacggcgaattccgcgccctcagcgtcgttggctaatgcgcacgacggaacttaaagagggaagcggcggcgacaaatacgtgaaaagggtggtcagcgaaagcgaactgaacgcactgctgaagaacgcgtggctgggcaaaaagcggcgataaaaaagggggagaaatgagaacggagcaaacgtgatttgatcagagagagaaagagaggaaggaacacgaaca

SEQ ID NO: 94715 - DNA, 55 bp, Heterodera glycines
tcgcgccctatcaacgctatggagtcggaacacttctgctctaccacattttctc

SEQ ID NO: 94716 - DNA, 300 bp, Heterodera glycines
  unsure (1)..(300): unsure at all n locations
cnggatgaagctaaatgcgtaggaacatgcatctgaaaggtgcaccaaatgatggaaaaacaaaaatattatttagattgatttgccaaaatgttgtggtgacatgcagttgttcgtcaatttgatcagaaattcgcgcacctccgcccacttggcaccggtccaacgagaacagttcccgtttgatcatgtgcacgtcctcaatcgctttttcacacatttgccctttttgatcagtgtccaccgtgttggcaaaattgacaatgtaactggacataaatgttgccacctgttgaaaaa

SEQ ID NO: 94717 - DNA, 259 bp, Heterodera glycines
ccttttcccagtgggaccttccgtcgatgcgtcccctcccccttcctatgaaaatgcacttcgactgcccgcctttccattggcttcttcggcccctcctccgtacataaatgcccctttccgagtgccaaaaacaccaaaagaacgaagggagcaaaggagttgacaaagaagacaaatatgttaataatatcattttgggtgaacccctagtttaattcattcaaatgaaaattgaataattttaaaatgcaaaaaa

SEQ ID NO: 94718 - DNA, 393 bp, Heterodera glycines
cttcgcttctgtcattggctggggttactctgctgtgcactcattcaatttgttgttctattggacggacttttggacgtgcgtcaactttcaagcggatcacacaattgtgccgttgatcacttttgtgctcagccttgtcttggcgtgttcgtccatcttcgagattgttcttcacaaattcgtgctgaatgatgtcgacacggaaagtgacaatatgggcattcatcagaagcagaagaacggatgtgcctttgtgtgaacaatgagcagagagacgagattgaaacgatgctggtgccaaaatatgattgatgatattatgataatcggattatatattgcttggtaaattgttttactccaaaaaaaaaaaaaaaaaaaaaaaaaaaa

SEQ ID NO: 94719 - DNA, 414 bp, Heterodera glycines
cgttggctctccttcaaagccgctttattgtggacattttcgcggggagtacagcagaaaaacaaaagccatggccaatggtccgttctgatttcctttttgatttacgaaatcaaagatgcttatttggcgcatattcgaacccttcgctcgaattctcttccgcacattgtcgagacttatcgcttggaattccatcgccgtaaaaaatcccaagcccaaaacgccaaacgcgcgattttgaagaagaaaaagattatcaatcaaatcgagggaaaatgacgggggaacggtcagctcagaatcagaagatttgattcaattgtcaaaagtgcctttctaatgattctgttgagttgattttcttttgtttggccatttcgctcgatcagtgaaagattggaataaaaaaaa

SEQ ID NO: 94720 - DNA, 621 bp, Heterodera glycines
catggcaatccgaagcgaattattatttttaagttgtttatttttaattgatggccaatttcaatggaaacgccgacacatttttgtgcagagacatcggagaatttaaggtaatttcagagttttgactaagttaacaccagaaatctgataaatggatccggaattttttgacaaatagccaagcgaaagtttgctaaatgagtgggattgaaattgaaaccccaaaaaatgagacttataaatccaaaatgcctttttcttcacatttcccttccctttgccatttggcgtgtcattgacaaattgcgggcggcggaggacaaaataatactgcgactgaactgcgaattgcccaccaaatcattctcaaaacaattggacaagcagcgaatttgcacggacattcagaaaagtctgttcgaaactcggaaaatgcgcgaacatttgttggtgcggtgtctccaggaaaacgaagcgaccgccgaacgatgcaaagaaagcgcagaaaaagcgacggaagggaaaacggcgaaagcaaatttgcgcctcatcagaacagaaatgactgtggaagagattgtgcggaaccaagcggacacggcacttcgggagaggtgc

SEQ ID NO: 94721 - DNA, 475 bp, Heterodera glycines
gtgatcacagatgacacaacagaggcggaagacatggaaaaggcaatgaaaattggccaaacttacttttggtgtaaactggtgacagaatggaaatgtcaaaataaaaattttaaaaaaaaaataatcacaataaaaaattgatcaaaatttgcgaaaattggaaagtgaaggcaattgcggcgaatgcctatgtgaaaagttgggtgtgccaaaaaaaacaattggaacaagctgaagttggtacaagttcatcaggagcacaaaatgtggaaatacaggtgtattcatgcctttgtatgaagccaaattttcaaatggtgaggcaaggcgaactgcaaatgagctcagcaatggaagtaatcaaaggagtgtaccgggacttattcggctggggcaatggcaaatggatgcaaattaagatgggactggaaagaaacaacttgtggagcatgactacttatttgtttgataa

SEQ ID NO: 94722 - DNA, 505 bp, Heterodera glycines
tcctgctggtgatggctttcatggcattgctcgtcgtccaatgttcttctgctgcagccggtgatgtttcaccggctttagataatcaggaggaaaagcgagtactttccgccgatgaatcgggaccactacaaaactttcgtactgtgctggaaggacgtcacaaacgaagtttaatgggacgctaccgaaactcgacgggtcgaaaacgaaattcgaatggacgcaaccgaaattcgacgggtcggaggcgaaattcgacgggtcgaaaacgaaattcttacggacgtaatcgaaattcgaatggacgcaatcgaaactcatttggtcgtggcaaacgaagtcctatggcctttcctcctgctgctgacaaatgagaaagccaaaagggtgacattggaccggctaaatacaaaaaaaggaagcgaaaatgatataaaaacaaagtaaaatttatatggatgtgaatataattaattatttaaatggtgattatgaattaaaa

SEQ ID NO: 94723 - DNA, 454 bp, Heterodera glycines
ccactgactatttcgacctgttaaagtgcttggatttcatcattctgacgaggactaatttgaccgggctgaactcgcgggcaggccgatgtgctgtatgcgagatggacaaagtcagcctctcatgccaattggcgtgtcgaagtgcgcttttttctccgactctcagccgcaataaaaaacagaagcgcattgaaatggtttgccattggggacacggagacgaaatccgaggggacagaggagtgctgaactgtctgaagagtacgcaccattggttggcacaaaaacaccagcagctgaacaactaacagaacaaagggccgatctgtcgcaatttgaattttaatacggtagcggaaaataattgtgatatacggtagcaaattgccaaaccgaaaacgcattaaatgcagaaaaaaaatccttttgttctctttccaatggatgttaa

SEQ ID NO: 94724 - DNA, 458 bp, Heterodera glycines
ctatgtttctggcgatgtgtctgctgttcgcagcggtgactttggcaacttcaaatgacaacgaagaaataattgccgacgcaaataacggagacttggcgatgactgctgtgaatgcaactcgtggaatgcgcttgaagagatatgcttcgtgcaacacccatttgagcttgtgtaaccagttcatgtgcaaccaatgctgcaatggatgtaacagttttggatgtttcggttttatgtgcagcgattgctgcgcataaaggggatcaaagccggcgggctcggaaatccgctgctgagcaacagagatgaaaacgcaatgacggattacagtgttttttggccccgctcctcatgactttacggattgtctccatctttttaaaaaaatcgtcaccaatttcggattacagtatttccgttcttgaaaacgcaataataacaaatgacaccaaaca

SEQ ID NO: 94725 - DNA, 554 bp, Heterodera glycines
tttttctaccgactttggtcgtcgtcagcgcagcaactgtgcccattctgccacaacaattgctcagtgccaatgatcaaaattcaaattcattaccaaatttaacaaatgttcttgctgatgaaatttcgctgagtgccattgattgtgccgcgttgccaccggcactttggtgtaccaaatttgtccgttacaaatgcggcaccagtaatttgtgcacaaagcatgacgatgccgtgcgttacaaaccgttgcacatcactttgctttacgaaagtttatgccctttttgccaacggttcatcagagacacactgttcaatgtgtacaatcgcttcagaacacacattaaattggagctggtcccttatggaaacgcaaaaacaaatggtactcatttcacgtgtcaacatggcacagaagaatgccgaataaacaaatttgaatcttgtgccatcaattacatgaatgacccaatgccttttgtgtactgtttggagacgttactttatgaaaatgtgaaatttgatgacgcaacgaaactttgcttcaat

SEQ ID NO: 94726 - DNA, 524 bp, Heterodera glycines
gcccatttttctgctctggacttgctatatttttcttgtccatcatcttccccattatgcccaagctgctaatgaaaatcggctaattaataatcatcatcctccccaaattactaatgaaaggctaattaagaagttgtgttttggaaattgttttaaaccgttcacagttcaagctaaaaaaggtcaaaagtttttgctcgagtttgaaacacagccagaaaaagaaacgttgaaacaatgtgcatacattagcactggatggtcaggattagaagactccgacattatcacttttgagaataaaaaagaagatattttgggcagagctagcgtacatttattgcgtgaagttggtgcaaatgctactgaattagaatttccggctggaatactgcggtgttacatcattaatcgaatcagcggtgccgtgaaagtaactgatttcccgtacccgcacggattagcatgacaaaagaatgcattttttgcttccgatgaatcagttttctgatcgtgttgct

SEQ ID NO: 94727 - DNA, 274 bp, Heterodera glycines
aaaggggaggagaagcgcctttcggagcaccgccgtcgcattggtggcgaaatcgacgcgaccgaacgaagtgcgaattccgccggtgtttccgattcgttttccaaagatgccgaagaagagaaggccaaagacaaggaagaggcggtgaaggaaatgctggggcagctgaaaaagcttggcaatgtgttccttcgcccttttggtctatcgacggacagtttcgaattggtgaagcagtccgatggcggagggttcagtgttcagatgaaaa

SEQ ID NO: 94728 - DNA, 133 bp, Heterodera glycines
tttacttgggtcagttgagccgcccgaattgagagaagtgctgaaatgatgccgaccatctcctcattttcgatgaacgcattctcatcattatggaaacttttgcgcttaaataaatacaaatagaattaaa

SEQ ID NO: 94729 - DNA, 521 bp, Heterodera glycines
  unsure (1)..(521): unsure at all n locations
caacattgtgccgtttcgtcgtcgttgctccgttcgtcttccaaattgtgccgtcgccgagttgttttcaaatgccttggttgtcttcagtgccggtgatgattcggatggtcgtggtcgtgttcgtctgtgccgtcctttccgctgctgctgctggttctgatccgagcgatgtcattgacatcgaaagtcttgaactgtggcgtgtatcgtgtgcgggccgaaactgtagccgccgttgctttggatgggagaatcccgttttttgtgccgactccatccagttttgtaccancggagtggcatggccgatatggatgatcgcttcntcctttgggctcaattntgtccttattgtccttgtccttgtccatttggctgtggtccgtgtccgccgagacttgccatttgcctcaattagggtctgtgaccaatgtcagcgccgtgttagtgttttgtccagtcgtattgtctcctcaatgtaatttctggttcatcgttggcacggccttaacacatca

SEQ ID NO: 94730 - DNA, 561 bp, Heterodera glycines
acttggccactgttattattggtgccgtcttgccgatgttccgtacttggaaggttttgaagagtcgcaaatcaagacaattaattcctctctcaaaatattggattgttttcgcagcatgggtttccttcgaatctgtggccaatttgttttcgttgccctatttcattccggcttactcctttctgaagttttctgttgttctttacacttatctcgtcggttacgagcacatttaccaaaaagaatatgagccgaaccgagaagttttgatggcttcagctcaatattacgcgtcaaaagccactcaacatgcattagcttatgcttggaatacgatcacttcatgctctccaagatcgaaggcaattacgacccaggcgaatggtcaaaggaatgccgaatttcgctctgttgtacgaattgttgaacttgaggaacaggaggaggatttcgtcgatataatagagcaagatgagcaatttgaggacttagaggccgattctgacaacgaaatgacatctaattcgccgattcactgatttacgatctctcataaca

SEQ ID NO: 94731 - DNA, 464 bp, Heterodera glycines
tccgtttttgctataaaaatgaccgttgaaactgtcccggccgatttgcgcaatttgcgtgcgtgtctcgtgtgttctttggtcaaatcggaggaccaattcatggcggatggctgcgacaattgcgaacgctttttgaatatcaaaggcgacattgacaagtgctacgagtgcacgagtgccaactttgacggaataatcgccgtttgtgagccgaacgactcgtgggtgtgcaaatggcagaaaatcaaccgaaaatgccctggcatttatgctgtatccgtgtcggggaatctgccaaaacacgtggtggccgagttaagccacatgggcatcaagtacaagtcgggccaacgcgacaaatcggcgaaatgatggacgaggaggggaagagggacagatgttgcgacaatttttgtagttttatacagaaaaacattatttattattattatttactattg

SEQ ID NO: 94732 - DNA, 297 bp, Heterodera glycines
tcggtacaaaaaagcgactcggcctctttggcttttggattcatcgccggggcgggccttgagctgttcaaaatcaacttctcatgttttggcatttcattctacaaagtgttcaatgagaagcagttgtcccaagaactgacggaattcgaagagaaattggccaatcggaactcgatgttgcgcagccgaattgatcagtttcaggacccaaaatgatttttgtttataatttaaaaaggataaaattggaagaattaaaaaaaaaaaaaaaaaaaaaaaaaaaaaaaaaataaa

SEQ ID NO: 94733 - DNA, 492 bp, Heterodera glycines
  unsure (1)..(492): unsure at all n locations
agaaatgcactaagaaactatcaaagttagctactgtccatgtggagaaaagtgaccaaactgcgaaacgagtgacaaatgaaaacaaattgttgagttcgaaacaaaaattcaaacctgcaagtgaggaatttaagaaatgcagaatctgcaataagatgacacatcatatttcagcgtattattgtcaaaactgctcgtatcagaaaggcatttgtccgatgtgcgggagaaaacaaattgagacagcaaaatacagacaaagtctgacataaacttgtttctgatacctattcaaacgagatattttgtattcatttgaaatcgcaagttttcgtatttcctttgttagtagatcaatatttttgtcatattggtaaaaagtttggttgcggnnnngnngggnnggngnggngngggnngggggaattnggactttgggtctttcggggcgagtgctggnnctgtcctcgcgtggcggccgcccccgct

SEQ ID NO: 94734 - DNA, 512 bp, Heterodera glycines
tcactaaggatgaggtcgccttgcacaacagtgaaaatttgacttggataattatgaatgacaaagtttacgatgtcacaaagttcctgatggaacacccgggcggagaggaagtgcttctccaatgggccggctatgacgccactgaagctttcaacgacgtcggacattcggccgacgcgaaaaagatggccgatgattatttagtgggcgaattgaaggaggacgaaggccaaacgaccgctggggtttcactgccggaagaggcgaaaagggacgaaccgacggagtcgtggcggcaaattctgagcagtccgacttggtccaactttcggattccggttgcgctgtcgttgggcgttttctgtgcgtataaattgggcacggccatctacagacaaatggcctcctaacaaatttcatatttacaccggttttttgttgtgacaaaccgatttagtatttttatgtcatttaatattggttttattgcatttaatcagtagtttgaa

SEQ ID NO: 94735 - DNA, 434 bp, Heterodera glycines
atgcaccaaagcgacacgggaagttcgactcctggagactctcctgtcgaccgaattgagatcactggtctaatgagtcttgccgaatttgtagaaacgatcgaggctgaattccccgaacaaattcttctcaagttgtatgctgattttcgtggccataatttgaaaatgcctgtcgaagttgacgaaccggatgatccgcaattcgaccgtttcgatggtcaggggcatctgctggtggaggacatcgtgtttgatatgatacacaaaacgaaaagggaccatcaccacgatatcccgtttaaggcgcagtatgtgaacgattttgttgccaacgtcagttaccgattttagtgcgtcgttggacaaatgttgttgtttcatatctctatttccgtatttaaaaatgaaataaaattgacaaacttaaaaaa

SEQ ID NO: 94736 - DNA, 575 bp, Heterodera glycines
aagtgatgagaaattttcttcttttactatgttttgctataattttgcaagttctttgtgacgaacatgaccatatttacagtccaaatgctgaagttgtgctttggatgaatacggttggcccgtacaacaatcgtcaagaaacatacagttatttctcgctgccattttgtcaaggttacaaaaaaacaattgagcattaccatgagactttgggcgaagcactgctcggtgttgagttggaattttccggtttggacatacgcttcaccgttgatcagccaaaaacggagtattgcaacacgaagctgactcctaccgacatcgacgcactgatttttgcagttgaacacaattattggtatcagatgtacattgatgaacttccactatgggccctggttggcgagaaggacaaagctatcacttacatttacacacacaaaaaatttgaactcggctacaatggtaaacaaattgtggtggccgacgtggtggcagaaggcaagcgcgagttgaagccgaacatggtactttacaactgggatttttctacaaccaaacttttgaaagct

SEQ ID NO: 94737 - DNA, 639 bp, Heterodera glycines
  unsure (1)..(639): unsure at all n locations
cttcgtccatcatcatcattaccttcgcggttaacatttctgctgttctttttactggtcaatttatactacctagtcaaatccgcaagtaattctctcatcaatgacaagtgcatgacttgcaaatttttgtcgaaaacttttttaggaggactggaaaaaactgagaaacttcattttggtggcggaaatactgactgggaagagcgaaatttgggcagatttaaaactagtgaaactcgtttcgttgaaatgttggactacgtttgcaaaagggattcatctgctgagattggatttagtggaattaaggatttgcaatttaagtgtcattctctgctggaagcccatgaagaactgcttggacaatggttttttgagcatcaagagaacggaccaactctcgggaaatatctttgcattgagaatcttaaactttgttgtgacgaaggctattttggctcggattgttctccatgtcctggaatgaaactctcgggcaaaccttgtttcnggaatggacaatgccaaggcaacggaacacggaatggcaatgggacgtgttcttgccatgcggggtatggcggcaaaatgtgcagccattgcgattcgtcttattttgcagttcgcaaaattgtc

SEQ ID NO: 94738 - DNA, 432 bp, Heterodera glycines
actcaaaaaattgaaaaagcaatgcgcaaaggtgaaaaagatgaataaatgcgcaaaggcaaaattcaaacacaacagcacgaagtacacatgcgcatgggattacgtacggacgtcgccaaggggagggatcggctgctgttatccgtccgtggaaagctgcgaaaatctgcgcagtatggggcatccaatttaagtttttgggccaaaatcatgcagcccgtacccattctcgaacgatcggacacggtggtttggccagaacgcttttggtcctcaaccccgcgacagttgtcgttcagggcctgacaggataaattttaatccgatttcctcattattggctaaatttgtaccaaacatttatttccatttcacttttctattgattgttgcatttttaatggattaaaatctgattttttaaaaaaa

SEQ ID NO: 94739 - DNA, 582 bp, Heterodera glycines
  unsure (1)..(582): unsure at all n locations
tggagccctccgacattttgtctcaatgggtcgtcgcttttcctggtcatttggaagaatcgactgtcaggtgggaacattccgataaacggacagttgccggccgttcgccaacagcaggaccgagagacactgttcccaatgtcttgtgttatcatcttacctggtcagcgagtgaccatcgacaaaatgtccgaatttatttcgcgcgaacttctcagtgccaatacacagcctcccgcccgtcgttatgctgccattgaaatgacaatgaaacagattggtgctacttcgtcgggttttttggccaattttggtgtcagactcagtgccgagtcaaccgttaaaattggagtccatcaaatgccaaagatcaaattcggcaacactgtcacctctttccaggacagagttcgaaaaaagcaaacaattttaaattaatctttttttgaagatcaatccggctgttcggtttttggagccctccgacattttgtctcaatgggtcgtcgcttttcctggtcatttggaagaatcgactgtcaggaactntgtaacgcanatgatacgcatgggccaaca

SEQ ID NO: 94740 - DNA, 154 bp, Heterodera glycines
ctttctcttcctcttctttttctccaatctctcctccgctctctttggcacttttttttgtttcacttttggcattttcctctcccattttgacattctctccctttttccttctctcatccctttcagttcctcccattcattctttggttcg

SEQ ID NO: 94741 - DNA, 518 bp, Heterodera glycines
gttttggcacgggtggcgaaatggatcaaaaagaatgcgcaatgtgtggtgagaaaatttcgctaactgatcgtctgatggttgacagagaaacaatccataaaaattgctttgcttgttgcttttgtggggcaaatttaaagcccggtcacgcggccatggaactgtcgttctacaaccgttatggtccacgatggtactgctcgggttcggcgggcggttgtgcgttgacgcccgtttctgaaaaagatgccaaacttaaggagaaagggatgaacacgaagaagttcaaaaaggcgaagaaatgagatacgtcacgtacatacaaacaacagtattcccagactgtaatatttaaaattgattacggtagtgatgatactatatttttcgaaatcggactttgccaagaatttagttggttctctttcatttatgaatatactttggctattgtaatttgatgataaattaaatccgagtttttataattaataaaacaatgcaaaattaaaaaa

SEQ ID NO: 94742 - DNA, 465 bp, Heterodera glycines
catcctgcccaacgttttgccgttcgcccaattgccaaattcgtcgcttcgaattgcacttgggcttttggtgctcattttgctgatcggattcttcccctccaccgacgccatccagtgttattcgggcaaccaattttccatcgtcgaatgtcccagcctttactgtatcaagcagacacttgggctggatacggtgcgctattgtgatgggacgggcttttcctcaatttgctccacctatcggacaatcgattcttgccaaactgtgccgagtctgggctatgtttgctgctgtcctgatcagttgtgtaattcggcgcagaaagtgccaatgaatgccctttttggcatcactttgctcggcatcgctttggcttcattaaacgttgccatgcgaacaaccgaaagaatgttctgatgaatgggcaagccgctcatttgagaagttccatccacttaaga

SEQ ID NO: 94743 - DNA, 137 bp, Heterodera glycines
cccgggccgagtgatgatcactgatcagaacagcggaaatgaattgattgattggttattgatgcgattatgtgacccaatgttggcctttgctatttaaaaattgtatttgattgttgctcataagttcataaaaa

SEQ ID NO: 94744 - DNA, 245 bp, Heterodera glycines; identical to SEQ ID NO: 83432

SEQ ID NO: 94745 - DNA, 337 bp, Heterodera glycines
tcggtgcaacaagccaaaaaagtggccgaacagctcgagcgggaaaagcgcattcgccgtcttccaatgtcggaaacaattaacgacttaattcggtacacccaggagatgcagaaagacgactatttgttcaatggtttcccaaccgacaagttgaacccgtaccgtcccaagtcaaattttcaatgtctcgtcatctgacggattttttccatgtttgatgaaaagaatgatttgtcatgatgtgcctacaatattataattttcgtagtttttttttatgctttcaacaatttcttttggatcatgttttggataaaacaatgctgcttcaaaa

SEQ ID NO: 94746 - DNA, 524 bp, Heterodera glycines
  unsure (1)..(524): unsure at all n locations
cgtctcccacgccaatgccgtcacaaaaatttcagcggatgtcctcaaaatgaactttatgaagaagacgatcactcgcattgagcgtcaaaaaaaacagaatgaaagggaacggacgaaggagcaaatttcggcagggaaattggaagtgttgccgcctcggcattatccgacagtcgaacacatcgacgacgacccgaacatcacattgggcggagtgatgaccgaatggcgttactccgttctcatggacaacctccgctttggccgcttctcatttaaaggacaaaaccccgaagttgagaaatggatgcaatttcacgaacgaagacgcaatggaatagaggacgaagaggaggaggaagaagaacgggaagaggaaggagaaaagcgaaggagtcgagaagaaggcgaactcagtgacgaggaaggggacggaagcatagtcaaattggtggagaagtgagaaataaggccgaaaaagaagggacggacgcanaaggcaaacgcanaagatgggaaaa

SEQ ID NO: 94747 - DNA, 446 bp, Heterodera glycines
caaattaaagtagatcaggaagaaagcaccaaactttgggattggccattgcaatcccatgacgaacttgtgtcaatctacgatggtcgtgacagatgggaagttggcttggacaccggatttttcacgcccaacgaaatcgaagtgaatcggatgggccaaaatttgttcatccactgcaaacatgaccagcgcgagggcatgctgggcacaacatcgcgtgaggttcagcgcaactataaattgccggatgatgtggacccgaaaagcatccgctccaacatcacacgtgccggcattttgcgcataacggcacaaaagaagcgttgaattggcgcaaatttggacaaaaatgccaaaattgatcaaaaaatggagtaataacatttggaagaacataataaatcaaatatattaatcattttatgacataaacacatgtaaaa

SEQ ID NO: 94748 - DNA, 544 bp, Heterodera glycines
caagaagcgccttttccgagaaacgatagaattgcctgtcgctctgaaaacctactacccactgaagagacaccctgtcgtaacgcaactgttatactgaagcacatcacctcccccgaaaacgaatgtcggcatccttggcaagcccgaacctagcgaccatgccaacgcctgcgcaatctcattcgtgactggacacgacctgaagaagctcatcaaggacagcaggctgatcggaaacctcaacaaaagctactacgctttccttgcctccgaatcactcatcatacaaatccctcgtattcttggtcccggactgaacaaggctggcaagttcccaagtgtggtgtcacactacgacatgctgaacgcaaaggtggatgaagtgaacgcgaccgtcaaattccagatgaaggaggtgctctgtcgtgcgggcgcaattggtcatgttgagatgtcgcacgactaactggtctagaacatttcgttgggcgtcaacttcctggtctagttgctgacgacgaattggccatatgtgcgctcg

SEQ ID NO: 94749 - DNA, 375 bp, Heterodera glycines
gggccaacgaagaaattctgcgaggtctgtcggagctggattgacttatttgaggataaaattcaagtggaaaagttgatgatgcacaagcgttgcttcgtttgcgcaatttgcgactgtccgcttgagccgggcaactgttcccgagatgacgggatcatctactgccaattcatgtgcaacgaccgtgtgccagtgtggttttgttctgcccatatgatgttgggatcgggcgaaaaatgccaattgttgaaggaaaaatggatgaaggaaaatgaggaaaagcaggaaatatgacacaacaaatgattaatgcatttcattagtcatgtgatgacaaaaaaaatgtaaaaatttttttgtaaaaaaaaaaaa

SEQ ID NO: 94750 - DNA, 352 bp, Heterodera glycines
catctcgacgcggcggtggtaataatgttgagggaaaggtttacgttgacggtctgccttaggacgcaacttccgaagagctcgacgacgtcttccacaagttcggcagaattcgtaaaatttgggtcgctcgtcgtcctccaggttttgcctttgtcgaatttgaggacacgcgcgacgcgcaagacgcagtgcgatcattggacggaacacgaatttgcggtgttaaagcgcgtgttgaactgtcaacgagccgctctcgtcgcgatcgggatgagcggggccggggaattagtcgcgagaatgaggaaaaatcacgcataagggaacattagtcacccaaaaagaaaaa

SEQ ID NO: 94751 - DNA, 302 bp, Heterodera glycines
tggtagaacaattttattatgatgttcaaatggccttaaaatcgcatcaaaaaataccgattttggtaactgtatctgatgaatgacatcattcaacattgtgtagtgcctaatggaggcccattgtgcagtggaattacttgattcacagttgaaattcttttgaacacaaatggaaatgccgtttggaatgcctgtcgatattccctactaaaatttatttgaaaataattttttattcaaatatttataacacctcgtaaagtataaaattggcccatttgatgccgcaccaatgaaaa

SEQ ID NO: 94752 - DNA, 369 bp, Heterodera glycines
ttaccgaaagaattgaaaaatggaaaaaatcgaagtaaaagaaacagatatgaagtcaaatctgatcgaccaaaccattgaaattgtgcgcgatggcctgcaaaaatatggccaagataaagacattgccagcttcgtcaaagacacaatggagcagcgcttcgccggcacttggcattgtgtcgtggggcgcagtttcggctcacgcgtgtcctatgaattggagtcattcacgcttttcaaggtcaaccaacacaccgtgctgattttcaagtgcggataatgggagaggaaaacaaattatatcaaatgctaatacaaatattcattttgtatatttgtaaaatacatttaaaaataaagaaaaca

SEQ ID NO: 94753 - DNA, 537 bp, Heterodera glycines
acttttctcttatttaagtctttgtttggtcatcgggaaatgcgaatactaatattgggcctcgacggtgctggcaaaacgaccattctttactggctgcaggtgggcgaagtggtgacgacaattccgaccattggctttaatgtggagcaggtgacttacaaaaacttgaaattccaagtttgggatttgggcggccaaacgtcgatccggccctattggcgctgttactactccaacaccgatgcaatcatttacgtggtggattctgcggacagagaccgagttgggatttcaaaacattgcgcagtctttcaccgcgttgagcaacctcaagtccattctggtggaacagcttgccacttccgatggtcaagtggttgagtcggctaggatgctttgccaccttcaaaaagtgccctattttcgtctgactccccaattgcgagttgacattgcacttgacacggtggacaacgggacgctaattgacatgctgtgggacgcaaaagcatatgtgcgagaacaatgtgccga

SEQ ID NO: 94754 - DNA, 523 bp, Heterodera glycines
aaaaaatgtcagctcaaaatgagtttatgcgggcggccgttgaggagggaattcggggcgtacaaagcggcgacggtggtccctttggcgcagtgattgtcaaaaacggcaaaataattgcccaggggcataacatggtattgttctccaacgacccaacggcacatgccgaagtgatggctcttcggggggcaagcaaagtgttggacagcttcgacctgagcgggtgcatactgtacacgagctgctacccatgtcccatgtgtttgggcgctgttttgtggtcacggattagcaatgttttctatgctgctgcgcctaccgatgccgcttcggtcggtttcgatgatcagaatttccacgaatttgtctctaatccgaagaaatacgaaaaactgatggcattggaacatttgccagtcgaagggcatatgaaagtgttcaaaatgtgggaacagagggacgagaagagaatgtactgacaaagggccaaccaatttattcaatttacatttctcatttg

SEQ ID NO: 94755 - DNA, 338 bp, Heterodera glycines
cagcaaaaaattgttaaaaacgcgcgtccaaaatctgatcccaatggcattcactcccaacgcattgaacactttcaaaagtgacgcatcgatgagcaattaaccgaatgaatggacgcgcatttgaacagtgattgatcaaaccaattagagagttaatgatttaattcaatttaatttaaaagcaccgatccaatccccgaaatgcactaaaagcaatcgtttaaattagagcatgaaaatgtttgttaaaaattcactaatttttagccatttatttttggttttattgtatatttctttttccaataatatgcataaatatcctttgtttgaaa

SEQ ID NO: 94756 - DNA, 235 bp, Heterodera glycines
atcgttgcgaagagcacccaccaaagcgaagtcaattgtggcatcggagacgcagctcacttgtcacgtatttgcaaccacgacaatgtgtgcgcaggagagactggaccgtcaaaggattgtctggtacattcaatgccgcgttcgcatggcacacttccaatccaacatcacctctcagtccgatccaatggacgtctactctgattggattgacacttgcgaggcggccaat

SEQ ID NO: 94757 - DNA, 220 bp, Heterodera glycines
agcaccgaccaaagcgaagtcaattgtggcatcggagacgcagctcacttgtccgtcttgcacccactacaatgtgtgcgaggtgaaactggacctgcaaaggaatgtctggtacatccactgccgcgtttgcatggaagacttccagtccaacatcaccgctctgtccgagccaattgacgtgtactctgattggattgacacgtgcgaggcggtcaat

SEQ ID NO: 94758 - DNA, 199 bp, Heterodera glycines
cggggaccaaacggagtgtaaagacgacaatgaattctgttacaatgtgacggcggaggcgggggtgattttcaaagcatcgaaggccgggtgttcatattacagatgcctgatatcccgaaataaatgcatcaacaccgaaatctccggagtgcccgtcagtttttgctgctgtaacactgaagatttgtgctatgga

SEQ ID NO: 94759 - DNA, 460 bp, Heterodera glycines
cccaaattcgccacggtccgctgaagccgctctaacatgagccaaagcccatcataggcggtcacactcattgtcgatgtgtacttggagtgtgtggccatctttttggagccgaaataggccaaatggctatgctgtgagatcgaactgagcagaatggacggacagtttgagttcaaccagtaacagcaggacacgaacagggacaagttcatctgcgagatcaaaaatttggacaaatcgcttaccggagtctacaagttggtgttgatcagtgcggaaggccgtgagaacatcgccacgttcaatctgcccctggtgggcatcgaaaaatgcaattggactaatgtggccgcttctctgacaatggacccaatggtcgtgcgagaagtgccactccaacctctggtcccgatcagataaagcgcaagaatggcggaactcgaaccgatcgatcgac

SEQ ID NO: 94760 - DNA, 183 bp, Heterodera glycines
atctgcggcttcatcacctgctctctgttgtgcgcgaattggtacggcggcaagacatgcttcttcgagggccgacttggatatgccagtggactcaacttcgtcatcgtgatcatcaacagctgatgaagaagcaaaggaagaaaagcagaaaataaagatggatgaagaagccgtgcaaaa

SEQ ID NO: 94761 - DNA, 468 bp, Heterodera glycines
tgctgatagaaaataacacccacaatttgctgctgatcagtccacgcttcagcttcaccaccgacacacttttccttaccgtagtagtcaatttctaggcatagactcaccggctactgtagcgtcaaaagactacaacaaaacaacaattttatcagctcccggcgatcattgacgccgctaggagcaaagatcgtcttctcggcattcttcgttcttcgtccgttcttcgggcaaagatcgcttctttcaacatgacagtgccagcatagcagcagcagtgccatgcgccctctgtgccgaaaacactgacaggagagcctttgctggtcggtcttcgctccgctacgaactttggaggaccaccagcagtacgtaaatttgaaaagcattgcttttgaacaaatgttcaataatgtaaagatgtcaagcatttaaaggggattttgattttgagtcaaattaaaa

SEQ ID NO: 94762 - DNA, 274 bp, Heterodera glycines
caacctgcttccaaatgttgaacaaataccgtaaagcaattcttaattgatccaatcaatctaatgtaatgacggcgagaagctcacttcatcttcggccccttgggcacgttcattgcgatcagatcaaatcccccaaccggcatcggaggcacttcccattgctcaatctctgcgcgcattttcgcatctgtccccacatatttcatcagttccacacactcgcgtttgatctgttctctcatttctcctaaaaaaacacaaattctgaaaa

SEQ ID NO: 94763 - DNA, 510 bp, Heterodera glycines
gccccaagaatatctacaagaagtttctttgctgtttgtgtggccaacattttgatggagttggtccgttggagtcccatttggccctggtgcatgtgttttacttggcctatgaatgcgatctctgcaaagatgcgttgtttccttccgattttgcgttgcgagagcattacgttaaaatccacaacaaaacatgttttactataaaatatcgcgtctctcctgagttggaagagcgacgcgcattgctccgtcgtttggtcgatcagtcaatgcataaaacgggaagcggcacaattcagcagaacaaagcaccgaatttggagccgcccaattcatacacttctcagctgctgatggattgcacgtcactgctgcaaacgcaactgatggccagcaatcactttctgaacagtggcatcaaaaaggagaatgtttgggaggagagaaacgacggcgcaagggtcgaccatttggagggcgaaattgaaggaccaccaattgaggggg

SEQ ID NO: 94764 - DNA, 525 bp, Heterodera glycines
cttgccaaattcacgccatttgttgggaaaagcattcgctatgaattgcataattttctacaaaattcttctctgttgtcaaagcgagtggactttttccacgtttacccaaaagcattctcagtgaatggttcttcttctggcgagcacagcaacagggtaattagccaatggcttgtcggaattgagcttcttcccgggaaaattgtggattccgagctcagaagcgaattgagtcaaatgttgggcaatttcgatgcaaaagttaaaaatgcttttaattatttccttttccatgctgtggaccttttctcagaatatgttgagaaaaatgaactcaaattacggcgatttgactaagaaatattttctgaatctcttttcacaaaaaaggggtgttcgtccggctattgcccaaatccaattcaatgtgatattttatttcttttttttaatgtaattcaatctgtttgtttaattaatgagcttgcaaaaggttaaaacgagcattttgaaaaaaaaaaa

SEQ ID NO: 94765 - DNA, 558 bp, Heterodera glycines
cgccccccgggtggaagtaagcaactgatagtctgctcaataaatggcagggaaaaacggacattgagcagctgaccaggctttttgtggtgatgggcacgccgacggagcagagttggcccggctgggaactgttgccggacgcgaacaaagtgatgttcgacgtggtggagccggccaatgattggaccaaaattgtcccatcagtcagtagtgaagggctccaactgatccgatcattgatccagctaaacccatgcatacgttcgtccgcactccgctgtctacagcatcccttcttcacacaccatccacagtatgaccaaataccgtaccagccaccgttgttggagcaaatgggaggacgaagaaaagtgccggaaattgtgttcaatgacagtcgaagaatggagaagatgaagccagcaacaaacaagaaacaagcgcaatggcacaaaggttaaataaatatctgttttcgactgaaaatgatcagtgatcacataatggtcgattattaaatcggaatttaaaaaaaaatccactaattttttaaaa

SEQ ID NO: 94766 - DNA, 593 bp, Heterodera glycines
gacacatttgaaatgcaattgcctacgatttgagtactgtcaatggtttccatgtcgcccatttgaacttgacgaaaaaccgttaccaaatgaacgcaattgaccaggcgcggctggtccaaaacctcacaaattggcaacggatgcatccgcttttcctccacggacacttcgctttctttgattttgagagattcggccttccccctcccatttggattaatttgcttcgcgagcccttcgatcgctttgtctcttatttttattttcttcgctacggcgacaattttcgggtcggacttcgcagaagcaaagcggggaacaacgagacttttgacgaatgctttcggcgcggcggcagagagtgcgacccaagcgcaatttggctacaaattccgtacttttgcggcactgcccatttctgcagcattcccggcaatgcgcaggcccttcagttggcaaagcgcaatttgctggaccattttctgttggttgggctgacggaacgcatcgaagagaccgtccttttgctggagcaacttttgcccgcctttttccttggcgccggcgaacatttccgcttgctaaatggt

SEQ ID NO: 94767 - DNA, 534 bp, Heterodera glycines
tgcaatgggaaaggacaagaaaggtgattatgacccggacatctacggagattggcaagatgagaagaagccatgtgcctgccattgttcgtatctgcgtgccaaaaatttctaccgagttgaatgtgacttcatgaatcgcggtgtcaaaaggttggcaaatgtcggccgtgttgcgcttgggctgctctctcttccgacaatgtttattcctggtgtaaatatgctagttgctaagccacaagtggactctgtgggacaagacattactcacaccgctttggaagtgcgctacgaatgcggaatttgtggtcaaattgcatacaaaacttacgaaattgtgtgtaaagacgtaacgagtgacagatggggccgttacatgaaaacttacggggacgagcccatctttggcattcgcaccacggaatttgatggcattcagcgagtgtttgatggcatgtggaagaactacgatttcatcaacaacaattgcaagaattggacccgtgatatgatcgggtgcctcagttaaag

SEQ ID NO: 94768 - DNA, 588 bp, Heterodera glycines
  unsure (1)..(588): unsure at all n locations
ccccccccagcccccgagtgtcaaatggcattcgaatgatcatcntcttatcattatggacatggacaaaatactcagtgatatgcgacaacacatatcgaatttgcaagacaaacttcacgtggcaaattctgccgttagcaaaggacaaattgtcaatgagaaaatcacactaatgaaggagtatcaagacaaaatcgcatcattgaactcgtgctggagagccaggaatagaacgcaattagtgcacaatttgcaacaggaaagtcgccaaatcattgcactcgaagaggaaaatcggcagcttcgatttgcactcaaagaaatggaggacggattgcatctgatcatgaacgactatcggaaaatgttttcgggttttatgagaggggaagaattggccgaagtggccaatgcccagcacaaaaaggtatttcttgctggggtgagttacgagcaatactttggaattgcacgtgccgctgagaaatttatggcgatatcagaaaacaaagttgcagaagacgatcaggttatcactcagctgaaactcgagaatcagactctcagggcgttgttccacggatt

SEQ ID NO: 94769 - DNA, 156 bp, Heterodera glycines
caattttcagcgacaagaacaggaggaaaagaggcggacgaaccgaattcgacgaaaaactatgatattgaatagtgaagagtgatatttaccattatcccatcaatttcccctgtaattcttcggataaataatggcgaaaaaaaaaaaaaaaaa

SEQ ID NO: 94770 - DNA, 427 bp, Heterodera glycines
tctaagattatttggcagcacatcattctggtaccttctgttactgctcgaactctacgatactgctaaattatgttattctggacgcaacaaaatgtactcatcgaaacagtgcagcggtggaagttttgatatcaattatgtgtgccaaaaatacacttgtgagggcggacgatcctcatttactttgcggacttgcgcaatgaaatcgacgggttgcatcgcgggcacacgaacttgcagattttcaggcggcaaaggctcgtgccagcggtgtgaaggcgatttgtgcaatttgtgaccaatcattttttgggaccgaactctgatgttgatcatgaagctttggtcacagacgatttaaatattttttagcattttgtaaacttttgaatgtattcaacctttaagacaaattttgagaaaa

SEQ ID NO: 94771 - DNA, 519 bp, Heterodera glycines
  unsure (1)..(519): unsure at all n locations
aattgacgacgcatctcattacaccaacgaaatgctttattcaatttttgccggttggattggcgcaaatgctgctgttaagtcaaaaagtcgcgtggccatcgatcgttcgacaattggcccctttcaatgtgggcctggtctttgcactcgaatggccggcatttcgggcggaattgctgtcgcaatgaatgcgtacggcgcacactttgttctcgccaatgccgacattaatgatgaacgaaaaagagccatgacttatgcgatcaaccatcacttcatcaactgcattggaatggcgttggccggcgtcggtgcccattatccgacgctgacctcgagtatgtttctgatcagcactgtgctgttcagtgtgccttcctatttgttcgccatacgcaatgatcgccgactgcgcgccgtgacgccgtacggcggtgtgttggccatgctcgcttggttcagtttcgtcctttgatcgcttcccanaacanttgcaacaaattcggacggaaaaga

SEQ ID NO: 94772 - DNA, 433 bp, Heterodera glycines
aattcgtcaaaatgcggtgcaattgcgagctcgcactttggccgacttgagccgatcctttgctgtcggcgacagttccccctctccgaatacggcactctcctacaaaatgcgttcttggtcttggcgcaccttccgacagtcgcgtttggacgatgtgtcctacgcggacgattggttccatttcggcacttcctaccgtacttttccggtcttggaaaaattcgaccgtcgtgattacgccgccataccgtacacttattggtcacgggcgtattgcaccgaactgtatccgtccgaccgtactgaaatataccggcgcatttacgagccgtacagagacgaatactcctacaaattgtggaacgcatcacgcagagcactgctcagcagagataatcgactcatgtgaagagaaagaaatattcttgct

SEQ ID NO: 94773 - DNA, 557 bp, Heterodera glycines
  unsure (1)..(557): unsure at all n locations
aattctcttttcgtcaaaatgctttctcccttctcctacgatccgttctatcgccgttcgttgtggcctatggccactcatgttggcaacgtcctttcgcccttccgccagttggagcgtgaactcgaccacttcttcgaggggatgcagcccatgcttcgtgaccatgtcgctcagctgaacgtctcggacaagggcgacctcacttacaaagtcgatgtcagcggcttccgccccgaggagatcaacgtggaggtgattggtaatgagatcatcgtcaacggggaacaccgcgagcagaacgacagcgaatcggtccaccgtcagttctcgcgccgtgtgctcatcccggagggcatccaaaaggagagcatcaagtgcgagttggacggcggtcgcctgttcatcagcggaatgaaaacggctgacaaaggcagcagtagaaaaggacggcggaagtgaagacggactgactgtcggtcgaccgaatgatccattgacattgatctttntattttgatacttttgcaaagtgatctataaattatttttccttc

SEQ ID NO: 94774 - DNA, 409 bp, Heterodera glycines
gaacgtttttccgtgttcgcttccctctttctctccgtcgtctctttggccttcgcttcgtccacttttcacaccgatttttggattctatcggacgtaatgcgaaggaatggcaccgaatcgaacaaaaaccaaatgaacagcggactcttccatggaatacgccaattggactgggcatttgggccaaaacggaaacacttttcggtgttggaggaactccaatccggcgttagctttatggaccgcaatgtttggttcgcccttttgctgtccattggcctcggcttcctttggaacatcgtcgatttatcagtgacggtgaaaaattgcacaaaatacggaaacgggggcaaaaaaattatgccggatgttggcacagttatcgttggaccgtaggccatttgct

SEQ ID NO: 94775 - DNA, 511 bp, Heterodera glycines
ggccaagaattggttagctgagctttttgggactttgtcctccttctgctggtccatcaaattctttgctcttcgaagcaaaattgaaagaaaatgttccctcaatcagtctgatacttttgtgagtgttctgccggccgtgacacaacgccacgacaacgacggacgacgggtcaccaaacacacaaccaatcaaatcctcatccatcaacattcgcatcatcatcatgaacatcattcgtcccgtcacataacaccgttttttcctcatcagactacctcattcactcacttcactacctcctccacccctttcgccggctgatcagaagcattcttcagccgcttgtgtcacttctgctccgtctgtctgatcaccgacaaacggacgaacgaacgaaggatcaactaaaaagtgaggactttgagactgatcgggaaaaaactacaaattgagattggtaatttacggcattttttccatttccctaaagacttcaattttttaaaa

SEQ ID NO: 94776 - DNA, 524 bp, Heterodera glycines
aagacggccaaatttctcagctttttggagcagttcacactgtgcacaatgttccgcatttttggccgtttcgtcggcacttatcccatcgcatttctgatcttctcattgatccttgcttcgctgtcaggcgatcccctgctgaccacagtgatgctgcgggcgcgcgaccggcacagcatgcaccggctccgttggctggacgaatgcgttcggatgcacgactttttgcgcctgaacatttccgccaccgttgggggacagttgactaacgtggtcaccttcgccatcggcgccttaacaccaaccccgggcaaacagttcaccatcctttggctgcacaagtcacaagcggaggagtgacaaagtgatcagagatggagagaagttacagaaggaccccaaggcatcgatagaacagttccaagcagcaattcacagtttccaagcagtggaccgtgaaatggaaaacgaaattcagcaacgaaacactccaatatttgtgaacaatgaactgatcagag

SEQ ID NO: 94777 - DNA, 279 bp, Heterodera glycines
atgttatgacaacaaacagaggcatggcgattggttggaagcttttgacccgagacaacagaaaaaaattgacgcagattacgctcttttcgttgccggtcatgatccaccgccaaagtgcaagaaatatcgcgaggcagatgaaagaattttgagactgacacaaaattttaacccactaaacattatggaatttttgattggtgtttctcgaaattaccagatggatgcttagaattttatgaataaatttttgggatgttaaaaaaaaaaaaaaaa

SEQ ID NO: 94778 - DNA, 470 bp, Heterodera glycines
tacccgaacaattcccctctcctttttcatggaaactgaaaacgctgaggaaacacagcaacaacgaccatttgcaattaagcgatggaatttggtgtctacatggagttgggacgtggagtgtgacacgtgcgccatttgtcgtgtccatttaatggaggcatgcctccgttgtcaggccgattcgaaggcgcaagaatgtgtggtcatttggggcgagtgcaaccactgtttccacctttgttgtatgtctctgtgggtgaagcagatcaaccggtgcccgctgtgccaatccgattgggctgtccaacgagttggaaagtgaagagtgaatgattggcatcacatttttcatttttaaaaatttaatccatccaatgattccaatttcaaagcgcataaatttgattatggtctccctatcaaacgcaatttttatttaataaatggatttgaggataaaaaaaaaa

SEQ ID NO: 94779 - DNA, 369 bp, Heterodera glycines
gaagacccgccaaatgcggagccaatcgaaacggtggagaaatttgagagcgaagaagtggagaaagtgcacatgagcatgggggctgcgaagaagcggttcgaccactgtttgttggactcggaaggggcagatttctccgattcggtcggagtgagacgccttaagcggggattcaaagccagcgaagtctttgaatcggaaacaattggcagcgaggaggaggaaacactcgaacagaaatttaatcgcctcaaccgggaaatcagaaatttggcagccgaagttgaacaaagccagaacgaatctcctagcgtcaaaaaggaagacgtcgcggccctggacgagttgctaaaaacgatcgcttcg

SEQ ID NO: 94780 - DNA, 524 bp, Heterodera glycines
tctccgctattgtattgcgagttcggccgcttttaccggtgccgcgctttacgttagcctcgtggaccatccgacgcgccttcagctggacaccgccactgcgcttaagcaatggaagaaatgctactcatggtcaatgccactacaggccggtctggcactttcttctggcattctcgcctttgtgaacattgtcgaacataaacaacatatttggaccttgggcagtgcgcttatgttggtcaattggccgctcactttgattttcattttgccattacaaaagcgtctgatggcagtcaatgaggcctctgccgatgagaaaacgcgtgccgacttagagcgctggggccatttgcacggaatgtgcgcgacattgggacttatggcgaccggcgttttcttggctggccgttttgtattaaaatgatagaaaaaatgatggcgatattctcagaaaatgattgcaatttctgcctaccaattctttggtttcacaaattccatcgcataaactcaatttg

SEQ ID NO: 94781 - DNA, 314 bp, Heterodera glycines
ttcctccgctcatttgcaaagtcattgttcgtccggttggttttcgcacaaaggcaattgttacaccgtgatcgccgggggatggagtgcaaaaagtgcaagtgcaaactgttcaattgcaaatgcgacactaatcaccccaaaaattatcgaatcggacgaagaggaagccttcctcagagatttaatttcatttaatgcacccaaaaagaatggccaaattttggtgggagaaaacattgacatttttatatgcagaaaagcaatgggaaaatattaacacaattttaatgtgtcactttattaaataggta

SEQ ID NO: 94782 - DNA, 371 bp, Heterodera glycines
cgcttgtctcattaatttcggataaaaattatgagcggagaatccacggctatgtcagtgttcttcaggatgagcgatggcgcagattatacgccgttttgaaggccaatttgttatttttatttgagtcgtccgaacgccttgaaatccccgtgctgttaattgtaatggaagactttgtggtcgaattggccgatgacaatacgatgggaaggcaaaattcgttctccatcaaattcaacaccaccggccacaattacataatggcggccaccgattatgacgctttgcagaattggatttctgttttgacttcatgctcatttgagtttatggaggcgacacgacagtcgctagagagtgtagaggaa

SEQ ID NO: 94783 - DNA, 340 bp, Heterodera glycines
ccattgggtggatcgtcgctttcgagcccgtcgctttatgaacaccgaccccaacttctggtcccgttgcaaatggtactccgactattgggagccgtgtaattggcgttgcgattaataccaacattatgaccggcccctttggaactagtggaaaccggacatttcggacggaaagaatcagaagccagccatcgacatgtgccggaatggactcctctcttttgcctattaggaccagagacggataactccgggggcgttgggtcagaaggaaaaagactgggccgacatttacccaccggacggaaagtacggctcactccagtacatgtactca

SEQ ID NO: 94784 - DNA, 315 bp, Heterodera glycines
ggcagttcgtacgaagcacgggtgccgtcggcgtcgcgtgttcagtgccaaaacgacgacgttttgtcccgacgacgttttgttctgacgacgtttcggccgacgacgttttggggacccaaatgtcgcgctttcatgcgtcttcatcagtcaaacttccgactcttttccgttccccaattttgccgcgtttgctcaaaaatcagtcgcctttccattgcccgattttgagcctttagatactgctttcatgtgcacttgcatcagctttttgtctgttaataacagtgaataaacataaaagaattttaaaaa

SEQ ID NO: 94785 - DNA, 445 bp, Heterodera glycines
gccggcttatttggcgcccgaagtgttcgaaagagttggccacaaccaaagtgtggactattgggcattgggtgtgctcatttacgaattaatggccggagaccaaccattttggggcaaatgtccggaggacgtgtacgagcacattcaggagacgaaggagaacggactgcgctttccgaggcggacattcagtccaaatgcaaaagatatcatccgtggattgttgtgcattgaccctaaacaacggttgggctgtgatcagctgaagaaacacccgtggttcagtcagtacgaatggacggagctgtccaaccggaattacaagcctcccttcgtgccaacaatttaccacgaaggtgacaccggcgactttgactcttaccaagaggttgaacacatggcgccggccaagcagtgctatttggaccttttggatgagtgg

SEQ ID NO: 94786 - DNA, 434 bp, Heterodera glycines
tgctgttttttgcctatttgcctccagcttggtctattggacatggcaattattttggacatcatgaggggttgggcgtgggcttggcacataattatgtcagcaaatatggcattccgatgaatttgagtgacgaacaattggatgaactcaaatggcgccccaaacggcacaccaaattggatggcacccaaatgatcaattcttcagggcagcaaaattgctcagatgagaattttattttgtccacattgctgagggattacgacaaatttcgcatccctggtggcggaaatgtgcgcgtggaggtggagatttgggtccaggaagtgtccaaaatcattgagatcaccagcgaatttgaactggacatttatgtcactgaaatgtggacagatccttttcttgcatttgcccatttgaatccgtgcaaa

SEQ ID NO: 94787 - DNA, 418 bp, Heterodera glycines
atcacatcaattacctccctcaaaatgccacttttttccgctggtcatcccctgccgttgaaatcgttaggcccttttcccgaatttggccccaattattcctcgccatatttcactcgcaccggcacttattcattcccgaatcattaccatttgcaaaacgaccgtttctacagtgccttctttcgcgcgtcttaccgtagtactgactacagtcccgagagtctctacagtagtcggatcgcttaacgctgaatgaaaataattctgctgctgctggtggatgcgcaaaatgcaaagcaaagaaagtgactatttacaattaatcatttttactgaaatgataaaacaattcactaacatgatatacgaattgtgtaggttttttgaatgtttaaaaaataaacacatttaaaaa

SEQ ID NO: 94788 - DNA, 502 bp, Heterodera glycines
cgatcgcgaccatctccaaccgtccacaattgcgaacattgttcattttcttgtcaacgatttacaacgaatgcagcgcatgacggacattctcacggatttccaagtcgactggatggaatacaaccaattgacatgggcagtgatgtttttcatcgtcgaggagtgccattctttgccgataagcgaagggacaattgtgatgccaacactgtcttttttgtttgccggatttaccaatccctttttgacgacatttcaggactttttcctgcacattgtctccgattccttcgtggacccgcgcactccaagttggcaaaaggaagttctcaccgttggcattgagtcaaaaaaggccatttctgattgattttcgttgaaaaaaatgaccaaatttattgctgtgattatacagaataatttatttgtatcgccgcattgatcaatgcaatttaaacgaatgttgttgtgttaattgtcaataaacaaatatgaaaaa

SEQ ID NO: 94789 - DNA, 548 bp, Heterodera glycines
accgaaaaagctccttcgtctgaattggaactttcatttttgtgcgaggaaaatgaagaaattgctgccccaaacttaacatacgacgacaaccaatcgggcaaatggattttatcttttgaaatcggcgatgtgctcgacacaaaatggaagatggctagagacttatacaactctaaaaagttggatggaattgtcggcatgaaagtgtcgacaaattgcccaaggacgcgccgaggaaatacgggagtgatcatcatgtattgcggcccgttttatgaccgaaacaaaatgttggacattggcaacaacatattggctaaaatgcaatgcacggcgccaattacatataaagctgactttcagacactttcgggggtggaggaaaccctttacaccatcagcccggaaggatcgtcgtcttcttagaagagggaaagagtgatgttggccattgatgtcatagtgaaagatgaaaaaacggagaaattcctttctgatcccaacaaatccaatggaacaattttgatggaaattgaaaaagtgtc

SEQ ID NO: 94790 - DNA, 206 bp, Heterodera glycines
tcgtggagctttaattggtctgatttggctgcgggtcgccacaattacaaatttattgacacgggtgtaaaaaacatcgattgatgacggctaaccagcaaattgcccagcggagaaagacgggaaatcggaaaaattaaaacattggcaataatcgactgactaatgataatattgcaaaatatataatatttgaaatttaaaaa

SEQ ID NO: 94791 - DNA, 567 bp, Heterodera glycines
tgatgaagacggcacttgtctgatttcgttgggtttcgaaatggttaattggtgctgcttcaaattttggttttgctttcgacttttgcttgcttccatcgcgcacttcaattggtttgccgccatttatgtcaattgcattttctttacattgtggaaatcttatgacattttgtggttttggactcatttggctctttgtgtttgttttcctgcgcttcgaccgaacaataatctaattgtcttcgtcaaattggttagagcaaaatgcacggatcactccagcaaaagcttcaaggaaatttacgaattgatttattcggacacgccggacgaaacaaatgcggagagagagttgagaagaattgaaacgcaaaggaaggaatcgaaacggagggcacacgagcgaattgggaagcagaaaaagcaccaaaaacaaatgcaactggaagaggacgaaagcgcctcttccgacagtgacgatgactcatcaacaattgtccaaatgcaaggcatttatccgattttgagctattgtcagcagatggccctctgttgtcggctcgg

SEQ ID NO: 94792 - DNA, 367 bp, Heterodera glycines
cctcaaatcctggccggttgatcattcccaaaatttcgacgaatacctggaggccaaagggttcggctggttcatgcgccaagcggtcaatcttgcctgcatcaccaaaacattttctaataattataactgcacatatgcatgcaaaatttaaaccatcaaaaagactgtggagtggcccagcttcaaattgcgcgaggagtaccaagccaaatatttggaccactcattgcctaatatcaccttccactacaacccaacaaccaacgagctgatctaaacgcacaaaaacgtggactccgcagataagcctcacatctacaagtacaacattgactctgacagatctctgatgatgcatatggca

SEQ ID NO: 94793 - DNA, 156 bp, Heterodera glycines
acgcttgtactcgtagagaaacatttgtgagatgtaccaacgttcgctggcaagtatgtaattcgatagacagcaattgtacctttcgacacttttacaacttctatgaagttccccaacgtcgtacaaatttgcattgaaaaaaaaaaaaaaaaa

SEQ ID NO: 94794 - DNA, 405 bp, Heterodera glycines
tgccctcctttccgcccaacgtttggccaagtctcctccaattttgtcctcaaatactccgtcacaagccatgggttcttcgatgttgacctccaccactaccacaatttcatcgtcctcttcaatgccaaacactactactgaaattggcattgaacgccgcacttcggcaacaaaaattgtgcaaaaaacgccacgatttttcttctggacattgagccaaagtgaaaagaagaaaagtgccaattctgtggattcatctccacgaacgcccgactcttcgcgcagtgtcagttttgagggagccgaagcttggccatggattgacgacgttgtggaagaagtggaatgtgaatgctttgaagaatgaatgagcttatgtgggttctctgtggataatggaag

SEQ ID NO: 94795 - DNA, 516 bp, Heterodera glycines
gcgaaaacgggctgttttcccagcaaaaacaaagtggaaatcgactgaccagtgatcatttcgtgggggatgattttcggcatgtgatcagtcgtctcattttggtgctgcttgtagtcattctcgtcaatgtccgatattgccaatgcttttctctgcgacggttttcccacaaatgttcggcataaaatcactgtttcacccaaaactcacatttctggcagacaaatggcctccatcactccgcgaatgcgcgtcgcttcgacgttcttcgactgacttttgctgcccgaaacaaccaaagtgatgacgtcgtcaacgggcaccaatttccactcaaaattctttaaaacattaattaagccatatttatgcaattattttttccgttagcttactcggaaaaggttttccattcctctaccgaatttgcccatttgtgcaccgccggaagagcccatcattccaccgcggtactgactatgctgctgatgcagcggaatttgtggcgtcggc

SEQ ID NO: 94796 - DNA, 205 bp, Heterodera glycines
agtgcggcgcgtgtgtccgagtttggccctggcgagaacggaattctctctccaattcgatttgtgccccgagaaatcgctgctggaacaaaattatcagtgcgccgaatgtttttcgcccatcggattcgacgacgactctgaaaaactgcctcggatttgcgatttcaccggccttttctgttgtaggcgctgtcattggaac

SEQ ID NO: 94797 - DNA, 297 bp, Heterodera glycines; identical to SEQ ID NO: 73338

SEQ ID NO: 94798 - DNA, 377 bp, Heterodera glycines
ccctaaacgaatgaatgcagtcattatgaatgtttacaacccaaatgcaactgctattatctttggtacgggaaaatttgtgtgcacaggagcagctaatgagaaagaatgtaggcaagctgcggagcaagtcaccgaacgaattcgatagtgcgggtattacgatgcccaaattcaggaatttaaagtacgaaatttggtagcaacagcagacgttggttttcatatacgcttaggacctctgtccgactttctaggcgccaaatattgttccttcacccccgagttatttcccggtctcgtgtatagaaaccaaaacccaaaaatatcaatcatagtattttcaagcggtaaattaaacttaacaggctcaaaaa

SEQ ID NO: 94799 - DNA, 269 bp, Heterodera glycines
agctgtatgaacagcgcaaattgattagcatgtttgtcgtgctgatcctttttgcttttttctgtggactttttttgggttctgtgttgaacagcgaaggatcgaaggaaaagtgcgagctcttatgcaaattacgcggacatgataaattcaagtgtgagatgttttgcaaagtgcgtgatgagcatgaattgtaaggaattaatcctgaaaaatatgttaatctgttgttggtaattcataaaggtctttgttgtttaaaaaaaaaa

SEQ ID NO: 94800 - DNA, 571 bp, Heterodera glycines
ccgtgcatttccttcacgggctgaaagagtccgccaatggatgctcttctcacgccaatggcatgcgattgacgcggatcgccaagatgtttggaaattggcgaagaaagtggccaaacatttgagcggatggtcgaagccgatccaccacccgcacacggactgtggtgatcatgttgttgttgtcaattgttccgccgtgagtatgcacgcgtttgactggaaacacacgcatttcttctttaaccggctgtacccaaagagcaaagcggacatccccgcctatcagatccacgagtacgacccgtgccgcgtcgtttggatgtgtatcggacgcgaattggcatttctgactcggaatcgagttgttcagcggcgttgtttcgagcggttgcatgtctttcccgatttggaggttcccgattctgtacgcaagaatatcaacaatcagcttcgccaagtccaggaagtgccaaagaaatcaacggagtacagtgccgaagaacgcgccggctttcctctgcttttcgcccaggagaaactttcttaaaattgggaagaacctttgagc

SEQ ID NO: 94801 - DNA, 583 bp, Heterodera glycines
  unsure (1)..(583): unsure at all n locations
ntttactaaaatgtcttcattttggaatgtgtctgctgttctcatgctgatcacactgatctctttgcttgtcaacagcagtgaagcggtgccgttgccttcaaaaaagtcgtcgtcattgtggtcgaaacttttttcaaacgatcgtgaaagtgctaaaaaattgggaagcccttcttcgacatcggctgctggtggtgaattttcagtgcagtccaaaatgtttataccgtatgccaacaacggcaacggtggcttctttctaccgtacccgagtgaaatggacacagtcaaacgcagcaacacggaaggccatttccttgacccatatgatggtggctcatcgtggttgagcctcagcgatccgagccgacttgaatggaacttcaacagactgcgctaatgaggagggcaaagatcaacacaatgatcggtgaccaaaaatcagtgcgaagagaccaacgatcacactcccaactgatcatttattaaaaccaatcaataatttatgacacaaatcacacccaatcttacaattcagatggagcatgttcttaaacatacacttacataatattttgtt

SEQ ID NO: 94802 - DNA, 460 bp, Heterodera glycines
agccatcccaatgccaccaccaccaacacaagacgaaaaggaccaacaaaagaaatcccaatggaaaccgctggagataggaacaacgaagattccggacccagaagaattgcctttcggaattgtacagactgcattccgagcttcagatcggatgcgcacgacctcagaagattcggccgagtcttttgacgcctatggaccggagtgggaagggaagggacggggaattgggaacagaagggaattcagttcgccaaatatgaccagttcggggagacgaatgagcatcacagaacgcttatttggacgtccagtgccccaagaacgaagaaactcattgggagaggaacaaatggggcaggaaaagccgaaaagcatcgcggagaacaaagacttcaaagaattaatgaagcgtcagcgaaaaattttgggcgatgatgagtggcaataaagaaag

SEQ ID NO: 94803 - DNA, 418 bp, Heterodera glycines
cttgtaatcagaataatctacagaaaacttttgtctcacattgtgccaaacccagtgtgtatggttctgcgacaaatattcctacggttttggtgataccgtaggaattggcgtcaataatgctaattgatttttatgtttaaataatcaaaatcccgcaactttttcacagatacttctgattttatggttgatccatcttttgctgatggctcattttatccattcgttactttgtttgtctctggtgacaaaattgaggcgaattttgggcccaatttcaaattcgatttggcaactctctgaaggaagaattaattattcactaatgttttcgatcaatttgctctttttaatcatttttgtgtctttcttcttcaattaaaatttggttttttgaaaaaaaaaaaaaaaaaaa

SEQ ID NO: 94804 - DNA, 533 bp, Heterodera glycines
tctttttatcgcaacaatcagttgccattccgtcatcaaccggacaattccgacagcgcaaatcgaaaggattacgaaaacaattcgaacaaagagagaaatgacaacggaaacaaaaacagttacaaggaaaagcagcgaaagaatgaaagtgacggagaggaaaacgaagaagaacggacacgacgacgaattgaacagagacatttgggaaaagggaaggaagagggagaaaagagttggacaagggagggcgaaaagggcacggaaaggcgggaggaaatggccaaaagtgaaagcattttgaacgcattgatcgaacaagtgcggcacagaagcgaagtttgtcacggattctaaggaaaaaaaattattgaagtcgaagaggcggccaaagcgatgacggcactaatttgatttgggtctgcttttctagcgatcagacaataaagtaaaaaatttgacaataagcggatccaaaccaaattactagctgacgtcgccacattgtgttttttgaaaattattaattt

SEQ ID NO: 94805 - DNA, 444 bp, Heterodera glycines
ggcacagtctatacgctgctgcactttattgctctcgcattggtcgtgcaattggaatagagcgtgatcctttcctatacgagttgcagtgtcaaattgttgccgaatttggcgattgcttatctccaagagttatgttcgcgatgttggcactacatcgaaagatggtcatgccgatgctgacattttggccaatgctgatgttgtcatcatgaacaacgtgttcacattctttgctgaccacgctgaacaggtttcctgttggcaacatttgcgtgcctatttgcgtcctgacactctgttattgccactcgccctcgctggagttggtcactgcccatctctgtccgtcggcacttggctttgccttcgacggttggttacaagcgctgcacattggcactgcagcgatgagcaccgctgtttctgtgggaactgatacat

SEQ ID NO: 94806 - DNA, 530 bp, Heterodera glycines
ccgctccaacgcttcgtctctttgtctttgtactgctccaatttgtcgtccgacccttggtcattcattcaatgctttttcctcccttcgttttgctattggctcccattccattggctttttccatttggcccatcgttttggctgaacccgtttttgcgttggaccatttgtcactgcaaaaccgtgccaccgatgaaaagcattcgtccgcttccacctccccttcactgttatcgtccgtcgcgttgacaaagtgtcaaagcgactatttgtccgcactgatccatcgctgcatgataagaggagtgcccacagcgatggaggggcgcatttgctttgcggacgaagtgcaactcgcagacgtgcacaaattggtcaactacatctcggaggtgtgctgcctccttcgctgtcaggccaaaactttagagcgcctttgctgcagacacgcacaacagcaaggacgatgccgaaaggccaattgtctaccgattcgagaccaaaaagtgttgtgggaagaagctcat

SEQ ID NO: 94807 - DNA, 196 bp, Heterodera glycines
tactggaaaaaagaagacgcgaaagcttcgaggacacgtatctcatgttcaccggcgggtgggcaagcaccgcggacatccaggcagtcggggtaacgccggtggacaacaccaccaccggatcaacttccacaaataccaccctggctattttggcatggccagtatgcgaaactcttatgtgctaaagaaccat

SEQ ID NO: 94808 - DNA, 528 bp, Heterodera glycines
  unsure (1)..(528): unsure at all n locations
attttcttatttattgttatgataaacgcacttggttgttcaaatgcccagcttaaatgcagaagggatacggtagggacaataaacggtgttggcttgaagatgaacttttccgaagaagaatgcgagtcgacatatttctggcaatcggcatacaaatattgttatgcttcgcattgtttaagaggaaatgaatggcttacgcattatgggtgtgccaaaagcccggagaaaggtgcatgtagcgacaatgttgagaaggagatgaaagatttgtatggccttgctgtgagctgttcattttgtacaattggacgcaaaatggacgacatgagcaacaagaatttcccgctgtacaatacgaccaatgttgtaatgccgccatcaggaggagcagatggagacgatttttcatttatgtcgacaacccaacaactaacaacatcatataatttatctgaaatcgctacgattgtgccaaaaaaaatgaatntacatgaaatggtcacttcaacaccaacaccaaat

SEQ ID NO: 94809 - DNA, 403 bp, Heterodera glycines
  unsure (1)..(403): unsure at all n locations
ttcacttttcgaaaaatgatcaaatattccttcacttcttcccaaatgtcttcagcacgtactcttcgtcactctctccattttgtgctctctgtgctccttctgctcgctttggccaatgtgctgacagtaaatgccactccgttgaccattctgacccgcgagatcagtcccgaggctgtggccaacaaattattggcgtcgttccccgaggggttggaccacatggaggaacagcacttgagagaggcgcgattctttggccaacgatgaaaaagagaagcgaagggacggacggaccttttgaagaatgatctctcaaattatgaccagttttttggcaattcattaaattntgattgttaaatggatgcaagaaatttctgccaaattggcaatcgaa

SEQ ID NO: 94810 - DNA, 444 bp, Heterodera glycines
aaattctttcttttcaatggtcaaactgaatatcgtttcctccacttcttcaccggcggtcgcaacgccgtcagagaatcggagtaataataggcaaaagccgggcaacagatttggcggtggtggtggtggggctggtcggaaaatgaccactccgatgacgagaaagccgcgccaaaacgacgacgaaaaccatggcaaacggatggtacaatcggagcccagaaagccgttccaaagacagtatcagcaacaccaaactccggcctcggccataaaatcgattctcaagacgccaaacgatggaagatgaagaggaggaggatgacgacgaaaaagaggaagaagccatggatgacgacggggaggaggatgacgaatgatggaggaactgatggatatggcacagtgccaatgatacggaccaccatcgcagtgcttttg

SEQ ID NO: 94811 - DNA, 290 bp, Heterodera glycines
ttcgacacagctattatttcatatcacaacagtttcattggttccaacattgataattgggccaaagttaacattttttaaaaatataggaagtagcatcaccaaaagcataagtaacagtgaccaatatcaaattgagccaaaaaaacactataaaattctcttcataattggaccaatcgataaaccaaagaaaaaaatggagtttgtcacggatgaaaagggaaaaatcaaatggaatttcgaaaaggaaattcttgaaaacaaattcacaccaaaaggattcaaaa

SEQ ID NO: 94812 - DNA, 515 bp, Heterodera glycines
tgatcgagaataaccaatgttgttgtcagcaaatttccggcatcttcatttattgagaattttcaatcgaattgtccgattgtctcctcactgtgtctgccagacgacggaattattctccgaacggtttatttcaacttcctttcttttgcgtatgttcattactcattttgtttaattctaattctgtttttacattcattctttcactgttccaaaacttttgttcagcggatgcttttgcaccaaaaaaagtcgtaagttcctttcccatggcttctacatgttggaactgccccaactgttcctttcgaaattttgtcacccgtcgttcatgtcgtcgatgtgattattcgcggacggaagaagaaataaacaaaaacaaaacaatatggccatgttcagagtgcaattccattaattacattgacagaaaaacgtgccacaaatgcggagtgtcaaaaccggaaaacgtcaattcgaaccgaggcgaaaccgcagcggatgggtcttgg

SEQ ID NO: 94813 - DNA, 308 bp, Heterodera glycines
tgaaggccctgaggggaatttcgccatgcacgaaaagcacatatgatcgagaggagaaggaggaactgcgcacagcgctgaagaaggaggaggaggcaaagaagaagctggagattcggaagaaaatgtccgtggttgtggaaagggtcaacgacgacggcacggagggatggtcggacaatgtgccgatcacgaaagcacggatggccgagctaatccgccatttctacaatttgggatggatgcgcgacaacggcgccggcatggcggtgcactttaagtgtccgaagaccgccgaacttctgatt

SEQ ID NO: 94814 - DNA, 387 bp, Heterodera glycines
aaattgacacagatggatggactgtttttcgcatccattgcttttctaacaacagtgttttctgtgattggaattgccattgtgaagttgtggttagatgaaagaaattctcgcaaaagcaaagagactttggtggcaatggacgacagtgcaactgatggtaacatgcaaaacgaagtgatggacagtgatgaggacgaacaattgacagggaatggcgccgctgaggaagcgatgttggatcaagaagggacgacattttccgaaaaaagaatcggaaagaaaaaattggcgaagcttcaggcaaaggcagaagcgaaggcactgcgagaacaggaacaaacggaaagagaagagaggaaacaaagagagaaagaaattagaaaa

SEQ ID NO: 94815 - DNA, 321 bp, Heterodera glycines
  unsure (1)..(321): unsure at all n locations
cncccgttgttcgtccgccaccacttggtgcagctgggccaggtcggggctgttgcgcagcatgttgtgcatttgtatctctctgtccaactcctcgtccattggctttcgctgggtcaaaaaacgccgtcctaaacgatttcttttaaatgcaatcaacgaacaaagaatgagtaatggccggcctaatgaagctatgcgaataagaagaggacagtgatccaattatgttatttttggtcagggtaattaattgaaggacttgacaaccgaaacaattcttcatttatttttcaattaaatttaaattaattatcaaaa

SEQ ID NO: 94816 - DNA, 488 bp, Heterodera glycines
ccaaatttcgaaatgcttttcctctcttttccttccttcatcctccgccaaattcgcccctctttctgtcgctgcttttcctttctgctgatgttagccatgctttttgatctgatcagcatcggtcgatcacttccactaggctcaaccaacgacagaatttacttctccaacgcattacgtgaccccaaagatattgtgcttcaattggtcactgttccaccgccaatgcttaaatttgccgacttttccaataaatttgttcggttggaaaagcgtcggcgacaatttggtcctgttcaggccaaaaaatatgaaagaaattgctttttctctcctgttcagtgcatgttggttttcagagacggctccaagctttacggacagtaaaatgattgaacgatattaatatttcgataaacacttaacattaacatccgaatgttaaaagatacgctgctataaagaataaatatgtctttatttca

SEQ ID NO: 94817 - DNA, 320 bp, Heterodera glycines
aaatttatttttgagtttcgaatcacttctccgagttcgaaaagtgtacactggaaatggcgcaaatgacgcgtttggcgacgggatggacattgggcactgcccaaactactcgtggctttgtaatgtgtgcatttgattgcaacgacatttggatggacattttcccgcattttgaccgtcctcaaattggcactgatttcgccacgttttgatgcgctggtggacaaacatttcgatggcaaaagcgaattgacattaatgaaaacttcgatttggcatctttcgtcactcgaatgaaataaaaaatttgtggaaaa

SEQ ID NO: 94818 - DNA, 399 bp, Heterodera glycines
  unsure (1)..(399): unsure at all n locations
cggttccatgactcggttttggaagcggtaaaaaataaattactgcaaacacgcgaagaagcagacaaagcacacaatgaagtggagcacttaaaaagggagctaatggaggagagagagaaacgcaaattgcctgaccaaaagttaaagtacgctcagaaagaggcagaggaggccaagacggaattggtgttgatccgccagcggatcagtgaggaaagggccgcccgagaaaaagccgaaagggaactgagtgtgctgaagcaaatcttggaagacgatacggcacggagagcccaaaccgacacactgcgcaatttatacccaagaaaataatcgcaaaaacaggaatttgctcctcttgaattcaatgtgtttttattanaaaaaaaccaaaaa

SEQ ID NO: 94819 - DNA, 313 bp, Heterodera glycines
  unsure (1)..(313): unsure at all n locations
aagagactctaactgctgaacagttgcagaaaatgctgttggatgctgagaaaagcggagaatattcatatgaagaacttcttccaattcgggaggaggcgaagggaatgattgaaaacgaagagcaaatggtttcactgtacacaacgtttatttatatgtcgaggcgcttcgccgaaagggaaaaaagcagtcccgactattcgagaacggaggaaactcttncacgagggttcgaattttcctcgaggaaatgcttcgataagtttttccgaatgccagccattcgaatttgagaaagaatttcgcctat

SEQ ID NO: 94820 - DNA, 397 bp, Heterodera glycines
ttttactaaaactataaattaaacgcaaatgacaactaattaaaaaaacacaacaataaatcactaatcacaaagattcataaaggcaatgaaagatgaagaggaatatcaaaacaatcgtgttcggcctttcgaaattgatcagacaaggggcattgccgatcgaccacgtcttaaaaaatacatcgaaaatgactcagctattaggcaattggtaattgcttatgacgcgaaagaagaaaaaaatgacgatgatttgatccgacatattcatgcattgcaataccgtgtggggatgaagggattcgaaggatgggattagagtattgttgaaaatattaattttgttgcgttgttaaaaattagtatatgttaaaaaaaaaaaaaaaaaaaaaaa

SEQ ID NO: 94821 - DNA, 179 bp, Heterodera glycines
gtgataacaaaatatataatcgcgataatgaaaaggatgacaacaaatcggcagaagagacagagacagaagtggtgaaataacaacaacaacaacaacaattttctaattttttttttaattacacatgatattattccatggctgaattgatcctcaatgaatgaatgaatgaaaaa

SEQ ID NO: 94822 - DNA, 576 bp, Heterodera glycines
gtttttattcgctttttaatttgggcacattttgcctatcgaccactcgccgaccccgacccgacgaataaactttggactagcgtgttcgaaacatgaataccatcatcatcgtctttctgattccaatttgctgcatttttctggcaaatttttcccaatttgtgcatgctgcttcaaagaatgtgtgcttcggatatgatcaccagttccaagttgaagcatattatgggcatgttatgaagcacatttttgatacaagagaatgccaagtcagcgggaaacaatgtgtggaaattaacccacgaaaatggactggattggctcccaatgaggaaatttctttccgacttagaaatggaacggaagttggtagagccattgtagcagaattaactgattgttcggtggtgttgatgatgaaaaagagaatatatttctcgtgggatatacaaactctacatatatctgctttcctctcctcagcaatcttctataatgatcaaactgaaacagaaaatttaaatggttggacctacaaacaatacttggagattggtcccaatatgtgggtag

SEQ ID NO: 94823 - DNA, 334 bp, Heterodera glycines
attttttctttgtgtctctgagcaacaaaatggcaaaaaaaacgaagtcgtaaagatataaatgttctttaaaagatatttatttaagatatttgattgtaaggctcgcgagtgttatttcgggcactaaacaaatttgggttagggagagagcagcagccgaagcggcggccattctttacgacccggcgattggcaaaaatgtgctgttcaaagaagttgagcaggtgaaaggaaaggattcttttcccgacagagtgaagaaaatgtacaatatcagttgatcgaatttcaaatgcaaatggatttgataaatttgtccgtttttgaaaaa

SEQ ID NO: 94824 - DNA, 447 bp, Heterodera glycines
gggatttggacgaattggaaacgtcaattgatcaatttcgaacattcctcaacgatcagccgcggatgcgcactttgctagccttaaagccagaggtccacttgctgttgaaccattttgtgccgttcgccagacaacaccaatttttggcacttttagacgagcagggtgatgaagcattgcattcggtgtggaggcgattggaacagctgtggaagacaatgcctgatgaagaacaaatgcgacaattgttggaacaccattttgtgtcaaattggcttctcgacacaggaaaaatcgacgaaatgaagcggaacaaaaacaagaaattggtgaccgacgtgagacggacgaagaaagcgatggagaagaacaattcgattttgaataaacacagttggatatgaggttcttctttgtttttacaggaaataaaattttaaaaaa

SEQ ID NO: 94825 - DNA, 215 bp, Heterodera glycines
cagcaaaaaaaagccaaatcactgattttacatgcacattccttcagcaagtgctggagacaacagcagaacaacttcctttgccaataagagcacatttgtcaaatatgctttacccggatactaaaataatcaaaagtcaaattccgaataaattgtgcagtgtttgtggctttgacttattaaagggattggttgtggttgcacaaaaaaaa

SEQ ID NO: 94826 - DNA, 611 bp, Heterodera glycines
tcgtttcattttcgctgttactttttgggttattcacaattcgcactgcaaaatcgcaatgcgagaaacattgcactaaaagcaaaccgatgggccaatgcaatgaggcggaagaagtgattctgcgcaactccgactgtgccttcatgaagaaaacggaaacggcattcgaatttgtggtcggaatgaatggccaaacggaggacaaaacggcgcccggggccaatgccaatggggcatttttgtgctgtaaggcaacccaaggaaccgcaacacttttcatcgtcggcgtggccaacaaacggctgatgttggccaaggacgtggtcaattacaaatttcataacaacatctcaatcgatgattttgtacgggaaaagcaagtgttggaaagtgtttcggcgcagggacaaaaagccggcattggggacaattatggagaaaaattcttccaggaccaaatggacgccaacaaaatgattcagaaaggctatgtgaagctgtgggccgccaacaaatcgttgcttcctcaaaatgtgccggatttacagaaagatacccggcctaaagtgacggcggcgacagaagaaatgattttggcactgaaagtg

SEQ ID NO: 94827 - DNA, 212 bp, Heterodera glycines
gtcgtctaattcagtaaatacgcagcgaagagagcacaaacggcgcaatgatcagccaatcgccggcagtctcctggacggaagtgaacacacgcgcaacacaaccgccgaattgcatggagacggagatctatatgttatgttctcaataaattgacataaattggaaagaaaagaattttcttcaaaaaaaaaaaaaaaaaaaaaaaaaa

SEQ ID NO: 94828 - DNA, 529 bp, Heterodera glycines
aaaaattcatcgggtgttggtcgtcgactgaacgatctccacgtttccatcttcaatttgttgcagcaatgggacaaagagaaccagaattgttgtgaacttttggaaagcatatgccaatgccgaattcaaatgatggaccgtatgaaagcgaacggaaaggctgacaatgaagcggatttacatcggcaaatgttcatcactgatgtcattcttcgtaattctgagcttctctgcacatcaattgcaaaattcgattcatttttgcttcgtctacgtaaatttggaccaaaattagccgctctgagtgatctcatctcatccacttcatctaacgacacttctacatcaccggatgaccctcatcaattgctacaattcagagccaaggaactgctcgacctttttcccattgttctggagatgtacgaacaggaactgtcatttaagcgggactcagtggttgatttggcagctctcgatgataaggatcttttcacggcgattatttcggcatggaaacatggca

SEQ ID NO: 94829 - DNA, 221 bp, Heterodera glycines
cagggcctttgccgatttcatcttcgcccatgtaattctccatttggtggtcgtcaactttatcggataaaccaatgtgaaaggatgggaatataaaagtcattctaaatttaactgaccgtttattcgtttttctgttaatttattttcgtttaataatgttttgcataaatgggtttcgttgaaaaaaaaaaaaaaaaaactcgagactagttctctct

SEQ ID NO: 94830 - DNA, 328 bp, Heterodera glycines
tgtgcaaaaacattgaacttgttaaagaacaacagaaacgacaatctgttgctgatgatgatgttgaaaaacaatgattgagtggccttattaatcaaatgatgcatgatgatgagcgagggattttgacttttatctgatccagtttttttatcgataattcattcattatctcatcaggaaaatgatggcctaatttttcccgatcatccccccgggtatattccattcttttttttgaacacacacttttatttatacactcacttgctatttatattttttcattcttcagaaaaaaaagtttaataaagtgatttgattaaaa

SEQ ID NO: 94831 - DNA, 416 bp, Heterodera glycines
gatcgttcgtgattggaaacccgacgtggtttatttggtccaattcccacgcacccataatgtgctcagtccatccccatttgcactcaaattggagacatggcttcgcatcaatgggcttaaataccgcaatgtgaacaacgaattcacaaaggcgtcggccaaaggtcaaattccgttcattgagctgaacgggcgccaatttgccgactccaatctgatcattgatcatttgcgcaaccatttcaaagtttccatcgattcgcgcctcagcacgcacgaaccgcgcgttgggtcgcgcattcactattctgatcgaagaatcgctttttcggtgccttcagtacgaccatagcattgactttgggtggttggccaccgaaaatggttgggccgttcacatgagcggattcaaa

SEQ ID NO: 94832 - DNA, 317 bp, Heterodera glycines
ttgttaattcgttgagttcagctcttagtttgttaaaaatggtgaactttaccgttgatgaaattcgtgcccttatggatcggaaaaaaaacatccgaaatatgtcggtcattgcccacgttgaccatggcaaatcgacacttaccgactcgctggtgtccaaagctggcattatcgctggtgcaaaggctggtgagacgcgcttcactggtcaagtggtcactgagacgcgagaacgaaagggattgaaggagggcattccatcgcttgacaatttctatgacaaattgtaatacgtggatttaaattatggtggt

SEQ ID NO: 94833 - DNA, 455 bp, Heterodera glycines
aattggttaaacccttccccattttgcgctcacctccaaatcctcgcctatcgtcggctcgtccccctcgtggaccatcttcagtttcttccgttcttccaagttgcgctttgccttcaacagttttctctttcgtcttaagcaaaaccaatattctttttattttatgatattcgaaattgactcatcactttttcagcgttgccttttcttcggcttttgctgttctgatcagatcgtcgatctcttccaactctttgaattcagtattttcctccaactcctcgccagtatcaccctccaccatttcttcagccgattttacactttctttagacgctttttcctcctttttctgttcgtcaaccaatttcttacgccattttaaaatgcttcccagttcggcaggtccacaaacctaaacgggtttttttctgttagtgttcactatattt

SEQ ID NO: 94834 - DNA, 440 bp, Heterodera glycines
atctcttactcctgtattattcgatcttcatctactcattttgtacctcgtgctgcagtgtaagtggcctatgcccttctgtgatttaatacagacaaaaaaacgctcacgttcagctagtgcataaatttgaccaaaaatgagcaacccaattaaaattgtgcgtgttcttgagattattgaagcagacgaagctgctggccaacctaagaaagtccgggctgtgtgtgtggacgatccaaacagagaagttatcatgaaagcaagcggagaggtccaaattgaccaacttgttggtttctttgatggcccggacaaaagacacattcagcgatgcttcacgaacaacaacaactgatttgaaggatttgataaaaataaatttgaaaaacgtatgtcatcctttttgaaagcgcaataaaaaaagcacatttctaaaa

SEQ ID NO: 94835 - DNA, 264 bp, Heterodera glycines
taatcgccgcgaacgtggacaacgttatcaaatttgcgacctgggacatgttttacgaagcgcgtcgcattttgatggcggacctggaaatcgtctctacaaccgtggttacgttttggtcagatgactcgcttaaattgaagacgcagccgtatcagttcttcgagttttaaaggatgatccattgttcattcatcattttttgttgcaaataaagacttattacaaaaaaaaaaaaaaaaaaactcgagactagttctctct

SEQ ID NO: 94836 - DNA, 589 bp, Heterodera glycines
gctccccagtctctctctctctctctgatcaaatgcattgtgtccgaggcaaaaagtgcaaatccgtgccggggatgggtccgttggccgtccgttcgtccgccattcccttggccacgctttgtttgctcagtgttctctttttggaccaaatgcttggcacaacggcgctccgatgctatcagacccaaagcactctgatgcaacccgtccaagggtcgcccaccgactgtcccatgatgggattgtcctgcattaaatcggtggattacagccaaggattggtcacacgcgcttgtcagtccaataattgtaccatgatgagtgggtacagttgtcagaacacttcctcctacccgcctcagacgttttgttgctgttacggcgacggatgcaattcgtctctgcgcctttcgtcgtttggcacttttccgctgcttttgggcagcgtactcagcgcaactttggcctttggaggcgccaaatggctgaaaacattcattggcatgtgaaggaaaggaaatgggcaaaagcaaggacaattagcaaaaaacagagtaaatttttgactttttttggaaaaaatcaa

SEQ ID NO: 94837 - DNA, 161 bp, Heterodera glycines
taataataattaaactcatttttgttcatgagcatgcggcttcagcagatgaattattacttaaaccatacaagaaaatttcggcaggagaaacttcgcatgaaaattaccatacagcaaaggtaaaaaaaaaaaaaaaaaactcgagactagttctctct

SEQ ID NO: 94838 - DNA, 285 bp, Heterodera glycines
tggttctattgaatttttttagtccaatcaagtgacaatacctgtttttttatacagaatgtccacacgggaattcagcagcagcagcatccgaatgtccagcctggaacaaaatcagtttcgtacaaccccggtgagaggtcggagagaatgagcagttctggaagtggaacgacctgagaggaggcgaatagaaaatgcaattaggttatgatggcatcattgttggatttttgtttatttctgtaatgtatggtttccgataaaaatcttgacagtgaaaaa

SEQ ID NO: 94839 - DNA, 384 bp, Heterodera glycines
atgagcgacagttcaattcggagacttagcattctgagcattttgccaactgatatgagtcgtagccaccaccacaaaggcgcgaaaatggatggaagaattgtggttttgaagtgtgtcaacctgcttcagcaggttgtgatcgacggaagagcgagaactgtgcaatgaaacagtctcctttaactcatttatgattaaaatttgggcagtgcgacggacgctaaatgatcgcctttcactcacgaaagatgattttgagctttgaaaacttgagtttaccattggcactttttacagtaagccgattattttccttttattacagtaaccgagtgattaaattattttataatatgattaaaacattttaaccaaaaaaaa

SEQ ID NO: 94840 - DNA, 351 bp, Heterodera glycines
aaaatgctttcattgtacacgatgctcgagttttccctgttggtgctgaacggcattgcaattataaaccgtgaacgagttctgaacaagtatttgaagaatcggcagcacagtttcggagcagaaagtgaacaatcggttgtattcaggctcgtcaatttaatttttgcagttcaaactgttcttagagtgcctctcatcgtcatgaatattattgttatcatcataaagctgttgtttggatgaaaatatgccttggccataatcatatatttatttgcagtttattcgttcgttccttcggttgtcattaaattttttcttgttactgactgataatcttaaaaaaaa

SEQ ID NO: 94841 - DNA, 386 bp, Heterodera glycines
ttccgataatttgcattttgttgttggttgaaactctgatgcttccatcattgatgggagctccagttgtaattcgtgaaaaacgcactgtgaccggcaaagagttggccaaaggtgccgccatcggagcggccgcgggcgttgccgtcacaatggcggcggccggcatcaaaaaagctttggaccatcgtgccgagcaaaaagcggccaaagaaaaggcgaaaaatgagggccagatccaataaagaaaaaaaattggaaaatgaatgaattaatgatgatgatgatgatgatgatacatcacaatggaaattatggaatgaatatcttaatatgtttagtctttacggaaagaaaatgaataaaagttttacttgaaaaaaaaa

SEQ ID NO: 94842 - DNA, 411 bp, Heterodera glycines
caagccttcgcattcctttcctctcccaacctccctttttcttttcctcctccttttttattcgttccctaatctctatctctctctctctctctttctctctctgatgcaaaagcattggcatttttattaattaagtataaccgaattaattgattaatattaatttacgattaatcgggtttgtgtgaattggtgattaatccgttccgttgccattgctctctttccccgtttgtccatgcttttgctcaatcctttcgcgccattttcccttcggcgctatcaaatttcaaagacagcaaaggaaaagaggcattttaccaaccaaaataactctgtgtccaattgacactctttcgccccctctcccctcactgtcccttaaataaatttcaaacactacaaaaa

SEQ ID NO: 94843 - DNA, 566 bp, Heterodera glycines
  unsure (1)..(566): unsure at all n locations
gtggcaaaaatttcaagagacgaactgcttgagtttgtacgaaatgaagtgacatgtacaatcggaagtgcggatgcaccagtggctattcccgttcttattactacgtttagagaggacactaatgaagacatcctccagctggccaaaaagttgggttatccttcaattgaggcaatgttagactcggtggaattgtccgacattgttgagccgtgttttactgaccttgccaagggggccggaaatgaaaacccgaaaaaagttnttagttacaggattaagaacattccaatggttacgcatatcctctccagcatcgaagaatcagcacaacatagggacaaaaaggcggaggaacagcgccacttcgagattctcatcggcgatccgaagtataatccgaaaattttagcgggaaaagaacaattgctttctctgatttataatttgggtggccaggaacgcttcgtggacttgttagaactacgaaaattgtatgaacataattatttcaaggaattaaacaaagcggcactgaaagagtttttcccaacgggacagtt

SEQ ID NO: 94844 - DNA, 429 bp, Heterodera glycines
cgtgcgcctatgaaataattaatggctttctcatctgctgcttctaccttttctatgccgtctttcgcgcgtctgttggcattttgccaagcgacaacagagacttaaggaataataaatttgctttttttcctttcgtctcctaaggcaacactaaatgagggcgacgaatggccgtcttggtaaccttgtccggtctccgctggcgcggaataaatatctgaataatggtgaagcaaaaatgcaacgccggcatagcagtgcgggtgaagaaatgccacgggctgtccagtttgatgagtcgtcggatcagtaccggtgtttgtgcggctgtttccatgttaaaactggcacttacctaatcgcaagtaatctgaaaatggcaccaaatttggttcccgaaaaaaaatttattcctgtctactcaaa

SEQ ID NO: 94845 - DNA, 539 bp, Heterodera glycines
  unsure (1)..(539): unsure at all n locations
gcggacttacaaagaggagaactctttcgacaagcgccgcgcggaaggcgaaaagattcgccgaaagtacccggaccgaattcctgtgatcgtggagaagtcgccgaactcgcgtctgcgcgatttggacaagaagaagtatttggtgccagcggaactgaccatcggccagttttacttcctcatccgcaaaaggatccatcttcgccccgaagaatcgctctttttctttatcaacagcgttatcccccagacaatgacaaccatgggacagctctaccaggaccgccacgaggaggacttgttcatgtacatcgcttacagcgaggagaacgtttacggctgatcgtgagttgggtggtggagtgctactaatgcccatcgacatgcattgtgcatgtggccaacggattcacgttgaaatgctatgggaatagcgtctgcctttctcatccctttcattcatatttgtcaagtaatttgtgtgatcacgcatcgatgatgattatataaaatcgcttttntctgaaaaaaaaaaa

SEQ ID NO: 94846 - DNA, 208 bp, Heterodera glycines
acggggtaaaatgcgcaatttgcgtcaaaatatcattgaacacttcactagtcaacccgttcaaagagtgtagtcaaatgctaccgttatgttgcgtgtttttagtcgatgaactttgaggatgggtcttcttattcttatttgtgtgttttctacccttccttttatttaaaggttcaaagattaaaaaaaaaaaaaaaaaaaaaaa

SEQ ID NO: 94847 - DNA, 324 bp, Heterodera glycines
  unsure (1)..(324): unsure at all n locations
tcagttaaaaccgactgaagcatttctaactattggccttactattcgtactcgcccttctaccgacacagccaaacttttgaccagtacaaatacggcctgatgaatgattggtactttaaaacaccgtaccactgtcaaagctaccgtaactcggcctccaattacttcagcccatatttgtggcgttatgagaacagtctgttccctaactgaggacactgacagagagatatttgctgctgatgaacaatttttgcctgaagtatntaaaattgactaatagagatacaaattgaattcattaaatatacaaataaaaaa

SEQ ID NO: 94848 - DNA, 351 bp, Heterodera glycines
tttcaaaagcccgttgtgccaatatgtgaaaaagatgtgccgccaacagacaaaattgtcgtggacagactaacaatccataaatcgtgcttcaaatgtgctatttgtgacaagccactgcaacagggttcatgcaatttggagcgcgggttggcccgttatggcactttttggctgtgccgggaacacagcctgattccgcctggtgagaaggaggatctgatcgttaagaaaggctaccaagtgaaaaccaagaagaagtgatcggaagataaatgtgatcattggtggcctattgctcagcgattgatcatcgattgcattacaatagaaataaatgcatgcaaaaaa

SEQ ID NO: 94849 - DNA, 477 bp, Heterodera glycines
  unsure (1)..(477): unsure at all n locations
atcttttgttaaattttgtttttctcgtcctttttcacttggaaatacaaggaacgttactacgcactttggttttacaaaaattgatgtagcagacaagcaggaaaaggttcgtactgtttttgcgaatgtggctacaaaatacgacctgatgaacgatgctatgagcttaggaattcatcggttgtggaaggaatattttgtgcagcagctgaacttatcaaaagactcaacggtgttggatatggcaggccgtacgggcgatgtggcgtncgaattgtacaagaaatgcgcagacaaccgatcggcaagggatcaatcactggtgccgatatcaatgataatatgctggaaacaggaaagactcgagccaccagagcactctccccatctgaccgagcccgactttcatgggtccgtgctgatgcggaaaatttgcaatttgaacacaacacttacgacttctacacgatttca

SEQ ID NO: 94850 - DNA, 260 bp, Heterodera glycines
tacgaagagaaactcaaaaaattcgaggaactcaaaaaaatcgctgcggatttggaagtgctcgatcaaaagcttgatctttggaaatatgccagtcgttccttggcggatttgcagcgcgcacgcaaagctgacgagcagaaacaaaaagaaaaagtgctcactgttcttttttatggctatttagttatcgctctttccattattgcctattctgttattcgtgtgatcaccatgtagaaatttgaaaagtttgtaaa

SEQ ID NO: 94851 - DNA, 517 bp, Heterodera glycines
acactacggtggcagtgctaagcccgagcatttatctggtctttatcataaaactgttgtacgacatacaaataaatcgcagacagctgagtgctgttgtcaccgaattgagcgctgtgcagagaaagacctttttgcaagtgtttttgatctcgtcgatcaacacaatgactggttcaatttgtttgtacatgcaatacaatgaagcaagtcaatggatgatcactcttgccgaatttgcttggtttcacgtccacggctttccaccggtcatttatttgacgctgaataaaactgtgcgccaagattgccttaaactgtacatgaaactgttcaaccgtaaccgggtcagccacattggcggtgttacggtacttcgaccaaatcgcccacaaccacaacaacgacagaaccatctgagcactgaatcgcctggctatacataaaattccaaagtttgaagtttgaaatgcattggacaaaattttcgccggacgaatttttgaacgattctaaa

SEQ ID NO: 94852 - DNA, 572 bp, Heterodera glycines
ggattttcgacaaagccaataattattgacggaaaagatcatttgcttggacgtttggccgctgtcacttcgaaacagcttttgcttggccagaaaattgttattgtgcgatgcgaatccatcaacatttctggcaacttccaccgttccaagctcaaattcctcgcatttttgcgcaaacgctgcaatgtgaagccatctcgcggacccttccactaccgtgcaccatctcggattttctggcgcacggtttcttttcatatttaggctaggctaagcgtaggcttgtttgggcctaggcttaggcacaggctttgtaaaaaaaaattttattgcacgagttgccattgactcctccggtaaaatatgatagaaaccaagtaaattttgaatcttattcatttaggttcgtggaatgcttccgcataaaaccgcacgaggtatggaagcactgaaaaagttgaaatgttttgacggatgcccgcagccgtatgacacaaagaagaaattcgtacttcccaattctcttcgccacatcgcattgaaaccgcgacgcaaatattgcacagtcg

SEQ ID NO: 94853 - DNA, 526 bp, Heterodera glycines
attcgaatgtcaaccatcccaatgccaccaccaccaacacaagacgaaaaggaccaacaaaagaaatcccaatggaaaccgctggagataggaaatcggatgcgcacgacctcagaagattcggccgagtcttttgacgcctatggaccggagtgggaagggaagggacggggaattgggaacagaagggaattcagttcgccatatatgaccagttcggggagacgaatgagcatctcatagcgctaagatggacgtgcactgccccaggagcgaagaatctcattgggagaggaacaaatggggcaggagaagccgaaaagcatcgtggagaacaaagacttgtgagaattaatgaagggtcagcgaaagattttgggcgatgatgagtggcactgaatgaaggcaaaggaaaagaagccattggaggaaaactaagtcggaatggatcaaagggttgaaaagggaatgacaatttatttatttgtatattttatttcacacttcttctgatttttcaataatg

SEQ ID NO: 94854 - DNA, 232 bp, Heterodera glycines
gctcgccgtatcgccttcacccttttctgtgctcgatggggaccgtgtgccgactgtggacattagccaaaacaccgccgaataccgcgaattgatccccgaggaggtgacctagttctaccacgagctgaccgaggatgacaaaaacgcacttaatgaagtggcagaacgccacgaggaattccggacggaagagcaagcaatggaagcgctgaatgaaaagagtgggaag

SEQ ID NO: 94855 - DNA, 258 bp, Heterodera glycines
tgtatctgaatgcctaatccgagcactttctttttaagggttcgaatgaagacgggcaatcgaattcgttacaacgcaaaacgtcgtcattggcgcagaaccaaactgaagctgtaagcgcaaatgaacaggcggaagacggcgggcgatgatttgacttgttgctgttgattcatacatttttatggactgttgataaaggaaattgtcatcaaaaaaaaaaaaaaaaaaaaaaaaaactcgagactagttctctct

SEQ ID NO: 94856 - DNA, 211 bp, Heterodera glycines
  unsure (1)..(211): unsure at all n locations
cattccatatctgagagatccgncggtgaaaaatctgatgaaaagtctgtgcgcttacagttttctgattctgtctgtccctctcggctcaatgtttctgctgaaaaattgcgttttctaatccattttctgttggcattcgcgcgactcaatgctttattcggcaattgttgccgctgtgatggttcacctggtgctgttcgtttggata

SEQ ID NO: 94857 - DNA, 358 bp, Heterodera glycines
gaccaattgctgtcggagacggatgtccacctggacactctgttggcaccgccgctggggcgtggcctcttttacatgtccaaatttacgttggcgcgaaagcgatggaaacaatcgccggcggagaatgaaaaagttttggaccgttttgaagtggctcttcaacatgtgtacagcttcttcttgacctaaagaaactgcgatggcacaatttttaatatgtgatggagagacaacaaattaagagagattttttgtttgatttatatgtgcgactaaggaaaatgactctataaaaatagttcgaaaattgtatcttttttcttttttaaatataatcagtgtgaagaaaaaaaaa

SEQ ID NO: 94858 - DNA, 292 bp, Heterodera glycines
caattgttgaggaagttcggaggcggaaggatgatcgtcaggcgtgtcatttctgcaattccgtttaagccccatgttgcgacaattgcagttattgcgggtattttcgcgtggatgcacggattcaaagttctgaagaggactgtaaaggaggccttcagcaaagacactttcgtgtaccatcaagaaatggaggattttatccagaaaattagcatagaacaacagaccaaatcaaagaattgttgatttttatattgtaacattataaacgaccgtttcgtttcaaaaa

SEQ ID NO: 94859 - DNA, 382 bp, Heterodera glycines
gggtctggaaaagggtaatggacgcaatggcgttcgtggcgaggaagaagtgaagggaggaaaagaaattgctagcaagacacttaatattcaatcgaagcgtttttatttggacgtcacgcaaaatgatcgtggacgtttcatcaaattggctgaagtagctatgaatggtcgaaagaatcgtttgatcatgtcagtgcgaatgtgcaagaatattaacgaatagtcggggaagattgatgggcacgtgccatccgtcgaggaagtgaatgggaaagcggagaatgtgaccattcaatctgaatctatcgtgaccgatagacgtcgatattacatcgaccttcgcgaaaatcggcgtggttccttttagcggattactcag

SEQ ID NO: 94860 - DNA, 322 bp, Heterodera glycines
gatcgaccggttccttcgaaattttttgctcaacgaacaaatcattcgcaagatggccgactctgtgccgatccgatggaccgcacggtttttgatccgatcgctgttcagggctcagtcggccgttcaaaatgcgcaactgcaggcgatgcaaaaagcgaaccgatttttgaacattttgcgtgaggaatatcgaaaagcaattggagagaagtgaaaggacggaaaaactcataggacggaggaagcaattaaacagagaatgtgtgatttgattctatagcaatttcaattggtgatgacgacgcattttccaaaaaaa

SEQ ID NO: 94861 - DNA, 73 bp, Heterodera glycines
cggcaacaacaaataattaacaaaaaaccaaaacgacaaaaaaaaaaaaaaaaactcgagactagttctctct

SEQ ID NO: 94862 - DNA, 398 bp, Heterodera glycines
  unsure (1)..(398): unsure at all n locations
tttttggctgggtcaattttcttcagtgcgctgacagtttcctgggtcctttgggacaacagaaatcagcagcacaaaaggacttcctccgtgcgctcaattttggcgtcggcacaacggcaaaagaatatggaggaaggagcggcggggccgaggccaacgagtgacctgccgattcgggggaaaaccgatcatccatcccgtcgttctttccatccttacgatcgatcacccttttccccctcgcccattgtatctccttttgttctctttctaatcgctccctctccaaaatgtgtgtcccggctggcgagaatggcagcaccttctaattctataaaatgcatcgtttgttaaaaaaaaaaaaaaaaannnnnnnnnnnnnnaaaaaaaaaaaa

SEQ ID NO: 94863 - DNA, 287 bp, Heterodera glycines
gcgcggaaatcctcaaaaattcttcaaattgccaaaagcgtcgcaattccccgccaaaccctctccgagtcgacgtcatcgaaggccaattgccaaagttgttctctgctgcacaacatgcgcatcttcaggtactgctccacaaggcgcggatcagcgacggtttcgcattggcgctgaacaaaaggaaatgtgcgaatggattggcaaggaaaagaagtgaatgtttgatgcggttattaatttcatttaatttttagctttttgggactgaaaaacggccgatt

SEQ ID NO: 94864 - DNA, 392 bp, Heterodera glycines
aaaaatgaatcgcttcggaataatttgcattttgttgttggttgaaactctgatgcttccagcagtgatggtgggagctccagttgtaattcgtcaaaaacgcactgtgaccggcaaagagttggccaaaggtgccgccatcggagcggccgcgggcgttgccgccacaatggtggcggccggcatccacaaatctttggaccatcgtgcccagcaaaaagcggctaatgaaaaggcgaataatgacggccagatccagtaaagaaaaaaattggaaaatgaatgaattaatgctgatgatgatgatacatcacaatggaaattatggaatgaatatcttaatatgtttagtctttacggaaagaaaatgaataaaagttttacttgagaaa

SEQ ID NO: 94865 - DNA, 497 bp, Heterodera glycines
gatattgtctcattccatttttgcgtcaacgtctaatggtttgtcaaatttttggaatgtgttcaacaccgatgaccaagactgtgatgaatggagtgccgatgctgaggataaagaattcagcaataactatcagtggctccattggggaccgatctccgcaacattactcgttgtttttgctggcttttctacgtcccttgttcatgtcccttggtgggacatttctacaataagcggagctttggtgttcatgctttttcttttatggaactacttagtcttgcggtatttatacttggcctgtctgcttggtccgtaaggataaattataaacatttgtttacattaaattgggcacttctttcgcatactctcgcacacagaaaagcttaaaagccaaaatgttatcagttttctgaataggtatttctggttcttcacaattttccccataacttatacttgtcttctcaagggcgtatctggggggggga

SEQ ID NO: 94866 - DNA, 374 bp, Heterodera glycines
tttttctgccttttttggtgccctctgcaacaatcatccaaatttgtggccaaatgtccaaggttcaaaattcggtgccatgagtgttggccgaagtccgatcactgcgtacctttcacggggcaccatcaactgcggcacaaaatatctgatcacattgcgaaaactgaacacatttctcgcataagcccacgaggaaatggaaaagtgcgaaaaattgacggatggaaaaacggatgaggatgaagcacgaaggaaagcagatgccacaatgaaacaatttgaagcgaaaatggaaatgattggcaaaatgttcgtttaagcagtttcttttttgaatgcccattcaacagaaaacatttatttgtaaaaaa

SEQ ID NO: 94867 - DNA, 445 bp, Heterodera glycines
gcaaaaacaaagcggtgaccgtcgttaaaggcctcaccacttgcggtcagtcgcccgggcgaacaaatcgatggacaattacaacaacggttttgatttgacaaaaggtgtcgacttgaaaaccgcctccaaattcttcgcaaatcgtttcgcctgcggctgttccgtcaccgttgactcagccgacgaattggtcattcagggcgactttaaggtgaaagtgtgcagcccttcccacacattgccattttgttgattgaaggacaaactcttcgtagaaatcccgaagaaatggggcgtcgatgaggaagtcattgaggatttggacgaccaaaagaagtgaccactcccctttcacactgcttgtttttactttaatttatatactaattcattgctttgttgtcgtgccgaaaagataaatttgaattcatttaaaaaaaaa

SEQ ID NO: 94868 - DNA, 411 bp, Heterodera glycines
aaactttctcctgtaaacatcgactctaaaggcatttttaagtacattctcataaaggtttttttctgtgaagattgaagcaaaatgcgaatttaggcttctgatggcgcaattgaaagatttttggttcgtggttatggtcgttgtaaatttcacgcggatattttggaggaagtgcaggcaagcgaaggagagaaggccattgaattttcttgtgttggcggaggccggataaaacatgagccggaagccaaacgtatcttcgtctacggatattcccaggtgcagaattctcaaaaagatttttatcggttgtttaaggggtttggccgtgctgaccatgcgaaatctgtcgaaatcctgagggaacgttatccaaactacacaatcgaatggtccaacgaaggatat

SEQ ID NO: 94869 - DNA, 377 bp, Heterodera glycines
  unsure (1)..(377): unsure at all n locations
atattcaaagttgttctcactggaggtccgtgttctggcaagacaacggggcaggctcgccttttaagtttctttgaaagcattgggtggaaggtgtacaccgttcctgagaccgcgtcatttttcctcggtcctggacgcattcgttttcccgacctgagtagtgagcaggctgctcaattccagacagatttgctcaaagcattgatacaaaatgaggatgtctttttcaaccaggccgaattcagtgaagcggaaaaaattatgatcattntagaccggggtaggtaacataaattagaaatttgagtaatactaccgattgtatcacaccttttttgaaaaaaaatttgttttcaaaaaaaaaaaaaaaaaaa

SEQ ID NO: 94870 - DNA, 524 bp, Heterodera glycines
gccatctataaatctttggaccaaccttcccgaactcaaattggacaacgaattcagacgaacattcctcgcgacagtggccaattcaatgcaaaagccagtggaatcgacagcactaattgtccagtcgggaccaaactgttgccaaatcggaagtgaccctgccgaaccagcgatgattctgcaagtaaaaagaaaataaaaaaaggggtgaaaagtcactcagcgattttaattgattgtttgttgtttattataagatcaaatcaattggctgtgtcagcgcagatgaaaatgtaattcactgtaagaacatcagcgaattcgtccaaagtcgccttgggattccgcccgaccgcgtgatgattcactttcagtctttggagaagcacgaagtcgggaaaggaggaacgacggtggaaaagatgtgccagtaaattaaagaaggaaatggatggcatgttcaatcaccgacttagcaatgttaagaaatggagttaaaagcaaaacatttataattggaa

SEQ ID NO: 94871 - DNA, 325 bp, Heterodera glycines
gaaacaattcaatgccattcggctgatgaaaagtcaatgaattcactttaattattgaccccctgttgcattgtttttatggacacacaaatcggaaaacaacaaatggcaaatggccgaaatcggacccaccgatgcgacgtgcacttcgccactgtacggactctccacgacggacggcacgccaagttcagtcaacgacagctgaacagaatcaacacattggcaaacagttgaaagaatgaatgagcaaatggcaatgttaaaaatggcaattaattaaaaatattaatgcgtccgtttataattaattcatccgcaaaaa

SEQ ID NO: 94872 - DNA, 346 bp, Heterodera glycines
tccaactgtcttccgcttcatcaacacaatttgatatgagataagtcaatcgatgcagacattgcacgatgcgtcgctggtgaagtccctcctcaaaaaacgcgcaaatatcgtgccgtcgatgcgagaattctcgactcttacagggttacaataccatcaacaacatcaaccctgcttaccaaaatgatcaaaattaccatacaatgttaatcctgataatatcttcaattttctcgttgaatttctcaaaaattatgaaatacgcccgtagtcattcttcaatgttttgttattttttcgttgaaaacacactgataaatatgttatggtgttaaaaaaaaaa

SEQ ID NO: 94873 - DNA, 684 bp, Heterodera glycines
tgtccttgtcggtggcaagtcttgttgcattgctcgttttacttgccatctccagctatccaacctttgccagtcctatttcttcaagagacttaaatgatgctgctgaagcaggtccactccaagcagttgaaaagcgtcggaatgcagaattcataaatggcttactgacaatggagcgtctgaatgcgatgggcaaaaggtctccagtcccagcatcatcagatgatggagtcgggccgatgacactctggcgtaaacagcacccggacttatggacatggtgagagccaaggatgaagcaaatcgggggattatgggtcggcttaaaaaacaagtataaggtgaatgacgcatcatggaagttgggaatagataatgcgggggcgagagtgaaggggacggagattggggagagaagtgtggacatgtatgtgttggggacggagaggaggaaggagagagcggagaggaagagtggagtagggagaggcggagagagaggggaggtgcggagagtggagagaggtggagagagtagagagggagagagagaggtggagagtggagagtgagagagaagagtgagaaggagtggatggaggagaggagagagaggtgggggagagagaggtgagagagggagagggagagtgagagagagaagagtgagcgagagaggta

SEQ ID NO: 94874 - DNA, 2032 bp, Heterodera glycines
tcaaaaaagctttatcctcgtgctatccttttttatttgctgatcttttgcaatttcggatagtgatcactgatcgcttctcatcgaaggagggaacaaatggcagttttttggggacgaaatttggatgaattggggaaactacaaaaaataagaacaataaggacaccggaaagtggggagaggggcggggcggggtaccagaccccgaaaggctggcctcaagaccgagctcacgcagctactccgagcatctcagcgcactccgcctgcaaatgccccattcgccactgaacagaaggacagcaaaccccagtctggaggctagcagcccaacgtacagcaacaaacgggtgaatgcagaccagatacgccagctctgtccgtttccacctcatcggtttcacgtcctctttaactctctcttcaaagtgctttgcaactttccctcacggtacttgttcgctatcggactcgtggccgtatttagtcttagatgaagtttaccacctgatttgggctgcgatcccaaacaacccgactccaagacacgtaaagatggataggcaccgccagttggacaggtcttgcaccttctctggagccccggtcaagggaaacttgaacaagcgggccaacccaagctcacggtctatacgctacacctcgcaaccccagaggagctgcgattcagcgctggactcttcccagttcactcgccgttactacgggaatcctcgttagtttcttttcctccgcttactgatatgcttaagttcagcgggtgttcacgtctgagttcaggtcgaaaaatcaaagcaggaatgccagtaatccaggcactccgccacagcatgcaaagcattggtgcgcccgagttacggtccgtaaaacgcgaattagaaccacaagttcgcgccagcacaccaaaaccccacagccgagctgagcaagtaacgtaagaacacgtacaagtacatgatcccacgaagcaacgcacaagcagtgcattttatggtaacgaccctgaaccaggcgtgccaatggatgtaactccaatggcgcaatgtgcattcgaatgttttgtgttcaaggtttctgcagttcgcactaattatcgcagttggctgcgttcttcatcgatccacgagccgagtgatccaccgataagactagaattcattcttcaacagaagtgtaaaaaaataataatgaaaaaaaaagaaaaagctgggcggtgcccgagctgacactcattgagtcttaagccacgtgctaggccaagcacgggccctaccacgtcgtctcatcacggccacggacgtagcagcaagcacaaacacaccgctagttacggcacgtaagaccgggaacgaaaccaccatccccagtcagtgtgttatgtgcctgctgctacgtccgtggccgtgatgagacgacgtggtagggcccgtgcttggcctagcacgtggcttaagactcaatgagtgtcagctcgggcaccgccagctttttcttttttttcattatttttttttacacttctgttgaagaatgaattctagtcttatcggtggatcactcggctcgtggatcgatgaagaacgcagccaactgcgataattagtgcgaactgcagaaaccttgaacacaaaacattcgaatgcacattgcgccattggagttacatccattggcacgcctggttcagggtcgttaccataaaatgcactgcttgtgcgttgcttcgtgggatcatgtacttgtacgtgttcttacgttacttgcttagctcggctgtggggttttggtgtgctggcgcgaacttgtggttctaattcgcgttttacggaccgtaactcgggcgcaccaatgctttgcatgctgtggcggagtgcctggattactggcattcctgctttgatttttcgacctgaactcagacgtgaacacccgctgaacttaagcatatcagtaagcggaggaaaagaaactaacgaggattcccgtagtaacggcgagtgaactggga

SEQ ID NO: 94875 - DNA, 817 bp, Heterodera glycines
atgagtcgaaatcgtctcccaccagaacttttactcgaaattgtcctctgcgttcgcaggggacacaacacgcctaacatttgtttctcttctcgcattttacgaactttcatggagcctcgagttgcgctgtggcggagagtttggatttctatgttacgcaaactatctgacgcttatttaaaggcacttttgacgtctatttggaactatgtgcccctggatgaaaattgccaaatgttttttggaacacttaacggagtttttcgtcaattggaagacagagaaattgctgccaattgtttgatcagtggtcgcggcggcatcaaagggcaaattcggctcgcacagggcgcggagaaagtactttctgtcagtgggcaaattcacagcccttccatcgagcctgacagaatggaagtacatgacctggggaacgtcaccgctggtagttcttctaccggtcggtctttacacacgttgtgtacttttgcctcggttggtgctgccaatgattacgttcccgctggtgttgtcacggctccgttggctctcagcggttcaaaaatcaattgcatcggtcgttctcttgtcgtttttcaagaagggcgttccgcattgggaagtggcgtaatcggttacgcgaaggacacgcgcattttctcggacgagtttgacgaaatctttcgtaatttgattacacagtacagaaatgtgaacgtctcagattgttggcttgttctcagagacggcacaagttcaaatccagattgtcgcgcgttcttcgacatgttggatgagattttggcgacggaag

SEQ ID NO: 94876 - DNA, 644 bp, Heterodera glycines
agtttgagatgttacgcaaactatctgacgcgtaccaaaaggcacttttgacgcctatttggaacttagttcaacaaatacttgatgaaaattgtcgtgtgttttttggaacacttaacggagtttttcgtcaattggaagacagagaaattgctgccaattgtttgatcagtggtcgcggcggcatcaaagggcaaattcggctcgcacagggcgcggagaaagtactttctgtcagtgggcaaattcacagcccttccatcgagcctgacagaatggaagtacatgacctggggaacgtcaccgctggtagttcttctaccggtcggtctttacacacgttgtgtacttttgcctcggttggtgctgccaatgattacgttcccgctggtgttgtcacggctccgttggctctcagcggttcaaaaatcaattgcatcggtcgttctcttgtcgtttttcaagaagggcgttccgcattgggaagtggcgtaatcggttacgcgaaggacacgcgcattttctcggacgagtttgacgaaatctttcgtaatttgattacacagtacagaaatgtgaacgtctcagattgttggcttgttctcagagacggcacaagttcaaatccagattgtcgcgcgttc

SEQ ID NO: 94877 - DNA, 476 bp, Heterodera glycines
gtgcatcgatgcaaaaaatttacgaaagaccggaaaaatacaatggtggaggacgcgtcgcgacaattccattttctaacggagctttgccaacaaatcacagtttgtattctttgcctgttcggtatccgaagggcctttgcggcttggccaatttgggcaacacctgcttcatgaacagtgccttacaatgcctaagcaatattccggaattggctacttttttcatcaacggagaatattccgaacaaataaatacccaaaatcctctgggcacccaaggcaaattggcacaagaattcgctgaacttctcaagaatatgtggtcaggcagatattgcacctttagaccgtttcgactcaaatgcgttgtcggaatgttcgcgacccgtttcaacggatttgcccagcaggattcacacgaatttattgcatttcttttggatggccttcacgaggacttaaatcggcggatt

SEQ ID NO: 94878 - DNA, 1188 bp, Heterodera glycines
ctccgtttcctttccaatgggccatttctttcccggcaccgtttccttcccaatttttctctttatgctcgggtccgctcgttgctggtggcattttggtgccaaacagcctcgggtgttcgcctcttcccatgcccaattgaccccgcccgaagggatcgaatcggccgacctccgaatgcccggagtcagtcctcaaatgaatgagtcgtatttgtgcagtgcgttccctttggactccgagagggaccattttatcgtgggtttcgagccggtgctctcttcacggcacattcaccacgtcattgtctacggatgcgaaatgcccggcagcgaagacaaagcgtgggattgcggggagatggcctcgccccggggcagctacagccattcgcccgtctgtgcctcccaaccggacattgtctacgcttgggcccacaatgcccccgagttgcttctccccgatggggtcgcttttcgcgttggcggttcttccgcggttcaattcctcgtccttcaagttcattatatgcgcgcggaggaggatgacacttccggcattcgaatcattcacacggatcggccacagccgcggcaggcggcgacgcttcttttggccactgacggacgaattgggccgaaaaggaaagaacaattggaagtcgcatgcgtcgtcgatgagtcggtggtgctccatccgttcgcctttcgcgtgcacacccatcgccacgggcgaaaagtcggcggatgggcggtgcgcgaagaaccaaagagtgggacggacaaatggacacttttgggacagagggacccgcagctgccccaaatgctccaactggtagccaaccaatcggtgaccatcacccaaggcgacgtattggcggcacgatgttcgatggaaaacgaagagaagcgggaaataaaaatcggaccgacgggggaagacgaaatgtgcaacttttatttgatgtattggaccaaaaatggacagactctcgagcaggatatgtgtttctcacccggcccacccatttaccgatggacgaaaagtgccggactgaaccacaccccaaaaaggaaatgaaagaatcaatgggagcgcactgcgcagatggggaggacgaacccattaaattatgcatcatcatcggttgatatatgtacaacaaagaaattcacatgttaaaa

SEQ ID NO: 94879 - DNA, 442 bp, Heterodera glycines
gttattaaaattgttgtttttcaaaaaggatactaaaactgggataacccattcagagactagtcaaaaaaaaaataataggcttggactaccatactaattagaatttttagaatgtgtctgttaaatgcaaaactgttgtgaaaaattgttataactccattcagagaagagatagaaaaaaaataaaaataggtttagagagcccgtgaacagctgcatcggatgcaagtgccgccgttgctgtacgcctaacagttggtgagcaatgacggaaaattgcttaaaaaagaaaccaaacaaactcatcaattgttagctcccgttggcaaaccgaagggtacattggggcaatggatgttgggctaccgtatcagttattaaaattgttgtttttcaaaaaggatactaaaactgggataaccccattcagagacaagtc

SEQ ID NO: 94880 - DNA, 652 bp, Heterodera glycines
caacaacaaaaaaattatgtctggtaaagtgcattagtacccgcttccttttggtttctaattcgccaacactcggaggaatgccaaagaaaagaccttctcttgcgcttcttcggagaggtgcgagtgttgtcccttcccccgagattcactcggcttcgtcgagtctcgaaagtgctttctctttccaccaacaaaacgtaaggacagcctttctgttcggcaaaaacaatgtcctcgcattttctggcgacagagaagcccctggttatttgtcgcttcatcatgaccaaaatcggatgcttattctcaaatggattccgaattcgcttctcctttcgaaacccgggggttcaacaacaaatgctgtcaaaagtccaagtcactcatcgcattgtgtgccggtgtcgattaaattcgagaccgtttcacatttgcacttgcataaaaatgagggcactctttcatcttcaattgtccttatcgattctgatggtgttcaacagttttgcttttcgttctctcttgagcaacattgtttctcctttctgaagacgttggaaggcgcacttttcccacttttcaaaatcgaccccccattaaattccattaaaatcgaatgcggtgccacaggtcgtccactaatgggaat

SEQ ID NO: 94881 - DNA, 1013 bp, Heterodera glycines
cgaacattaaaatagggctaaacgagcacaaatgaacagtgagtgatttgaaattgtccaatcgaataaacaataagtgacgacattgaaaaaatcgatcactgctcattttgttccttgtttaatcaatcgatcattcgtccaacaaaaacccaattagggaagtgataatagcaaattgattgggcttcactcaattccctccctactgctgatccatcctaaaaatttggacggattgtctttttttaaacggccaacagtcaatttggcctttcactctttcggtctgttcattcgaattccccctccctcccctctttgtctgatgggattatccgatcccttccctaattgccttcccttttccttaattgccttttcgcttcgcttcgtccactttattttccttcctttgtttgccattgaatgattcgccttcctccccattttgttggatcatttttccgtttttattctgtgtgatctccgatgaaacatcgccgtcgcttggggggttttgccgggttaaaaagtgcgacaggaagtgcctacggggagaggcaacggaggcggtgggctgacccattggtgacggtggcgtcgaaaaatgatttgacggtggcgcccgagggaatggccgacgatggcaaatccaagtgggcttagagaaaaggcattgattttggcattacaacaaatcagtggcatttcgtgtcgacagacgcttttgccagccgacccggaggaaacggcagagagcaaagaggagacattggcacaacttctgaagagacatctgcgaaatttggtcggccggtcgttggcctacgcattatgacaaaaactgattgtcttcggcaatttcccttctcaggtgcatttcttcgttgaggattggttcatctccggcatgctcggcttcatcaccgccgctctttccatctccgtggacgttggctatgaatatttgaatcactgtatgccttttgcgccttctctttgttctctct

SEQ ID NO: 94882 - DNA, 1506 bp, Heterodera glycines
gtttgaggttaattattttgtccgtcctttttgtcccactcaaaaatgctcagtcgaatgttgtcctcggctgttgccgtccctcggatgtgtgaatcaaacaaaaaattgttgaggaaaggcgcgactttcgttggtcttctctgtgggcgaatggccaactcaactttcactgccacagttacccctcctcatcggctcttacgtccgttgcatatcaacgaaaaaaaattgttcggacctggtcccaataacatgccaccactcgtccaggagggactcgttcaaccgttgcttggacatatgcatcccgagttcttcgaaattatggatgatgtgaaagccggcatcaaatacattttccaaactgagaatgcgctgaccttcgctgtttcgggcactggccatgccgggatggaatgtgccattttgaatctgctggagcctggccagaccattttggtggtgcaaaacggagtgtggggcttgcgggcagcgaatttggcggagagacttggcattaaagtgcatcgattggtcgtaccggagggagaagtgattaatttggacgattttgccgaggctgtggataactaccgtccccaagtggcattcgtttgtcatggtgaaagttcgaccggagtcgtccatcccttggagcgttttggcgatatttgcaatgcatatgacgttcttttcctcgtggacaccgtcgcctccatttgtggtgcccctttccatgccgatgcgctgaaagttgattgtgtgtatgccgcaactcaaaaagtgttaaactgcccgcccgggttggctcccatttcattcagcgaaaaagcactggagaaaataacgaagcggaaaacgccgagtgccctcattttatttcgacgcgttagagttgggcaattattggggctgtttcgacgagccgagaagataccatcacacggcgcccatttcgttggtttatgcgctacgcgaaggtctttcagcagttgcccaggaaggaattgggcacatggtaaaccgacacaaaatcaatgcaaaacttttgtatgacgcttttgaccaattgggactggaattgtttgtccaaaaagagaataatcgtttgccatgtctcaccaccgtacgcgttcccgaaggtgtcgactggaaggcggtgcaagacaaactgatggcccaaggatttgaaattgccggcggattgggaccaacggcgggtaaaatatggcgcatcggaacattcggaatcaattcgaacccggaggacattgagtcacttaaacaagcattgaaaggagcactttacgaacaagaggaaaagggacagtcggaccatttcaaggcggccatctgatgacagagggaaaaatggcaaaataaattaagacggttaattaacaatgggtagatcattaacataatatatcttttggttattttggcacatttcactatgaacatgtcaatttttaaaaaggacggacaataaagttaaacggc

SEQ ID NO: 94883 - DNA, 657 bp, Heterodera glycines
ccaagcttgaggtatttattctcgagtataacttggattttacaatacctaattgactccaaaatggaatggtattctggtgacgttactactgctctgaacatttaccaagagaagaaaggcattcttatcgtctatgttttttctgatgatgtaaattccacaaaatttgaccaaatttgggattcgtttgaccattcaattctggatcgcgtcccttatgttgctattcgacttgctaaggacactgaaggcgcaaatcaattcgctcaattctttcccactccggtttttcctgtctgttactttctcgggctcaatgctcaaccgctcgaagttctgactgccgttgaacagatgaccattgaacgtttgaacagttcgctcgctaaggctttttcgctatacaatgaccaaatgaaggaacaaggcttcgccacagatgcagtttcatttcaatcgaaaagcagtgagaatgacagtggcaaaaatacttccgaaaatgttcccgagcctctcaatgccacttcgaatgacgagaaactcgaatattatcgcaaacggctcgaagaaaagcacaaagaagacgccatgaaaaaggagcaggaggagcgggagaaggagataatgcgcagaaatgaaggcaaagcactcgct

SEQ ID NO: 94884 - DNA, 621 bp, Heterodera glycines
gcaccggctaacgccgtaacacactacggatgacccacattcaactgctgttcacgtggaacccttctccacttcagtcttcaaggatctcacttgaatatttgctactaccaccaagatctgcactggtggaagctccggccgggcccacgcccaaagccttcaacgcaaccactacgaccctcctacacgtcatggccagactacgcgacaagcacgtgtacaagccaatgacggtggagtataggtggcccgctccagcgccatccattttcagggctagttgattcggcaggtgagttgttacacactccttagcggattccgacttccatggccaccgtcctgctgtctatatcaaccaacaccttttatggggtctaatgagcgggcactttggcaccttaactccacgtttggttcatcccacatcgccagttctgcttaccaaaaatggcccacttggagctcaaacattcaacgcctgggttcagagtcaagcaaccctggcttcatacccatttagagtttgagaataggttaaggacatttcgtccccaagtcctctaatcattcgctttaccgagtataactgcttaacgagctccagctatcctgggg

SEQ ID NO: 94885 - DNA, 2141 bp, Heterodera glycines
agaaaaaaaaataggaaaattgttgaaaaatacttcacaaagtcagactagagtcaagctcaacagggtgttgtttccccgctagatttgccaagcccgttcccttggctgtggtttcgctagatagtagatagggacagtgggaatctcgttgatccattcgtgcgcgtcggtagttagccgacgaggcatttgggtaccttaagagagtcatagttactcccgccgtttacccgcgcttaatcaagtttccttggcttaacattcagagcactgggcagaaatcagacacggtcaacgtccacaaggaccatccgtctcctctgttttaattagacagtcggattccccgagttcgtgccagttctaaactggtcgttcagcgccaaccgaagtgcataccctgacgagcatacacgcagctgaagcgctccacaagcagctctcaccactagtccacgcaccatccccgaaagaacagcacgcagccacgggcaaaagccgcctgtttcacgcaacagcccggctgacccgacctttagagccaattcttttcccgaagttacgaatctaatttgccgacttcccttacctacattattctatcgactagaggctgttcaccttggagacctgctgcggatatcggtacgatcaggcaggagattcaaatagcttccctcgcattttcaagggccgtgtggagcgcacgagacaccacaggaaccgcggtgctttacgggcgcaacatccctatctcaggctgagccacttccaggcacgcacaccctaaaccagaaaagagaactctggctcggactccacacgacgtctgcgagttcatttgcgttaccgcgcaaaacagctcttgcgaaccgtcatttccctagcctggcgtgggaatgttaacccacttccctttcggcaaccggatggaccaactgcgcaagcacagaaaagtcgtcatccgtagtgtgttacggcgttagccggtgccttaggatcggctgacccacattcaactgctgttcacgtggaacccttctccacttcagtcttcaaggatctcacttgaatatttgctactaccaccaagatctgcactggtggaagctccggccgggcccacgcccaaagccttcaacgcaaccactacgaccctcctacacgtcatggccagactacgcgacaagcacgtgtacaagccaatgacggtggagtataggtggcccgctccagcgccatccattttcagggctagttgattcggcaggtgagttgttacacactccttagcggattccgacttccatggccaccgtcctgctgtctatatcaaccaacaccttttatggggtctaatgagcgggcactttggcaccttaactccacgtttggttcatcccacatcgccagttctgcttaccaaaaatggcccacttggagctcaaacattcaacgcctgggttcagagtcaagcaaccctggcttcatacccatttagagtttgagaataggttaaggacatttcgtccccaagtcctctaatcattcgctttaccgagtataactgcttaacgagctccagctatcctgggggaaacttcggagggaaccagctactagatggttcgattagtctttcgcccctatacccaagtcagacgatcgatttgcacgtcagaatcgcttcggacttccaccagagtttcctctggcttcatcctgctcaggaatagttcaccatctttcgggtctcagcgcatacgctctgtctccgccccatcgcatgcgatcgagacgggactatgttgcgccccaacaccgcagtgccagggatcacacatcagctccgtaagaagccttcactttcattgcgcctttgggttttgaacacccaatgacttgcgcatacgctaaactccttggtccgtgtttcaagacgggtcgaacagatgaccggcttttacaccgagaacgcacaagtgagagcctgagctggaccgaactggttgctggtacgtgtcgcacgcgaccgccaccgacccccagctcgagtcaacacggacccgaaaccattgcacaattcacccagagtaaacagcactcccccgatccgggtaccagaccccaaaaggctg

SEQ ID NO: 94886 - DNA, 385 bp, Heterodera glycines
aatacaggtctgataaagccttttttgatcatttctttctttgatctttttgggcctgatcatttttgtttcaaaaattattttccataaatttatcgccaatcacttaaaaaattcataaaaaccaaatcctgtacgaaagaccgaaaaatcgccaattttaaaacaccacggcaaatttcaaccaaaaactgcccataacttttgtcaaagtcaaataaattagacattcttggtatcattcgatagccctaacatttctctattagctaagctaaatttcaaaaaatttggtcaagattgagcaaagttatggccaaagcacaatgtaacaggttttcacacatttttggccataacttttttaaaaccttttaaaattttg

SEQ ID NO: 94887 - DNA, 480 bp, Heterodera glycines
tttaagttcttggatcagggacgatcctcagatatgaaggggaggtatagtcatacagtcacaccaaattatatcaaaaatccaaattttagtcgattggaaattaaaacaattattaaatttatataattttaaaagttttaaatttcatcagattttctcttgtctcataatttgaaaagcaatgccaatttaattcaaatccaattgaatcagaatttcaagaaaattaatttaaaaagggcggatttcttttagtagctcaatgacagagcttctgtggattggttggaggaatgggttcattcccattagaggctcggcattttccatttttattttgagtaattaaataaatatttaaattattttattttcagttttggcttaaaatcaaaacaaatttctcatcgtaaaacaaatcaaaagaaagaaaaagtctgaggacttcattcaaatttggaaattatttaaatttta

SEQ ID NO: 94888 - DNA, 990 bp, Heterodera glycines
tgagatttcgttaatttatttctgtcactttccgtttcttattctctcgaattgaaaatggttctgttgggtgccattgaccaggggacttccagcagtcgttttctcgtcttcgattccgaaaatggcaatttggtcgccggtcaccaattggaagtgcagcagcaattcccgaatcccggctttgtggagatgtgtcccgagcaaatatttaagacgacagtccgatgcatcaaaagcacttgcgaggaactgaacagacgcggcattgacccgaagaaagaaatcaaagccatcggcataaccaatcaaagggaaacaacaatcgtttgggaccgagagacggggtgccatctgagtaatgccatcgtttggttggactgccgaacgcatgagctttgtgacgaatacattcagaggacgtcgacacgggacaaaaaccatttcaaagcgaagaccggcctgccaattcacccgtacttttgtgccctcaaacttcgttggcttctcaacaatgtgccagaagtaaagaaatcgctacaaaatgggactttgatgttcggtacggtcgactcgtggcttatgtggaaattaattgggatccatgccaccgacgtgaccaacgcgagtcgcactttgttgatggatttgcagaaccgcaaatggtctacagaaatgtgcaccttttttgacattccaatggaaattctgccggaaattcgaagttccgcagagatttacgggcaccttcagaaaggacctttggaaggcattcctttggccggctgtctcggagatcagcaaagtgctctgcttggtcacggctgtttgcaggcgggcgaagcgaaaaacacttacggcaccggcacttttatgctttgcaacacaggacaaagggcgtacatctccaagaacggacttttgaccacaatctcttaccaattcggccaagcgtcgcccgtttgctacgccctcgaagggtcggggtcc

SEQ ID NO: 94889 - DNA, 729 bp, Heterodera glycines
ctttaatttaatcctttcttccgcttcgaattagcaaaatgatttcgtccaccgccgtgcctcgcccccttcgctcttcgaatcaacaaaaacagcagccaaacgcactgaccaaacagaacggtgctcatcagcagaagacgcctatcaaagccagggaagacagcagaaacaggaacgacgcattgggcgcacagaaaccaaacggtcattcgccgcgtacgccgagcgttccgccggtgaataagcgatacgctcacgtaaaaagcaaagtcgggtcaatcactgagtacactccgtcgcccagtcgcgtgaagattttccacgagtctgtccgagtcagcgccactcccaaagtcggctcactgcaaaatgcgtcccatgtgcccgccggtggaaatgtgacgatcgagaacagaaaactcaacttccgggaggcagcaaagccacgggtggaggacaaatcggaagtgccaattccaaagagtgagaaaaagattgcgactcaaaagttggaatggaaagcccagcccaaagtcggttcgttggacaatgtgaagcacaaacccgccggggggcaacctcaaaatattccacgagtcggtgcgggtgaaatgcgagtccaaagttgggtcccttgacaacatcggacacgtgcccggcgggggcaatgttaagatttcggattacgcacgcagtgtttcccgcagcggtgatggctgcagacgt

SEQ ID NO: 94890 - DNA, 462 bp, Heterodera glycines
cctcgagccgagaccattcaatcaaaaccaaccaaatccccactcattagctcattatgaaatttgcccctctggctttgcttgtgatccttttggtgtctttggtcgctgccgtctctgctaattccaacaacccttttgatgcggacgcggccgacaacggtggcatgaagcgcgtcaaacggcagcaacagcaatggcgttggagtccgcaacagcagcgctgggtgccaataaacattgcgaatgtgaacattgctcagaatggataagcgcactgagaaggagccgaaccgaccgaccgatggacggacggagacgaaaactgaggacaaaatgccaagaatatgtgtgatcagtgacaaattcaaacccaatgccgcgccctttcgattgccaaagtgcaaaaatgccactgataaataaacaaagtgaattaaaaaacaaaagaaaaaatacata

SEQ ID NO: 94891 - DNA, 689 bp, Heterodera glycines
ccacctttgagttattcctgttgtactaattaaaaataacatgtaaaaatggcagcaaaggaactgttccttgctcagcagcccgacctgttcaagccgattcaatccatcaatgccgtgctcatactgatctgtctcggctcctccaccgccgtgccgggcattggcgtcctttggttcatcggcctttgctctctgatcgtctcagtcaccgccacggtgatctttctgctgaaccgtgaaaatggcttgtccggcgtcaccatttccggcgcttttctcccctggggcgtcattgaatttgtctattcgtctgtcctcacgctgctctgcggggtgggcttttggctttcattcggcttcgcctcccacgtgccggacaatggccattcggccggctatattttcgcggggattttcctggtggcccaagtggcctgctatgccatccctgtgctgatcatttacgatcggagccgaacggacggtccggcagccgccggacacgaacaaatcgccaacgtacatccgtttggggtcaccacggacggatgtgagcagcactaccagtcaatgcaacatgaacgtcccattgtctgacattgccaaagttccgttcgcattgactcctcccattttttggcccaatttcaccattttttgtttattaattattaaacagtaattgc

SEQ ID NO: 94892 - DNA, 503 bp, Heterodera glycines
gtttgaggggttccagagagctcgtcaacttgagacacacattgaagttttacgccgcaaaattgaattattgcgagaacagaattatcggttgttggagaaccgtcttctgagagaccagaaccaacttctgagcgatcagaaccaacttctgagagaccggaaccaacgtgtgagcgagcagatccaacttctgagagacgccgctaacgagcgccggcaggctggcggtggcatcgacgagggtgccaacgtcggtggacaggccgaaccaagtgaccgtgatgccactagtgccgaaggacagcgcgagccgaacggtggtggcaacgatcgtgatgcgggtgccaccaactgactggcatttacaagaccgagagaagcagtttcctgttgatgtaagaacataaacaaatgaaaaccatccactttttgttgcagaaaatgtattagtaagatcatacagaaaaatttaatagcaataaaaagatgtgtgtgaaaaa

SEQ ID NO: 94893 - DNA, 160 bp, Heterodera glycines
ggtgcaccaatatttgagcaaattgcgccaaaaatgctagtgctcgcctaattctaagcctctgccacgcgatcagcatcaaataagcatcatcgacaccgagggcaagcaccaaaaagggcgtaacacaaagcagtgacccttttaattgggaaaattt

SEQ ID NO: 94894 - DNA, 603 bp, Heterodera glycines
gttcagttaagccattctttcacttttgctcactctcatttttcactgaaaaaaaccatcgccaaaaagtaacatggaaaccaagcgcaacaactacaacaacatcgactcgttgtggagcactttgtgtgacctcggctaccaaacctcgcagggattggcctactccgtcggcatgcccaacttctcattcggcgccttcattttgctgtccgtcatgacttggtgctgctttttcatgccgcccgtggctgtgttcttccgcggctatctgcgcgacgggaacgcgtgcactgagcatgtcatttacaacatcattttgtgctttttcctgtgggtgcccggcatggtgcacgccttttggtactgcttcagcgacatgttcagcgggccgaagaaggagggcgccgggtacagcaaaaatgcctgagcagaagagcactggcgagcggacgaacgcagaaatgagcattttttgaaaaatgacgtcatcgatcttattaatttttgacacctaattaagcgataattaattatctctctcacccttttttcatcttgtaaaagtttcaccattaacctatcttttggttgagaaaaatt

SEQ ID NO: 94895 - DNA, 476 bp, Heterodera glycines
gcatttggttcccaagacggcgtcgtgtcctttgttgacattcgtcaggtcaatcggcagttacccgtcgccttcaaagtctctcaacatccgatcagtcggatcaaattccatcccatcttcgccaataatttcttctcttcctccgattctggcctaatccattgggatgccagtgctttggcccaaggagcgaatttaaatccgccaacaaacggaagagaaatgactggccacgaatctgctgcggacatgcggacgaccggagaaaatgaacacaccaacatttggttgtctccccatgcttcgacgagcgttaatttgcgagtgcttattgacgaggaccctcttctgctgagctctttcgacgttgtgaacggtgcgatcgtcgccgcttctcatacggctgaattggtgtttatgagcaatgataaatttacaaattgaaaaataatcagctgactggaaatctcatt

SEQ ID NO: 94896 - DNA, 388 bp, Heterodera glycines
cgccgctccgttctctctgcccccgccaatttttgctcatcactgtcattttgcgacatttgtaaccgaaaattcatctctccacgcggggtggcacttcacaaaggcaaggcacacaaaggggagagcagcagcaaattggtcaagccgaagaatatggcgaagtgccccatcgccacccgcgcagtcaaacggggccgtccccgtaaggttggcgtagtgccgccgacgtttgttgacactgccaaaaaaggacgagcccattccattgccgccgtgccgccgattggccatcaaaaccttttgagtggccgtcaccgcaccaaacccacaaacgccgccactgctcagcagcaaccaaatggcaatgtgcaaattccgaagttgc

SEQ ID NO: 94897 - DNA, 351 bp, Heterodera glycines
gtttgagataaaaatgcgcttcttctttcttctgaccattgctcttctctccgttgttcttctcctttccccaagtgcactcgcaaagaaaagagcccgccgttcgatgcccgttaacgctgccatgccggaatggaaaattttgtccgctgaagtggaaaacgatggcacagcataagaaggaggaggcaagctttggatcatcggcatgatcgaagaaggaatttgccaaaatgatgaagaataaaccaatgaatgttgtggatttgtagaaattcattcaaatgccgggaataaaaatagttaaattagctcatcaatgacaaagcacgagcaaaaaaaccactcaac

SEQ ID NO: 94898 - DNA, 483 bp, Heterodera glycines
aaatgttcaacaatcacgccaaccacttcatgccgaatttttgcattcccccacctccgccaccacaacttcctcaacctttgaattcggctcgagttttctttccgccggttcctcatcaccatcatccggcttattaccttcaacctcaacatgcacatcctcatatgaaccctcagttcttcaatttaagcgttccgcctcctccaattacgcaaaatatcagcagtttgatcgcagcaaatattaacaactatccaactcgtcatccgctcaatggcacacatcaaataaccacatcggaaaggttcagcaaaacgttccatactgggcatgcgaatggtttcacatcgaaaggcaatggagcgccgctcagcaggtcaagaaagcgatttcttgaacaaattaccaacgaagaaggcacctcgggagaacttcgaattgaattggacacagcgcccaaaaatcgtcaactttcgggac

SEQ ID NO: 94899 - DNA, 406 bp, Heterodera glycines
cctcgtgccgaattcggcacgaggagattcaaaagcgtttcaattaaatgatgagtttattggccagtaataatgcgtcgtccaatgggacaaacgctgctgccgttgcacctttgtcgccgctagcttcgtacaaggagcagcaacagaagcacaaattcaaaaagcctaacccgctagaccgttttctctacaaggttgttccggctcagacgcatcccttcacccagctttgttacaccgctctcatctttggcttatgggcgcaactcgggcgttatatgcgatgattctacgacgaaagaaggatgactaattttaggcttttgactctatgtgtgtgtatcgtcgcaaacacttgaataaaagttaaaaagtaaaaagaaacaaaacagacaaataaaat

SEQ ID NO: 94900 - DNA, 466 bp, Heterodera glycines
ctaaaaacagtggccctgattgtaaattaccactaaaatggcgacttcttcaaattcgaccacaacagtcgctgagccgttgccgacaaaaacttcgatgaaaattgccgaattgcgcagccgcgttctgatcggcgatttgccagccgactttttgcgcattccgccggtctcttcctccgtaaatctctcgtccgcccccgaccaaattgttgcccaacaaccgcaacagattgtcgtcccttatggccatccgtacgctttcgtcaatccggcggagcacttttattccttcgttccaccgcacacgcgggggcgaattgcggtgaaaattgtggaggcgaaactgaccaaaagttacggtttgcccggcgtccgaatggatccgtacgtccgacttcgaattggcaacactttgttcgagacgcccacctgcgtaaatggcggcaaatcgccgcattggaat

SEQ ID NO: 94901 - DNA, 1225 bp, Heterodera glycines
tttccctttttctctctttttcattttcccttttcatttccattccaagaattccctccacctttttctccaatttcttaaatgatgtccaacgcaaccaaaaacattctcggcactccaacaatcgtcgacaatgttagtttcgaccccaaagtgagcgccaatttccttcacaaagccatcgaagagaagcgaaaggatgagattatccatttgctgtgcaccatttccaaccaacagcggcaagaattggcacgcgaattcaaacaattgttcggcgaagatttgtccgccaaactgaagaaggcactctctggcgactttgaggaactgattttggctttgttggaaccgccagctgtttacgatgcgcagcaaatgcaccgcgcgatgtccggcctcggcactctccgagggatcggttctgattgagattttggtcacgcatagtaaccgacaaattgatgagatgaagcgcgtgtacgagcagctgtacggccatccgctggagaaggacatcgtcggggacaccagcggcgcattccaacgactgctcgtgtcgctgtgcaacgattcgcgcgacgaaagttggagctccgacccgatcagagcgaatatgacggcacgtgctctgttcaaagagagcgaggtggagagcggggtcaacgacgttctgttcaaccaagtggctggccaacgagaatttcattcagttgcatttgattttcgaggagtatcagaaggtcagcggtcatcccattgagcaggcaattcagcaacagttcagcggagacacgagggacggttatttggcggtggttgagtgtgtgcacaatcggcacgccttcttcgccaaagtgctccaaaactcgaccaaaagcttcctcggcattggcaggcgcgactcggacttgatccgactgattgtcactcgtgccgagtgcgatatggtcgagatcaaagagcagttcatgcaaatgttcaacactccgctggagaaggccatcgaaagcaactgttccgggccgtacaaagacggacttttgactctggtcaaagggaattgatcggcggaagaagcgatctgaagatgattgatcattggcattggattgattgatcggatttgccactcgctttatcatttattttgcttgcatttggtcagtgtcaccaattgtaaaggtcaaacgttggagaatgcaaataaagaaagtccggcgct

SEQ ID NO: 94902 - DNA, 637 bp, Heterodera glycines
gtccatttaagcttaataaaagtttttgcgaaacaaaatggctgatgagaagaatatggtcgtggagaagaatacttcatcttcaacttctgctactgactcttcaccagacggagggaactatatcaaagaggaaatgctccagagagaggttttttgtgagtgtcttggtggcgaacgtgtttcggtccgtgcttcgcttatgtttcagagccaaacctttgccaatatgtggaagtctttgaacgtggacaccaatgagttgcctgacgattttgtcttcccgatgacgagtgttgcagttccggtctttaaaaagattatcaattggatggagagtcacgtcggacagcaagtgcctgagtttgaagaggacccaaatactcgcgaacgcaaatggttcgtccagactgacttcgaaaaggattttttcaaggtcgaagttgaagagttggttgactttctgaatgctagcaactttctcaatttgcaatctctctatcgtcattcgtgtcaggctatggctgctttgctcaaggaccgttctcctgaggaaattcgtgatctgcttgggattgaggacgatctgactgaggagcacaaggcggaaattcgtccgcaaaatgtttggtgcaac

SEQ ID NO: 94903 - DNA, 462 bp, Heterodera glycines
tattattttattgcgccttttcctaaaattcaatttccaaaaatggttgccaagccttcttccagtcatcctctgctgcttgtttttggcttctttcgccctctgctcgcccaatgctgctgatgtgctgaaattcaaacgagaagctgcgatcagcagttgtggagctggacagtttgaatacgggggcggctgttgtacgacatgcacaagcgatgctgattgtacgggcgggaagctttgtgtgccaattctcaacttgctcagcgtcagtctgtgctttgccccatgcggaaattaagacagaaaagaaagcagcagcaaaagagggctctgatagtgtgataaattgataggattaaatgaaagattgggagttaattattacttaaatgcatttaatagtgattgattgatcaataaatatttttcggaaaatgatgccgaagcaaccgtcaaaag

SEQ ID NO: 94904 - DNA, 466 bp, Heterodera glycines
attcattttattattttattggcccttttcctaaaattcaatttacaaaaatggtttccaagcttcttccggtcattctctgctgcttgtttttggcttctttcgccctctgctcgcccaaggctgctgatgtgctgaaatttaaacgagaagcggcgatcagcagttgtggagctggacagtttgaatacgggggcggctgttgtacgacatgcacaagcgatgctgattgtacgggcgggaagctttgtgtgcccatcctcaacttgctcagcgtcagtctgtgctttgccccatgcggaaattaagacagaaaagaaagcagcaaatgagggtgttgatagtgtgataaattgataggattaaatggaaaatggggagttaataattacttaaatgcatttaaatagtgattgatcaataaatatttttcggaaaaaacatccccctttcaccaactaacata

SEQ ID NO: 94905 - DNA, 746 bp, Heterodera glycines
atttaagtagggatgcgatttttggattttaactgcgcgcctaaagtgtatataaaagcaacctgcttcattcacattcacttttgccaacaccaccaactgttcactcgtaatttctgagaaaccgacagtttgctcacgttcaacaacagcgccattctcagcaacatcgcacaaaaatggcacgccggcgaagaaagaaggagccgcgaaagcagtcgtacaagctgtacgttcgacgtgtgctgaaggaagttcatccgggcaaggaaatctcaatgcgtgcgttgaacatcatgaactccttcgtcatcgacgccttggaccgcattgcaacggaggcgacgcgaatggcccacaacgaccggcgcaaaaccatcacgcttcgcgacatggagttttctgtccgactgtgcctgcctgacgtcatggccaaagatgcgaaccagaaggctcagaaaacggtgaccaagttctatgctgcaaaggtgcgggatcggatgagaaggacggagatgcgtcgtggcgaatttgcgatgatgcagatggcagcgctgtgagcacactcaacttttggacgaccggcggatgaagccacctgtatattgttgatgattggccccgtatcccccattactgtatgtgtatatattatgcaatgtacccaccccccagtattgtatgtgtatgtattattcactatgtgctttatatgtatacctggtcaataaaatataaccccattc

SEQ ID NO: 94906 - DNA, 348 bp, Heterodera glycines
cataaatggaccaagaaatgagtgcgggaattcaacaaagccgtccttctggaaagatcaatcatgaaatcttgatggaggagacgcgtcgaattccaattttaggcgaagtcgttggccaattacgaaatatttatggttcttcgttagccgagcagttcaaaaacgaactcattatcgccagccaacttaatcgtggaccgatgaataatgggatcagcaacccgcacatggacatgcttcttggtgttgatgagaaaattagcgatcttttgcaccaattgtaatcacacagctgatttactctcacaatgttgttgccgataaattgtatgaattcgaaaaaaa

SEQ ID NO: 94907 - DNA, 240 bp, Heterodera glycines
gccaagttgtgacaatccgaagccggagatttgcactgcgcgcttttgtgactgttcatgcgactgtgtgaagggattgttccgcgacaaaacgaaaaaatgtgtgcccaaatgtccgtattgaggaaggaaattgatactaacgatgtaatgatatcaaattatttaatcattcattaatctaagaaatagcaattatttaaaaattgaaaagaattagaatttgttagttttcaataa

SEQ ID NO: 94908 - DNA, 426 bp, Heterodera glycines
gtttcgtttatagttcatatttatttggtaatcgcatcatggaaatgaccggcggtgaccatcagctcaaccattttgtccagcaactccaagcagaaattcagaagcagggattgcaggaacagattttgaaaatgaataatcgatgtttcgacctttgcatcaccgattcgcgtcttccgagtaaattggacggaaggactcagacgtgcattgccaattgtgtcggtcggattttggacgcaaaaacactgatgtttgaacatctccaaaaacgttctggcagtggcggagccatgtgaacgatggccaacccactgatcaattgctgtcgctgtttttgttattcttgttgccttttttgtcttccgtttatttgacgaattggcactatttttaattttacaaaataaatacttattcaaa

SEQ ID NO: 94909 - DNA, 380 bp, Heterodera glycines
cccaagtttgagcttttctaaaaattaactgctgccaaagtcttcatcatgtcttcaaagcctctctacggaaaggatgttcttacggaaggttcggagatctcgcgtgaattggaggcacgtcatcgtaaacgtaaggaggaggacaagcccatctggtacagcaaataccttataaatgacccgaaactcggcacccgctacttttggacttttgctggggtgaccaccgttctgttcggtgcatacattcgccgctgtcttcgctgattggacaaaacgatgggaatgtcttattttcggaagtgtatatgttatttagacggaataaattgttaggatatgaaatgactatatgcaaagacttagataacaaaaaa

SEQ ID NO: 94910 - DNA, 490 bp, Heterodera glycines
gtttgagacacatttctaaacgctcaaaatgactgatattcaggcatatgctggcccatttatagtgaatgacgtcgtttcctattttttaaaggatggcgtctggtactaccgaaacgcgttcattccgatcaatttggagtgcaagcagccaccgccggcggagattgtcaaagagtggattgacaagtacggttccgcagcgccaaaatcgacaaagcaggccaaacaaaaagtggccacaccattgaaaaagtcgtcacacaaaccgaagttgtccagtgccgacaaggacagcgaaatgctcaagaggaagaggaagcatgagcagatgctttccaattcttcaacttcatcatcatccacatccaaaccgttgcctgtctctgcacaaaaagtggtgtcgtcctcggcactgccaacgccgggtgcgccgtcgccaaacattcccaagcaaaaacagccggcaaaaccctcctccgctccaaca

SEQ ID NO: 94911 - DNA, 520 bp, Heterodera glycines
aaagaatctccaaaatccctaaacttcgaaaatggcagaaaccgccgagacaatcaacaccacgatctcatcgccgccaccggaatccgaaagctccaccactatttctgcaatgacagatccaacatctcaagaagcagcctcaaaagacacagatctgacgaaagaagccgaatcagagaagaaaccaggaggaatctctctccgaatctggccaccgactcagaaaactcgcgacgccgttctgaatcgcctgatcgagaccttatccaccgaatcaatcctctctaagagatacggtactcttaaatctgacgatgcaaccaccgtcgcgaaacttatcgaagaagaggcttatggtgttgcttcgaatgctgtgtcgagtgatgatgatgggattaagattcttgagctttattctaaagagattagtaagaggatgcttgaatctgttaaggctagatctaatgctagtgttggaaatggaagtgtggaggatgctaatactgatgctagtgag

SEQ ID NO: 94912 - DNA, 219 bp, Heterodera glycines
caacagcagtcaaaagtggcgaaactaaggacatcagccgggggttttctttttccaatggaagcgggttgcactctccaagagccgatgatcagctaacatttttcatccatattttgttgtattatttattcattataaaaggctcaacattttgattatataaaatttttatttttttccaactcaaaccatttgctcaaataaaaagataagctc

SEQ ID NO: 94913 - DNA, 1023 bp, Heterodera glycines
taaatattgcacatttttatcacatttaaatgtctctgtcagtgttggaccaaattaagcagcattcgaccattgtggccgacactggcgacttccacgcaatcgaagtgttcaaaccgacggatgccaccacaaatccttcattaattctcgccgctgcaaaaattgaaaaatacaaggaattgatcttaaaggcagtaaaatatgcgaaagaaagggcggcggggcaatcgaaggaggcggtgatagaattggcgagcaacaaactttttgtgcttttcggcaaggaaattctgaacattgtgccgggtcgagtgagcacagaagtcgacgcgcgactttcctttgacaaagaaggctcaatagccaaagcattgagtctgatcaaactttacgaagaggagggcattgagaaggagcgcattctgatcaaactcagctcaacttgggagggcattgaggcagcgaaggttctcgaatcccaacacggcattcattgcaacatgactttgctgttcaacttttaccaagccgtcgcttgtgctcaagctaaagtcacgcttatttcgccttttgttggtcgtattttggattggttcgttaagaattccgacaaaaaagagttcgaccgaattactgaccccggtgtgcaaagtgtgaagcgcattttcaattattacaagaaattcggacacaaaacgcaagtgatggccgcctcatttcggaacacggaggaaataaaaggactggtcggatgcgatcttatgacgataagccccgctttgttgggtgaattagccaaagattctgacggcggttggaccgatgatgaccgtgcaaaatgcagacaaaagccgaattggagcagattgaggtggacgagaaaatattccgctggcagatgaacgaagacgcaatggcggacgaaaagctcgcggatggaattcgccgctttgccgtcgatgctattaaactcgaagagttgattcgatcgaacctttgaattaaaaagtatttgttgcc

SEQ ID NO: 94914 - DNA, 641 bp, Heterodera glycines
gtttgagatacttaaatttaaaatttgcatttcaaatggcaacaaaaccgctcctctactgctactggcgcagctcatgctcctggcgagttcgaatcgcattgcatttgaagggcattgaatttgatcagcgcattgtcaatttgttgaacggtgatcagaacaaagatgaatttttgtccaaacttccgttcgccaaagtcccagtgtttgtccatgacaatttagtgctgtccgaaagtatggcaatcattgaatatttggacgaaaaattccccgaacccaaccctttgttcccaaaaagtgccgaagatcgtgcacacgtgcgggcacttgcgcttcaaattgtcgcaaatacgcaaccgctacaaaatttgggtgttctcaagcacctttctgaagagccggccaaacgaaatgcctgggctcgtcattggatcgagcagtcattcaatgtttttgagaaagcattggccaaaacggcaggcaaatatgcctacggggatcagatcagtttggccgacatttgcattccgccacaagtgtataacgccaagcgctttggcgtcgatatggcgcaattcccgatcattgcacgactggacgaaacactagcggaagtgccggcgtttaaagtgccg

SEQ ID NO: 94915 - DNA, 396 bp, Heterodera glycines
gggcgagaacggacagcccggccagcctggaaaccccggcccgcaaggataccctggcgacggcggaagccccggccaacccggcaaccccggaggcagcggcgagcccggacagcccggagcacagggatccagcggccaatgctaccactgtccgcctccccgcaccgcccccggctactgagtgtgatcagtcgaccatcgagaattggagaagaacccccactgatgatccacgaggctgctgtcctttcgtctctcaccattttcccgatcattttggcatttccaaaacgctgatcggacaattctcaatgttatttttgtatttgtgcaaaatttcgttggattgttctgtcgcacaaaaaaatcaaagaataaattgatcggagctca

SEQ ID NO: 94916 - DNA, 756 bp, Heterodera glycines
aacccggcggagacggacaacccggaggctcaggacagcccggagcaccaggccaggcagctcctcgcccgtacccgccaagcggcggatgcgtgccgcaatgtgaggccgcccagcccggactccccggcccgcccggaccccccggacccgagggacagaacggccaacccggacagtcggcaccacccgcgtctcctggccgccccgggccccagggacctcctggacccgatggacagcccggcaaccccggagagtctggccaacccggccagcccggcaaactcacccagggcccgcccgtcgttggaccgtcctggcccatcaggaccccctggccagcccggacagcccggcgagaacggacagcccggccagcctggaaaccccggcccgcaaggataccctggcgacggcggaagccccggccaacccggcaatcccggaggcagcggcgagcccggacagcccggagcacagggatccagcggccaatgctaccactgcccaccgccccgcaccgcccccggctactgagtgtgatcagtcgaccatcgacaattggagaagaacccccactgatgatccacgaggctgctgtcctttcgtctctcaccattttcccgatcattttggcatttacaaaacgctgatcggacaattctcaatgttatttttgtatttgtgcaaaatttcgttggattgttctgtcgcacaaaaaaatcaaagaataaattgatcggagctcaaaaa

SEQ ID NO: 94917 - DNA, 747 bp, Heterodera glycines
gcaagagactcacattgttctcgggattgcctcggtgtgctcgctgttggctatcatcgccacagttgtcactctgccatctctgtactcggagatgagccaaatgaacagcaaagtgcgcaacggagttgaggccttccgcgtcaacaccgactcggcatggactgacttgatggacgtgcaagtggtggtgacgccgccgtcgaagccccgtgcgaaccccttcaactccatcttccgtgccaagcgtcaactgcccggacactgccagtgcgctggcctccaacaaccaagctgtccccctggtccgcccggcccggccggaccgcctggacagcccggacagcctggaagcgcaggacagcccggacaggctggacagcctggccaacccgctgctccttgccctccccagaacatcccctgcccacgctgccctgctggcccgcccggccgccccggaggacagggaccgcccggacagcaaggagcccctggacagcctggtacgcccgctcaaggtggaggacctggaacgcctggcgcgcccggaccccaaggacagcctgggcagcccggacgccccggagcctctggccaacccggacagcctggagcgaacggagttgtctcgcgccctattcctggcccgaagggaccgcctggagcgcctggccagaatggaaaccccggaggccaaggtcagccaggacagcccggaggccaaggaccgcccggcccacctgg

SEQ ID NO: 94918 - DNA, 845 bp, Heterodera glycines
ccaagtttgagcgctaaaatgcaagagactcacattgtctctcgggattgcctctgtgccgctctctgttggctatcatcgccacagtcgtcactctagagcatctctgtactcggagatgagccaaatgaacagcaaagtgcgcgacggagttgaggccttccgcgtcaacaccgactcggcctggactgacttgatggacgtgcaagtggtcgtgacgccgccgtcgaagccccgtgataaccccttcaactccatcttccgtgttttaacggacaactgcccggacactgccagtgcgctggcctccaacagccaagctgtccccctgggtccgcccggcccgtccggaccgcctggacagcccggacagcctggaggcgcagggacagcccggacagcctggacagcctggccaacccgctcctccttgcccgccccagaacatcccctgcccacgctgccctgctggcccgcccggccgccccggaggacagggacccgcccggacagcaaggagccccctggacaacctggtacgcccgctcaaggtggaggacctggaacgcctggcgcgcccggaccccaaggacagcctggacagcccggacgccccgggagccgctggccaacccggacagcctggagcgaaacggagttgtctcacgcccaattcctggcccgaagggaccgcccggagcgcctggccagaacggaaaccccggaagccaaggtcagccaggaccagccaggaggccaaggaccgcccggacctcctggcgcgcccggtcagcccggccagcctggaaaactctggccagcctggacagcccggagcaccggga

SEQ ID NO: 94919 - DNA, 673 bp, Heterodera glycines
agaatatggcacgaaccaagcaaacagcccgcaaaacccaatcccaaaaaggcttttcgtcgagcagtggcagccaacacatgcagagtcaactgcacaacttgagaaaacagttggctacgaagcgtcccaacccaaaacgagggatcggatacaaagaattgcctcctgttaaaatagcccaaaaacgtcatcataagaaaggagcattggcacttaaagagatccgcaagtaccagaagagtgtgaatctgctcatcccgcgccgtcctttcatgcgtttggtccgcgaagtcacccaggacatgtcgcagtcgaccgacctgcgctggcagggcttggcactgctggcgattcaggtttcaggaggccgccgaactgtacttggtctcattgttcgacgacaccaatctttgcgccatccatgccagtcgagtgaccataatgccgaaggacatgcaactcgtgcgcaaaattcgtggagagacttttcttaagccgttgtcctcgcagtactgatcgaagaaaatggtggtggttgatttcatagtcgatgacaatttgaatatgatatttttcgcaaatctcttttgtattctcgacccattccattttcactattatcctactttgtccaaaccccaaaatctttctgataaatcagctttactgc

SEQ ID NO: 94920 - DNA, 478 bp, Heterodera glycines
cattcgttttgccattttctatggcttaattacacaaaggcacttgtcaccacacattcactaattacccaaatgctttgttttgccacctcaaaatgttttcctcaaagcttcgaccaatacaaaagccgatcagtttcactgatcttcatctttttgctgacgattcatcttttatttgcggaaattgcttcggaaaagtcatcaaaagaaacatttaaagattctctggtgcaaaattcgccaaaaagcgacctcaactttctattccaacaacggagcactcagaaaacagctttcatcagacatcattatgcttcttccgtagcaaatggccaatctggacaacattctcggcaccggcgacggatacccaccggaattattggcaaattaattgccaaattaagcggaaagacgggaaaaattgcagcgactgcaagcaaaagcgatgatatttttgttgggaccgcaaagg

SEQ ID NO: 94921 - DNA, 228 bp, Heterodera glycines
cattactcatgttcgactcagcccgatggagaaacttcaggacgaaatgctggaagctgctaaagaacgtggaacccgcgatgctaagggctattgggttggaaagcaataggaaaatggatgtaatttgatgtgttaactgttctttagcttgcgttctcatataatgtatacgtggagcaaataaaagcagattttaaaaaaaaaaaaaaaaaaaaaaaaaaaaaa

SEQ ID NO: 94922 - DNA, 724 bp, Heterodera glycines
cctactggatcttttgcgctatcgggagtccagaggatacctttcttttttataaaaattttcgtttcatttttatttttagaaaagataaatttgacttctttacaatgactgcttcatcccgtcgtttgcaaaaggaactttccgaaatgcgtgggaacaattcgggcgctgttcgtgttcttgaggttgatgagtctaatttgcttcgctggagccttatgctttatccggaccgtgaaccatacaacaaaggtgcttttcgtgtgaatgttgattttccaactgagtacccattcaaaccgccatccgtgacattcgcaaccaaaatttaccatcctaacatcgacgataagggccaagtctgtctcggcatcattctcgcggagaattggaagccggcaacgcgtgcagagcaagtgatgaacgcgctgctgtcgctgattgccgagccggaaattgctcatccgttgcgctccgatcttgccgaggaattccaacgggacaagaagaagttcttcaaaaatgcagaagactacacgaaaaagtatgccgaacgtcgcgactgagtttgtttggacagatggagttatttgtgcatgaaagtcccgctggtatctacgaataatctctcgccactcaaattgttcaatttataaattattgtgttttgtctgtcgttgattattttgacttttttgtatcgatttaaacttgaagaaaa

SEQ ID NO: 94923 - DNA, 383 bp, Heterodera glycines
cactgctcaaaatacaatgaaaactgctcttgagttggcaaaaaaaattgtttgtggtgtatttattgcacacgtttttcgccaaaaagttggccgaattcttacgggagtaggtgattccatgctgccgactatccacgatggcgacattctatgggctcgagtttgggatccgaacgatgctttacgaccgggggacgtcgtgtgtttagttgaccctctcgatgcagaagagtatgtcataaaacgcatttccgctgtccacaaagactgcatagaagttcgcggcgacaatgcgaaaaagtcgttggactcgcgcaaatatggccccgtgccggctggacttgtccgctaccgcgtgtctttgcgactcctccccttaa

SEQ ID NO: 94924 - DNA, 791 bp, Heterodera glycines
  unsure (1)..(791): unsure at all n locations
ctttttgtgactctaattccgtccgtcccttgccctttaacttccaccaaatgcccctcgtgcacaattgcatcgcttgcactcgccattccctcttaattgttttgggcctcattatgataatggccaattgtggacaagcgatgcggcagcaggcggtggccgtacgtggccaactccgttgtgggaacagacccgcctcgggggtcaaagtgaagttgtgggacgaggacgacgggcccgaccccgacgacgtgcttgacgaggcgtttaccgactcttctggctccttccaaatgagagggtcgacacgcgaactgacaaacattgaccccgtgctgaagatttatcacgactgtgacgatgggataatgccaggacaacgcaaagtgaaactgcgcatccccagccaatacatcacaaacggagggttggccagacgaacttttgaagtcggagtacttaatttggagacagtctttgctggggaggaaagggacttcatttgaacatggaggggaagaagaactggcgaaatgaaagctgatttattatcacatacagtataaccagccattccatttggtattctttgtataccacattcgtattcagcaaaagaatgtagaaacaataataaactatacaatgtatcaaaacaactataactagaggatctcgatngatcgtgggcatagaaaaatagaaaaagttcccttcgtttttaccacttatgctagtagtgtatgtagcacccctctaaaagatccaacttacttcacttctgtcga

SEQ ID NO: 94925 - DNA, 778 bp, Heterodera glycines
gtaaacagctaaatttatttccgactgtgttccaaatcggttataaaacaaacagttatgaccacaatcgataacaaaaagagtgcttttgccctgtccttggccggtttacaaagttcctcgtacacttcgtccgaattgtacactctgtccacatttggcaacgaaaagcgtccgcgcggtgcggcgcgcaattggcgctccaacgcttccctttcacgcgcgtctttttgctgctttggcaattggaaattgttccctttagcgaatgcctgattctgctgatgacatttattatcaatgctaatattacgctgacaatgaacgattgaaaatgcggatgagacggactgaggaagaattcggagagacgaataaatgtataagaaattggccatcccctcgtgccgaattcggcacgaggcttttaataccctcgcactaattgctctcaagatgtcgcctctccgttttatcattgcctttcttttggtcgttttgtgcgctttttccgcactgataaccgcgcaagaagagagagttgacaatgaacctgctgctctgcgcgccagacgcggaatgtacggttcgccgtacggcggcggaatgggcggcggcggaccatggggaggaaatttcggaaagaaatgagaagggagcaaaatgtggtgatcaagacgaacagaacaagccatttgattgaatatttgtgaaaatagtcaatgtaacaattagaaagaaataaaattacaatttaccaaaggacagaaggaaacaa

SEQ ID NO: 94926 - DNA, 927 bp, Heterodera glycines
cattctcggtctcttccccctcaagattcttgactacttcttcttcttatgtaaacaaacaaaataccaaacatcccccaattcgattcgccatttttcttttctttcttttctcatttacattgcgtttccgcaaaatgtcaaatttgaattttgaagacaatttgcaacgcgtacaagtggaaattcaatggaagcaatgcctttataatccgatcgtcgctccgtttgccgacgtcggctcttacccaattttcactgacgaattcaaagggacgcgcaagtgcactttggatgtgtacgttcagggaaacttagagcatttggacgacaaagttgttttcctcaccgttcatgacgttggcaagacgtatttgtcttgcgtggaccttgccaacagtccgacgctctctccgctggtcggtcagcgtgccgttttcctccacgtttctgtgccagggcaagcgcccggcgctgaaaattttgtcggagacttcccctccatggaacaattgggtgacggactttcgcaagtgatggagcagttcaatctgagcaaatgcattgcccattggggagagcgcgggtgccgacatcgtttgtcgttttgcgatgagcttcccccaactcgtcgtcggtgccgttttggtccattgcatttcgacaacccacggaatcattgccagcatcaaagagcttttcaccaatttgctccttaatgatggtgaaatgactcacagcgcgtggaattggcttttggtccacaaatttggaaatcatgaaatggacaaagaaaagcgcaattacgtcgatgccatcaaagcgggcggaatgaatgaatacaatcttagcagatatttgtacgcattcagtcaccgcgacgaactcacagatcggctgaaggatcaactgggcaaagtcgacgtc

SEQ ID NO: 94927 - DNA, 517 bp, Heterodera glycines
ccttcaatagatgacccccgggctgcaggttttccaacaaagcgtccagatcaattaacttgacaattaatcccttgtccctaattttcgccaatttttgtcctccaaatgatttgtcccaacgaatcggagccggacactgccaatggcgagcagcacaaaaattcagcggcaatgaatggccacggatttgtgccctcgggcaatgccgaaacggagggaaaagccgacaaaagacaccagcagcaaagaaaactgtacaaagcagacgaaaacccaccatttctgctgacctttttgtttggctttcagcaagtgatggtgtccctgtccgtgctcgtatccatcccgtttctgatctcggacgaggtgtgcccaggaagggaccgtgatcagctccgagtgcgtctgatcgccgccacttttgtcacctgtggcattggcacaattttgcagacggcgtttgggatgaggttggctcttctccaaggcgtcgctttcgcttacattccatcga

SEQ ID NO: 94928 - DNA, 422 bp, Heterodera glycines
acaaaaaggaagtgccaaccaacgaaattttgcattgtgaaggcggccaagtcgatttttccatcgatgatagccatatcattaaatcggagaaaggtgagggagaaaaaggcgacgaggagctgatcccgatcggatcgccggtctgcaagaagccgagagatgcgggccacagatgccatggccgagctggcggaccaatcgcggccaaaaaccttaagtggtattttgacacggagacttttttatgtttggcattttcgtacaacggctgtggcggcaacggaaatcatttcgactcgcccgcagattgttgggacaaatgcaaacttggtaaagctgagacaaattttctgtttattgactaaaattctggtttttaaattttccatgtggtcatataaattttcgttcttataaaa

SEQ ID NO: 94929 - DNA, 357 bp, Heterodera glycines
taagaacattttgaattataaagttctacttcttcaaaaatgctccgttttttgcacgccggctgtgtgccccattgtcgcatcaaagcgtccatttcgacggtaggcgagcgaaagtatcatttgttggactcggtgaagcgggacacactgtctcaaaaaggctcagggacattaacatctccaaagaccagatgctggacgtgcgaaaagatgtgggagaaccagtgacggattgatcgcccttttggagattattgaatggacaattgatctcttctcgttaatttgatgtttctttccgacgaaaatatttatttgtttgttttgccttcagtcggtataaaattgaaattc

SEQ ID NO: 94930 - DNA, 394 bp, Heterodera glycines
ttgcttgtctgtaaaaccattcagtttcaaatcgtattttaattccaaaaatcaacaaattcacctcccatttttacaaaatgtcccccctccgtttcttcgtcgccctttttctgatcactttggcaattttggccgggacccacggcactgttgagaactcagtggatggtgggccaaacatggcatcgccgattatccgtgaacgccgttggggccatggcggcggaggccattggggctgaagaaaatggtgggagagataatggaaaatggagaacggaagaagcgataaacgatgaaaaacaagaaaaaataatttgtggtagaagaaaaaatgctgaactcttaggtcgaataaagtttcaatgaaataagaggacaatcaaaaaaa

SEQ ID NO: 94931 - DNA, 618 bp, Heterodera glycines
caagtttgagaataattcttcaaaatgaccaaatttgtttgtgttttgttgctgctttttgcttggactctccaaattgtccatccttccgtagttccgtccgatcaaatttatatcatcgaattcaaccgcgacaattcgaacaatcaacaggacaatgatttaaaatcggccaatggagttgaagacagcaaaatgaccaatggcgtcatttcacaagactctgcccaagttgtgacgaccaatggcacgaccgagttggaaacggacccactcactgtttcagtggaattgcaaagaggcggacgtgctgttggcaatcagttcaacatcaatttcactgacatcagctatgtgttggtgtgcagtgcaagattccgcatttcattaccaagcgatacaactctgcgaagtcactcgaaaatgactgccgtgccgaacacatctgatcaattcacgttgcctgatggagtgcatttgtacccgggtctttctcacactgctgaagtgatcttgagcggaaatggacagcctgaagtgaccattctggacacattgactgtgctgaccactgaaaaatgtccgaatgatgtttgaatgaagcgctgaaaaatttcg

SEQ ID NO: 94932 - DNA, 750 bp, Heterodera glycines
tccagcaaatccctccctttaatcatcgcctccattattattatcctcttccatttgacgacagttttgtccgatcacctctgatcaccattattcgtgcgtcttcaacttcttcatcattctgtcgcccgtttcgattcccctttccccaaccatcacaaaaactccaccaaaatcattgtttctccactacttttgtgtagcgaatgttccgtccgacggagctgattttttacactaacaatagcaccagtaacagcagcaacacggaggaacaactgttgaccctcatcattttcaaggagtacatccgaaagaaacagcaccaattttggaacgggacgacggcacggaagaggaaaacaacagcaaacgaagaagcaacgtcaaacagaacggaggatcaacggaaagagagggagacaaaggagcagttcatccggacattggatcaacaccaacaacaacagaacgagcagcaaaacggagataaacggttgagactactaacaaagcaaaagcataaacaccgacaagttcaacaacagaacaacaacaacagaagaaggagttactgtttgctgttgaggctcatcagacagtgacgacgacgacgtcgagcagtacaaaccatcaccaaaaaaacaaattgttttcattgttttttgttgttatttgcattttgttagggttcatctacagcatcagcctcacattttcttcgctccatccacccaaacaacaaaaatt

SEQ ID NO: 94933 - DNA, 497 bp, Heterodera glycines
ataaaacgaacactcctccaaagctttgtgcgctcgtcccccaatcggccgaccgaattccgagtggttgtacactcgcgcgcgaatatttctacgacggctttcatttggttgaaattcccttcgcggaaaagtcgcgatcgatggaaaagcgccttctaccgccagatggcggagttgggacatggcaattggctaatccggaccaagtggaggcggccaagcagttcgtcaaaaaattgaccaacaccaaattctctccggacgattttgcaaatcccgtgcttcaacagcattacaaagctgtcgaaatggtagcattggatttgccatttgacagcgaacagttcaaaaaagaggcagcggaaaatgacaaattaattccgtacttcaaaaatccaacttttgagcagagagttgccaaagaattggaagaattcgcagggatttgtgagacaattgcagaaacaagggagaaagggaagaggaaaagtgca

SEQ ID NO: 94934 - DNA, 600 bp, Heterodera glycines
ctcaaatttccaattgtttcttaaattaagctgctaactaaattcgttaatcgaagcgacaaaatgaagtggacttacaaagaggagaactctttcgacaagcgccgcgcggaaggcgaaaagattcgccgaaagtacccggaccgaattcctgtgatcgtggagaagtcgccgaactcgcgtctgcgcgatttggacaagaagaagtatttggtgccagcggaactgaccatcggccagttttacttcctcatccgcaaaaggatccatcttcgccccgaagaatcgctctttttctttatcaacagcgttatcccccagacaatgacaaccatgggacagctctaccaggaccgccacgaggaggacttgttcatgtacatcgcttacagcgaggagaacgtttacggctgatcgtcggttgggcggcggagtgtcggtttggcccgtggcgcataaaactcccatcgatgggagggaataaccagcgaatcgtcgtcggcttttatgtacctttttcatccctttcattcatatttttcaagtaatttgtgtgatcacgcatcgatgatgattatataaaatcgcttttttcaaaaa

SEQ ID NO: 94935 - DNA, 1171 bp, Heterodera glycines
gtttgagtcgcttttcaatttcaattttccaaaattccaacttttgaatgctttcttcgccacacaattttaaagttgcaattgtcggcgctgggcccagcggtctcacagccgcaagacaagctctgctctacggctacaaagtgcgcatttttgaaaaggaacaaaatttcggcggcgtttggcgcctcgccatctcagaaaatgcgcaaagacggcccgtgcctttgcaaagtgtgatggactgctcaaaacagctgtgtgcctttagtgaactcgccgttgctgaacattttcccacttttcttcgcccttctgacgctgtcgcttatttggagtcgtacgtgcgaacattcgaattggcacggcacatgaaacttggcacggaagttaaaacgattcgccgatcggagtgttggcaaaagacagataattagcgggggattggcaattaaaccaatggattaattaattaatcccttttcaagccgatggattgtccaatgggcggacagtgaacagccgaacaacggcccatcggaaggacagcgactggtcgaggaactgttcgatgccgttctcatctgttcgggcgcccgcctaaggcggtggcgccccccggagtaccgtatggagagggcgttcaaaggcacagttatccattcggaacagttcacacattcgtccgactttcgtggtcagactgtgtgcgttgtcggccttggtaactccgccgtggctatttccattgcattggcacacacagccaaacaggtgtttctgtgtactcgtcgtggtgaatggatattaccattgcttcaatccgacggacagaagccatgggattggcctttcagcagccgatggcatttttggggtcgccgatgggtgccgaaatgcctccgaaatttttgttgggaaatgagtgcccaatcagtatcaccagactgttcacaaaacaacggaattgggcgaccaatgcatcgattgctgagtgccaatttgacatttggagctgaacagctctgcccactgcttgcttccggccgaattcgaattcgcccaaacattttgtcattgtccgactcgaatttggtcgaattcgccgacagaactgttgaacaacacgtggacgcgctggtcatctgcacgggtttcgaattcgacttta

SEQ ID NO: 94936 - DNA, 817 bp, Heterodera glycines
caattaagcttatcaatttttaccctttccacttaaaatgacttatgtttcggcccaagcgcacaatgttttgtcggacattgacaagaagttgcatgagaacaatgcgttcaccaatttgctgggcaaaattgagaccaaaactggcctcaaacgtcttcacgtctttggagccttggtcgtcctttacatgctttaccttctgttcggtcgttgggctcagctggcgtgtaacatcaccggctttctctacccagcttacatctcaataaaagcgattgaaagtcaccagaaggaggacgacacccaatggcttacctactgggtggtttttgcgctgcttaatgttgtggaattcttctccaacaccattctgtactacttccctttctattggttgatgaagtgtgctctgctgttgtggctgtacttgcccagcactttgggtgctcagctgttgtacacgcgcattattcgtccgttccatcttcaacagcacaagaacattgacagcatgtacaacaaattggctgggggtgcacaaaaggcatacgaagagcacgtgaaagagacctgaacaatcgtcagaacaagaagatgaagaagtacactttttgacatcacctctctctctgatttcgtatattacaattcttgacaggaaactttacccattttttgctgtcttaccaatatttgcgtctcttttgtcgtttgctgttcatttggctttaaaataatactctcgcgagacaattttgctatgctttgattatctctctgatcaatttgcagttaataaacttatgctagtttg

SEQ ID NO: 94937 - DNA, 561 bp, Heterodera glycines
tggagctcacaccgcggtgggcggccggctctacaactagtggatcccccgggctgcagattcggcacgaggagcctgattttctgattctaatttccaattttcgaatacattcctttcagtgatgcagccgcagtcaaagcgaaagattcaggtttcttttctgatcagaaatgggtcggtcgagtcgaagcatcgcggcttcgtcaacgccctccaatttgacccgacgacgcgcagtctcttttcggccggttcagattcggtcattcgccagtgggacacttcggcgccgtcgggcagcgccgcctttctccgctcattggagcaccactgtgactgggtgaacgacaaacggcaaattgtgacgcgggacagtgatgggaacgtcgaactgtgggatgtgatgcaatgcggcagggtgaacaccttcccgatgggcaccaacatggaggaagtgatcaaggacaatgtgcggaaggtgtggatcccgagttggttcggcgtggatgccaagtgcggggtgttggaaatcactttggacgagagcgacgcgttctc

SEQ ID NO: 94938 - DNA, 698 bp, Heterodera glycines
  unsure (1)..(698): unsure at all n locations
agatgtcagacagaaaggacagtgtgacaggagggaaacgaatagagcaggaacttgctgaggacggccgtcctgtttacatcgtcgtattgaccattttcttaaaagggtttttctttttgtatgacttgctcgtctttattccgttcaaattatttgctgatcctgaactgaaaaaggagcgctctcgtgaacaaaaggccgttccgattgatgggaatccggcttcaccatggcgacacgtcgacaccattggcactgctctgtacaccgaactttttgaggactgtccgacgctcggcaaaatttgggacaaagcggcagagttgcaccgtgggcacaattgcatgggaacgcgcgacattcttgaggtcatccaagaacgacagtcggacgggaaaaccttccagaaattggcacttggcaaatatagctggatggattacgaacatgttgatgaagtgatcgtggaagtcgcttctggactcgacaatttgggcattgagcaaggacaaaaagtagtcatttacgccgagaacaggaaaggaagggatgatctccggcatcccctggcttcaaattgtgcccttccaattgtaccggttaattccacgcttggtgacgaggcaattgcttttgccttggncgagtgtgacgccgttttggcgtttacttcacgtccccttctgtcgaaagtt

SEQ ID NO: 94939 - DNA, 1959 bp, Heterodera glycines
ccaagtttgagtttgtttatttggcattgcattacttacaactattaatcccgctgtttctgctggtcatttatggtcaatattctcacaatccgatggaccatctgcaccaccttgaggaatggcgcatggccatgcgcgcgggtcttgatgctatggcagccgtacaggctcctcctgctgaagaggatgttggtgaaaatggagatgacaacgcagcagcaccccacaacttattggcgtgggatggcggtgttctattggaagcagaaggcggtttcgtaccgctctaacttttacaaaaaatttaaaatgccaaaccaaaaggacggagtgacaggaggcaaacgaattgagcaggaacttgccgtgtttgaccttcccttttacatcgtcgcattggcctttttcctaaaggcgttcttccgtctgtatgacttgctcgtcttcgtcccattcaaattatttgctgaccctgagctggaaaaggaacgctctcgtgagcgaaaggccatgcccatcgatgggaagccgacttcgtcctggagacacgtcgataccattggcactgctctgtacaccgaactgtttgagggctgtccgacgcttggcaaaatttgggacaaagcggcacagttacaccgtggacacaattgcatgggcacgcgcgacattctcaatgtcgtcgaagaacagcagccggacgggaaagccttccaaaaattggcacttggcaaatgcaattggatgaactacgaacatgttgatgaagtgatcgtggaagtcgcttctggactcagcaatttgggcattgtccaaggacaaaaagtggtcattttctctgagaccaggaaggagtggatgatctcggccatcgcctgcttcaaattgggccttccaattgtcaccgtttatcccacgcttggtgacgaggcaattgcttttgccttggccgagtgcgacgccgttttggcgtttacttcgcgtccccttctgtcgaaagtgttctcttccgtcaaagactgtcctcagctgaaacgcgtcgtttacttcagcgaactgcacgcacttgccgaggtcgccgagaaagcgcctgatgcgataaaggaagcgttcaaaagtatcggacgcgaactgtacagctttaacgccctcaaggcactgggccattcgcaagcaaaactcgagcggaatgtgcagccggacgacttggcgatgatcatgtacccgagtggcacccccggaaagccgaaaggagggcttttgtcgcatcgcaacatcatcccgaccgcttcgggacagagcgctgtcatttcagtcagtaccagcgacacaatcattggctatttgccgttggcccacattctcgaagtgtgcgccgaaatcatttgcctgtccaaagggtgccgagtcggttactcttcgcccagcactttgcatgaccgtgccgtgaagattaagaggggaaccactggcgattgcgtcgaactgaagccgactttgatcgcttgtgtgccggcagttatggacaagatcttcaaagcagttttggacgaggtcaaagaaaagtcgcccattcagcgcgaaatttttcgcatctgttacgaacggaagcgcaaccgatttgaaggagggtacaaaagtttggtgatggacagtttggcttttgccaaaatcagcaaaatgctcggtggcaaccttcgctttgtgatttctggcggtgctccgctcaatccggagacgcagcggttcatgaacatttgcttctgttgccccgtcgttcagggctatgggctgacggaaacttgcggtggcgccactttggcggatgaacacgacctcagcaccggttcggtcggaccgccgcttcggagttgtgaaattcggcttagagaatgggaggaagctggttatttgcccacaaattcgcctcctcagggcgaagttctgatccacggg

SEQ ID NO: 94940 - DNA, 485 bp, Heterodera glycines
taagcattaactaaaataattttcttattatgaatctcggacggtgtagcatttgcactttaagctttgacttaaacgatgtttcagctctcaaatgtgggcatacgtatcattaccaatgcatcgacaaatggattgcgaattccaaaacttgtccaaattgccggacatcgaatctcaagcgcgacatattgaagcttttctttgatgagggcgaaaagtcttttagtcaattggtgcaagaaccggccaatgcagaacttcttgctcaactgaaagaggcgcaagacgtgaaatgctttttggagaaaaccattaaagagcagcacgagcgactgacccttctggaatttaagctgaagcaacaaaagaccaaaggcaacgaattgaacatgcaaattcaaaggaaggcacaacacatcgccactttggagtcacagctttttgaccagaaggttctgaaggaaacaaacgaaaagtacaaa

SEQ ID NO: 94941 - DNA, 335 bp, Heterodera glycines
gtttgagcttgtcatataactattatggagcatgttcaggcagtggttgaccctggcaaaaagtttgccaaagactcaattcgattggtgaaaaagtgcacaaagccggaccggaaagagtatcagaagatcgcctttgcaactgcgattggattcgccattatgggcttcatcggattcttcgtcaaactcatccacattcccatcaacaatattatcgtcggcggaggataagaaaaaggagaaaatgaacaaaaaaagtccaccgttttttcacctgtgaattgttttcttcacctttgatttgttattgcacataaacaattcgcaattcc

SEQ ID NO: 94942 - DNA, 324 bp, Heterodera glycines
gccattaattattattattattcaaattgaaatttgagtgattgcaaatggaaatattaattacattgagatgggatggacaataaataatttaaaaataatttaaagtcattcagtcaatcgaatggtcaatttggctttggttgttctccttctcctccgcgtctgtttttatgccgcgggcgcggcggaagggcggtctttttaaggaacggtcatttggtgcgcgagacggacgagggcgtccacatttcgcgctttgcgcgcggacgacgcgagtttgttggcgcggtcggcgttacggtactgattggtgccaaggtc

SEQ ID NO: 94943 - DNA, 510 bp, Heterodera glycines
gtttgagataatataaaacaaataaaacaatatggaacgcacattcatctgtttgaggcccacaaatccgtcgccggttggacgagtgattgcccgctttgagtctaatggactcaaattgatcgccatgaaaatgattaacgctacacgaaatcaagcgactgagcattacaaagagtacagagacagaccgtttttcaacaaactgatcaactacatcacgtcagggccagttgtggccatggtctgggaaggaattgactcagtcaagaaaagtctgcatctgctggagtcggcatgtttctacaatttgaggaatatggatgagtgccgtgacattgtgcgccatggttcgtgcaatgtgcaggacgcacaacgcaaaatcaacatttggttctcaccaaatgagttgcgcattaattccacaagcagataatcccaagcgaaattattatttttttcatttttattttaatttatattaaattgaataaaatcatcatttaaaaa

SEQ ID NO: 94944 - DNA, 512 bp, Heterodera glycines
caagtttgagatccattttcataaaaatgcataacttttattttcctcttctttcctttgtcatctttgtgtatttagcccatttctcagacgcaaccaaacaaaaatttcttggcggcgcccatggtaacgatgtggacaatttggatgcaccaaagcaacacattctcggcggagttggtggtgaaaaacagctcaaaccggacgatgcccagccaagaagaatgcgtggagcatggccatggattccacctcggaacgacaccaatggccaagaacagcgaaaatttctcggaggagcgaaggttgaaacagtgatgatcaaaccgccggaggcggatgatcagaaacagcagcaaaccattcttggcggagttcatggaaacgatgctaattgaatgaaaaatgtgatcggatatacacccgtccctccctcatttaaaaacatttgcaatttgacgaaatatccataaagataatgataaatatataaataaaaactgtcacggaag

SEQ ID NO: 94945 - DNA, 575 bp, Heterodera glycines
gctcgtcaggaggcccatcaaataaggggtcggattcgactgctcattggtgacagagatttggaattggctgccaatccatcgccgacaacaaatgaagacgttaattacggattccgttttatctcggaaaacaatcttaacgccgacgacaaccaacaaatccctaacattattgcctttggacgagaaaatggtgaggcagacgatgaccaaaacgagaacaatagcgaagagggaagagagatcgaacaaacgcaaaacaccaccggagaagaggaagaagaagacaacgcaaccgacgacaatgtcggcatgagttccactgaaagtgatggccaagacaaaatgaaagccaacaacggaaaagggacttgtaaaaatgaagacgaatccaagccaagtccaacggttgaaacagaacagaataaagtgcatcagtccgcttctgaaactgtgataagtcaaaaggccaatgccaacaattcggaggaatgtaaggaaagcaatggagagaacggcacgcgcatttcaatgaaacgacaacggcgttcacattcagtggacagttcgcc

SEQ ID NO: 94946 - DNA, 344 bp, Heterodera glycines
cgaggaactcactttttggctgggtcaattttcttcagtgcgctgacagtttcctgggtcctttgggacaacagaaatcagcagcacaaaaggacttcctccgtgcgctcaattttggcgtcggcacaacggcaaaagaatatggaggaatatttggagcagcagaaactttatgaggagtacaaaatgtcagtttctgacggtcataattaaacaattatttgatcattcattttgtcattaattgatcagtcgttgttttgtttatgtcgttattaagaagtgatcttttgcttttctgctgtaattgacatgacttttaataaacttattcaattcaaaaa

SEQ ID NO: 94947 - DNA, 696 bp, Heterodera glycines
cttcttttgcacgggagcagacggcgtaaattcggacaatgagcggcttctccgagggcactttccatcgcaattccacgccgaataacacattggccacgactgcggtgccggcaaattataaaatgtcgatgatcaatgatcggaatttgtttggcaacactttgctgtccatcagtccgttgcacgacgaccaaagcaagagcgggcgattggtgcctttgctgatgcgccatcaaaaggaggccaagtcgatcaaccaacagcaggcttttctcggtcgttccacttccgtgcgcgacagggccgcccaactgcgcaagcccatcgacttggacgaggtggccatcgacgcggcgcccttccaattggtcatcggcacttcgctgtaccgagttcacacacttttcgcgttgctcggcctcaaccacgcttatgtcaccaacagaggccgtctcgtaggcgtcgtcgcattgcgcgagctccgtgccgccctcgcccacatttacacccgcggcgctttgccgaccgcccagtcgatgtcgcgacttcggctgaacagcttgaactttggcctctgttcaactgatcgaagccgcgcgaacagcggcgtagaaggaaacagcgacaatctgaacggaagttcgctgaggacagccatgtcgccaacttcgctcagcggcccattgacacaaa

SEQ ID NO: 94948 - DNA, 635 bp, Heterodera glycines
tagaaaacttagcaaaaaatggccgacttcgaagggcgtgtcaaagcttaccgcttcgtggcttacacgaccgtttctttctccatcatctcacttttgtcggtgtgcttgacactgccaatgctgaagagttacgtgtcgaacgtgggcatgaaaatggactcagagctcagctcatgccagcacaatgccaaagacatttggtccgaagtcagtcagctgaaggggctgcctctgctggtcgccggaaaccgtacggcgcgtagcgcatacggtagctgccaagagtgttgctccggtggtgcccaaggccagcccggccaacctggacagcctggacgacccggaaacccgggggcacccggctcaccaggacagcccggacaaaccccgcagacgccttgcgagcaagtgcacccgccgccatgcaccccgtgccctggcggtcagcccggaaacaatggcccaccgggacccccgggagcgcctggatcacccggtcaacctggtaccggaggaggacagccgcaaccgggagagcccggcccacctggccccaatggccagcctggccaacccggacagcccggagcgcctggacagcccggacaacctgccagcccaccgcagacgga

SEQ ID NO: 94949 - DNA, 788 bp, Heterodera glycines
ccaagtttgaggtagaaaacttagcaaaaaatggccgacttcgaagggcgtgtcaaagcttaccgcttcgtggcttacacgaccgtttctttctccatcatctcacttttgtcggtgtgcttgacactgccaatgctgaagagttacgtgtcgaacgtgggcatgaaaatggactctgagctcagctcatgccagcacaatgccaaagacatttggtccgaagtcagtcagctgaaggggctgcctctgctggtctccggaaaccgtacggcgcgtagcgcatacggtagctgccaagagtgttgctccggcggtgcccaaggccagcccggccaacccggacagcctggacgacccggaaacccgggagcacccggctcacccggacagcccggacaaaccccgcagacgccttgtgagcaagtgcacccgcctccatgcaccccgtgccctggcggtcagcccggaaacaatggccccaccgggacccccgggagcgcctggatcaccaggccaacccggtaccggaggaggacagccgcaaccgggagagcccggtccacctgggcccaatggccagcctggccaacccggacagcctggagcgcctggacagcccggacaacctgccagcccaccgcagacggagccccctcctccaggcccacctggagaggctggtgcacccggacagcccggtcagcctggagcccctggacagcccggcgcgtccggacagcccggcccgaagggaccgcctggaggcccaggacagccaggcaacggcg

SEQ ID NO: 94950 - DNA, 890 bp, Heterodera glycines
gctttgcaaaaaaaaatggccgacttcgaagggcgtgtcaaagcttaccgtttcgtggcttacacgacggtttctttctccatcatctcacttttgtcggtgtgcttgacactgccaatgctgaagagttacgtgtccaacgtgggcatgaaaatggactctgagctcagctcatgccagcacaatgccaaagacatttggtccgaagtcagtcagctgaagggaatgcctctgctggtcgccggaaaccgtactgcgcgtagcgcatacggtagctgccaagagtgttgctccggcggtgcccaaggccaacccggccaacccggacagcctggacgacccggaaaccccggagcgcccggctcaccaggacagcccggacaaaccccgcagacgccttgcgagcaagtgcacccgcctccatgcaccccgtgccctggcggtcagcccggtaacaatggcccacctggacccccgggagcgccaggagcacccggccagcccgggcaccggaggaggacagccgcaacccggagagcccggcccacctggacccaatggccagcccggacaacccggacagcccggagcgcctggacagcccggacaacccgcaagcccaccgccaacggagcccgctcctgcaggcccacctgggagaggctggtgcacctggacagcccggtcagcctggagcccctggacagcccggcgcggccggacagcccggcccgaagggacctcccggaggcccaggacagccaggcaatggcggagccccaggccagcccggccaacccggacagcctggaaaccccggagagcgcggaatctgtcccaaatactgtgccgtggacggcggagtgttcttcgaggacggcacacgaaga

SEQ ID NO: 94951 - DNA, 1027 bp, Heterodera glycines
gtataattgcttaagttaggccggtgtttaggcctaagctttcggctaggcctacgcttaggcttgattgggtctaggcttatgattagcttaagctttattttgtaaaatatgagttgccttttgtacaagttgccattgagccattttccgattatacaaaacatgtagaagccataaaaatctcatccctacttattttatttattaagtaattaatttttctctattttcagtaaatttatgagttcaaagcgcaaattacaggtttcttatttaaaagattggccattaaaaaattgacgaaacccaactcgtacttggccaacacgtactgccccaactcgtactgtttgacaaaaaaatcgtcataactcttgcaaagtcgactaaattaaactttcttggtgccattcgataactcttaaagttctccatctacatgaagcaaaatattagaaaattttattgcttttcaaaatttatgaccaaaaatggtaaaaaaatttttgttaattttttcaaattttttattctttaattttttcacatttcaattaattgtctcccccattggttcatttccaaaaggtaataagcggctaagagagagaggcgtgcgttgttccaacggccgcgccggcggcacggcgcggggtcacgcaagaattcggcacaaattacattccctctgaattggtccaacggcagacactccgtgagacgcgcaaaagcgtggatatcggctgatttgcaccgggacaaccaaaagcaggagaatattttgctgtccgtgctgcgcaattgggctttcctgaggcgcgtcctgtattacgcggtctgtgcagttgccatgggattggacatgattcacaccatcaaaattttcggtcgaattcacataactgagacagcactgaacgcgttgaacagtgcgtgccgtgtggaagtgggcagcgggccggaacattcacggcaccttgttgagaagggaatcaagcagacatcgctggtcgtctccgaggag

SEQ ID NO: 94952 - DNA, 494 bp, Heterodera glycines
ccaagtttgagtaacaacaatgaaaagcttacaatagttctgctatatatataacttacctattgctttcgcacatttttcacaaggatttattgaaaaacaaagaaatgaacgtgtcaggccccgcgattgatcaaagtgaaaaaaatcggaaactacttcaggatttgcaaaagaccaaacaacaaatgatgatgaggggtgccagtgctgtgagtcgttccgcccaatcgccacttttgccttccgcttcatcgagcagtttgtcctccctacaacaagcatcgactgatagtacgcagggaacattcgccaccagtgggcaacaacagcacggcactttagcgaataaatccaacacaatgctcgccatggaaatgatccaaaaatccagtataatcttttacccgaccaactccaattatggcaaccaacttctgcccgggtttccccgttttttggctgactgataaaacattttacggagaaaaaaa

SEQ ID NO: 94953 - DNA, 171 bp, Heterodera glycines
gccgtacaaagacggacttttgactctggtcaaagggaattgatcggcggaagaagcgatctgaagatgattgatcattggcattggattgattgatcggatttgccactcgctttatcatttattttgcttgcatttggtcagtgtcaccaattgtaaaggtcaaacgtt

SEQ ID NO: 94954 - DNA, 669 bp, Heterodera glycines
gtcgcatattggcagcggtgggtctcacaaacaatagccaaatttattaaaatgtctgctgctaatgatgttgctgcaactgctaatgatccatcaactgtcgtttgtgaagagaaaaaatcttccgccgctgaagaggaactcattgacgttgttactgttggggaaaacaatccgacggggagtgccgggacaaaaactggggagtccgacgaagtttttgttgtggaacaaatcaaaaacaagcgaagtgtgaacgggacggatgagtatttgatcaaatggaagggttacgacgacgagcaagatgacacgtgggaacccctggaaaacttgcattgtcccgaattgctcaaggaatttgagacgaattattgcccagcaaagacaaagcgtcgcaaaaaaagtagcggaaaagtagccaaaaagagaaagatttccagtgactcaacactaccaacaattccacttgtgctgaaggatcgttaccacatcggagaagatggagcagttcctgaacatatcattggggtcatgaaacacgaagagtccggcaaaatgatggctcttttgacttatacggacgacagagaagcgacggaatttgtacctacggaaatactgctggagaacaaactaaccgcaaagatgattttgaatttctaccag

SEQ ID NO: 94955 - DNA, 1009 bp, Heterodera glycines
ccaaataagatatttaatccatttattggtcctttattttcgttcttgttgtctgctgattatgggcaatgaacactcaaatcgctcaaagggtcatccgtcatcttcgtcttcctcaaaaaaggatagtccggcgactcgccttcaaaaagcgctgccgtccgcgctaaaattcggctcgaatgatctctcgtcgagtgccttacgacgccttttggaacagtcgaagaaaagtcgaagtttgcaactgaaaggggccggcatcaaaagagtgccgtcgggaattgtcgaggaggtccattctttgctcagaattttggagctgtcgtcgaacaaattgcgcgaattgccttcgaccatcggcactttcagcatgctcaaacagttgtacatcgccaacaaccgtctgaccaatttgcccgacgaaattggctgtttgaagacattggaattgctcgatgtttctggcaatcagctcactgaactgcccgacccattggccgcgtgcaattcgctgacccaaatgaacgcgtccaacaacaaattcagcacatttccctccgtcgtgacgcgactgctgcggttggaggtcatcgacttgtcggagaattcgatcactgaacttccggacgaaattgccattctgcgcgccactgaactgatcattcggcgtaaccaattggccttgctgaacgcctccaacttgaccaaatgcgagcacttgaagattcttcgcgtggaagagaactgtctgccgagggaggcgttcactgccgaacttctcgaaaagtccgagctgactctgatcactcacgagggcaatcttttcgcggagaaggaatttcaggcactccccggctacgacgcgtacgaacagcgttttactgcgacacgccgcagacttttctgattgtgcgaaataagaaaataattataaatttctaaagataatttttatttttgtacttatttttgctttccaaaatgtttttaaagacatttggtggcc

SEQ ID NO: 94956 - DNA, 617 bp, Heterodera glycines
gagtcgaccatattccaatatattaaaatttcttaactatgtcgacctcttcaaagttgacagtgatcaacaccattgcgacaatgcgacaattcgtgcgcaaacatcgtaaacagaacgccaatctttgcgtggcattagtgccgacaatgggtgcccttcaccaaggccatctccgactggcacaccaggcacgccaatggcataatgacaaaaaagaacaaaatggcaccactgatcagtgcgcctctccgcccctggtgatcgtctccatttttgtgaatccgcttcaatttggcccaaacgaggactttgaacgctatccgcgcacattggaagcggacttggccaaattggagggcgtcgtggattgtgcatttgtgccaaatgccgtggaaatgttcggggaggaaaagcaaccgctgaatcacaaggatgaggaggatgggatcggcattaaatccggacgcattggacgtattttggagggtgtcacacgtccacagtaccatgacggaatgttgctgcatgtagccaaacttttcaacattgtgcaaccaaatttggcattttttgggaaaaaggatgctcaacagctgttcgccatccaccaattg

SEQ ID NO: 94957 - DNA, 387 bp, Heterodera glycines
cgtggatctacaattaaatatcttcgaattccggacgaagtggttgatctggtgaaggacgaagtcaaggaagtccgacgtcagcaaaaagataaccaacggatgaagaagcaatttgcaaagggaacaaaaggtgccggtggtccatcagctggaggcggcagacctcaacagggcggacgaccgggcggtgggccgtcacgaggggcgtacagaggcggggcacatccgtcgggaggccagccaaggagaaactgacaatgcattattttcgccatgttttgttgtttgctagatctccatttggaaccaattaacgctggaataaatttccaaagactttatgacaattacaaaaaaaaaaaaaaaaactcgagggggggcccg

SEQ ID NO: 94958 - DNA, 921 bp, Heterodera glycines
gtccaattaagtttctaatggcctctcctcctcataacatagacttaaataacaaaacaacggcaaaaatggcggtcaaatggcaaaaactgttgactgacttgacttcgtcctgctctcggctaatttccagcgaggcgttgggtttaccgccagcgctaagcggaggcccaaatctccgaaatgaacggccgtcggcggagggcccttcgaaatgcatcaacgaaattcgcacaatcgcagccgaattaagccccgaaatgcttcggtttggccccgtcaacccttcccttctatgggcctcgagtttttgtgctccggtgtacgagcagaaggatctgttcgaaatgcacgtgttcggcctacgctccgccggccattccattccgttgcacgaccatccgcggatgtacggattcattcgtccgctgcacggtcgcatacgaatctgcactttttcatggttggagcccgaagaagagcagaaaattgtcactgagaggaggaaacgcgcgggaatggccaaaggagcgtcgggagtgatcagacgaccggccaaatttacgggcgaactcatcttggacggggcctgcaaagacccgccgattgccatcgtcgagccgaacacagcaaatgttcattccatcgaggcgttggaggacggcgccgctttcttcgaccttttggtcccgggttacaacgacagtcgctcgtgtaattattacactctgtcggatgacaagggcaatggtaaaattgggatcggagacttcgtttggttggagggttcagaagaagtgcctagagaatttaccatgcaacagcttcgtttcgatccattccttatgtcaaataccaacagattcgattgaaaatgtcggaaaaatagtggcctaactaatttattttattacttttaaa

SEQ ID NO: 94959 - DNA, 478 bp, Heterodera glycines
taaaaagaaaaaaaatgttgttttatgaccatcacacgagaacttgttgttttttcaacgtgcaaaagtgcgccttcacattcgcactcatcggttttgtgctcaatttggtcgcattggtcccaatatttttgccatattcgcccacttctcaagaaaagccaagcatttacattggcaaatgcttgcacatcctgttttctgcgatgctgtttttgtcaatcatgttggcctacaaacttcgcaaagcttggctctatacgccataccttatttacacgggaatttcgttggctcttgcagtttttggctgcttaacctatttgtactttctgattacggacccacaatcactgcttgacgacaattggcgaaaagcacacccgggcaaagcaacgaacgattcagaggctcgcgcaattgcgtcggcttggcttgctttgatgttggtttatttgctgttcagcggttggattta

SEQ ID NO: 94960 - DNA, 431 bp, Heterodera glycines
acaaaagaaaagagtaaaaataaaatcatacgaaaatacaagaaaaaaagagttagtcatcaaaggtcagtgttaagtgagtttaaagtctgagtctttttggaggaggtgtaaaagcagtcggggaaatatgaacaatttcggtcaacaaatttcacaaaatccatgccgtaggagaggcaaacttgcaacagagcctcacagtccgattgtgcccgatgaaattgcggggcaatggagaaaaacctcttgaacatgttctccagtttgaaattgccacgtccgcacaacaaccgcctggcatggttaccattgaaattccattcaccgcgattgttgctctcaaaaaatttggcgtcaatgcagcggcgtttggccggcgaccaatgcgttttgcgcatgaactgtatcgggtgaacatcctcatcaaa

SEQ ID NO: 94961 - DNA, 360 bp, Heterodera glycines
gtttgagctaaattttaaatttttcaaaactgattgtgagacttcattcaaatgcagcaacaacagcccgttccgaagtgtggcaatgtgaaatgcccctgtggagacgcgtgccagtgcggcactgactgcaaatgcggtgcgaaggaggccagcaactgcgcgaacgagaagtgcgtttgtgagaattgcaagtgtggcgccgactgcaagtgtggccagtaaacgacaccgaagaatgggccggagggttgtgataagaagagcaaaagacagttaccttatttaatttgatcgtgaccgaccataattttgacatgtttattttaaaatgctgattgatacaataaatattataag

SEQ ID NO: 94962 - DNA, 617 bp, Heterodera glycines
caagtttgagataaacttaaaaatattttatgatggaacgccgaaacagcaccaaaaatggcggtctgtcccccacccctcaagagacgaccattaatttgcccgtttcctccaatcgaagggcttcgtccgcttcgattctttttgcccaggcgagtttcgacacgggcctcgacgtgagccgcgcctcgcaattgtcgtcccagcggaatgtgctgagtacgcacgtgatggacttgggcagcggcagaccgtgcagtggcatccaatgcaaagcgttcaaatgggacaaaagccattcggaatggattcaaatcggagacacggtgaccaatgcgcaggggcgcattccgctggtgcaccccggcacttcgctgtccaaaggcctttacaaattgcgttttgccacgaaggaatattacgcacgtcaccagctgaagtcactgtttccgcaagttgacgtggtcattgaggtggacgacgccagcgaacattgccatgtgccggtgttactcaaccatttcggctactccgtttataagggacactgatggaatattccctctctcattaattctcattttggtgtatattaaaaacaaataaaataaataatt

SEQ ID NO: 94963 - DNA, 571 bp, Heterodera glycines
ctttttagctttgctcttaaaattctttctaattgctctgcgttaataatttggcacaatggtttgtgtttctaaaacgccgcgttctctccccaaaaaacgacggcaatcgactgagcaaaacaccgacactcctccaaatgaccatcccgaagtaaaaaaggccaaaatcgaggatctgctaaaaaagttctccaatggagggttcgatcagttttggaatgaaggattccaaccggaagaggaaccatcgcccgacttttgcaattgggatttcggcaaagagccaagaaaatgcgttttttgcattgcgaaagaagaggaagaagagtgggaagaagaagaggaagaggacaaagaatgagtggaagagagagaatgagaagacggggggagccgcgaaacaaaaagcaaaactttagagcacatcgaacatctattattaattcttaatatcaaatacacgaaaaaacaaaaacttaaaagaataataataattaatttaattgtgaattatcataattaagtttgtaattttttttgttctctctaaaataaaacgatttattcc

SEQ ID NO: 94964 - DNA, 731 bp, Heterodera glycines
aggacgagccatggatgccggcggagaaagtatacacaatcaaaggccgtggtacggtgatcaccggcaaattggagcagggcactctgaaaaagaacgacaaagtgaccattgttggactgggcaaaaaattggacaccacaatcgccggcttggaaacattccgcaaaacagttgatcaggcggagcccggggaccaattgggagttctcctcaagggccttggtccgaaggacgtgcgcaggggaagtgtgctgctcaaacagggccaagacgcacattttacggacaaagttcgagcgcagatttacttgctgaaaccggaggagggcggctccaaaatgccgttggcccacatgttcaaggagcacatgttttcattgacatgggactcggcggccaccgttatgttgcagggccgtgacttcgtcatgccgggcgagactgttgagctcgagtttctgttcaacactccccaatttgttcgtccccaacagcgtttcactctccgccatgacaaaaccacaatcgcctgcggcgtctttttggaggctcttcccgagtcggagggcgaaattcccgacaaaaagtggaggaaaatgcaaatgcgaggagtgatggaaagggttggtttcaatccgttcggcaaccgatcgtttgagcgagcgtgcaaacctgactataccaattcgccgaaggacaacccggccgaggcattgttcaaaagcgaa

SEQ ID NO: 94965 - DNA, 529 bp, Heterodera glycines
ccacttttggtgaggaagttttcggcaatttccgcttggttgcgctccaattgagggacttcgtttcgtcgcgctctgttcaggaaaagttgggcgttgtcaacagttcccttgcacccataagagacgcggccaacgccactgaacagttcatccttgacgagcagcgcaaagtgttgccccgtgccgtcgccatttccatgggcggcatggccggctttgtggcggccatgcgaaagggcggacggatgcgccgcacattttatcctttgattggactgctgacaatgaccgccttttgctacccaaatgagacggtgcactccgtccgcgttggcattgcccactcgcagagcgcatggcacaacttcaagcaggcgcctgaaccgaagagcagttgactgatgaacaattcaaatttgtgcatcgtttttggccattgtcaaggggtgacgaacacacacattttaatgttgtaggatttaaattttaaattctgtttttcggtctgataaataatttcaattaa

SEQ ID NO: 94966 - DNA, 628 bp, Heterodera glycines
gttgttttgccattgacactttcagcaaacaaacaaaaaaaatgggcagcagtgcctccgaatcgccgccaccgccaaaacttgtcgccatccaagacttgcccatttacaaggccgagtccgtcccggccgcacgtgctgcacggcccgtcgacaccattggcaggccggccacttttggtgaggaagttttcggcaatttccgcttggttgcgctccaattgagggacttcgtttcggaaaagttgggcgttgtcaacagttcccttgcacccataagagacgcggccaacgccactgaacagttcatccttgacgagcagcgcaaagtgttgccccgtgccgtcgccatttccatgggcggcatggccggctttgtggcggccatgcgaaagggcggacggatgcgccgcacattttatcctttgattggactgctgacaatgaccgccttttgctacccaaatgagacggtgcactccgtccgcgttggcattgcccactcgcagagcgcatggcacaacttcaagcaggcgcctgaaccgaagagcagttgactgatgaacaattcatttgtgcatcgtttttggccattgtcaaggggtgacgaacacacacattttaatgt

SEQ ID NO: 94967 - DNA, 750 bp, Heterodera glycines
gagcagaagacgaaagagcacgcgatgcagtccaagcagcaggccacgggaattgaaagccaaggaaacgatcatccgaaaacagtttcgacaagcggtcaaaattcaaacgcgccaattcaaagcgtaccaatcccaaatgctccaaatggcgccccgggaggagcacagagaactgctgaaccgactgaaggaggaacagagtcggaagatcgcctcccttgcggaccaatacgaagcgaccattgaaacgatggtcacggaacaaacgatcaaattggacgcccaacaggaggaggacttgcgacagctgaccgaaaaactgaacagggagctgagcatgttgacggagtaccaggagaaacagcgggttgaactgagcgcacaaattgagcgcgagcgagtgcaactgcaggaccgcgtcaaccttcggcttgctgtgctgaaacagaaaatgaacgaagaaaaggtccattttgagcggaacagagagcgacagttggcgcagttgcacgaccgacaggcgcaagcgttgagtgccttctccgtcgatgagagacggaagaaaagttccatgggaagtgacgggggacggaacgacgcgtcgtccacaaatttgtgaattgggcccagcgggcattcgttgccttttctctccttttgtcgccttcaattttcaattgtttcgacaatttttacttatctttttctttctccaacgaatttttgtatgtttttgtctttacttat

SEQ ID NO: 94968 - DNA, 626 bp, Heterodera glycines
attttaaaaaaacttccaaccaattctcttttcgtcaaaatgctttctcccttctcctacgacccgttctatcgccgttcgttgtggcctatgaccaccgttggcaacgtcctttcgcccttccgccagttggagcgcgaactcgaccacttctttgacgggatgcagcccatgcttcgtgaccacgccgctcaactgaacgtcacggacaagggcgaactcacttacaaagtcgatgtcagcggcttccgccccgaggagatcaacgtggaggtgattggtaatgaaatcatcgtcaatggggaacatcgcgagcagaacgacagcgaatcggtccaccgtcagttctcgcgccgtgtgctcatcccggagggcatccaaaaggagagcatcaagtgcgagctggacggcggtcgcttgtgcatctgcggaatgaaaacggctggcgaaggcggacgaaccatcccaattgagatgaaaaagaaagcggccgtggaacagcagccgcaagcggagaagaaatagagggggacaaatggagacgacggaccgatcgatccattaatatgggtctcctcctttggacattttaaattattttcaacaataaagcgttttttctaaaa

SEQ ID NO: 94969 - DNA, 214 bp, Heterodera glycines
  unsure (1)..(214): unsure at all n locations
gatgaattgatcggagaagtgctcaacttaattcacgcagaaagcccggaacagtgaccgtcttgatgcttttaaatgcacttacgagaaaaaaaacaattccgcattttggtctcacttattatgctcattttatcctctcaccaacatatgacactgtccaatgcttcttttttttgcatttataaacggtgagttggatcagaccgggtcn

SEQ ID NO: 94970 - DNA, 478 bp, Heterodera glycines
aaagttgctcgtccaacgccaacttcgctctcccacgaggcgtacgaaccgcaactgatggcctgagtggacatttaccggaccaaatgcaatgccaggcatggcgcaacggcaaaatcggcggtgccgacggttgacgaactgttcagggcacagcttggtcatttctacgctcagattgatggcattgtgtttgaagattttgtcaggtccgccgtcctcggtcagcttttacgcctccatctgtcttctgctcgttggccatgcgttgcatgggcaccgactggcccttctccgccgtttgggccccgcttggctaggccgagtccgcgaacagttggccgactgccgagccatggacgaggcggacaaagcggcacaatagcagcagaaacagggccaaaaaaggcacaaaaacgggacggacatgccgaggacgacgatgggatgagtgcggaattgagacgacaaatgactt

SEQ ID NO: 94971 - DNA, 436 bp, Heterodera glycines
ccaacggcaaaatcggcggtgccaacggtcggcgaactgttcagggcacagcttggccatttctacgctcaaattggtgacattaagtttgaagatccgccgtcttcggtcaatttttacgcctccatctgtctgctgctcgtcggccatgttttacaagggcaccggccgacccttctccgccgggtgggccccgcttggctgggccgagtccgcgaacagttggccgactggcgagctatggacgaggcggacaaagcggcacaacagcagaaacaaagccataaaaatccgcaaaaacgggatgaacacgtcgatgacgacgatggaatgagtgcggaattgagacgacgaatggctcaatcggtggagcaacaacagctgttccgaatgaacatgtttaccttccaacttgacgaggcggaacgacgtgttc

SEQ ID NO: 94972 - DNA, 420 bp, Heterodera glycines
ccaagtttgagatttataaattttcctgccctaaaaatggtagttgaaatgtcttccggtgctgcaacaactgcttctgccgctgctgttgctggaactgctccgtccgctggccctgtgccctcatgcatttgctcgtccacctcgcagctgttgacagcggccggcatggacggcattccgccggccaaaacgcccgcaaattcgggcccggacgcaaattttcttgccgattcgttgggcgtctcaccgctataccgccaagaagatactaaacgatggcaaaccgccgccaaagtgtaccagtcaagccgtagtcaaatgcacagtccaacctccggcacttgtgcaccgcagcactttcattttggcgaatcgctgacggcggagggccatttgacgcaaaaaattcgccaatgc

SEQ ID NO: 94973 - DNA, 1280 bp, Heterodera glycines
atctttttgcatccccgtcctgacatcatggacgatttgtgccgtcgtgggctgctgaccacggaacaaaccccgcacgagccgtcctccgcagacaaatttgacggagcggatgaagcggtgttggccctggtggacaaataccgacgcacttgcggactgccgaccgccaagcgcagtgcgccctcaccgctcaattcgctgctgtcgccaggcaaactgccgcccgccggaaagccgccgacgccgtacatcccaacgccaggcggttccgctgggtacgcgccggccgcgttgctcaagcaacaacagcgcaacgcctcctttgggtatcactcgaacagcagcagcagcaaccaggacgactggcaggcacttcttcaaccaccgcctccaccaccgccgccgatgccttcgttgtcgtcagtgcagactgcgcttagcggtgggacaccgcgcggtattctgagccacgcgtcttcggctgctgctgcggcgcataaacgtgacactttgcgctcacccgggacagaggcgcgacgaccaaagaatcagacactgttcaaaaatgcgctggagcaaatccgtaaaatcaatgaggagtcaaagtcgggcagtggcactgtgccgtcagcgacttctgtttcggatccgtttccatcatcatccattcctccacttaaaacgccgtctccacttcgtccattgatctcaaccatttctgcaacttcaactgaacaacaacatttgccagcacctcctgtgcctcccaatcttccgcgtgacccacgactgctcaaacatggcaatgccaccgctgccgccgtcgttgttgttgtagacaagccaaaccaacaacaacaagttcgatgtgccacaattcctgtcgatgctcgccccaattctgtcctatcgccgccttgcgacccacgtctgaagcgcatcagtgctgaagcattgcctgtttcgtcgccctccgtccttccgccactaccaaagttcaaggcaacggtgcccgtgttgaatgtcaggccggtgtcctctgctgccgccgttgttgtaccaccgccgccgccgtcaccaccgccaaatgtgtctgttttcaagcaattggtgccatctgctgcttctgtttcgacgacggcgccggcaccaccaaatttgggtttcaaacgcgcatatggccttgtcggaatggtatcttccggcattgatataccgccaccaccacctccgccagaacttgcaccgccggaggagaaaaagatgatgttgcagcc

SEQ ID NO: 94974 - DNA, 474 bp, Heterodera glycines
ggacaatcaccgaaagctcatcagagttaccgctcctcctccgcagaggcaacaacaacaactgatcaatggcgtagtaatgtctcacaatcaacatttgcacgtgccgaacacggcaattggtgggaggacgacgacggtggacatggccataccccaacggcagcagttgtccgacagtgaagtgttgccggtgcatcatcattgtctttatcgaattgaccacccacaaattctttcttcgggcactgcgacagacttttcggtccttcagaatttcccggcggccaaacctcgcaatgccgtcaatttgaacaataacaacatgcaacaatttgtgccaacaacagaatcgttttcgtcgccttcctcgtcgtcggcgccaaacactgccattgagctgacattgatgaacggcgaattgtcgatggactcatccgctaccatttctcagtttcatccaattgtcttgga

SEQ ID NO: 94975 - DNA, 459 bp, Heterodera glycines
atttggttgtctctttcttctcctttctctttctctatgttttccatactctctcctctccttccatctgttttaatttaccgttcgattcgttcactttgcgcagtttcccctggttcagatgcaacttcggtgcgtaaatgatgtccttcaccaagttggccatgtcttctcccaattgtccgctgtgcgtccattcgtccaccagcaaatcgcataagcggatgaacgaattggcaccgctttccagcagtacgacgccacggcggaagcagtgtttgagttgcagcaaagggtaaatgctcagcagagagatgtacggcttggaaaggcgcgtgccggcgccctcaacgcactgctccaacttaatccatctgaccgtgccatattagagtgcttttccatgctggataatgccgaccggtgcgtctgttgccaaaagagcgtttgctgaacatt

SEQ ID NO: 94976 - DNA, 1090 bp, Heterodera glycines
ccgcctggacccagcactgaaacacccggaccgcctggacccagcactgaaacgcccggaccgcctggacccagcactgaaacgcccggaccgcctggacccagcactgaaacacccggaccgccttgacccagcactgaaacacccggaccgcctggacccagcactgaaacgcccggaccgcctggacccagcactgtttttcccggaccgcctggacccagcactgaaacgcccggaccgtctggacccagcactgaaacgcccggaccgtctggacccagcactgaaacgcccggaccgcctggacccagcactgaaacgcccggaccgcctggacccagcactgaaacacccggaccgcctggacccagcactgaaacgcccggaccgcctggacccagcactgaaacgcccggaccgcctggacccagcactgaaacgcccggaccgcctggacccagcactgaaacgcccggaccgcctggacccagcactgccggaacttcctctacaaagacctacactgttccaacaactccaaaaccacctccgtgttgttatggctgtgactaccctgtcgactgccacacttctgggaaggattgcgactattccccgcttcagccgccttatcaaagcgacccttacccggttgggaagtgcgtcttcaaaaatgtcacttgcgccgctccaaacaccggcaaagtgctcttcatgaagctcaacaatgaccccaactccgtcgtttcgtcttccgtctcaccgttcaacaaagtcacagtcattttgcagtgcacctgcaaaccgtacttcgcaccttattgggtccaagtgggcgttgacggcaacccggccaagcaggtcaacgtcaaatcggcaacctgcggacgtcactgttactagaaaatgatgaccactcattgtccaacaaaagaattaagcaaaaaggaaattaattagaaaatcaattagagaaaaatttccttgcgcattttttaaattgtaattttctttattaataaatatgtagtagaaaagaaattgtcgagtagaagaatatcatattattcgatataataattttttg

SEQ ID NO: 94977 - DNA, 696 bp, Heterodera glycines
catgaataaatggcttctactattacgcacgtggtcttcgaccttgatggtgttctgatcgacactgaacgtcattatacaacggccaacgagcggacgttggagaaatttggagcaaaattcactcgagaaatgaagctcaaaatgatgggacgcaaaaagacggaggcggtcacggttttgctgaaggatgcggggatagcggatcgcgttacgatggaccaatacattgcggagtacgacaaacacgtccttcaaatcatgcgcgctcttacggaggaattgcctggtgccaccaaattgatcgaccatttgtacgcccacaacattccaatggccatctgtacgggatcggacaacgaggagtttgcaagcaaaatgcttaaatttgacgaatggcttaagaagattccgcttcgtgtgctgtgcgggagtgatccagaggtacgcattggcaaaccgaatccggacgcatacgaagtgaccattggacgttttgctgccaaaccgacttcgccgaagaatgtgctggtgtttgaggactcaattaacggagtggaaagcgcgttgggtgcgggatgcacggtggtgatggtgcctcagcgtgagtttctgccgaatgattggcccgagaaagaactccgttcgcgtccaaattttgccgccttgctcgattcgcttgacaatttttgcccg

SEQ ID NO: 94978 - DNA, 420 bp, Heterodera glycines
ctcggaggaaaatgtgccgaatccgcttttgttggagaaggaagtggtgccgaaccagcaggactcggtggaaaatgtgccgaatccgctttgttggagaaggaagtggtgccgaaccaacagaactcggacttaaactcatgtgccatggaatccactcacgtttcgtctgccaatcacttttttgcacagtactgtgccgaaatggttgaaacacttctcgggaaaatgtcggacaaggacgccttccatttgcgcaaggagatgaatgatgttttgacgaaatacgaggccgccaccatcgacgacaaatgagaagagggaagattgattgattgtctgccagtgatttttatgggtttctgcgcttgaattttttccatttgaacgtcaatttcgtcagtaaagcaaaatatattt

SEQ ID NO: 94979 - DNA, 615 bp, Heterodera glycines
cacaattacctaatttctcatttccccggtttctttctcttagtaattccctttgatacgccgccttttctccgtccgatggatgtttccctcttccgtttgccttctcttccccattttttcccttctcttccgctgtgtcccttccttctcctttttcttttgtccaatcctccgattttcgcctccgattcggctgcttttccgacgtcttcatgccgtaacatccaacaagcttgtgccgctcaacttttcttcttccctccgttgccttccgtacaggagacggtgccggacgtgccgttggcacagcgactggaggaggaggaggaggaggaggggtccggtgaaggcgcgggtgctgtagacgccggcggatggcattttgtgccaatgtccggccctttgtcttttcctctatacgacgaatttgtgccgacaacgccatcctatgattacaacgcggaaccgctggagatgagacaagtcgacatttgtacatgtccggagaatgatcagtgcagtttcgacactgaaaggaccgtcaaattcagtcctcaaattcgagtcgctttctgcaggccgttggccgaggtgttcaagtcgaagtgcaaa

SEQ ID NO: 94980 - DNA, 423 bp, Heterodera glycines
agattatgaaaagtgatttatattcacaaattgatagaaaatttgaagaatcttctacttcgaatgaagggtcagataatgagctcgtagctgatgataatgcttctcttaattctatgtatatgaagcttgatttcctggaccgggttaaagccgagatcatcttcaattcactttctgtcgacaaagagccaaaacgaagtacaacgagacgattgatgagtttggatggcacaattatcactgcaaaattttcttccgatgatcagaaatcattgatacgaagcgccaataattttttcgacatgtgccaactgagcaaaagttgcatcgatatggcgcgaaattatgcctacaaatctcccaaaatgaagacagttcaaattccgacgaaaaagaaacataacaaataaaatttttatg

SEQ ID NO: 94981 - DNA, 618 bp, Heterodera glycines
gagaaatatccggcccgcaacaatctcgagcaccttgcgatgctcacgtgtacggaggaaccgcacattgtgcgcaagacgggaatcatttgcacgatagggcccgtttgtcgttcggtggaaatgttggttcaaatgatcgaaaatgggatggacgtcgcccggatgaacttcagtcacggggaccacgaatatcacggcggtaccatcaaaaatgtgcgtgaagcagctgccaaatgcaccaagaaacgcaacgtggcgattgcactggacacaaaagggcccgagattaggacgggacttttggcagggggcggttcggctgaaattctgttggagaaggacgcgtccattcgcctgaccaccgactcggcatttgagaagtcgggcaccgccatcaacctctacgtcgactacaagaacataacgaaggttgtgaccaaaggatcgcgcgtgtacatcgatgacggattgctgtcgcttattgtggaagaaattttcgacgacgccatactgtgcaaagttgaaaatggagggaaattgggcagtcgcaaaggggtgaatttgcccggaacaccggtcgatttgccagccgtttccgagaaggacatcaaggac

SEQ ID NO: 94982 - DNA, 1707 bp, Heterodera glycines
gtttccgtcaagagcaaatcatggagaaatatccggcccgcaacaatctcgaacaccttgcgatgcttaagtgtaccgagaaaccgcacattgtgcgcaagacgggaatcatttgcacgatagggcccgtttgtcgttcggtggacatgttggtccaaatgatcgaaaatgggatgaacgtcgcccggatgaacttcagtcacggggaccacgaatatcacggcggtaccatcaaaaatgtgcgtgaagcagctgccaaatgcaccaagaagtacaacgtggctattgcactggacacgaaggggcccgagattcggacgggacttttggcagggggcggttcggctgaaattctgttggcgaaggacgcgtccattcgcctgaccaccgacccggcatttgagaagtcgggcaccgccgtcaacctctacgtggactacaagaacatcacgaaggttgtgaccaaagggtcgcgcgtgtacatcgacgacggattgctgtcgcttattgtggaagaaattttgggcgacgacgccgccatactgtgcaaagttgaaaacggagggaaattgggcagtcgcaagggcgtcaatttgccaggaatatcggtcgatttgccagctgtttccgagaaggacatcaaagacctgcgttttggtgttgagcagggcgtcgacatcattttcgcctcgttcattcgaaacgccaatggcatccgcaccatccgagaagtgctgggcgaggcgggcaaaaacatcaaaatcatcgcaaaaatcgagaaccaggaaggtgaggacaatgtggacgaaatcattgcggcgtcggacggcgtgatggtcgcccgtggcgacttgggcatcgaaattccggcccagaaggtgtttctggcgcagaagatgatgatcgcaaagtgcaacatggccgggaagccggtcatcaccgccacccatatgcttgagtcgatggtgaacaagccgcgaccgactcgtgccgaggtcaatgacgtggcgaacgcagtgctggacagctcggactgtgtaatgctttcaggcgaatcgaccaaaggcgattatccggggggatctctgaaaaccatgcaacaaaatttgtctggaggccgaaaccgcctttttccactcgaggtacttcgaggagttgttgcagaacacgcccagccccaccgggccgggcgaaaccatcgcaagcgctgccgccaacgccgcgaggagatgccgggcaagcgcaatcattgtgctgaccaccaccggaaagtcggcccaggagtgttcccgcttccgcgtgccaatccccgtgttggccatcacccgctatgagcaggtggcgcgtcagctgcagttgtgccgtggtctgttcccgctgtactacccgcacatggaacgcgacacggagtggacggaggacgtgaacaagcgcatcgcgtacggcatcggagtgggcaaggagcgcgggttcatccacaacggcgactttgtggtcattgtcaccggatggcaagcgggtgccggctccacaaacacaatccgtttgcagaaagtcgaataacagagggacgtgtccaatgagcttttgaagacttcgcgtgaccgatgaaaactttttttaggaatttacgcttttgtgacttttgttttcatatttttgttgactcggtgtttattctcaaataaagaaccttaggctttaaaa

SEQ ID NO: 94983 - DNA, 1022 bp, Heterodera glycines
cctcgtgccgaattcggcacgagggtccaattaagcgtccctacccaaatgaatattgtgtgtccgtctcaccctgaagcggatttggtcgaagatgccagggccggcgatttgatttgtactcgctgcggtttggttgttggagaaagactaattgatgttgggactgaatggcgttcgtttagcaatgaaagttcgggaaaggacccctctcgcgtcggtgcccctgagaatccgcttctttctggctccgacttatcgacttcaattgccgtttctttcggatcggacagtgatagagctttggcaaatgcacagaggaagcttttgagcagcaccgatcgacaaatgacacaggctatgatggttattcgtgaaatgagcgagaaaatcaacttgacccggacaatccaagacagagcggctaaactgtacaaggaggtcctcgagtcgaaagccctccgcggaaagaacaacgaggcacaggcggccgcttgcctttacatcgcatgtcgtcaagagggggttcccagaacgttcaaggaaatttgtgcggtgtcaaaagtgtcgaagaaggaaattggacgctgtttcaagctcatccagaagaccatggagaccaacttggaccacataaccagtgccgatttcatgtcccgtttctgtggcaatctcagcctgccttaccccgtccaagtcgctgccactcgaattgcgaaaaaatctgttgaacatgacctcgttgctggtcggagtccaatttccatcgccgccgccgcaatttatatggcatcgcaggcgagcaatgacaaacgcacggcgaaagagatcggtgaaattgccggcgctgccgaagtgaccgttcgtcaaacgtaccgtctcctcctgcccaagggttttggagctgtttccgcctgactttcgcttcgagacgcccatagatcagttgcccacttcctgaaaaggcgcaatttgggcttttcttttgaatgcgtgtcaattcgttcattttttccgttcat

SEQ ID NO: 94984 - DNA, 363 bp, Heterodera glycines
ccaaaatcattcattaactaatcaatcaattggtcagtccctctcacaatgctcttctccactccaatgccactctttctcgtctcttctgtctttctcttcgtttttcttctcgtcgccatgtttttggccaatccgtccgatgcgcggcctcaatttggctcatttgccgattcgatgaccagcggaacgattttgagtaatatgtggggaaaaaaagcgatgagaagcggccaacagcagacggagaaagaaagaaaattaaagaaaactgaagagaacaattggaaataatcaacaattaataaataattgttaattttgtataatcaatcatcaattataaatggttggtaattaaaa

SEQ ID NO: 94985 - DNA, 1401 bp, Heterodera glycines
caagtttgagcaatttcttttctcttccaaattcactttccatttgccctccttccctagccaatttgtcccccttaaaaatggcactcgtctccaaatggcgttccgaccctttcgggcgttctgactggcccagcctttggcgtgatcgcttttctcgcgactgggacgattggccccgcgattggccacgcccgggagaactgatggaacgtttccgttcccgcgacttcgaccgcgaccgttggtggcgagattggcccactgattggccccggatggacgcaattgtgccaagattttcttcacatttggaccgtttcgaccgtaattggcgtgacgaccccttttggcgcgatttgtacccgcgttgggccgagcccatctttaaagatggcatcgacgtcaaaactaacatcaccaacgacagtaaccgtttcgcagtcgaaatggacacttaccaattccgcccggaggaacttcaggtgaaaacgatggacgacactttgctgattgagggacggcacgaagatgttcgagacagagacaattacaccaaaatgtatttcgtccgcaaataccaattgccggccgatgtggagtcccactcgatcagcagtcacatcgacagttctggccgtctgagcgtcgaggcccaaaagcgttggcaggccgtggaaggcgaacgttccattccaattgagagcggctcgcgtcgtcagggcgggggctacgggtcgcgctcgagctcatactcgccgcgcgatcgctactacgccgactcaggccgagggtcggccaacgattattacagggctgagagccgtctgaacggagcggcgaacggcggcggtggttacctttcgccaaacccgcgatcggacggatatcgaacggaattcgagaaacgcgagacggacgcgaacggaatgcgacacgaagcgagacgggaggaattccgcgaggagttccgtcgcagcggatcggccgctaatgttcttccaccggcctcgcctatgctgcgcaccgagtcgcgtttgagcggcgcggtcggcgccaatgcgtcgtcaggcgaagaacgccgcgaatcgtcgcacttccgccgaacggcttcagccgcctcgcgcgagtatcggtcgggtggcgctttcgctggcggagaaaatcttttgcggccggcggaggaattgggcgggcgaagttcggcatttggcactcgaaacgtgccaattcaccgtggataaagacaatgtgagggggaagcgcccgcatggacgacacataagacgaacgaacagacaaaagacgaaatcactcccccccactcactcatttgccttagagtgtcaaagggcagactgactgataaataagcccgatcactttttattgcttcaaatt

SEQ ID NO: 94986 - DNA, 647 bp, Heterodera glycines
gtttcataagtgactaataatgtcgtcgtttggcactagcagtggaggtcgaattcgacagcgtggtactgttggaggtcgtggccaattcaacttgtccggcatggtggaaccacagcaagcttttcaaccaccaacgacacacccagccgactttagcgttagccgcggtcgagggcaccgttatctgcaaaatccattggaaagtctgacccacccgtgcaaacttgaagtggccatggccacccccgctgaagttgacttgtcgccggccattcgtgaaatcaagaaggatacgttttccgttggtgtcactccgaccacccttacatccgttggaaagggtccgtgcgtttcgtgtcagcaaagcgaagaagtcaaccgccagttgatggccgcgcttctgaaggaccttggaacttcgctcgtcaatttcgccgcgaaattggagcagccgtcgaaatgattggacaaatcgaaggacgaaaaagtgacgaagcgaaagacggaccgactaaagacccatttttaactgtgttcagttcctatctaaagtccttatcaattttatcataatacgtatgtttcacctaacttctcataatgacttaaataagaaaactaagaataaatccctatcataaaaa

SEQ ID NO: 94987 - DNA, 481 bp, Heterodera glycines
cctcgtgccgaattcggcacgaggcttggctttgctgctgctttcgatgaccattttcagcactttccgtggcttttttcggctctcttcgcttggcttcttctcctttttcttcttttggagctgtttccttccttttcagccaatttatctcttcagttggtaagccctcgccgtgctctgatcgctttattccgtgcccccaacccaaccgaacattatttggcctttctcgacatattccgaatcggtgccatctgttgggtgataagcaatcatctcggcagtgaaggacgtctcgatgtgcttttgggacttccgcacggcgaacatttcaaacagtccgtccattcccttcccatctttggccccatttttggcaattctgctctcggtgtggaagtttttttggttctttccggctttttggccgcccgctcgtggcatcgtcggtggcaatccgaccttggcttttggccaa

SEQ ID NO: 94988 - DNA, 817 bp, Heterodera glycines
gtttgagtagtgccggcaaaatatgttcaaacccaaatcgcttctccgccttttcctcattcggaaatgtgtcaattatcggtcaaagacttcattttctggttccgaatttattgaaaggcgagcccggctattggaattggttggaaaagcacggcccgactttgatggaaagaagcccttcgctttgctattggccaaacggagaagtttcagtgcccccgacgtgccccacgtttaccgccaatgttcccactttcgctacctttgcggcgttgacaggcctggctatcgactgctcatcggacccaaagagagcgtgctgttttgtgcccttcagtcggctcaccaaatcctatgggacggtgcgtcgccaagtgatgctcagctgatgtgtgcttccggtgtcgaccaagtcctcccgctcgacgagttcgacgcgtacatggcgggcacagttcgcaacggactgctcgccttggatttgccttcgatggccgatcacgctgccgatgcgcctgcacaaatgaagaaaatgtggaaaatgttgtcggacggcgtgtggacgcacgtctcactcaatgagcacgtggacacattgcggtggcgcaaatcagagacggaaaaggcgatgatgcgacggacatgcgcagtgggaggggaggcactgaacgcgatggtccgggaatgtcgtaaagcaaccaatgaatctcatattgtcggcttcctcgagttcgagtgccgtcgacgtggtgcccacttcctcgcctatccccccggcgttgccggtggttcaaatgcgaataccatccattac

SEQ ID NO: 94989 - DNA, 804 bp, Heterodera glycines
  unsure (1)..(804): unsure at all n locations
gacaaaagtggttcgtcgttttgtttcacttagcacattcattgatgagtgtttttctgaactccgtcagaaggctgtccgtcatcagttcagccatgaaatttcttagacaacaagaagcgattgacatcgaccgggagctgttcacctcgtgcggtttcagcgtggaccaactgatggaattggcggggttggcctgtgcccaggcaatcggtgaaacgttcgaaaaggggaacgttctcattttgtcagggcctgggaataatggcggcgatggactcgtttgtgcgagacacttgaagcattttggattttcgccttcgattctctgtccaaaaccatcacaaaatgatctgatgcaacgattgatgcttcaattggaatgcctcggcattcccttcgtcgaatcattccctgaccccaattctattgagaagttcaacttcctcgttgacgcaatcttcggttttagctttcgtcccccaattcggggagccattcaacaaaattttgaagcaaatggaaagtgtccaaaatcgtgtcccaattgtgtcaattgatattccttcgggtcaacccaaaggttgggacgtggagaaagggcccccggatgaaaagagcggtttgcccattctgagccctttggcactcatttcactgactgccccgaaacaatgcgcacaattttttaaaggagaatatcattttttgggaggccggtttgtgccacctgccttggtacagaaattcggacttgaaaatatgccaccatatgaaggatcttcncaatttatgcgtcttaat

SEQ ID NO: 94990 - DNA, 1067 bp, Heterodera glycines
atttgttcaaatgaattctttctgatgtgtttaaacaatgcatggttcttcaccattaacagaggctaatctgtgcatgaaatttgagtcttctttttcatggaaggattgggttaggttacgtgacacttggaatgccgttgttacgtcgcaatcgcagattcacaggcattctgaacagctcgacaaaattgtttcggaggaaagcagttacagaaattatgcatctgacattcaaaatcgacaaattatgatccaaattgtggaaagaaatgtgaacaaagcgagggaattggtacgaacggcgcgatatcagttgaacgctttcaattcggcgctgagtcaaatgagtgcaatgtttaaatcgcaggaagagaacgattcccaaactgagcacggaatattggagctgaacaaccaaaacgccgaaatgcgcttggagttgagccgacttcgcaatgagttggttttccgacgtcgacatatgctcaaaagcctttacgaagtgttttttctgccgaagctgaagcgctcttcgattgcggcaccgctcgtcttcagaaggcaatgcttttgctccaacttcgatgccattcgctccttgcatttcccttctgtgcctgctcgactcgggcacaatgatgccgagttaagttcggccgctggttttatcgttcaacttttactcgcaattagccatattttggacattccgctcaaacatttgctccttttcaatggttctcgttccgcaatatttagtcgttcttctttggaacgctttggacctcttttccacttcctctgcaaagagtcaaaggaatccgctggaccaaacgatgtacctgctcaacgaaggcatcgtcccacatgagggccaagactggcggttgtgtctgagggggaccgaccggaccatgcagcctagtgcgaagagcggggactactctaagcaaccgaatgccagacggtgtcgagcaactcgcgaaaaggctacactacaattaggaagaagaatacacctaatacgcggcgcgggaggaggggcggccaaaagcaaaggaaaa

SEQ ID NO: 94991 - DNA, 346 bp, Heterodera glycines
  unsure (1)..(346): unsure at all n locations
aacagatcagccttctgtcaatgcatttcggcgctgagcaggtgaacagacgcatctacggcttcaaggccgactttttcgcaaccattgccaattcgttggcgactgaatgcgtctttttggacggtgcgtcgcattcgcaacggatgccatcgaagcgtgggccgaactcgtggaaatgatgttcagcagtgtccgcgatggctattacgcggaggtgcgtcgaaggcgccggtgcagcggcggcgcctccggagagaccaaaagtggccaaaatgaaaagatcataaaatgaaacacatttttttcactttgttgttgattaagagaaaacgaaatttttcan

SEQ ID NO: 94992 - DNA, 564 bp, Heterodera glycines
gaatttcatatctctgaattaacctcggcaatgcattctctcgcctttatttccttcgctttttgcctttcactaacggacgcttttcgtactcaatcgtccggcgtccgggggacacttctctgtggaggaaaagcactcgcggacacaaaagtgaaactttacgaccacgacaaagggccggacgcggacgatttgatggggacgacgacaacggacgagcagggacgattccaagtcagcggaaagaccaccgaactgaccaccatcgacgtccaactccgcatttaccacgactgcgatgatggcatgatgccttgccaacgcaaggtgaccttcaacatccccgattcgtacgtcacgtcgggtgcggtgccggcgaaattctttgacattggcacagtgaacatgcaaatcatattcgaccacgaagagcgatcatgcattcattaattgacagatctttatttttttattgaacaatgaatgatttgtgagttattctgctaaagagtccgttcttcggtctttgggcctttgcctcagaatcaaatttctgtttgg

SEQ ID NO: 94993 - DNA, 653 bp, Heterodera glycines
aagtttgagggatttgccattttaaagtgcacagccaccaaaagccattcgtaagacgcccgcccaatgccaacttttgcagaacttttcgaactcagcgcaacggatgtcgtcctcgttgttctgttcgtatacgtcgtctacaaattgttcttcgctcgtcgccatattccgcctccccccgacgtgccgcaagtcgaaccgttggagaagcaggacatgacggtggagcagctgagacgctacgacggagtacaagacgaacacatttgcatggcaatctgtggaaagatttacgacgtgacaaagggaagggactattacggacccgagggggcgtacggagcattggctgggcatgacgcaactcgtgcactgggcacgatggatgtcaagcaaatcaaagacgaatttgatgaccacgccggaattgacccatccgatttggaagaagcgaaagagtggcaacagcgcttgtcattgaaatacccgttcgtcggccgacttttggctccgggtgagcaacacacggagtatgagactgttgcagacaaccgtgagggaaattaaacagcggttgacgcgtaagaaattcacacattccttcacttcaatttttccaccttttcactttgctccataaaatcactatc

SEQ ID NO: 94994 - DNA, 624 bp, Heterodera glycines
cttggttggtccaactctactcaattgaattaagcaatgattgattgccattgccatttggcggatgaaagttttaatgaggacattagtcaggtgattgaccgagcgaagcaaaatggtgtcaaagctgctttagtggtcgcagaatttaaggatgattttgagcgaattttggaattggcccatcaatttcccgattttatctttccatgtcttggaatgcatcctgtgcaacgtggacacatttcatgcagtgaagaaatgtacaaaaatttcgaagtggacaaatggattcgcactcattcagatcaactgatcgcagttggcgaggttggcttggatttcaagcctcaacatttgaagaacggagacgcggacaaggaggaacagcgcaaagtttttcgtgcacaaattgaactagctaaagaattgcagttgcccctaaacgtgcattctcgttcggctggtacgcctgtaattgaatggttggccgcgcatggggcgcaaaatgtgctgttgcacgccttcagtggcaatgtgaaaaatgctcaaaagggcatcgaaaagggcttcttcttttccattcctccatcctttactctctcaaaagaaaagagagcgatt

SEQ ID NO: 94995 - DNA, 1152 bp, Heterodera glycines
gtccaattaagataaaattcccatatttatgacacttgacgataaattaacttttcctccattagaagaacaaactgctcgcaagaggcgcgaacgaaaacatcaaaaagttatttcgtcaggttggaagaccaatacactcaattccatttgcttctctactgcacttttgctttgtttcgcccattttgaacaccttcaaacggatgctgattataaatttttcgaaattcaaaatatttcaatccgacttcaaaaagatttcctcgctggaatcgttcgtaatggtcattctatctcagccgtcatgttcttgttgcatattgtcgctaccaaattgtccgaaactcgtttcactttccttggtctgctggctgtcctttcatggccggccttattcttcgtacattatgaacagattcacaaccgagattatctgatcagtcgcttagcactttctgcctttacactgctcatcagcacagcacttctctttttaccaaaaaagccgaaacgcaagaaaagaccgaacactttttacagtgccttttccgttgccagcactcctctctcgcaacgttcacgttttactcgggactcatctgttacagattttgtacttgataattcaaaaagaatgatggattttgaggacgatgaccaatcgctttcttcaaaatattctacgaaaatcgtacttcaaatagaatcagaaataggtcgtttttggacaagtcgaatttactgtccaagtccgcttccaaaaagtcttccgcgccttcccttcgttctttttccgtttgttcttctaccgttccttcgcattcttttggctggcgtgaaaaaagagaggaaactccgttaaaagaagtaaatcagctcatcgaccaactgatgttgtacagcaccgacgaagaaacggcagagaatgaattggacgacgaagcgattggaaggcaaagagaaatggccattggaacggcagcgaaaaacgaaggcaaaacgatgctgagcactcgagcgatttcgccaggaaggcagtgccgacacggcaaacagcagggaccattcgcatcgctcactttcaacccggccgtgcgtaaaattgccgctggccatgccttcccttttgaaggcggtttatttggctca

SEQ ID NO: 94996 - DNA, 674 bp, Heterodera glycines
gtccaattaagcgattcgtattgcctttaaaattcttgtcaccactcaacatcaagtttatgggtgcaatgagttcttcgtcttctgccgccccatcggacccgcagcaaaaaagcatttatgaattttcggccaaagacattgacggcaatgagaccagctttggcaaataccgtggcaaagtgctgttggtggtcaacgtagcgtcgaactgcggcttcaccgactccaactacagtcagctgaagcagttgctggacaaatacaagtcgaagggactcgaaatcgcggccttcccgtgcaaccaattcaacaaccaggaatcgggctgcgccattgacatcaaagactttgtgaccaaaaagtacaacttcgagccggatctctacgacaaaattgacgtcaacgggcccaatgagcatccgatctacgcctatctgaagagcgtccaaggcggcatcctcggctttgatgcgatcaaatggaactttaccaagtttttgatcgataaaaacggcaaagtggtggagcgttatgcgccgaccaaagaaccgaagaacattgagaaggaaattgagaaattgctggaggcctgatttgatgaaaaaaacttgagcttttcagacttatatgcccatagaataatttgtaatctaaataaaattcttatgctt

SEQ ID NO: 94997 - DNA, 476 bp, Heterodera glycines
atttacgttttagtaataaaatgccaaaattttcgcggaaaatgctgagacctccacgaaaaaggattgccaagaaaagtgatgacaaaaaatcgacggaagacgaaaaaaagaagaagaagaaacggaggttgcccaaaacactgaaggagtgttttgagtgcgtcgacgtcggttccatcgttttgtgcgcctcctatttggacattccgccggagccgatcagcagcagcagtgacgagaaaagcaactggaaaagaaagaagcaaaagggacagacgaaaaaagaagggcccaaaattgtgacggatgtccacgaatttgggtgcattccatggcgactttcgcttgtgcaccagcttcgcaaggacgacaacggaggctattccaaacacattctcaagttggcactgcactcggactatcgtaaggacgtcgcatggcgtgccgatgtgtccggcactttgacgatgaaa

SEQ ID NO: 94998 - DNA, 663 bp, Heterodera glycines
gtcgattcattctaattttctttgcattgtcaaacaaacactaaaaatgcgtggtccttttatgcgtggcactatgccgctccgtcggactttttattatcttggccagggaaaaatacatttgcgtgaggaagtgaaggtctttgcaattgctttccacaatttcccaaacgtggcccaggaaggggccaaagaattcgtattttggcactgggcccaactccaattcaagaaccctcacgttcaattcgtgaaactcgcggatgtttgtgtgacgccatttgtgcaagctttcttaggcgatggcagagaagttgtttttgatttggagtgccgtacgagggagcaaataagcgaagcattaatcggaacattgggcatgacagagactgtacggaagcgaatgaaaatggacagttacaaaagggagaacccggccgaattcggctgcgactgcgaaaggcaatgcatttgcgaaatgcaagggcagcacccgtgcactgccattctttacgcgccgaagcatttgcgcgggagttggcgatggaatcactccacttacaatcctgaaaagcccgttccgtttccgcctgtggagggctacgactgatttgcgtttgtttcgatgctttgttttgataaacatttgtccttttgattggt

SEQ ID NO: 94999 - DNA, 481 bp, Heterodera glycines
gagaattaaaatcaccagatataaaaccccctgaagagctccttcaggttttttctaatccatcccgccgttccattcgtttggccgatgaagcacggcaatgcgcgtaccaaaacgagatgtctcgtttagcgcgaattattcaatctcaacaatggacgatttcctctcaacagaggaccatcgaatcgcaacaacggacaatcgaaatgttggtctcccggcttcctcggaatgatggagcggcggctccgcccaatggcgacgaacgacgtgacatgggaggagcgcccaacgaacagcagcatggccaaccgcccattcttcaaattgacaatcgtccgcacattgcgcccgagcccaatggtcgaggaggacaaaatggaggcggacatgggcaacgcccaaacggaaatgccaacatcgttcgtggccaaaatgtcgtaccagtggctcctcccccatttgtggctcaacgaca

SEQ ID NO: 95000 - DNA, 600 bp, Heterodera glycines
agacagtatggcacaactgttcgaaaacattggcgttcgacgcaaagttgatgacaaattggtgaacgggcaagaggcgctaaagggttgcgaagtggtggcgctttatttcagtgcccattggtgtccaccgtgccgcaatttcacgccggtgctcaagaaattttatgacgagttgaaaaagtcgccggagacggcgccctttgaaattgtttttgtgtcctttgatcgttccgccgatgatctgagcaactatttgcgcgaatcgcatggtgattggctgtacattccgcttggaagtgagcacatcgaaacattgtccaaaaaatttggcatcagtggcattccggcattggttgtgctgaagcaggacggcactttggtcaccaaggatggtcgagcggatgtgcagaacctatcaccatcaaatgcaatggccaaatggcgctccggctaagagaacaccccttcactggggagactgatggaagaaaatcaaaaattttgatatggatggacacattaatacattagtagtgatatatcgaaaactaatttttacaaattaaatttttaaacaaaataaaaaaatcttttgtt

SEQ ID NO: 95001 - DNA, 534 bp, Heterodera glycines
cctcgtgccgaattcggcacgaggctttaatatataggatgtacatccgagagttagaatccccgggtgagcttcctctggtttggttaaatgcgctctcccgttcttgctttcgtccgactaaagatgaccaacttgtatcgcttgttgagctgagacaggccgcagaacggatcgcggtcgaaaacgcgcagttgaaccgggtcaatgccatgctcctaattttaattcaacgtcccgcaggagttctgcctcatcaggctgtgcccgtcgctggtgcttttggccaacaacaaaaccaacagccggccaatgcttttcccattccaccggttgtacctgttgtgcctgtcaacgcgaacaacagacttcacaccgatgaacttcaattggaaatttctcgccatgcacggaccttgaatgagctgtcggtcgaatacgctcgtttgatgcacaccaacagaacccttgttgaacaactttttgcaggtggtgcaccgccttatgttcatcaacagtttgaaccggtcgatg

SEQ ID NO: 95002 - DNA, 673 bp, Heterodera glycines
  unsure (1)..(673): unsure at all n locations
gacaacgggaaaaaactgtcgggtttggtcgaattaggctatcggaagagagtgctgcagcggttgggttacgcgactgaggaggacaccatcacggaaaagggccgtgttgcgtgtgaattgagttcggccgacgaattgctgctcacagaaatgattttcactggcgctttcactgatctttcgccggccgatgccgcggctttgctttcgtgtttcgtttttcaagagagagcaccgattggcaaactaagcgattcactaagtgaacatttgcgcactatgcagggcatggcaaagaaaatagcaaaaatctcgattgagtgcaaattggaactggacgaggaaaagtacgtggagtcgttctgtcccgcgatgatgaccgttgtctccaagtggtgttcaggcgccacattcgccgaaattctagaaacgtccgatatattcgagggcagtataatcagatgcatgcgacgtcttgaagaattactgcaagaaatggtgaacgcagcccggtccatgggtgaccggccactggaacaaaagtttgagcaggcccgatctctgcttaagagggacatcgttttctcagcgtccctttatctctaatttgcgatcctttttttgttaatacatttaacatgttgcgcaaaaataaatattcattanttta

SEQ ID NO: 95003 - DNA, 338 bp, Heterodera glycines
ccctgctctccaacggacgaattcccctctttgctggcgttctgatcaccatggtggacacgttcacttttctgctgatcgatcgctacggctttcgcaaattggagttcattttcgccgttctgatcagcacaatggccatcacttttggctttgaatttgtcgtcgtcaaaccggacggatgggatttgatggccggcactctgttgccctattgtccgggctgtggacgtcaagaattcctgcttgtgtttgagtggggttcactacgttccccatccctgatgatctatttactgtttttttcaaaaaattttccaagaaaatcatgaaaattt

SEQ ID NO: 95004 - DNA, 479 bp, Heterodera glycines
gttgctttgattttctgtccttttggccgatgagttacaattatttgttcaaaattgtcgttgtcggcgaccacaactgtggcaagtcgtgcattttgttgcgcttttccgagaattccttccgttctgaccacgtgagtacgctcggagtcgatttcaaattgaaaaccatcaaaattggacgggacaaaattcggttggaattgtggtatttcaatgtgttaactctccgtttcatttgcatcaaaatgcttatcgttaggcatggaaaggtatcggaccatttacaattcgtattaccactcggcccacggagtgatgtgtgtgtacgacttgacaaacgaaaagtcatttcaaaatttggaaaattattggctaagacaagtgaaggaacacgcgccacaaaatgccgtcctccttatggtgggcaacaaagccgacttggactccgagcggaaggtggactttgaccgtgccga

SEQ ID NO: 95005 - DNA, 955 bp, Heterodera glycines
aaaatataaaagacgagcgatcattaagccaaatcatttgttaaacaaattcaaaattgacttttgaactgccaatctccaaaatggtgcttctttgctgttcccaacataaaatggaccgctcattgcccaattgcctcagggggtgccgttgtggcattttggtcggcagaaaagggaagaaaaatgtgccgaaaagcagcggagaggagggaaaagcggagcaatcgcagcagaggaacgaacggaaacagaacaacgaaaattattattgttcagtggaagagatggcttacgatgcgatgtacgacgaaaaaatgccggcggatgaacgggacaaaacgggcacagtgcttcaacgagttgcgatggcacttcagggaaaggccggccccgaacaataccaacagttcaaatgaaaagcggtggaagagaagaggaaaagccgttttgggtggaaaatacaccaaaaaatcaaacaaattggaatttttttcaattttttgttccagacaaaataagcatcacaaaagtaacaaattaaattaattggaaaatgtttttgctttgctttgtattgctaataaataacaattacaatttgctatttacaactccgcttcatcagagatatgctcaaagtaaagagctaataaaacttgaaaatgaaaagggaccaaaaataaaacagaagaaaaaataaacgaaagataaaaaaggataaataacgaaggatatggcaaggaaaatattgtcggatggactaaccaacggagaaaggcccgcaaaagggagaaaacctaacggataattgagttaatggtataattaaaatttaaaatgaaaaaacggacggaatggaaaataatttacaaaacgaatgaatgggcgaacgatcgtccgtttttggctatgtacaaacaaataattgcgtgattcatacaatgcgtcgtct

SEQ ID NO: 95006 - DNA, 719 bp, Heterodera glycines
ggtttgagcgaatactctttattcattataatgcaaatctttgtcaagaccctcaccggcaagacgatcaccctcgaagttgaggcgagcgacaccatcgagaatgtgaaggcgaagatccaggacaaggagggcatcccaccggaccaacagcgtctcatcttcgctggaaagcagctggaggatggccgaaccctcgcggactacaacatccagaaggagtctactctccatcttgtcctgcgtcttcgtggaggaatgcagatctttgtgaagactctcaccggcaagacgatcaccctcgaagttgaggcgagcgacaccatcgagaatgtgaaggcgaagatccaggacaaggagggcatcccaccggaccaacagcgtctcatcttcgctggaaagcagctggaggatggccgaaccctcgcggactacaacatccagaaggagtctaccctccatcttgccctgcgtcctcgtggaggaatgcagatctttgtgaagactctcaccggcaagacgatcaccctcgaagttgaggcgagcgacaccatcgagaatgtgaaggcgaagatccaggacaaggagggcatcccaccggaccaacagcgtctcatcttcgctggaaagcagctggaggacggtcgaaccctcgcggactacaacatccagaaggagtctactctccatcttgtcctgcgtcttcgtggaggaaagaa

SEQ ID NO: 95007 - DNA, 742 bp, Heterodera glycines
gaattgaaatgccaatattttttgcaaggcctcttgcggcagagaaaaagcttccaattctgaataaaaccccagagccaacagagtcacaaaaggacacgttgagtgacgacggccaagacaaccaggacagcggtgcctcaacttcctcacagaccaacctaatcaaaaatgtgcgaattcttcggaaagaggcggcggaaacatcgctcgagccatacattcagtttcaatgttttgcgcatttcgcaatttcccggaaatgtgttaacgaattgtgcgctgatgtgtcctcggatggcgtcgatgtccacatttttttcgaggatgactttccgcgtcttccccgcattggcttctcctgcctgtctttgcaagagctttacgaagaccgtgctctgctgagtgaaaaaaacgcaacgccagaccaactcagtttcatccaattggtgcgttttgtggacaacgggttgaacgaaatacccaattggctgttggttgctccgaagcggggtcaaattttcaccatttctctggacttggccgacggaaacggagtccgggttcgcttctcatttgggagtgtgagtccgactccgtggtacagtgtgcgttatcctccgtataaatcagacttttctctcgtcatcgaagtggacaaaaaggcggtgttgaggcggtcgtacgaagaaagtagcacactgagcattttgagcagctttggactgttggaacgaaagct

SEQ ID NO: 95008 - DNA, 472 bp, Heterodera glycines
aaaatttctcccaaaatgcgcacgtcccttttgatccccttcagccttttctctttgatcactttgctgttcattgtcagctttagtgaagcggacatcgaagtggacagtttgatgccacgaacgaaaagacaatgctgtggaggatgtggctatagtggcggatacggtggctatggaaacgacggtggtggacaatgctgtgatgcttgcggccagtgcggcagcggggggtacggtagcggggcgattataatcactaccggaggcggtggatacggatatggtggttacggtgacggatactgttacagttgcggtggtggaggatgctacggatgctgtggttgagaatgactcgaaggcacatcaattatataatgttcttttgtgcttttattttatttcacaattacatataaaaagagctcccgcgggtttgcgggtcgctttgatcaaattcttcaaaaaa

SEQ ID NO: 95009 - DNA, 1710 bp, Heterodera glycines
ccttaaagcactagccgattgaaataaatggaaaaaaaagcaaagtcaaaacacaaaaccttaaagcactagccgattgaaataaatggaaaaaaaagcaaagtcaaaacacaaaaccctaaagcactagccgattgaaataaatggaaaaaaaagcaaagtcaagaacttattctacctaatttcatggtgactgacgaggcatttgactcccttaagagagccttcccttctcatgtacttgtacctaaaatgttgttggcacaaaaagtaaagggggaaaaagaagacaaatcatccgatcaagggctaagtctcaacagatcgcagtgtaaaagctgctctactgctaacaaccccctgaccagtagtcaagtcgtatacaagtgattttgcgccccgacgttccaccatggcacacgagtgctacggctttggcaatgtgcgagcaattaagcacgcacatcgggccagatgctggggcatttgtgctgcaccgcaagcggcgcataagtagtgcctcccgacaccggggagcaagaatattgctatcttgcctaggcgggattctgacttagaggcgttcagtcataatccctcagatggtagcttcgcaccattggtctatcgaccaagcacatgaaccaaatgtctgaacctgcggttcctctcgtactaagcaggattactatcatagcaacaggtctttagtagggtaaaactaacctgtctcacgacggtctaaacccagctcacgttccctattggtgggtgaacaatccaacgcttggcgaattctgcttcgcaatgataggaagagccgacatcgaaggatcaaaaagcgacgtcgctatggacgcttggccgccacaagccagttatccctgtggtaacttttctgacacctcttgctggaaactttacacattcaaaaggatcgataagccacgctttcgcggtccgtattcgtactgaaaatcaggatcaagtaagcatttgcctttttgctctacgagaggtttccgtcctctctgagcttgccttaggacacctgcgttacgctttgacagatgtaccgccccagtcaaactccccgcctgacactgtcatcggcgccgggtcgccgggccaccgggtggcccgacttaacaccaaaatggacaccctttcgggcgcactcccgttttaccgattaagtaaggaatcgatgaaagtagtggtatttcactggcgccttgcggctcccacttatgctacacctctcatgattcttcacaaagtcagactagagtcaagctcaacagggtcttctttccccgctaaatttgccaagcccgttcccttggctgtggtttcgctagatagtagatagggacagtgggaatctcgttgatccattcatgcgcgtcactaattagatgacgaggcatttggctaccttaagagagtcatagttactcccgccgtttacctgcgcttggttgaatttcttcactttgacattcaaagcactgggcagaaatcacattgtgtcaacaccttttcaggccatcacaatgctttgtttttattaaacagtcggattccccttgtccgcttcagttctgagttagctgttgattgcatagaggatctcccacgatccgaatctcgccagtcctgccgtccacagttgcccgcagccagcaagacagcttgaaacttcacgta

SEQ ID NO: 95010 - DNA, 619 bp, Heterodera glycines
gtttgagttttagcaactataaatatacgccctgctgatgacaacgcccaatttgccttacggtgcaagagaggggagcggccagttcagtacgggcaccaatttcagtcccccaccaccgccgtatgacgccggcgccagtagtccatttgaacaaccacaccaacagcatcagtcaccatcgccctacggaatgatgtacagcggtggcaatgtgccgtcgccaccaccgccgtcctctccttaccaccaataccaacagcaggcgccgccgcaaatgtccccgccgttccaagcaccaattggggacccacaacagcagttcatgtacgacccgttgttgaacactgcgcgtcatttgggtggtcaatttgcggagcaacaaaagcaaaagttcacccaatacctttcgtccacgtcgttcaacctgaagtattattttgcggtggacaccaattatgtgcggcgaaagttgggcatcattctgttccccctctttcatcgggattgggccaacaaatgtgagggcgatgcgcccgtgttgccctgtcaggatgtgaatgcgcccgacctgtacatttcgatgatggagtatattgcctatgtgctggtgactggt

SEQ ID NO: 95011 - DNA, 381 bp, Heterodera glycines
atgccttcccccatccgccttttctttcttttcctgtttctgcttcttctcctcccatttttgtccttcgccgctttgtccccccgagagaagcgccaattcagcttcaccgatggcttctcaagcggcacaattttgcagccgggcggcggcggacttttgagttggtggcggagatgagccaacggcggaagtgaagcaaaacaatgggaaagattttgggttgtgatttgatttatgacgaatgaatgacccaccgatcaaccgacttaccagaccataattcattcattcattcattcattcattatgccgtgccaatatccccccaacccatccttttattgtaaataaaaaatttaattcatttctactgttttt

SEQ ID NO: 95012 - DNA, 311 bp, Heterodera glycines
cctacataccactcgcctgcctcgcactccgagtcgcctatgtaccgcgttccgtttccctttcgcttggttgtgtcagggtgagtcggctctctgtgggccatcatggccacaccgcacggccgctgaactcgcagtgcatgcatgccgcgtttcgtttgtgttgatgtccgtcatctcgcagccgatcgcggtgatctcggtgtctcacggccaagcgaaagcttccagattggctgaatcaatcgtaacaacacaactgctcgccacaactccctcttttgctttcccaatcgtagacgccccacatt

SEQ ID NO: 95013 - DNA, 306 bp, Heterodera glycines
gtttgagtcatttcttctgagcaaatacctaaattcgaagtctaaaaatgtttatgcctatggaccacaacattcaacaacaggtccaggcctccgcttctaggaaggcccgtgacgactttttcacgttcatcgcttgtggcttcatcttggagatcggcactcgcgcacttcgttatgttggattcgattcttttctcgtctaatttcgcaggaattgtttttcaattttcgcaggaattgtttttcaattgaaagtcgtaaaaaataaacattgtttttgccaccacaacatgaaccaaaaaa

SEQ ID NO: 95014 - DNA, 688 bp, Heterodera glycines
gccttgtccccgtgctggtactgcttgcactgcttggtgggctcttgcacaccggtgcgcaggagtccatttccacgcgctcaacacgtgcggagggcacactgatgtgcggaaaggtgccggcctcaaaggtgtacgtgcggctgttcaagaccaactccgatgaaatcagcaatgcgttggcaacagcggtgaccaatgatcagggcaaattcatcattgaagggaacaccgccaattaccaaggctcggaagcaaatattgacccgttcctgaagatctaccacaaatgcgatcagaaggaaggcaaaaaaggctaccgacggatcacacttcgttacccgagggaatacgtcacaattggacgcgttccacgacgaaattacagtgtcggaaatttgaatttggtgctccaatatccaaatgaagctcacatcgacgagctcaaaggcatttgaatgaatgaggaattttttgaaaaaaaaacgatggaaccgttaattgactaacaattgaaatgcgtaaaaaacagcttgggaataaatgaaaattttatttgattataattccttaccgtcgattcattttgactttttcccaattaattaatgatacaaaatgcagaataaatacttaattgtcaaaaaaaaaaaaaaaaaaaaaaaaaaaacctcgagggggggcccgg

SEQ ID NO: 95015 - DNA, 630 bp, Heterodera glycines
gtccaattaagcttttcctcgtttaacttttcctcaaccttttgcctctctttcctcccaatttttcttttaccaatgtattctttccgttttttcctcttcgtctttttgttcatccattttcgtttcattggcacggcacaaattgtgaatggtcagcagctggacagcaattcggagcagcttcagtctaaccaaacgtacagtgtcaccaacgtcgaccgcatgtccaatgcgttccattcgccaacggacaatcagacgacttctcttctcggagacgaaaccctcaaacccagcgacaacgaagcgaactgtacgactacggaaaatggttgcgagttgaacgatggcaaatattcccttcgtttggtgctcattcttttggccgtccccaccgttctgctcattatcattgtgatggtcggtttcatcagccacaaaaagaaacgtcgtaacgaattccatttggacaacggcgccgccaccatttgagaaaagagtgacgatacgataaaccattgaaaatttggtatttgtttttgaaaatttggtattttgtttttcttgcaatcgatcagcatattcccgtgtcttttctttatggataaattgtcgatctgaaaaaaa

SEQ ID NO: 95016 - DNA, 550 bp, Heterodera glycines
ggagctccccgcggtggcggccgcttttcaatagtggatcccccgggctgcagtaactcaaaaacgaggcaatctcaccatgctcaacgccacccgctccgccgtccgcgccgttgcgcagcgcatgcccctggcccgcaccatggcctcggccgcccccgccggcgccgttgccgctggtcagatcaagtcggtcattggtgccgtcgtcgatgtccagttcgatggccccctcccgcccattctcaacgccctcgaggtccaagaccacaacatccgcctcgtcctcgaagttgcccagcatctcggcgagaacacggtgcgcaccattgccatggacggtaccgagggtcttgtgcgtggccaaaaggtgctggacacgggtgcccccatcatgatccccgtgggccgcgagtgcctcggccgtatcatgaacgtgattggcgagcccattgacgagcgtggtcccatcaacgccaagaacaagctccccatccacgccgacccgcccgagtttgtcgacatgaccaccactcccgagattctcgag

SEQ ID NO: 95017 - DNA, 656 bp, Heterodera glycines
gtccaattaagattaaatggactcaaaatcaaatgatttcgaggcacgacgaacagtttgggacagcaaagttcctgtagagtttacgttggacaactcagagtccgtcttggcttctcatcagtcctgttttatgatgctttcccgtgtttcatatttcccggtttatctcgacaaagcattgaaagttttaaccagcggtgacgcaagcgaagaacaattactaaatgtatggcttcaatttgacggacaaattctcagatggcattatccgattggcgtcctttacgacatttaccatgggaatgctggcgatggccaaacaactccatggccaattactgttcatttaaaaaattttcccgatgaactcattcgatgtcggacgaaagaaacgctaaaattttgctttttgcaatctctgaaagaggcgtgccaactcaaacttcgttctaacattgctgcgtcgatgactaaggatgagcatggtcgactatttgacggcttatgcaacgacagatttaacgacttttggatggtcaacgacaaactgatgggactccgttcatcatcaggcgaagaacagtttagcactattcccgcccgattttatgagtcatcatattcatttcgtcaattgcttttacattccaaaa

SEQ ID NO: 95018 - DNA, 411 bp, Heterodera glycines
  unsure (1)..(411): unsure at all n locations
ctcagtcggaggcgcggcagcgaatcgccaacaaaggcaaaaagtgtaaatgaaaaagaatattcccgaataataaataatgcaggacagttttggaggagtgttaccaaagtgtcaggacaaagtgtcgacaaagggacaaatggacgaaagacaaagcgcagaaagggattggtcgagaggccgaattggacctgccgaaagtcggtcttcgagcgcaagtcacctgcccacggcaatcggacagaacgccaaaaaagtcgctgaaaatgtcccttcggccgctaaaaaagcgggcatttcgtggctgggccgtctccgtcggaaggagggacaaaagacaaacgaatgactcaaatggccccgcttttgtctttttattgaaatgagagaataaaatgcaaatgttnn

SEQ ID NO: 95019 - DNA, 1045 bp, Heterodera glycines
cctcgtgccgaattcggcacgaggcaaataagcaaataaaaataagacaaaagctgaattcgaaacaaacgtgatgagcgtcgaagaatcgccacttttaagggaatttaagacatttctgcaggcgactcttgtcgcattcggaagcgatggggcacccttttcgctggtgaatcagagattcagtgaggattgggttggctcgccttctctcaaggaatacgcgaccaaattaggttatgtccatccaaatggcatcttcaaattgttgcagtcaatccctgatcaggtgacaatgatggtaaatccgaccggcgaagtcattttgaagccggtccctatggaggaaacacgcgacaatttggaaaaaatcgacgcaacaaacaaagaactcaaagctgagagaaagcgtcgccagcagtaccaacaggggcctcttccagcgtcggtcattgcgcaattggcggcaggcatctgttggcccccgccggtgcccgcgcaaccgttgtcctcggttttcaacgcgagcatcgagcgtaccgcacccctcgccacttcatctatcgctactattagccgaccaccgccgccgccgccgatgacaaagaaattcaacccaaatttgattccgcttggaacgcctcggtttgcgcggtgtgccagtaccagcaacatcgctgcggacagcagcgccgacagtgggcccagtgcttccggtggaccgactccatcgccgatggtattccatccaccacaccagcagccgcaacagcaaccacaacgttcgaaggtattctttgggcagcgtaaaaaaccaccacctcctgtcgccgtgccccgcaacgatttcggcgatttggcgcctcctgtcgccgtgtcccgcaacgatttcggcgatttggcgcctcctgtggccgtgccccgcaacgatttttgcgatatgccgcctcctgccgccgtgtcccgcaacgatgtggcgcaaacgttgtcctcggtcttcaagaggaacgaaggctattatgaagaggactttcatgcgttggcg

SEQ ID NO: 95020 - DNA, 497 bp, Heterodera glycines
ccttgttgtagtcgaaactccactcttccccacccacccacttttctcaccatgtcgtacggcgattaccagcagcgcccccgtggctgcttcaactgcggctctgccgaccaccaggcccgcgactgcgaccaaggcgtcaagtgctacaactgcggcggcaccggccacacctcgcgcgactgctccgagccccgcaaggccaagacctgcaacaactgcaaccaggagggtcacattgcccgcgactgccccgatgcgccggcccagtctgcccgctcgtgctacaagtgcggtgaggtcggccacatttcccgcgactgcacccaaggccgtttcgccggcggtgaccgcatggccggtcgcaactgctacaagtgcggcgaggccggtcacatctcgcgtgagtgcccgcaaaacgctggtggcgactcgtcgtggggtggcaactcgggcggctcgtcgcgcgcctgctacaagtgcggcccagagggcca

SEQ ID NO: 95021 - DNA, 962 bp, Heterodera glycines
gttgttaataagtgccaatgactttccctaggaacagtttgcttcgttctccaagaattcgaccaaatttgctcaatttttccgcgtgtttctcctcaccttctgatggcagtgctccccgattggaaggttcttcaccaccaccgttggcatcttcaattcgcttcccccactttgtttctcgtcagaaatttactctctcttccacatatgaaaagcaagactggttcccaaaacacatggtcgttcaactgaaagtaatggagggaaaacttcgaaccgtcgatttggtcattgaagtgcatgacgcccgggttgccctgaccggaaggaatccttcgttcggtgccaaattatattcagtgcgaccgcacattctcgtctttaacaagatggatttaatcaacatgaaacgctacaaggaacccatcgaagagtactaccggaatgagcagaacattaccaatatttgctggacaaattgcaagaatttgacaaacaaaacgcagtttcaaaatttgatggacaaaatgttggatttgttgcgaaatgaacatcgcttcaacagaacagtgaagacggaataccaagtgatggttgttggtattccgaatacaggcaaatcctcgttgataaacgcattacgcaatgtgaatttggactttggaaaagctgtgaaagagggcgcgaggcccggcgtgaccattcgggtgcaaaaccgtgttcgaattctcgatcgtccgcccacctatctgatggacaccccaggagtgcttaacccatgggctaacaacattgacgcggcgatgaaattggccatttgcaatttggtgttggatacgaccacacggcccaatttcgtggccgattatttactctattttatgaataaatatcgcgacttttcctacgtcgactttctaagaatcagagagccatccgacgacatcaaacaagtgctc

SEQ ID NO: 95022 - DNA, 681 bp, Heterodera glycines
  unsure (1)..(681): unsure at all n locations
taatagattattaattaattaaattaatttgttctgtactgaaatgacccgccccttctgatcaccactcattcgcacttttgtcacttcgactcaccacttgcttttctgatggaccctcccgatctatccgagactcagccgaccattccgaaaaggggccaccaccaccggcgtcgcgtggatatctccgcctcgcgtttgccccgcgctgtgctcgtccgcatctttgggcatttgagtgtggctgagttgggtgctgtttctctcgtttgttgcagttggaaattcatcgtcgactcaaatgacttcgatctgtgggctcgccatgctcgtgctcagctgccggagagcgcgctgtccgacccgtatttgtttgtcaacatttcctcccacagggaaatgttgagggcatttaaacacgcctggaatccatcggactgttctcgaaatgcttttgtccgcaccaatggtttcaccgtccatcggcaacccattgcacagagtacggatggaattcggggcaaagttggcgtttcgagcggggcgcactgttgggaattttgctgggaaggcccactcggaactaccgctgntgttggagtggcgacaaaacatgccgcgttgcattgtcccggctatttgccggtaattgggagcgacgacccaagctggggatgg

SEQ ID NO: 95023 - DNA, 831 bp, Heterodera glycines
ggcaaacacatgctgcttttgggtgaacagttcccggactttggtgccgacacttcccatggcaaaattgacagtttttacgaatggatgggcgaagaaagttgggccattctcttctcccaccccgccgattttacgcccgtttgcaccaccgaattggcacgtgccgcgcaactcaccgccgaattcgcgcggcgccatgtcaaagtgatcgcactcagttgcgattcgtccgaatcgcatcgcaattggactgaagacatagccgcgtatggcaattcgaaagggaacggaagtgagaagatttcgtcggcagccgattttccctttccaatcattgctgatcagcagcgtcttttggcaattaaattcggcatgattgacccactaaattccgatttgtccggtgtgcctttaacggtcagagcagtttttatcgtcgacaccaaaaagcgtcttcgtctgtctttgctttatccggcaagcaccggacgaaattttgacgaaattttgcgagtgcttgactctcttcagctttctgacaaatttatggtggcaacgccggagggatggaagccgggctccgcttgtatggtcgaaccacgggtgacggatgcgaaggccaaggaaatgttcgccggcgttgggggcggagtccgaccggtggaattgccctcgggcaaacggtacttacgcgaagtgaacgacccatcggccgggcaaagcgaagtgccacggagtgactgaatgaattactaaatgaatacggcacattcacttcccattcatttgttcattaaataatcggtcaaataagaattatttcccaaa

SEQ ID NO: 95024 - DNA, 814 bp, Heterodera glycines
gttccgttcaatgctaatcagctaattgctcactaattaccccaaataacaaaactgtgcctgcttctcccaacaatggcccccaaatgccttccgctcgaacttttgttcgaaattgtgccttttatccctgccgaaaaagccgtcccgaatgcgctctcttcctgtcggctgctgcacaaacttttgctgccacgtgtcatcaaatggaaagagcaactgctaaccgatttgatgagtttctcggcgatcgtcaacaatctctcggcgaaagtggacaatctatcgggcgtcgtcaacaatcactcggtgaaactggacaatctatcgggcgtcgtcaacaatctatcgggcgtcgtcaacaatctctcggcgaaagtggagacgattgagaaaaaaatgggagaaacgactggcaaggcgccaaacgaacaaaaagagcgaggaaatggacacaaagcggtgatgggcgcttacaacgaaaacaatggcaccatcgaagtgccattacatggttacaacgtcggaaaggcgattgttgaaaggattttgaacacggaaaacgggacggtgcatttgcacggaatgcgcgaaccaatgtcactggcaaaggccgtcgaaattggcttttttgacaacctgtcgctgactgtggttgacccgaacactttttctaaggctgtttttggacgaagcattggaacggaaagtgctggactcaaatggccgattgcagcaccagcaccggcaactgacattgggcgaagcgaatcggcaaagacttgtgcgtcttgagaagggcaaaccaactagt

SEQ ID NO: 95025 - DNA, 381 bp, Heterodera glycines
gtttgagacttccatttgacttttgaccattttctccgtctttccctatgcccgccgtcccttccggctaccaagtggtgcagcagggccgtcaaggaccttcgtgcatggacaagctgaagttgggcttcgccatgggtgttctgatcggtggctcgaccggcgttctcatcggcactttcacatcactaaggatgggcctccgtgggcgcgagttgctcagacagacgggcaaaatcgcggcgcaaatgggcggttccttcggcgtttttatgaccgttgcgcaaggcattcgatgctgagggacggccgagagagaacgttttgtgctttttatattttatttagctgttttttgttggcctaataaattatattctc

SEQ ID NO: 95026 - DNA, 531 bp, Heterodera glycines
ataaggtgcactctttaactatttctattttcgcttttggtgttgctaatgtctcaacgcgaagaacctcgtcctcaaatcaaagcgaagctcaagaactcacttatcgcttttcatttgtttctccttgtttccggtgttgtgctcttcagttttgctttgtggcttcaatttgaccctgcccgtgaatttcttctccgtctcgtccacttctccgagtccactccctttttcgagatcgctgtttacttaatgttgggcacatcgctcttcatttttattgccgtcgggattggattctcgggaatttggaagttggagcggtgtttgcttagcggattctctgtgcttcttctgctgttgatacattgcaaattgctcatcctttttcttttggttgcctatcgttttaagttccctgatgacacagtaatgactgagtacctctgtaaaatggcccaacatcactaccatcgcgacaaatgggcgacacctctgatggattccgtccaattctatcacaaatgttgc

SEQ ID NO: 95027 - DNA, 482 bp, Heterodera glycines
gtctcaaaagtgctcccaatcgcgcactttgagtgcatttgaaattgttccggtacgcggctgtaaactctccaaaagttcttcccgtcggcctgagttttgcgagtgttgtcccatccctcgcagtggccatcgcgtctttgctgactccgatttcatttacgtatttggcggatacaacccatttcactctcctgacagcacttacactgatttttggcgcttcaaccgtctcacccatttatggcaaaaatgcggcctttcctcctctgacccaacgactcagttgccgaattcgttggcttcttttgcattggcttcatcttctaggcccagcgagtgttttatttttgggggtaccggcattcccttcggtctcgccgcttcaaatgaattgcatcgaattcgaattgatttgcttgggaatgtcaatgttcggactgagccgaaacaaagctatgaacagagacaaaacacagcga

SEQ ID NO: 95028 - DNA, 381 bp, Heterodera glycines
  unsure (1)..(381): unsure at all n locations
cattgttcccgtaccatagccgttcattgttcccataccgtagccgttcattgttcccataccgtagccgttcattgttcccataccgtagccgttcattccgtagggcattgttcccgtaccatagccgttcattgttcccataccgtagccgttcattgttcccataccgtagccgttcattgttcccataccgtagccgttctttttgtagggcattgttcccataccatatccgttcattccggtgccgataccgtatccgttcggtatgttcccgtaaggcgatgttcctcccgtaccgtaacctccatacggatttgtgttgctgctgctgctcccttgctgacctttttaaaaaaatatttttgcattannaac

SEQ ID NO: 95029 - DNA, 336 bp, Heterodera glycines
ttgagattcaatggaactggaaccttttgtgaacaaatgtgtgtccattatcactggcgacgggcgaaacattgtctggactgcatgaaaggctttgatcaaactgtaaacattgtgttggaagattcacatgaacgggtgtacagtatcgattctggagttgctcaaattccgcttggactttacattgtacgaggcgataatgttgcggtgatcggagaggtcgatgaaacaattgacaaacaattggacttggaaaagatgaaagcaccaccgttaccggcaatttggattccttaaaatatctttttcgtttaaataaatttgacggatttt

SEQ ID NO: 95030 - DNA, 513 bp, Heterodera glycines
gggctgcaggatttccagcacgaggataaggtcatgcgtcaagcctcgttttatgctgtcgcgcggggaagggctgtcggcgtattcaacacctggcaaaagtgtaatgacagcatcaatgggttttcgggggcaaagtttaagaagtttccaactttggagcaggctaatgacttcattgggaagcatcgtgaaactctgaattctggcggcaaagtgatttcgaagaaagggccccccgttcgtacaatgattgtaaaatcggctgctacgacctttgctgagagacgtttgacacgtaatacggcaatgtttggggttgaggcatcgaactcattggcagcatccaacttggtttccgtggacgatggatttacgactgttgtctatacggacggcgcttgtagtcggaatggatttgtcggtgcaaaggctggcttcggcgttttttggtctgatggacaccccgacaatgtctcagctccggtcaatggcccagccaccaataatcgt

SEQ ID NO: 95031 - DNA, 215 bp, Heterodera glycines
atttgaatgagaatagaaagagccaggttcgatgaagttttggtaagccaaaaaaaatccaaacatttaaaaatctataaaaaatttaaaaatgagaattcatgcgagattttctggaaataagcttaatagggcctagttaagctgtaaaaaaaatttggggcgatttgaatgagaatagaaagagccaggttcgatgaagttttggtaagcct

SEQ ID NO: 95032 - DNA, 670 bp, Heterodera glycines
aaacaatggcggtgagtcatccgcagcaaaaacagaacgggcgacacagcggtggcggcacagtgccaaaacacattggcatcggtcggctgccgacggaggacaacggcaccactagcggcgaaaatccgtcgcatcagttggacgatggggacgacgttcaccaattccaattgccgctcgcttttcggtcatcgctggtccatccatctacgacaactgcacaaaatgttcaccaccatcaattgcttcagcagccgcaactcaacatcatcgttccctccatggaatgtgtttccgtcattcatcccaaaagagagcaacaattctccgcctccgttgaccaattcttagacggcgaagacgacctattcaagacggagccgttggatttgtcgctgtcatcggcacgtacaaaggcaaacgaaaacggcacaatggtagggaatggcgcaacagtcgctggcggcatccagcgcagaaaacggacgacaaacaaaagacaaatggtggaggaaatgtgcgaaacggcggcgacggggagaaaagtgacgccaacggaagcggagaaacggacttcgcccccctccgccgttggtatttctttgcccccctccgtcgtccctccgtccggcactctcttcactcccctcgcttctccttccgctgt

SEQ ID NO: 95033 - DNA, 643 bp, Heterodera glycines
ttctttttatttctaaacattatgaagaagtttgactatctcgtcattggcggcggttccggtggcatcgcatcggcacgccgtgccgcggaattcaaagtgaaagtcggactcatcgagtcggagcgccttggtggcacatgcgtcaaccttggatgtgttcccaagaaagtgatgtacaacaccgccatacatgccgagtttctgcgggaccatgctgactacggcttcgactcaatgaacgtaaaattcaattggagcaaaatcaaaaattcccgtgacgaatacatccgccgtctgaattccatgtatcagaccaacttggaaaattccaaggtggaaatagtccgtggacgggccaaattcaacaaagacggctctgtcgaagtctccagaagtgatggctcaaaagagacatgtcagggtacgcacacactgatcgcagtcggcggtgcgccgcggattccgaaggacgtgccgggcgccaagtatggcacgagcagtgatggattttttggctttgagcaaatgcccaataaaaccgtcgtggttggtgccggatacattgcagtcgaattggcatcaattttggctgaccttggctctgaacccatctgctgatccgttatgatcgtgttctgcg

SEQ ID NO: 95034 - DNA, 1611 bp, Heterodera glycines
gatttgtgttgttcgttttaatatttttcgtgtccactgattttactgtgcatcgaaaggacagaaaagaaggaaaaggcgggcaaaggaccgaccgaccgaagacgccgccgccgcaatgcccggcggatccttcccgccccttcccccgacgacgtcagccaccgccaaacccaccaaacagcgtcaccaaaagtcctcttcttcctccgcttcgcattcgcctcattccgactccgtcctcttcctgcacacctccgtcaacagcaccaaacagcagcaacaggaacaacaccggcaacggcccgtctctgtcccaccgtcaattggccctggcgtttttgcagaatttgacagcaccgaaggcggagcagcaacagccgctgatacgatgaattttctcactgagaagagttcgacaacccccgcaatgtccgctttgctcggccgacagccgacgatcaccgaagacgaagagaatgagcgggaggaagacgaggagcccatttcaatgcctgattttggtgctgcggtgacgcgcattgtttccgatttcggcgctggtcgtgtcaaaagtgaggcgcacgaggaagtgattatgatggaggacgatgtccgccaccaacaacagcagcaaatgccgcgttttgctggcaaattaattggcgacggtggcgaatgtcgcgatggaagtgccgaaggcgccgcccattcgatacatttgaaacgggaggaggaggacgccgcgggagccgaacaacagcggcagagggaagaagcggaagacgcggcggatttgggcgcggacgcactcaaagcacggcgagcagcgcggcagcggaaacgcgagccggtggtggtcgggtgccgcacattggagaaggcaatgcgaacgacggccgaagacagtgacatgtctccgctggagcaattccttctcggctccacgctgctctcccgtctctgttccttcttcgaaatggcatttgccgaagcacagcgccaacagcgcgggaaattcaaattgccaatcaaagactacggagttggcactgacggagtgatgagcgcgacatttccgagttaccccatgcccccgtccctcgcttcttcctcgctgcccaatgcgctcggttcgcccggcgaccattctgtccaccagcagtttcacccctccacccattgtatggttcgtctccaactgttcgtctgtccgcagcagttccgtttggtctccatgttggactatgccaccggcccccaatgtccggctgagtcggacgtgcgcattttcgagcgatatttcgcccgcgaagtcgtccgtatgaacaacgaattggccgtgttcgctttcgtcactctgtgccgtttttgtcacccgccaattttcgcctcctttgcccaactgatgatggcccaaatggagtcccaaccccggtggccatggcgtgtcgaattggaattggtacacaatgccgaggaatcggcccaacccacgggagcgaactctcatcagcagcagcagaagacgcaaaagatcgtcaaaaacagcattcaggtgcccgacatgtgcaaacgctttgtgtttgtgatttggttgaggccgcaatg

SEQ ID NO: 95035 - DNA, 480 bp, Heterodera glycines
atcgttccgtcaattacattcattctctattattgttttcaacaaatatctcttgcatttccatttcattgcctttaaaaaatttcaaggatggttcagagaaatttgaattgacccattctctcagaattttccaattgtttaaaatcgaatattaaagtgggtgatttgttggaaattatttcaactggtttcatgcctcgggatttgtgacacgtttctctcaattcgctcggtttattattaattaattctttcccagaatgtaaaagtgaaatttatataaatataccaacataagtaataataatcagtttatttagtttttgatttgtacattcttttgtttttctgtgtagaaaggtttgtgtgcattgcaagtgcgaccgaaacgaacacgagcccagcagcaaccaggcactgagtgtgtacgaaagactcggcctcaaaccctcgtcggacatggccaaagtgctgcag

SEQ ID NO: 95036 - DNA, 591 bp, Heterodera glycines
attccctccaatttcgttccatcgttttcaaaatgatgtggatgttcttccacactcaaatcaaggacacggttctattcaaatggtggaaagtcgaaactgtcggaagtcttctgatcacttgtttggtcatgtattttggtgccatttgcttcgaagccatcaaatggcttaggcttatgcttgaacaaaagtcgcgtcagccgaactccgccaattccgccggactcaacatgacagaccaaaacaaaacagtgccaatgactaatcgccggtacgccgaatcgctcctctcccgggtccatcttctccagagtgttctgttcacggttcaactgctgctctcctacctgctgatgctctgcttcatgactttctctgtttggattggaatggccatttgtgccggtgctgccaccggtttttggctttttgggaggagagtgccaatgttggcatttgcatcgagcggagcagcggggagcggacagggatatgcgagcaccggccgaacggaactccattaaaagccatgcattcattttccccaattaatttgcatcgaataaacgcatttggccaagtgccccg

SEQ ID NO: 95037 - DNA, 488 bp, Heterodera glycines
gtccgttatctcgcaatttttgcaaaaatgaataatgcgatggattcggtccccgcgcggattgtcataattgggacaagtaaaatgcgcctttccgaaagattcaacaaattgcaaaaggctcccccgcctcctcttcctcaagctcagcaacagaaagtgtttttgaagagggagggtatcaatggggtcgcaattggccccgtaatttcacggcctcgggttattgatgaacgggacagaccagataatcggattcaaagcagcaaatcttttcttcacgacgattacatggacaatgatttatatggcgattttgtggagccgttccttcgacggcctcaaatgggtggttttcgcagtgcaaatttatacgagggatttcaaccggcgccagacccactgaagttgacattggatgcctatgatcagtattcgcggttccgtccgtctcatcgccggtccattcattctcgcataactgaaac

SEQ ID NO: 95038 - DNA, 482 bp, Heterodera glycines
ccaagtttgaggtaataattttttaattaattatttttggctaaagtttaattatgatgaatttatttaaattccgagacatcgttttattacggaccattgcctttcctccgaattttgtattaaatcgtggaattaattaccgggaaaacagcaccatcggatcaaagcaaagtattggaaatgcagacgaattcaaattgcgcgaatttggccaaaaatacctcggcaaaagagaagtgaagttcacagagaaattggaatttcgaagcagtgccaatgaagtgccaatgccaatttaccaatgcattaattcgcgaggagaatttgttgacggaagcgaagagtgtcctctgccgaaggaaatcgcagttaaaatatacaaagaaatggttaaattgaatacaatggacaaaattttgtatgaatcgcaacggcaaggacgaatttcattttatatgaccaattttggcgaggaggcc

SEQ ID NO: 95039 - DNA, 582 bp, Heterodera glycines
ttcataattgtcaatttttttaatcttcaatgaatgcctaccaacagcagcaacaacagcaacttctccaggcttactacagccaattccaaccccaaggggtggcaggtgctgacggacaagtgccggccaagtacaagagcacactgtgcaacatttggttgatggagggcatttgcacgcgcggaaaacaatgccattacgcacatgggatcaaagagctgaactacagacaagatgacacaatgagtcgcttctacaaaacatctctgtgcactttttaccagcagcgcggcttttgtaacaacggcgaccaatgtcggtgggcccatggcgaagccgaacttcgcaagggggcagacggttcttctaatggactggcgaattattacgctgcgacaatgcaagcgatggccaccggtcagcagaacgccaacggctcgtcagccgaagcggcggcggctgccgctgctgccggttggaattgaattgattctcgatcatttgtataactaaccgattgtcaaaaattgttaagaatgcataacatttgggcaaaaatgtatctttcaatttgaaaaa

SEQ ID NO: 95040 - DNA, 588 bp, Heterodera glycines
gtcaaatcttacaatttttatattatttgaaagcccttcacaagcaatttcaatggaccatcttatcgcattgatcgacggtgcttgccttcgcatgcaaagtagtgcccttcattgggttagtgacagtatcaagtcgaagtccgagcctaagaagccggagaagttcaaaacgcagctgtgccatcactacagtcagaatggattttgccggttcggttccagttgttggtttgcgcatggggagaacgaacttcgctctgtctctgctggttcgtccttttcttcgcccatcgggagccgtaaaccgcgttcgttgttgccacgcccgcctccgccgctgatgttcggttccagttgttggtttgcgcatggggagaacgaacttcgctctgtttctgctggttcgtccttttcttcgcccatcgggagccgtaaaccgcgttcgttgttgccacgcccgcctccgtcgctgctgttcaacattttccccaaaaatccctgattttcccgagaatgctttttttccgcactcaccgtttttaatttttgaaatcaaatttacattttttattgtcaaagtttttc

SEQ ID NO: 95041 - DNA, 371 bp, Heterodera glycines
caagtttgaggatttttttctcgaagataattcaaatttccattaaaatttacaactcagtctccaacaactgttttgacaatgtctgctgtacaattcaaacagtcatttgacaaagtctgtgccaccacagccaacgcatttcgcttcagcctccaatggtgttttgtgccgctggtcgttattcttggctttcgtcgcggtgccgagccgttgccgaacggcgaaattgtgccattgtcgatcgcgtcactcttttggggctgaacttttggcgtgtgatgtttgacgccgacaaaatatattttcaataataaaacgagcaaatgtttttttgttagtccttgaataaacaatttttcctaaaaacc

SEQ ID NO: 95042 - DNA, 514 bp, Heterodera glycines
caagtttgagctattcagttctgatttgcaatttgttttattaccattctcaacaatgccgaaagcttcgaaaaacaaggaccccaacatgccaaagcgtgcccaatctgcctacttcatctggatgttggccaacagggagaagatcaaaaagccggggatgagtgtggctgaagttgctaaagccgcaggtgtcgagtggggacgcatgtcagcagcggacaagacactttgggaacagaaggcggcagacgacaagaagcgctacgagcaggaaatgactcagtacagagctcgccagaagtagacgattgggcagtgaatgacgttttatctttgacttccttttccgctgttctctcctatatttaaaagtcaacaaaaatcgaccttccatttgtcgtccttttcgacattctgatttatttctctcagtttaacttttattctgatcatgtacgtatacattgcatctggaaaatgatgatcaaataaatggaaatcatcaaaaaaa

SEQ ID NO: 95043 - DNA, 426 bp, Heterodera glycines
cgccgccgttcgtcaagttcttcgagttctggaagctcttccagtactggttctagctcatcaggttcatcttcgtcctcttccaccactgcttctcgttcaccttccccaaagaaacaaagagcagctgctcgtccttctgctcgtgacgatcgtactacacgtcgttctccaagaaggtcgcgttctccccatcgtgtccaaccgaaaacagagaaaagcactgtcagctctcgcctcgtcatgaacgcgcggctccatcaccaccaccagtgaaaagggaacgtactccggaaccaccgccacgccgactttgtgttcgaaatctaagcagaaatatcacaaaagcgcacatggaggaaatcttcgctctgtttggggctctaaagtcctgtgagttgccaatggaccgtgtgcatgtgcatt

SEQ ID NO: 95044 - DNA, 1166 bp, Heterodera glycines
tccatttctaaatacaaaatcatttctcctctttgatcagctgattccttccaaatgccttctgagtacggcattgaaaccgactcagtgactcttcagcgttttgtgctaaacgaacagaagaaattcccggatgcaaccggcgacctgaccactcttctgaccagtctgttgaccgctgtcaaagcgatctcttcggctgtccgcaaggcgggattggcacaattgtacggagttgcgggaaatgtaaatgtgcaaggggaagacgtgaagaaattggatgtgctgagcaacgaactgatgattaacatgttgaagtcgtcatacaccgtttccactttggtttctgaagagaacgaacaggtcattgaggtggaagtgagcggcacccaaggcaaatacatcgtcacgttcgacccgctggacgggtcatcgaacatcgactgtttggtgtccatcggaaccatcttcggcatcttcagaaaggcgagcaacacttccaccaaggaggaggacactctgcagacaggacggaaaatggtagcctgcggggtacgcattgtacgggtcggccactatggtggtgctgtcgaccccgggccgtgtcgatgggttcactttggacccgagcattggcgaatttattctcacaaatccggcgatgcgagtgccgaagaagggcaaaatttacagtataaatgagggatatgccaagaaatggtccaaagggatcaccgaatacatccgatcgcgcaaattccccgaagagggcaaatcggcgtacggacagcgctatgtcgggtcgatggtagccgatgttcaccgcactttgttgtacggcggcattttcatgtatcccgcgaccacagatgcgccaaatgggaaacttcgcctcctttacgaatgcaatccgatggcatttgtcatggaaaacgccggggggaaggcccactcggggaaatgcccgattttggacatacagccgaagtccatccaccaaagagcgcccatctttttgggctcgaaggaagacgtggaggaattgctggaatacatccgaaaacacgaccaataagaaaatgagacggaacgaaagacaaccaatgaacaatcgagcaaaatgataattatctataacaattacatggaattggcagggcatttaa

SEQ ID NO: 95045 - DNA, 524 bp, Heterodera glycines
gtccaatcaaggtgatgcaatgtcagaaggactgtgaagaggcgcgccgacaaagggaccgcgaagtgaacaaaaaacggaccattcagcaatttgaggaggaggagcgtcgtgcgcgtgcaattgcttccgccgcctttgctgaccccgtgccgctgacggcggacgaacgcggccatgccgaactgatgaagcgcatttcgccgatgcccatgcgacgcatcatggtctccgccacgcagaatcagcagaaaaccgaagctgcggcgcgtgttgtcgccgcttacgaccgcacggcgatggcggcaccggcaccgcaatttgttcagcagccgagggggcgcacttttcccaccgctttgtcagtgtttggcgaatgcgtgccaaataattgtcgtcgtgtcggagcaatgccctcaaaaaacatcgtcggagttcgcctaacccagcagaccaattctgtggcaaacgcttcgcaactgaagcgaacttttcctggaaagtgagaaatattgaaacgcaga

SEQ ID NO: 95046 - DNA, 636 bp, Heterodera glycines
gtttgagagagtaaataacaacttataaaatgctttcacgacttttcctccaaccgaacaaccttccgtctattcgatatttggcaacttctgcgttttccaaagctcgctatggtttccggccttccggtggagcaggacaatatgcatttcgctttaaagaagcttttgctgcgcgtcaggttgcgccgactcttcgtgaacgccttctcggccctaccactggcaaaccatttatcgtcggaacttacgcacttgccggggcttcagtttttggcattggaatgttgtgctactacggacttaccacgactgtcgacagcgctgctgttcgttccaatttatggcctgattatgttcgtcagagacttcagtcgacctacgcttatttggctggtagccttgccttgactgcgggtgctggagtggctgctgcccgtagtcctggaattttggctcttaccagcgctccatcacttctggtttggtttggttctctcgctgctattattggttctggtatcgttgttcaaaaaatcgactaccatggcaactcggctgccaaacatttggcttggttggctcattgtggcattcttggtgcagttttggctcccctttgttttgttggtggac

SEQ ID NO: 95047 - DNA, 662 bp, Heterodera glycines
gccatccatttctttttctgttcaatgtcttcgtttttcatgcatcaccagcagaagcggtcgcaccaacaagcggccgccgtcactctggcggacattcgctggatggaaccgatggccgcgactgaaagtgccgctacttcttcaacaccggcaaagcggctgttgacacgactcggcacaaccagagtgggccgctacgttcaacagttggccatcgattacgcagcttccttccgcgacatcgtcgttggaatgcgtcagcgaccgctgcgagccgtcgcttgcggcgccgccttggcttcgcttgtgttcactttaaaatccaatccggacgaaattgcgctgcgcgcgcgtttggctcagttgcgtcagcaaatggtgctcatcccggcgtccattcacagcactcgtgccgacgaacggctcgagcagtacaccgtcctgttgaatgggaatcggcttgaactcgtcgactttttgctcttctctgtgctcgttgagcgtccgtttgacaaaaagaatgacttttacgctgcccacgacaaaacattgcgtggatggccgtggaccgagctgtggcggaacgcgtgggacatcggcgcgctcggccgtttctgggccttggagcggtcctttgacaattgcgacgttcgccacga

SEQ ID NO: 95048 - DNA, 644 bp, Heterodera glycines
agtccttaagcttatttcattaattttgatgtcaagcttgctatgagctttcaatggccttggcattttgattttcctccatttttcaccatccaaccaaacctttcaactcgtgacaaacaactaaaagcttggggacgacttttgctcgattattgccaagcaaatcgtatttacaccactgatttggacgaaatttcaaagtcggatttattcaacaatcgtcgactgaatagacatttggatctgtcagggattcgggcagtgttcgactttctcgaacttcaaaaacacgttgagtggaaggataaggacaagacgcgctgcaacatttattggcgtagaccataagagtggggccaattgctttacgagtgggcaaattcaattggattgttgaacactgtggtcacattgtacgagttgacccaaggcgaatacgtcgcgaaagaatctttttacggtttggacaaagacgtgctgttaaaagggctccaacatttggagaaccaaggcaaagctgtgctgattgacattgacggcgaaaagggcggtgtcaaatttctgtgaacaaagctttgtgttcaccgttctatggccatggaaaagggttcgaattttttgcgcaattccgacattgttga

SEQ ID NO: 95049 - DNA, 609 bp, Heterodera glycines
ataagacagaaaattatttaacttattccttaaaccaaaaaatcatggttcgtcgtggtggtcgttcttcttcaccaaaagctagcgctccggttcgaagtgtgaaaagcacttctcctgctcgttcggccgttccgtctcgtcctgctggtactcaaccaacttccggtgcaacggcaccgcagcagaaagggcctgggctgctcggacaaatggctgcaactgctggaggagtggcgattggttcggcaatgggtcatgccatcggtaatatgttctctgggggtaatgctcaagaagtcgctgctcagcaagatgttcctgccaattcggacaactttgaaaccaccaagcagtactcacagccctgtgagattgagtggcgccagtttcttgagtgttctcagaaccagagcgatgttagcatatgccagggattcaacgacctcttcaaggaatgcaaagctcgctttggccgttagaccttgaaggaaggaattagaaccaatgagaaacgaagaggacgatttatgtgttaactgtccaacggaacattgctattattgatatatgaattaggtgttgggacataaagcatttcttgcgcta

SEQ ID NO: 95050 - DNA, 947 bp, Heterodera glycines
ccaagtttgagttttcactgttttttgtccacaaaatgccttcgtccgcccaaagaaagcgtgccgaattgcactggggtatcatcggcttggggaacatcgccaatgattttgtgcttgcgatggcttattgtcaacacccgaacaaagtgaccgccgtggccacttccaattccgtggaaagggcgcagcaattcatccaaaaggttggcctgaacagcgaacaggtcaaggcttatggcaactacgagcagttgctgcaggacgccgacgtggacgtcgtttacatcgccaccattaacagcacccatttgccccttataatttccgcacttgaacaccacaaaagtgtgctgtgcgaaaagccaatggtttattcaagtgccgaactttccgttgtccaaacggtgcaaaaaacgatcaatcgaagggagggaaagaaactctttgtgatggaaggcttttggtctggtttctttccgagttggcagaaaatccgacaaacggtgcgcgacggacagatgggcaaccccaaattggtctcggtggatttcagtcaaaaattgcccgacaaacggcgcgacctttccaatggcatttgtcccctggtggacatcggctgttacaccgtcgatttcgccacttttgtttttgagggcaaaaaaagtgatcgacgtgaaagtgatcggagatgtgtctgctgaggacggtgttgacaattgggcctgtattgccttgcgctttgagggcggcggtcactccgtttgccattacaatggcaatttgtcgaccaattcgaatgcttcggtgacttttgaaaatggcagtgttttggaattgccggaacgcttttgggcgtccaccgatttgcgcagtcggagcgaattgcaaacgcatcgaaagggccaatggcacgacgaacattttgcattcccggagagaaaggg

SEQ ID NO: 95051 - DNA, 462 bp, Heterodera glycines
attttaattaaaattatccgaaaatctccatactaaaaaaatgaattctgcgacaatgttcactctgctgttgatcattggcactgttcttgcactgacaattggcatgccagcccccggcggatctgatgaaagtgtctcatcgatgcgccaaaagcgcggctacggaatgagcaacggaggcggaatgggcaatggatttggaggcggaatgggcaacggatttggaggcggaatgggcaacggatttggaggcggaatgggcaacggttttggaggcggaatgggcaatggttttggaggcggaatgggcggcggaagcggcggtggctatgggtacggtaaacgtcgctgatgaattactgtgttttacattatgacgacgacatttgatatgctcagatttatggaaatttttattcatttgtatttataaataattttaagtttatataattccat

SEQ ID NO: 95052 - DNA, 602 bp, Heterodera glycines
gtccaattaagcctttattttttcactttccactgactgtgccttttcgtcttcaattttgttcatccaaaatggcggaggaaaccagcaaaaccagtgaaaacatcgctgaggacaacggcatcaaagcgctcgactctttgtttgccgccgtcgcccacgcctcaaaatgtttggcgtccgctgccggcacgcccaacttctgcttggccacgcccgcctttctcgccttcatggtttggtgctgtttcctcatgccgcctgtcgctgtgcttttccgcagttaccgccgcgacggcaacgcgttcactgtgcaggcggcgtacaacgtcattctgtgcttcttcctctgggtgcccggcatgttgcacgccctttggttctgtttcggtgagacggtgcgtatgtttcgtcgtcgcgtgccgccatcggacgacgcacagaaaaacgaataagggaaaagcatcgaaggatgacagagagagacacaacggcaggcaccgattagacactaattagacgataatttatatgtttttaatgtttttcttaaattcttaagtgtttttatttgaggtgcataaaaaaagacacattcgaaa

SEQ ID NO: 95053 - DNA, 475 bp, Heterodera glycines
gtccatttaagccatgaatgagtgccattcaccagtttttggaatggagtgcactttctgccgagttaacgttcaaatttgaaaatttgcgcaggctcctttatttgttcgtcgattcgctgtttgggctgatcattttgacttttgccacttcgcaatggacaaacatttccaccaatttttgggccgcaattcatttgtacatcgaacagttggaaacgctgatcacttggctgaccaacaaccccgcggggctgaaactgaacgacgcgctgaacacctttctggccaactttttcttctaccatatccatttgtggaaaacttatgtcaccgtttttgaacactcattgactaattggttgctaattgtcgccttcggcgcattgggcttttcggtgctcgtcgcttttctgtctgactttcttcgcgtgcttaccgtgcacattttctgcttccacatttacacgcacag

SEQ ID NO: 95054 - DNA, 1008 bp, Heterodera glycines
attaagtatgaatttgctacacaaagaatggtatacggaattctcgcctgacgatgcccaacgaattgctggcactggggacgggtgttccaaaatgatgaagttggatggtgccgaactgtcaggggcctggactgggcaagcattttctttgaatgtggacaaaattcttttctccgaacgttcgaaatttcaggacgttcttgttttcaagagtaaaacatttggtaatgttttggtgttggactgagcgattcaaacgacagacagagacgaatttgcataccaagaaatgttagcacatttaccaatgtgttctcatcccgacccgaagcaggttctgatcattgggggcggcgatggcggaattttgcgtgaagtgcttaaacatccctcggtggagagagtggtcatgtgcgaaattgatgaaatggttgtccaagtggccaagaaatttttgcacggattggccacttcttttgactcgccgaaactccaacttcacattggagatggtttcgagtttctaaaaggacatgaagcggaattcgatgtaattatcactgattcttcggacccaattggcccagccgagtcgcttttcggcaagtcttattatcaattggtcagaaacgcgttgaaagaagacggagtgttggcgagtcaggcggagagcatttggctccatttgccactgatttccaaattgatgaattgcgcgcgcgatttgttcccttcggtggcttatgcttctgcgactgttcccacttatccttcgggcactatcggatatttgctcgcctcaaaacggcagatgcatgttctgagtgttccgcttcgtcccctcaatgattccgaatgccaatcgatgggtctgaaattttacaatcgccttttacactcggcttcttttgtgctccctaactttgccgaagaggcgctcaatcagcagcaaaacagtggaagagaccagtgaaatgaaaagggacgacggaagcgcattaattt

SEQ ID NO: 95055 - DNA, 452 bp, Heterodera glycines
gtccaattaagctgctgaggaacggttcttacaatcgcaaaatgatcagaagaaacttttgggaaaaatcagtgaattggagaaagaacagaaacagctgcagaaggaaaacatcgattcggcatgcctttgtgatttccattcgtcagctccgtttggccatcgaaattggtgacccggtgctgatttcgcgctgcttcctttacatttcactcgcatttgcccaaaaagggcaattccttacggcactcaaaattgtgcgtcaggaatggatcagaggcattgagcttaagtccgcttttttgctgaattgcacccgcggcgtttggtccactatcaaatggctgatgatgaacagaaaagtgatgatgcttaaataatttcgcacacatattttttcctttaatttattgttttgtgttttggctaattaatcaaattaattgacaaat

SEQ ID NO: 95056 - DNA, 642 bp, Heterodera glycines
ttaagattcaataaaaaattttaatgcatttgtcagtttgttcattattgctaaaaaggcttccttctacacgcttggccactacgcttgctaatgttagggcaaaaaatgtgaagcagccgtcgactgagcggataaatgcaatttctctggatgatttcccaattgcttatcctgattttcttcgctccgaagttcttgatcgtagagacccgttgtttgaacaactcgtccaagcagacatgtttgaaagacgtatggtaattgacatccccgaattctatgttggttctgtgttagctgtcacaatgtctgaccctaacaccgtaagtaagcagcacagattcgttggcatatgcattcggcgcgaaaaacagggacttcagcacacttttacacttcgaaatgttattgatggcctcggtattgaaattatgtacgaaatatacaacccaacaattttgcggattgaaactcttttgctcgagaaaagactggacgaggacctcacctaccttgcggatgctttgcccgagtacaccactttcaaattcaacatggaaccagtgagccatacagcaggaaaaccggttcccgtgaaccccttaaaggtgaagctgaagcctccgccatggacacttc

SEQ ID NO: 95057 - DNA, 632 bp, Heterodera glycines
aggccaaggagtgattttggtgtacgatgtgtccaatcggccgtctttcgagaatctcgaccatttgctgttggaggtggacacttactgcaccaaaagtgacaccgtcaaaatgttggtcggcaacaaaatcgacgcggagcgaagaatggtctcgcgggaggagggccttcaatttgcgaagaaacaccgaatgcttttcatcgaggcgagcgcaaagacgcgcgaaggagttcaatgcgcatttgaggaactcgtggaaaagcaatttcgacatggtcagtctgtgctctaaggatgaacatactcagtttttgtctttgccgcgccgttgcgccgtgtacgaaattgacactgcgcagtcggtgttgacgccgagtggaacccgctatcaatttggcgacgacctcgccatgctgcgcgctcgcttgcccgcctgtgtcggcctctatcgcccgcagggcattgtgtgcattggacagttggtagatgaactcaaccgtctttctttgccgcggctgcccgactttccgttgcacaaatttctgttgccgctcactgaacagcaggaggagaagctcaaggagcacacgcgacagatcaaaccgccacgttacgacgcagtgacaaac

SEQ ID NO: 95058 - DNA, 551 bp, Heterodera glycines
caagtttgaggttttaaataattccgctaatatttgttaattcatttttggcctttctctgctcaaatgcgactcgttcagcttctccatttggcactgcttgttcagcttttgctggcgcctgttcttttggccgttggccaaaccgatgaaaaagtcaaacgaattcaaaagagagaggggccccccgaggcgaatttggtcgacaaaagtgcggtgccggccgaagggaatggcatgaaaatacggagacgacgcggcaccaaactgaaggcaatggcaggcggtgccgcggcaggactcggcgcggcacttctctacaaagcatttaagggcaaaggctaattgaatgagggaggagaagcagcggagaagggagggaatctccgaaggggtgataatccgaaagatattcataaatgaattaaaaataaattaacaaggaaatacgaaataacattcaatgaaataataaaattcacttttatttaaattaaagataatacttattgcatttaaaaagttattttacttattaaattttatttttc

SEQ ID NO: 95059 - DNA, 177 bp, Heterodera glycines
gtttgaggaaattctctctaacttggattttgagccatcgcgttgaaaagacagatgatgaaaaacgactgggacccattaaaaacgaagtcggacattaaacagcggctcaaccgtctcttcgggcggttcgaccagtactcagaatttgcagccaaacctcggactcctgaccat

SEQ ID NO: 95060 - DNA, 228 bp, Heterodera glycines
cggcacttcgtacagtaggacatgccgacgaaactaccggatgctttgcccatcaaattcacactgagatggccatgatgatgccaaattggatgttcgaaattgcatcaaagctgcaaatcaaaagcattgaaaagaaaaatagaggaaattcctgagaaaacatttccataaaaacattatttttttatggctgtcgcatgtgctgaataaatcgctgtgttttac

SEQ ID NO: 95061 - DNA, 532 bp, Heterodera glycines
cctcgtgccgaattcggcacgaggtggtcgtattttgtacgctgtgttggagcattcttttcggcaacgcgagggggacgaaaagcgatgctatcttgaacttccgcccctaattgcaccgatcaaatgctcaattttgcccatttcttctaatgagcgacttgacccaataatctttgctgttcgggaccaactgacctctcgagaaatctcttctaaaattgatgacagttctggttccattggtcgtcgctatgctcgaactgacgaaattggcataccatttggcattacggtggactttgagtctgagttgcagccgtggactgtgaccttgcgaaatgcgccaacaatgcaacaaattcgtgtttctgttagtgaaattggtgaagttgtcgggcatttggtgaaaggcaaaatgaattgggagacagcaatggccaaatacccaattttcaatgccaaataaatatttgcatttcatacatattgtattttattgactttctttttgttgggattataagtttat

SEQ ID NO: 95062 - DNA, 932 bp, Heterodera glycines
gataatttgccaataagcaatatccacattaaagcaattgaatagtctgataattactaaaatgaacaattacgaattcgccatgaattcgcctcacatggaaatggccaaattcaaggagttcatggacgactctagtgaagaatttgtcgctttgtcaccgatgatacaaaaccagcgagattggagcccatattcgaaccaaggagggaccgtttgtgtgttggttggtgacgattttgtcgtggtcgctaatgacactcgtctgacgggcgatgctgaaattgagattctgtcgcgcaagtgcgagaagacgcacattttgaccaacaaaatcataatgacttcttgcggattttacggcgatgtgctccaattgaggcgcattctcgagctacgtattaaccacttcgagtttatctaccagaggcccatgtctttggaccagtgcggtgaaatgctttcccgtactctttactcgcgtcgtttttttcccctatttcacggggaccattatttgtggaattaccagtgatggccgtggtgacctttacagttacgacccggttggttgtattgaaaccaaattattcgaagcaagtggaaatggtggaagcactctgagtacatttttcgagaaccaatgggcttactcgacggtcgcacccgaggagcgtaaaaacatgccaaaacggactttggagcgtgctctttcggttatccgtgatgcttttcgtgggctgtcagagcgcgagacaaccaccggcgactctctcaatgtgtattggttgcaggcgggtgacgaaaaggttcatcaggagacttatcgcctgcgtggagattagccgcttttctgtgctgttgttggaaataatccgatcattttttgtctccgtcggcatatttttttcttataaattctgccatttaaa

SEQ ID NO: 95063 - DNA, 938 bp, Heterodera glycines
aggcaaacacgtaaaattgcaatttggcaaaatatttgcgtattttgtatcagtggatgtgtcggatttccgatttctaacctttttgggctcgaaattctgttttccataattttttgagggcctcggcacttatcactgtttataattccaaaagcagtaaatgggtcataagttgctgaatactgcggaatgccttggcatttccgttttgacatttgcacaattttctaccaactcggcctttggccaatgccaatttcgcgaccagtcatcgctttgttcgtttcggctccccactcattcactaatttgtaagttcacaaatgctaagcttcaccacctttttggccaatttggcctttaactcggccaatcccagcgttattcactctttgcatgcgatgaatattaattggatttttgacaatttgccgtataaaagggagggcaaacgaaggcaaaagcacacgccgtccacaccattcaatcaaaaccaaccaaatccccactcattagctcattatgaaatttgcccctctggctttgcttgtgatccttttggtgtctttggtcgctgccgtctctgctaattccaacaacccttttgatgcggacgcggccgacaacggtggcatgaagcgcgtcaaacggcagcaacagcaatggcgttggagtccgcaacagcagcgctgggtgccaataaacattgcgaatgtgaacattgctcagaatggataagcgcactgagaaggagccgaaccgaccgaccgatggacggacggagacgaagacaaaatgccaagaatatgtgtgatcagtgacaaattcaaacccaatgccgcgccctttcgatttatttccgatggaatgacaattccaaacttttttttaatttgttaaaattaaagagtgcatggtaataatttaaattcgtt

SEQ ID NO: 95064 - DNA, 496 bp, Heterodera glycines
tatcacttcattcccaaaatgtccttccttcgtctgatcacttttgttcttctgatcactctgtgctctttgccttctctggtcgaaagcggcctcattggcattgtcggcactcccgttgaagccgcttggtgcggtgttttgggcaaagaatccagccattgccctactgctggaggcggtcaacatggcggaggaggaggaggaggaggaggaggaaattacggtggtggagccccgggtggaaattacggcggttccagcggctcatacaatggccatcgcgcacgccgattcgcttgataaatgacaaataaagaaagtggatgatgatgaagtgttgttataaataaaaagtaaacaaaacaatctatttttaattactttattttaaattgtttttttaattttttagctattttagtgaatgttcgatgtttattttaataattttcctttttaataaatttgagttcatttcggaagaagcgcgcaa

SEQ ID NO: 95065 - DNA, 379 bp, Heterodera glycines
aattaagccataatcgtttcacaatgttgattttcccgcacatcaaattttcgacactccttaaacgcgcgactgtcaacagctcctattatgtctcatacgctgcctatggtgcctctgcttttcttgtgttggtttacgttacggaatggaagcgtttcgcccgttatattcccggactccgttcgcagatcaaatcggacgaatgaatgaatgtctcgtggggtgtgcggaacggtcgactaattaggcaatgatgatgacaatggctgctgttgttgtgtttaagcatagaattctgacaaaagcacgtgtataaatcacaaatccctttttttctcgaatatttgttgagtgatcaaatgatatttaatcaaaa

SEQ ID NO: 95066 - DNA, 840 bp, Heterodera glycines
accatagacgctggttgacggatttggcttcggccaaaaattccgtatcacaacaatgacaatctgattaccttcacacatttcgatgtggacatggctttgttggtgttttcggaggctgtcgacgcaacttcggttatgtccctaattggaacaacggcgcattcgttgcttgcgatctctccgttttccatggctcctcagtcgtccaaatggtgccgtgccaaagtttggcttgcctctggcggcatttccttttctccgtccgccggtgtttttcgtgccggcagtcctcgctttgtgaacactgattttctgaccaagtacttttcgtcgtctccaagctgtactcggacattgccaagaaaagcactcacttcgttagtgtcaatgtgcgaggaattaattgcggaggagaacaatccgtgggaagtgtcggcactgacgagtgcccgtttagcacttgacggaattacgcaggaaaccttcaaattgacggaacaaaattgcgagaaattgaagcagttcgacccgcaacgttcggcaatgtatgacgaaatgtttgacaaagtccgaattatccacgaactgaccaaaaacacttccgacacacccgagcaaagccaattggatttgcttatggaggcgaaaagcgatcggcttaatctgaatggaattggactgatcagcctgctccatcttcggcctctgtccggcttagtccaggaactcaatctgcagaacaaccgggtcacttctgatcagatcactcaactctgctcatttgctgcgctcacttccctcactttggatggcaatcccatcgacagactccctctg

SEQ ID NO: 95067 - DNA, 390 bp, Heterodera glycines
ttgacattggcactggcaaagtgacggactacgtgaagtttgatgctggcaacatttgcatgatcactggtggacacaacattggtcgtgtgggcattgtcggacatcgcgagcgtcacccgggctcctttgacattgtgcacatcaaagactctgctggccatggccattcatttgccacacggatgaccaacgttttcatcattggcaagggtgccactccgttgatcagtttgcccgcttccaagggcatccgtttgtccattgcggaggagcgtgaccgccgtcttgcgcagaagcagaaagtttgagcctgatcccgaagaacccatttttctgtcatggatgttattgttttgtttgttggcataaagaaaaagagtgttaaaa

SEQ ID NO: 95068 - DNA, 917 bp, Heterodera glycines
gtttgagttaaggattttgactgctttctttattctgttcttccaaaaaacatggcgcgtggacccaaaaagcatttgaagcggttggccgcaccaaaaaaatggatgctggacaagctgggcggcgtttttgcgcctcgtccaatgtgcggtccgcacaaattgcgcgagtcgttgccgctcattctcttcctgcgcaaccgtctcaaatacgcccagtcgtacaacgaggcgcgcatgatttgcaaacaacggctgatcaaggtggacggcaaagtgcgcactgaaatgcgcttcccatgcggaatcatggatgttatctcaattgaaaagaccaacgaaacttttcgtttgttgaacgatgtgaagggacgatttgtcatccaccgaatccaaagtcgtgaaggccagtacaaactgtgcaaggtgaagaagcaggcggtcggtgacaagcaagtgccgtacattgtcacgcacgacgcacgcaccattcgctacccggacccgcacatcaaggcggatgacaccgtggtgattgacattggcactggcaaagtgacggactacgtgaagtttgatgctggcaacatttgcatgatcactggtggacacaacattggccgtgtgggcattgtccgacatcgcgagcgtcacccgggctcctttgacattgtgcacatcaaagacgccgctggccactcattcgctacacggatgaccaacgttttcatcattggcaagggtgcaactccgttgatcagtttgcccgcttccaagggcatccgtttgtccattgcggaggagcgtgaccgccgtcttgcgcagaagcagaaagtttgagcctgatcccgaagaacccatttttttgtcatggatgttattgttttgtttgttggcataaagaaaaagagtgttag

SEQ ID NO: 95069 - DNA, 479 bp, Heterodera glycines
gtattttaatgcgtcttgagaagtgttggttttgttcatcaacaatttatccgggccacggaattcaattcgtacgtaacgacgcaacggttttcaagttttgtaggtcaaaatgcaacaaattatttaaaaagaagaagaacccgcgcaaattgaaatggacgaaggcatcgcggcgaattcggggaaaagaattggtcaacgatgttactcaagcgatggaaattcgcagaaacgaaccgacaaaatatgatagaaacctttgggaaactgcagttgaggcagtaaaggaaattcacagcattcgacaccgtcggtacggagagcacataaaaagcactctgaagccgggaaaacaagcggtgaagagggcaatggtggagaaggcgcgcaagaaagtgcatttgataagggcgccagttgccatgggcgaggacgacgagaaattggaggtggtcgaagacggagagcaaaagacg

SEQ ID NO: 95070 - DNA, 696 bp, Heterodera glycines
attaaattaacaatgttttcttttgtaaaaatgcacccatcgtttttattccaccgaaccgttggtaaaaaaactaacggtgattggctcgggtttgatgggcgcgggcattgcccaagtcagtgcccaggcaaacgtaaaagttgtgctggtcgaccaaagtcagtcaatcgttgagaaggccaaaagtggcattgaaaacagcatcaaacgggtggcgaagaaacaattcgaagacccggggaaacagaatgaactcgtcacccgcgctctttccaatatttccctgtcgacggatatttcgcaggccgtgtcgggcgccgatttggtcattgaggcaatttctgagaatttggacgtaaaacggaaactgttcgcagaagtggagtcggctttgccacaaaatgggaaaatggccacaaacacttcttctctgacattggccgacattgcggccaatttgaagcgcaaagattcctttggggggctgcactttttcaaccccgtcccaattatgaaacttctcgaggttgtccgctttgatggcaccagcgaagagacattcaacgttctgatggactttggcaaaaccattggcaaaacgaccgtcgtttgcaaggacaccccggggttcatagttaaccgtttgctggttccttttatgctggaagcaatgcgaatgttcgaccgcggcga

SEQ ID NO: 95071 - DNA, 565 bp, Heterodera glycines
aaggagggtttgagtcaagaaactattaaaagtatggctgcaattgagaagcctcagattgttcaacaacccgtgcaagtttttggtcggaaaaagacagcgactgccgttgcattcgcgaagaagggcaaaggcctgataaaggtcaatggacgtcctttggagtttattcagccagaaattctgcgcatcaaacttcaagagccaattctaattgtgggcaaagacaaatttgcaggcattgacatacgaattcgcgtcaaaggcggtggacacgttgcacaaatttatgctgttcgtcaagcacttgccaaatcggtggtggctttctaccagaagaatgtcgatgaacaaagcaaaaaggagctgaaagagcaatttgtcgcctacgaccgcaatttgttggtggccgaccctcggcgccacgagccgaagaagtttggaggacctggagctcgtgctcgctaccagaagtcttaccgttaagatctatgggataccattttttgacgatcctttttgttgttgatgtaatgcgttatcattaaaattttgttggaaaaaa

SEQ ID NO: 95072 - DNA, 571 bp, Heterodera glycines
ctttttcattcgttttgctaatgggtcctgctgctttgctgcttctcctcccctccctccttctgctttttctgctcatccgtgctcttcttgagcttatccccgtctcgcggttggataagcgttctgtgctaatcaccggctgcgattcgggctttggcttcgacttggcactgcgatgtttgggtgccgggatgcgcgtttttgccggctgtttgactcagacaggaattcagtctctaaagaaaagtgcccaagaaaagggaattgccgtggaacttttggaaccaattgaattggacgtcacaagtgacgaatctgtggcaaaggcattggaattcgtggaacgaaaattaggaccgggaaaagggcttcacgctttggtcaacaacgcgggaatcagtggcaacgagagttgggacgattggctgattccaaaggactacgaagatgttttccaggtgaacactctcggcacaattcgcgtcactcacgcattcaaacgactcgtaaagcgcgagagggagtcccgaattgtgattatggccagctcctgcggccgcgtggcact

SEQ ID NO: 95073 - DNA, 478 bp, Heterodera glycines
ctcccgtttctttgtgtttctgtgataaataaaaatgtcttctcattcttcttctgttgtggttgataattgttgtccaccatcacaaatgacaacttcttcttcccccgctgcctttcgttcttctgcgctcgcttttcttcagttcctcaacaaatcggtcacccctttccatgctgtcgaatcggtcgaggccattctgaagagtgcaaattttgttcaaaagtccgagtatgacaagcttcaaattcaaccaaaggatcgtttctatgtcaaaaaaagcgagacttccatttttgcttttgctgctggcggtgcctttaaaccgtccgaagcgggggtttccattgtcgtcgcgcacactgacagtccttgcttgcgcattaagcccgtctccaaaaagacctccgaacaatttcttcaagtcggtgtttcgctgtacggcggcggtctgtggcgcacgtggttcgaccgcgac

SEQ ID NO: 95074 - DNA, 917 bp, Heterodera glycines
gtttgaggacaaatggttgccgccaatctgaagctttccctgatttttgtggccggcttttgcctgctgttcatcgccgactccgatgccgggaagtcgtgcaaaccgggagaaaagggaccgccaggccctccagggaagccgggaaacaaggggaagcccggcgtgtgcaagcccaaatatgaaacaacttccaagtacggtacgactacttccaagtacgacaccaccacttccaagtacggtacaacaacacccgaatacgatacgacaacatccaaatacgatacaacgacttccaaatacgacacaacaacttccgactacggtacgacaacttccaaatacgatacaaccacttccaagtacgatacaaccacttccaagtacgacacgacaacttcaaagtacggtacgactactcaaaagtaccgtggcaaacgctttgcggatgccgtgctcgttcgggctgctcgcgctgagtacgacgccgattgcccggccggtcccccgggagatgccggcattgccggaccgcccggccccccccggcgagccgggcaaatgctatggcagcgggtccaaagagtccaaagaaaaggagtacaaacccagcaagcgcagcattgacaacttcgagcatggcttgcgcgtcgccaggggctacaagcaagaagtcggaccccctggccccgcgggaccgcccggccctcccggaccggacggaccgcccggagaatgtgaatgcaaatactgaggatgatgctgaagatggtccacgatgtgagctcaaccgttttgttcctttgcctgattatccatcgatgtgtgaaactgtagcattagtagtactgtattgtcgatggaataaaaattttattaaagaaaaaaaaaaaaaaaaaaaaaaaaaaaaaaaa

SEQ ID NO: 95075 - DNA, 481 bp, Heterodera glycines
gaaataacaaattcgggcaaatgggactgcatcattcttcacgacgtagatttggtgcctgaacatgatcacaatttgtaccgctgcttcaaggaccatccaacccactttttccggcgttttgacgagaataattacgcgtaatttattttattaatcatatatttatttaaataataaagaaacttacccctaaaaatatgaaaattggaaaaataatttaaaattcaaggctttcaattttcccagaatattcatattatttttgggaagactggcagttctgggtccataacttatgacagaatggtagccacaataagacatgaattcttaactcaatattttggtggatatatatgattacatttaaaaacaaatccaaaaactaattaacgaaataattaattgcattttataattaagtcctcttccggacaacaactttggcgaagtgtccggcttcaccccggaacaatat

SEQ ID NO: 95076 - DNA, 495 bp, Heterodera glycines
agctaattaatttatttaatataaatttgttccaaatgtgctgcatcaattcaaaaatgttgctgctcgtggcggcatttgttgttctgttgtgcctgctcaatcagaacgtcggagctgagaaaatcattgtactgtataatgggaaaaagtacgatctgaccgagttccacaaaagccatccgggaggtgaagaggtgttgaaaaaagtgaacggaaaggacgtgaaggaggtgaaaataatgtatttggagggcaaaaagggagtgaaaacggaccatttggtgcagcacaaacacagcaaacatacaatcaacgaattcttgccaacgttcgagatcaaacactaaattacaacacttcgccaactgcagaatgttagctgaatttaaatgaatgaatatttaataaaaatgaatgcttacatatattgacgcttgtgtattgttacataaatgttaattgaaataattagaataaatatttgccttaaaa

SEQ ID NO: 95077 - DNA, 535 bp, Heterodera glycines
gtttgagataaatttattaagaacaatgcgttcagtaaaacatggaggaaaaaaaggaatgcgattcagatacaaattgtcagcagttaagaggcaaaacaaaaagcagaagaaaaagcaaaggaacatagctggatgctctttgatcaaaaaagcatggcaaacccaactatcatcgcggcaaaatttaagtgcaatgggactggtctatgatccaaatgaggcattgaaaaagaatcctgaattcgccatggaaatggaccaaagcgaaattgaagtaattggattgccagaagccaaagctttgggaagcgtgaaggaacaaaaaaaggcgaccaaatcaaagaaagcatgcccaaagttgaacaaatctgaggccgagtcgtcgaaagttgtgttggaacttcagcaaatcgcattggaaggagcccagcaaatggccgagcaaaagcaaaggaaaagagaacgggcgaagctgcagcaaagcgacatcgaattttgccagaaaatgttgcaaaggcacggagagaattat

SEQ ID NO: 95078 - DNA, 602 bp, Heterodera glycines
attatcaggaaattggtcgccgatggggatggcactggggatgaccggcgaattgtccaattattccaattgataattatgttgagcaaatcaaacgctgatacgaaaagtattactaacaaaattctaatcaacttggaccaaattgaactttctttccaaaaacaagcacagatttccgccataaccgaaattgaaattgcaaattatgaacaactttgcaccgaaattgatgaaatgatcacccaaaataacaacaaaatggatgcagtgaaaagggaattggcagaggcaaaacaaatccgaaaaaaccgacaggaatatgacgcactcgctaaacttatcaaagaaaagccgagcagagtcgaaacttcgaaaaggctgaaactgcttcaggatgagttggaagaagcatacgccaaacaaaagatgctcgaacaacggttgattgaaaagaggaagaatatgtacactcttgctgttctgctggacaacctcgaggaaatgaacaaagaatccgaggacgtgcccatgtcggaaggtgacgatgccagtccggccggagcagtcccatcgtcgtccgctgggtctttaaagtgaaa

SEQ ID NO: 95079 - DNA, 718 bp, Heterodera glycines
tgagagtttcccaaaaaacaattctgcccaatatggtcacttcttcgccagacattcagcttatttttcagtcagttgaccgcgatcggtccggtcaaatcagtgccgatgagcttcaacaggcgctgtccaatggcacatggaagccgttcaacccggagacgtgccgaatgatgatttcaatgttcgactcaaacaacgatgggggcatcaattttcaggaattcggcgcactttgggagtacatcaacgattggacgcgcacttttcgcactttcgaccgcgacaacagcggaaacatcgaccgcgacgaattggtcaatgcgttgacacaattcggttatcgtctgtccggcactttttacgatatgttaatgcgcaaatttgaccgaactcaaagcggtcgcataaacttcgacgacttcatccaactttgcgttgtgctccaaacactgactaccgcttttcgagaaaaggacaccgaccgggacggatggattcgaatttattatgaggaattcctcgccatggttttctcgctgaagatgtaagtcaatgatggctaaacaatgagcaaaagaagggggaattattgactgatgaggatttgctaatacagtaacccacttatttttgtatgttttctgttaaacattatttacatatcactttcaattttacgacatttttgtttgaataaaaatttggaaacttaaaa

SEQ ID NO: 95080 - DNA, 686 bp, Heterodera glycines
cgttacgtcgcttacagtcctcgcgccaaagaaactcacctaaatacgagtcgaatatttcttttttaattggcgtgtggcttcaaaacagaaaagtgccaaattattttcgaatttgagaaatgaattccaattcgttgctcttctctctgttcactttactgttgagcatcgccgccaatggccatttttgcttcggaaaagccatgggccagcagcgctcgcgacgagtggcggctgtggacaatggcaattttatcgtcgtggacggatccgtcagtgttgtcaatggagtgatctccggcaatggctgttattaccatgacggaaaagtgacggattatggcaaaacgcggacgctgaccggcgcagaacgtgccaaactgaagaagttcatcgacgaaatgcagcagatgagcgtaaagttcgcgcaggaaatgcaacggatgttcagcgcgacttttccgttcggtccgcccgcggcgccgcctccgcaatttcatttaccaccgcaagtgccgtgcttctgctcatcgtcgtcgtgttcaaagtttagagaaaaggcaaatcggatgaaataaatgatggaggaaaatgaatgtgatttggcataataaaactggctactgtagatgggctttaccatatagccacatgtcctaatgatactgtagcttttatttatt

SEQ ID NO: 95081 - DNA, 477 bp, Heterodera glycines
caagtttgagctgtcccttccgcttcctgcttctcttcctcgcccttgtaattaaattccatcccctgcgctcgttttggccttccctcccacaaatgactgaagtgcctcccaacgcgcgtcaatggacactccattttggtggattggtggaagcggtcaatggcgcacacattgaccccagtggacgcactgatctactcaaagtgttggacagagccaagcgggacggcagtttgcaattggatggtggcgaaataacactgttggaatgcgattgcgatgcagtgagagtgagttcagcgaaggtggacgaaagcagcaaacctttagcattcattccactccatcagctttcttctgttggctttgtccatgaaccaccacaaaacattttggcactgaaagttggtgacgtggatgagaacaagcccgatcagtttgatctgataattctttacacttcaactgaggaaa

SEQ ID NO: 95082 - DNA, 935 bp, Heterodera glycines
gagaaataatacataatcaattaataatgtgtcgatttcaatgcgatcaacaatgttgtcccagcaaacaaacatacacagcaaaggataagctgaaaacggaggagcagcaattctcacggaacaaaaatgtgaaatttttctcgcccgactcttctgatgaaagtgaggatgacgagcatcataatcatcatcatgacaatcatcatctgctgcggaccaaaacgaacctttcgaattacaactttttacaatcatgcgaagacaattttttccgatcattcgatgccacaaaaattgccgacaatttttgccatgacagtgactcatcgctgtcattatcatcagcagcaactgaggaggaggactcggaggagtacaacagccagcagagtgacagtgaggaggacagcagcaaaacaacctcatcatccattgacgggtcaacgacgacgttcaaactgaaatccattttgtcaacaagtgccaagaggagtccaacagctgagaagcatgcttacgagaggcgtgtcagttttgcggaccgctggggcatgcaattgacatcgtttcgcacaattccgaaccgttttgctgatcggttttatgacgaattggagctggacttcaatgaagttaatttctccgacaacacatcatatttttggtgccaatcgcttcagcagcagagaaacaatttgcaaaactggtcattagatgaacaaggagaggtagcctgctgagaattgcttaaattcggctggtagatgaacagaaaacagatgggctatgacggacgggcaacactttaattaattaaccctgcgcaacattctacacaaattttcattgattttgaagattttacctacgtccatttagcatttttttatctatttttttattagtataaaaaaatctttttaccgtaaaaa

SEQ ID NO: 95083 - DNA, 690 bp, Heterodera glycines
gtttgagagagcatctgcggaatggctgacgaatttgccaagccgaaatttgacggcaaaatcttccaaaaccccgacagcttcacaacatggaaaaacccgccttcggcaggagacccgagaagttggcgggacttcattaaatggaaatgggatgcaaagagcacgaaactgcccaatttgaaagtgcttgaccagactttgccggtgttaaagcctcggttccaaacggattctcggctttcggccacttggctcggccatgccacactttttgtgcgcattgacggcatttcagtgctcacagacccagtttgggcgatgtttgccactccttcgttccttcccttcttcaaattttgcccgcgttttcgtccaccgccgtgtaaaattgaggaattgccaaagattgacattgtcctcatctcccacaaccattacgaccatttggacgtcgtcgccgtccgtgagttggcacaacactttcctcacatcatttgggtcgtgccgttggggcttaagcaattggtgcaacacgagacgaactcaaaagcagtgcacgaaatgaattggggtgaccgtctggaactgcaattaaacgagagaacctttgaagtgttcagtgtgccggcacagcattggtcacagcgaaacttaattgaccgaaacacgtcattgtggagtggttgg

SEQ ID NO: 95084 - DNA, 472 bp, Heterodera glycines
gtttagttttgatggaaggcatcgatcagcctgtgacaaaaacgtgcaccatcgttgaaaaggactacgaccaggacgagctgttcatcttccgtcctctcaagttcaacacctgctcagtcgtcaaactttccatcgaacccataaatccgtcagaactgccaaaaatgctcgactcgctgcgtaaagtgaacaaatcctacccactgctgaccacccgagtagaggaaagtggggagcacgtgatgctcggaacgggcgaactttacatggactgtgtgatgcacgacatgagaaaggtgttctccgaaatcgacatcaaagtcgctgacccggtggtgtccttctgcgaaactgtcgtcgaaacttcgtccctgaaatgttttgctcaaacacccaaccaaaagaacaaaataacgatgattgccgaacccctcgagaagggattggcggaggatatcgaaggcgaaat

SEQ ID NO: 95085 - DNA, 586 bp, Heterodera glycines
gccatccggaacatttcaaggcgaaagttctgtggatgctgcgcaagttaaaagccaatcgtgaacgcccgccttcactaatcttcattattcgcgatggactggacgaaggaaaagtggacaatgcgttgtccagtgagattgggctgtttcgcgaaagctgttctcagatcagccaatcgtggaagccgaaatttgtttattgtttggcggacaaacgacacaacagacgctttttcgaggtcgaggaacggctgccggacgcggcccagccgcgcaatgtgtgcaacccgcaaccgggttccgcggtcgatcgcaagttgacccgttcgggtgttctcaacctctacgttcaagcccatcatcccgtacgcgggacagcgaagattcccgagtttattttcccatgtaacgaagtgtgtgctaccaaggaggagttggaggcatttatcaacggactctgtcactcatggcaaattgtgaaggcggcgacgtcactgccggtccccgtttaccaggcccacgaacttgcgaagcgtggaaggtccaattacatggagctgaggagaatggcgcccgaacgaat

SEQ ID NO: 95086 - DNA, 460 bp, Heterodera glycines
gtttgaggaaatttaagcttttgcattcttttcaaatttactttgacttcaataaagaagaaaaatggcttcatctggctttagcgtctatgttggcaacattccgtacaacgcaactgaagcggacattggcaatttgtttagtcagtgcggagtggtcaccaatgttcgcattgtgtacgaccgcgagaccaatcgcccaaagggctttggcttctgtgaattccaggaccaacaaggagctcagaatgcggttacaaatctgaacggagccgagctcaatgggcgtgcgctgcgtgtcaattggaccaacaaataagaaggttgtgcttgaactggacggatgatgatggatggattgtcatttttgaggatcgttttgacaattttcatttttctttgttgattggttttttgaaataaaggaatggttcgttaaaaaaagaagaggagagggaga

SEQ ID NO: 95087 - DNA, 303 bp, Heterodera glycines
gacaaggacccgctgaaggagttgaagatgatgaggcggcgatttatccagctgacgaaacgcgtttccgaattggaaacgcaaaatgagcagaaaaatattgagaggaaagtgctgctgggcattgtgagtacgtcgactttgttgagtgtcgttttgtttgttcgcacatggctgaaccgttaggagggacccgtacaggaaatatcggaatgtccatatgttaatcccgtgttatttccttttctgtaccaacgaacttaaaatttttgttttattttcgcgaataaatcgttaacaacg

SEQ ID NO: 95088 - DNA, 376 bp, Heterodera glycines
tgtaattagtaacagttaattgcctttgtctaatccttttgccattcatttggctttgaatgctttccttttgtcccccctttttttgctcgtcggttgttcagcgttatttctaagaataaagcgattggtccttttctcacgcaaacgttcgatgctttttgttggtcctggggaactttgtccgattcccggccccgcctcaacgaaaagcggacacatggccaaaggaaggaaagcgaagtcggcccagaaccaaccatcgaattgagctaatcgaataaccaaattctgatgcaattttgatttgtgcctaatgaatgtttttacccttttcataaaataggttaacgataaatgagcttaattatcaaaa

SEQ ID NO: 95089 - DNA, 648 bp, Heterodera glycines
taatgtttcacattcaccgctatgacaaattgcaatggtgtggactggcgatccatcgtcgcactttgagtttgaccgtcgactattgtcgttatcgccagcgccgtccgtccatttcttttccgtcttccgccgttcgctcatccgaccattttcgcttcatttgcaacaccaccaatcatcgctttttgccattgggggttgggcgtctcaactcaattttgcattcgactgtttgcggagttggcccctctaatttttcagccggttttgcaaatcatttggttcaacatcgctttctttcttcaaagtctgatggtttgaacgtcttcgaaccgaagtggaagaaggcaattctagttgtactccttgtctctgctgttatcgttttgataatactggaggccagatcgaatttggcgaccgacgaagagggggaaggtttggaggagcaccggcggaaggaagaggagaagcggaggggccgccaggagcggatggcagctaatcggctgcctccggcagagccggaggccgaggaagagccggaggttattccatggcaagcgcgtagcgcggatgacgatgatgatcatgatgatccggatgcgcccgacaattggcgaaaccggacaaactgaagaaata

SEQ ID NO: 95090 - DNA, 624 bp, Heterodera glycines
ctccaacttaagaacataaaatatttgcctttcagtaaaatctttcccggaatgtctgcggataaaacgggcgcactttttgtgggcgatatcattttagccgtcaatggcgagtcattactcaatgcgcggcatgacgaggctgtccgtgcacttaaacaagccgggaaaatggtcaatttgcaagtgcaatatcgacgcgatttgcacctccgtcgggagaatatgctgcaccggctgagttgggaggagagtcgggtcggtgcgtcgtcggctgggccgacggtgaacggacaaagtgcgggagaagcgttgcgaagtttcggactcaaattggcatttgtcacgcgaaacccactcgaggaggaggacccggagaatcggaccatcgaaatacgctcgcacagcgctcgacacattctgacgttgaggtgttcgtctgccactgaagcggacgcttggttcgaggccatccattcgtgtgccgacactctgctcactcaggcgttggcaacagtcaatttgatcctcggacaaagtccgcaagtgctccgcatgggttggatggcggagcaggacgccgccattggttggagggccgtttttgtggcattgactgtcaac

SEQ ID NO: 95091 - DNA, 1325 bp, Heterodera glycines
caacaacccttcccctccctcccatgttgtgtgatacgctgggcactgacaaaaacaaacggactcttttggtctacggccatttggacgttcagccggcggcgtttgaggacggctggaacacggaaccgttccaactcatcgaaaaggacgggaaattgtttggccgcggttccaccgatgacaaagggcccgtgctcggctggctgaatgtcatcgaaaccatgcaagggcttggcattgacatgcccatcaacataaagttcgtgttcgaggggatggaggagtgcggctccgacggattggacgaatgcctcgagcagcgcaaagattttctctccggcgtcgacttcgtgtgcatttcagacaattattggctgggcaaacagaagccgtgcatcacttacggccttcgcggtctttcgccgtttgccatcgaaatcagtgggcccaaccaggacctccattcgggcgtttacggcggcacaatccatgagccaatgaacgacctttgctggttgctcagccaattgactgacacaagggcgaacagtctgatcaaaaacattgacaaaatggtggccaaactcactgaggaggagcgcaacacttacaccaaaattgactttgacttgaatggattcaaaaaagacgttggcgttgagaaactcacttccgaagacccgaaacaaattctgatgagacgctggcgtgagcccgccctgtcaatccatggcattgagggcgcattctccgggaagggctttaagacggtaatcccttccaaagtgacaggcaaattcagcatcagaattgtgccggatatggtgccggaagaagtggacaaaatcgtcgttgattttgtcagcgaagtttggaaaggtcgcggctcccccaacaaaatgaaaatccttccgttgggcggcactttggcatggctcggcgacttcaaacagccgcactttcaagcgggagtcaaagcgattaaaaaggtgtatggcgtagagccggactttaccagggagggcggctccatcccagtgactctgaccttccaaaatctaacgggaaagagtgtgatgcttttgccgatgggcgcttcggacgacatggcacattcgcagaacgagaaactgaacgtgaccaactacgtgaacggcatgaagatgttcgcggcctacattttcgagtgcgccaaaatatgaactggcagaaattatttatcactcatagacattccatttattttccattccatcgactttctaacttctaattacttttaaaacccttgttaacttcgaaaatatatcactttctcactt

SEQ ID NO: 95092 - DNA, 120 bp, Heterodera glycines
ggttaaccataatggtttccttaaaatattagcccaaataaaaacaaaatgattatgtaaataaatttctttattccttttttggacaagaaatgcttaggaaaattttttactaaaaaa

SEQ ID NO: 95093 - DNA, 481 bp, Heterodera glycines
ggaacttggaaatcattcttcaaaatgggtcgcgttcgcaccaagactgtcaagaaggcctcccgggtcatgattgagaagtactacccccgcctcaccttggacttccagtccaacaagaaggtcgcctcggaggttgcttccatctcgtccaagcgtctccgcaacaagattgctggtttcaccacccacttgatgcgccgcattcaaaagggtcccgtccgcggcatctccttcaaactccaagaggaggagcgtgagcgcaaggacaactacgttcccgatgtgtctgctcttgagcagaatgagctcgttgttgacaccgagaccgctgcccttttgtcgtccctcgacatcaagcttccccaaatccgcaccgtcgctgtcaccgcccaaggtgagcgtcaaggccggaacgccgttgtgggcgccaacttccgtggcgaccgcggtgaccgcccccgtcgccccaagacccagc

SEQ ID NO: 95094 - DNA, 474 bp, Heterodera glycines
gtccaattaagcaatgattgattgccattgccatttggcggatgaaagttttaatgaggacattagtcaggatgattttgagcgaattttggaattggcccaccaatttcccgattttatctttccatgtcttggaatgcatcctgtgcaacgtggacacatttcatgcagtgaagaaatgtacaaaaatttcgaagtggacaaatggattcgcactcattcagaccaactgatcgcagttggcgaggttggcttggatttcaagcctcaacatttgaagaacggagacgcggacaaggaggaacagcgcaaagtttttcgtgcacaaattgaactagctaaagaattgcagttgcccctaaacgtgcattctcgttcggctggtacgcctgtaattgaatggttggccgcgcatggggcgcaaaatgtgctgttgcacgccttcagtggcaatgtgaaaaatgctcaaaaggg

SEQ ID NO: 95095 - DNA, 480 bp, Heterodera glycines
gtaaaatatggcttctccgttgcgtctccctcaacggatcggtgcccaccatttttggcacaatttcgacaattttctttttgacgccgacggcgtgttgtggcgggaacaacagcccctcgagggggcggtggaactcatcggaacgctgctcaaagcgggcaaaaaggtggtggtggtgacgaacaactccactcaaagttgtgccgaatacgtcaaaaagtgccaacgaattggcttcacagaccttgacgagcagaacattgtcagctcgggcatggtgttggcacatcagttgaacaaaatgaagcgcagtgccgagtttgggtcgacggcgcatttgccggtttatttgttcggctcggtcggactgcaaagactgctgaaggagagcggcatcgacagctttggcacggggcccgacccaattccggcggacactgccactttcgtctccgacttgccaaaccttgacttggg

SEQ ID NO: 95096 - DNA, 219 bp, Heterodera glycines
  unsure (1)..(219): unsure at all n locations
aattgtcgaaccggaagagcaaaattcaccgcaaaagaaggagtacatctcgagacttcgcatgccaacaatcttcactcgccgcaacacgcgaaaggacaccgaaaagaaatgaacgtcttccacagacaacgcgctcatcgcatttttgtacgaagaagcgatgaagaattctaacatttaactcatcttacacaaacatataaatatatacacacn

SEQ ID NO: 95097 - DNA, 911 bp, Heterodera glycines
gaccagcaaaactcatgcatgattcgactgataatcgacgaaccaaccgaactctgtgcgactcttttccaacaacatgctcgtaccatgttggaccaagttgacattatgctgctgctccatagacaggacggcgaggctacgcctggtgaattgatttgccggtcatcgcgtcgagttttgccgtgtgtgcgaattgatgacacttttttgcctcgtggagagtatttgctctgtgcccattcattttcaaaatttggagaacaaatggtttcggggactattgtcatacacagttcacgggaaattcaaaccatgaaactgcggaccacaactctcgacgacttgcgtcagtcaatgtgttctttgctgctcaaagaaggcgtcctccaaaattcttctcctgggattgccacacgttatctcaccaatgaatttgctggtttggtgttaatggtggacaattacagctcggacaattgtttgaaggtccattccgattgtcaaaactcaacaaatgttctttccactcgttcttctttgcttgcgttcgattccatccctccgctgcatcgacaggttgtcactcttttgacgcacttcgaaccctcccaatcttttatggtcactcatcgatgggtttaccaccaaacaaaattcccacaactgcgcgactttgtgccctgcactgaatttgcttccgctcagaattttccaccgttacaaacggaaacaatcggttatttgcatggcccttttccggtctataaatgatttgttcacatcttctaatttcgtcaaacatatcttttctatttcttttgtggatttattttttcccatcttcagcatctcatacatatcacttccattgtatattttcctcctttcatcaatgaatttattgactt

SEQ ID NO: 95098 - DNA, 468 bp, Heterodera glycines
gcgaatcttcagcagcaaacgcacggcccaattgctggcactgactacgattcggcagatgaatatgtggtgattgaacaggaggaagaaaccgacttggaaaagaactcaactttgccggagacggtggctacgaacactaattcgactcccagtgacgtgcaaagtgtggcagcatcagtcggcactttggacgcggtcgctgacattggcaatggcctcgacggagcaaaactcagtgtttcgtctgttttcccacagaatgcaatgagcggctcgaactattcgcaaaatggcttcaattcttccatttttggatccttcgtgatggaagaccaacttcgcgatttagtccgttctgaaaatgagcagaaccgtctaatgttggacagcatcaaaaatgcaattggcgaacttacgaagcaaaaatcgaataacaacgaactgaatgcgctgatttcacaacaa

SEQ ID NO: 95099 - DNA, 986 bp, Heterodera glycines
gtttgagaatccttcgggccatgtgactttaataaattttgccggtgtgaaatttgccattgcaccctcgatttatcttcttccttttctcactttcgttttgccatgcttttcctccctccctcccttttccttttgcttttcctcctccatcgtccctttgccaatgccctcggctgtatgtccgccgtttgtgccgccggcggtccctccccctcttcccatgccgtcaatcgcatcattcgttgcgcttccgactctttttgtggccattttcgcgctttgcggcgaaatgaccaatttgtcgaggcggtcgacctcagttgtcccgaattcgccgtggtgcgcgctcctttcgatggcgaaatttcggcttatcgtccgatgggagggagccgagcgcaggaggggacaaagggcgaatgtgtgccggatcagggagttcggatcgacggccgaggccaatggcagggctatcacgcgctgatcagttccgtccagctgtttcgttttggtggcgaagtgaatgcgggccaaagaattggcgtggcacgagatttggaatgtgccgggacgcggcccaagccgaggggcgacgaaaatttcgtgcgcatggaactcttccgagaggacaaacccatcgacccaacccatcatctgatcgactgcatgtgcaccggccaaatttgcgagacaaatcgcgcaaatgccctcgagggactcccatttaaatttgacagccgtttcaacggagtgcgcgggtgggaaatcgtttgtccgaatgttcggcccgaagagccgaattcgtcgggcgaatcgcctgaacaaagtgacaacagacaaacaatgagtcccaaaatttacagtcccatcgaaggcgaagtgatcggtcgcgtgcggctgagtgcgtcgagcaactcgcaaagctattcgggctgtgccaacgaaggaatatttgtagttggcacgggaaaatggacggacta

SEQ ID NO: 95100 - DNA, 907 bp, Heterodera glycines
aagtttgagaaaaaaaaattcttccatcaatttttcttattagcattttgccatccatacatattaaattctcaaaaaaacactaaaaactctaaaaatgtccgaccagcagtccggctcttcttcctcttccgccgtactcacttcccccaccccttttccaccacaacaacaaaaaccgccgctgctccgccgctgttccatgtcggaaccgcacttggacattgtgccacactttttgaaggattaaaaaagcgtccacccgtttgaccgtgtgttgtccggcctgttcgacaaaggctccacattctccgtgaacagcaccgattcggtcgaccaccattattcggcaaaaagtgatcgtcacgatcacccgttctccccgaccaatcagcagttgaccaagggcaaaagtgccatcggaatgatgagtaatagtgccgccgtcgccccttcctcggcggacggtctgctgcgcaagtcggccaccagtgcgtcggcactgtacagcagttctccacaacatggcacgacggccaaccatttcccgacaattcctgaggaccagggcctgaccatgtcggctggtcgtgacaaaatgccacagacagccgcctccgccagtccgccgaaatcgggcttcatgaatttcttcggcaccggcggcttcctctcgcgacccgtcacgcacacgccggaggagaactatcgtctgatcatggcgcttgatcgttgattgattgatttgatgagttggagagagagagagtgagctgaagcgcgggcgggagagtgccgtgccgaccaattttttctgttttttttttgtgccgtggacggtcggctgtgaattttttggatttttgggatttggagggcgcgcgcgggcggccggcggcgtgtacat

SEQ ID NO: 95101 - DNA, 827 bp, Heterodera glycines
  unsure (1)..(827): unsure at all n locations
ccaagtttgagcctaatttgatataacgaatatcaatggaacatggaagcttgccgcttcaactcattattttattcgttttaacgttgcaaatttcaactcagtcgccagaaatttcagtgccttctgatgttcaaattttgtcagcagtccgaaacgtagatttgaccactcaaattgtcaaggttaaaactgactttgagttgaaaaatggaagaaacgaggaattgagcagttttgtacatgccatgtcggctgaggaggctgcaagactttcttggatgtccgcttatgagagcggcaaagaatcgggcaaattacggatttctcgtgttagagtcaaaggggtctcatcggacatggttttccacaaaattgagtttctcgatttgttaatgtccggttccaatatcaaactttcggtggattatgctcttacggaatatttggtgccctctcctaaggacattttgcagtcagaaaaccagctggtcatcttttccggtactgctaatgttctcagcgcctacccagtgatgaaagaaaattgtgtctataaaatcggttcctcaaagcccatttcattcacggagatagcaccgagcaaacattcacaggaaaaaatttcctacggaccatatgagaacaccaaagcgtattccaagaaaccaattaccattcattacgaaaacaatgcaccatttttggtcgcttcatccgtggagcgcatcattgaagtgtctcattggggcggaaacatcgctgtggaagaaaacgtcgaaattttgcacaaaggagccaaactanagggttcattttctcgactt

SEQ ID NO: 95102 - DNA, 480 bp, Heterodera glycines
gtttgaggtgtcccatcggaatgcttttcgcctcttccgtcttccgcttctttctccgtcctcctccaaagcgttattcgtccttcctcctgaacacaatgtggagccctctcttctgtctgctggtcttcgctggtttggccgcgtgttgcgtttcccttccacagattcaatacgtcaatgacaagccgtactatctgatgcagaacatggaatgtcgaggaggcaaaatttacgagatcaatcaggtccaggacatcgacgagtgcaaggcggcatgtgtaactcggaattgccgggcagtcaacctcttccagctgggcgagttccaattcaaatgcgaaattttggcccatgtccacgggtacttccctgcccaaggagccgcttgttacatttcttacgtttgaaagagagagggcaatgtgacagattaatgaaaagcgatgtttttgcatttttatttttttagtttttttc

SEQ ID NO: 95103 - DNA, 255 bp, Heterodera glycines
actcaacgggttctgctgttgttgctgctaggacgggttgctaaacaaattcggggtcgattcgcctcctcttttagagtcctcgcctcgctttgttccatcggttgctccttctcccctattccgtccccgggcaaaaatcgcccttttatcagctccaaattgcttctgtagaattcagtcacgaattgcgacatgtgtacagtgccctcaatttgtattggcgtaatttgcggagtatcgccgggctaatat

SEQ ID NO: 95104 - DNA, 495 bp, Heterodera glycines
tttcggcctaaaccacaaaactaattaacattaagctggaagcaaacaaaggaatttaaataaatgaaagacattgccactgaagaaagtattgcacagaggcggcttaacctaaaagcgaatttcatgcggcagctacaaattcggcgtggtgttcttcccagcgaaattcccccggttggagtcgccacaaacgcagtgcccacaatgggaagaaagtttcgaaagcctttggaaagtcgctttccaccagccaaaccccgttttggccttggaatgacagccgccgatttcgaagacaaaacggacaactgttcttcattagccaaagggccttcactgacagaaacaaatgccccaaaaggaaggaatgttcgtccaaaagcaattaactgttacatcaatccgtcgcaatccgtctccacttggccaacttcgaatgacacggactccgatgggcaaagtccctctccgacgagttcggcttccgtcacg

SEQ ID NO: 95105 - DNA, 699 bp, Heterodera glycines
gtagttcgataattccccatttctggtttaaaacacccccccccccccaccttttcctttcgctttgtctcatcttacgcattttgcgcaatttgtcccacaccgaatcaactgatttatttgtcgtcttcgaatgggtttattataccatttctcaactcagcatcagcacctaattcacccactgctgtgatggaatgtgttcgtcaccttctccatcttttgctattactgaccttctctggccaattgttggtgacattggccgacctttacgatgactacgaacagtgcaaatcttctggccattttggggcagaggacggctcgccatctttggtgtgcgactcggagggacggttgacgccgcaggcgctggcccaactgaatggaattctgacggatatggggagagacgcggggtgccaatgtgcagatggatgtgacgggaaaccattttctgtccgattgttggtgaccagcggcgaacgtgtcgaacaatcgggtggcacaacggcactgaatgaaacggccgggcgaatttgggaaagcgaaaggatgggcacggagcagtgcgataacggaatgctaatgctgtacattcgggaccagaaaagaatggtcactttccaaggccatcgacggctccaaatttacagcgaccgcgacattgacaatttgcacgaattgacttctcgg

SEQ ID NO: 95106 - DNA, 1105 bp, Heterodera glycines
atccgctggacgattcgctaagtgaatttgacagagcgcaactgcgcgaattggacatgtttgaggacaacagcaacaaattttgcgaagtcgaagatgaaaatcccgaacgaatgcattacgtcaacttggccaagaaccccgagcggtacaccggttacaaaggcaattcggcggtcaaagtttggaagtgcatttacaacgagaactgtttcaaacccgacccgaaattcgacaaaaagtttctcctccaaccgacgccaacggggatgtgtttggagaagagagtgttctatcggctcatctccggccttcactcggccattaccgtttcgattgcggcccacaattacagaccggcccccggcggtttcggcaccggcacttggtaccgaaatgttgaattttttgaaaatcgcttcggtacgaaatggggcaaagaagggcccgaacggttgaggaatttgtacttcacttacatgctggaactgagggcattggtcaaagcgacgccgtacatccgaaaaagtcaactgttctacacgggcaacgagcaggaggaccgagaaacgcagcaatccttggaacacttcctcgccgtgctcaaagagttccccaaccaattcgacgagactcaacttttctcgaatttccaagagtcccacgcccgtctgctgaaggaggagtttcgcctgcacttttggaacatttcgcgtattatggactgtgtcggctgcgacaagtgccgactttggggcaaattgcaaacgcacggaatgggaacggcactgaaagtgctcttttcggaccttccgcggaacggaaacggagggaaagcgaacggaaggaaagagcaaacggaaaacggagaaagtgcagcgaacggcggacttttcaaattgacaagaaatgatttggtcgctctgttccaaagctttggcagatattcctccagcatttgggagatcgacggattcagaaaagagttccgacacgacgaattgtgaattgtccgctgaatttctttttcgtttcgcaaatgtcccatttttcctcctcctcgtttcctctccttttgtacgatgagtccgattaatttatttct

SEQ ID NO: 95107 - DNA, 647 bp, Heterodera glycines
gtccatttaagcaatttgttaaacaactttttgagcaataatatcaaatcatatttgaatggatccgtccgctccagcgaagaagcgtggccgaccaccgaaggcgggcggcgtagcgaaaacaattgccaagaaaccaccagcgaccacaaaagcggcgcccaagtcgccgtccaagtcaccagccaaatcgcctccgagttcaccaccgcagccggcaaagggctcgcccgccgcaaagaacgccgtcaagccggcagcagcgactggacgcggccgtggccgcccaaagggcaccggcacatcggcagcagcgaagaagaaggcggccgcaccggcgggcggaggcacgggcaagcgcggacgcccaccgaagaagacagcgcagaaggccaaggagagcgatacggacgagcacgacgaggggactgaccctgacgaatcggcgagcagcaaatcgccctgacttttgacgtgttgaatgtgtgacttttgctgacccttgcgcggatggatctctgtgtaatgatgataatttcaccacccccattttttgtttgtttgttttttcttttgatttcttccgtttattttgacaccctttttttgtctccctttttcccccttttattttctgtcgcattctc

SEQ ID NO: 95108 - DNA, 470 bp, Heterodera glycines
ttgagttttcttttcgctcaaaagggacatgtcgccatcagcacaaagggaagtgttcgcgtcgcgcgtctttccctgcgattcattggcgccgctcacaccgaatggcacgacaaatgcaccggcgcccctttcgaaagtgtcgacagagtcctcgacgagtacagagacttgaccagcgaactttcgtccctttgcgatggctccaccgaactttcccccggcgaacattccgtcgcttttcacttcaaactgccgatggattccgtgtcgaccattgccaaagacggacacggcgtggtcaaatacttttgcgttgcgtcgttggatttgcccgacgacgggggagacaacgaaatcgttgcggagaaggaattcgctgtcactgcctatctgaacttagacgcgcctcattttcgagagcccgcccattcctccgaacaaattaccaaaggcggagttttttgcgg

SEQ ID NO: 95109 - DNA, 378 bp, Heterodera glycines
gcgtttttttcacaaaaaattccattaaaaatgcaacaaaatcgtgaaaatatactcgtggatgagagaatcaaatcttacgtagcatatgaattcctacgtattatcatcgtgccctgcatgtgagctacgcaggaattctgattctctgacccaagaaatagaaaagtcactgctctgaattgttaagggagcagatgcacattttatataaattttattacctaccataataaaaaatttattttagattacttagtttgcgaaatgtcaatttttgggtgtgttggtgaaatgtccgaatttggattagccggcgaaatgtccatacacacctttctcattgtaatttttttgccatactgttaaacgaaaaaa

SEQ ID NO: 95110 - DNA, 480 bp, Heterodera glycines
  unsure (1)..(480): unsure at all n locations
acagaacgatgtgtgcgtgctgaactgtcgcatcgacttgggcatctgtgtggtcaaaaagtgcagcctgactgtgtgccctcggcccaaggatttcgggtcggtgccatgagaagtgccgaagcaaatgaggaaaatgcagaatgatcagagagagggagagaagagcagaggagagatgaacagcagccaattcaaatcactggtgatcagtgctaattgcctaccaattgaccgatcaattatttgactgatcgaaatttttatttacaaacnanaaaaaaaaaaaaaaaaaaaaaaaaaaaactcgagggggggcccggtacccaattcgccctatagtgagtcgtattacaattcactggccgtcgttttacaacgtcgtgactgggaaaaccctggcgttacccaacttaatcgccttgcagcacatccccctttcgccagctggggtaatagcgaagaggcccgcaccgatcg

SEQ ID NO: 95111 - DNA, 426 bp, Heterodera glycines
  unsure (1)..(426): unsure at all n locations
attacataataactaatagcttcataagaaataacaaattgatttacaaaattcaatcacttggaatgaaaaggtttgttggcatttcttccgccgtttttctctgtcacttctttttgccgtacgattgttggatcagtagtgggaaaaagacgggtcgcattatgccaatgccttgtggctactgtaatgcttgctggcacctaccgtttccactttgtacgcgtcgtgtttggcgatgatcgcatcgaaaccgctgaaaaggtcgttcagaaaagcgaccacttggatgggcgttgaagtggaggaaatgcgcgtgaaactgaacaaaaaggggtgggggattatttgggatttaaaacattaaaaaataattattttttaaattttaaatttaagatttgagtataaaatacccccttanaa

SEQ ID NO: 95112 - DNA, 292 bp, Heterodera glycines
aattggagattgggggcttaatggagattgggggataattagagcaaatacggtaggccattttgccgtaaattgtctcattttagtgcattttcctccaatctcttacaattagcaaaatctctcctcctacgcttgtaacttttcccatagttctctttgcttcttttctttcactttttatttctttccgtttcaaagccttttccgttttctctctctctctccattcattacgggtttttttgtttaattatttattttcatatattattgttgattatacggcatt

SEQ ID NO: 95113 - DNA, 838 bp, Heterodera glycines
aaaaaatttcaacggaggataaggaggacgttgtatcttgcgcacaattgtggtaagcatccattgatggctcacatggcgaagaaagcttcgaatttcttaattggtgatttcaactctgttgactttgacaatatggcggatcaacttggcaaccatggatatgtttcgccttgcaacatgctcactgcattggtatacattatgcggctaaaagaatcaaacgaaagagattttctcgccttcaatccaactgaactcttcgtttcttcgttggtgttggcaaccaaataccttaacgatggcactttgcaggaatttgtttggaacgacgaatgggcatcagtttcgggccttgcattacccaaactaaacgagttggaaattcgcctgctcacttctttacgttgggatgtttcaattcaatccgaagattttgaaaaagttttggcgagattagaagggttcgttgccagcgaaatggcccagcaaaatggcgttatgagctacaatgaactttgcattctgtccaacacacatggcttcaaccgttccattctctgtttgctcacagttctactgaagtttttgtttgtgttattggcttttcatctcgctttgttagccggtttatccgtgctgaatatggcagtctcgcgaaaacaggaattggcggcgagtgacgcgtgcatttatcatcacggatgggatgattgttcgcatccaccaattcttttagcaaatgaacgaaaaatcgatgcgaacttgacgaaagttgttcacaaggatgatttttttgcatttgttcatgcctttagcatcagttgatttttatttt

SEQ ID NO: 95114 - DNA, 928 bp, Heterodera glycines
ctatttttgacgattcttctatttctttttttcttctccaatgctgaacaattaacgtttgttggcggacattcattcaatgaaatgggtgaatttcgtgtgaaatttcgtcaattggaggcggacattgaggaactgaagggcaaaaatgaagcaattcaaaaaagattggtcgagttcgaacagaaactgtcgacaagcgcaaattatacgcgaattgtgagtggacaagagatgattcgaattttggcgaaaaacaattggaaccaaacggacagtcacaaggaactgtttttgtttaagccaaatctgttaaaagtcgtttgtctgggagctgaaaaggttccacgtactgtacgtgccaaagacagggcgccaaaaaatttggaaattgtttactacgaagtgaaaattctttcagcggagcaaaaggattttgatggaacccaaaatgactcaattggcattggctttgcgcccaaatcgatgccattaggcaccaaggttggcacgcaccccggcacttttgcctacttcaacgatggcaatgtacgtggccacagaattgtgggcagcaccaagcaaaacttggccaaattcgatgccggtgacgtcatcggatgtggactgaatttgaccagcaaagaaatcattctgacgaagaatggcgaacgattggggaaaaaggagcagccgtaccaccgcttcatttcctctcattacggcagcgaattgtttgatagcaatttcttcttcgcatcaaaagaaaccgacgatttatatccggcaatttccttgaacaaccccggggacgaagtggaggccaattttggaccgaacttcaaatacacacttaattaaatgacatatccctttttccgatttattatttgtatttgaaaaataatgtgttaaacagtaaaaaaaa

SEQ ID NO: 95115 - DNA, 1564 bp, Heterodera glycines
caagtttgaggctctaaactttccactattcaatttctcaaaatgctcgctgccaccggaagatggccctcgtcctcctccaattcgggcttgaggattgccatggcaatttgtgccattttggcatgttgttccttaccgaactcaacagaagcggcactggccgaggttggccaacagcccaagggcaacaacccgttgctgtacagtgtcgacgacccaattgttcacttggacgccgacacgtttgaggacactgtgctgcggcccaaccgggaccgggcgtacatcgtcgagttctacaaggactggtgcggttactgtcgccgctttgcgccctatttcaaagtgctttccgaatccatcaaatcgtggccatttgtccaagtggcggccattaactgcgccgacgcatacaatgtgaaaatttgcaaggccaacgacattcctacggtgccgaaattgaagtacttcccgcgcaatgcccggtcatttgaggaaggccaagtgattgaacattcgtacgaatcggcgatggaaatgcgcgagcaagtgcacaagaagatcatggaagagttcaatgccgaaacgggcaaaggcaatgccgatttctacctgcaaaaaatggaggcacaacgccaacacaacaatgagaacagtcaaccggagccgtggagggacatgccgaacagcacacagttcctggcccaactcttcgagaaggacgccaaggatggactgccgttctccctggatttgctgctgtacaagccaagcgtggaggtccgccaagtgctggtgggcagtgccgacgaagtgccacgcaatgtgccaaagccagcgaaaggcaaagcaacggaagcggcggccttcaaattgccttatgtgagggcgatggaacgcggcaaaacggagccaattctggcggagagcctcaatgatcagacattggccaagttgcgtgaattggtgaagccaatgatggtggagttgaacaagacggaacaagccaaggcacaccataaggaaccggtgcaggtggtggactgtgcgcaatccccggaaaagtgcaagcaaatgttctttgtcagcgagacggacatgctgaaggccatccatacggcacttttggacgaagtgatttcatcgggcggggacgaaattaacggggaccgattcgccgccctccggaaatttgtggaactgctcattcagcgattcccgaagaaaacatttgaacgaaacccgcaattgagtgcacatcccaaggggacggcactttcatccatcggaaagcctctgctgcgaagtcaacgggcgtttaaagtgtttgagcaaatgaaacgctttttggacgcaaaagcgggcgacggcaaagtgtccatggacgagtggagggcggagtttgatcaggcgaaggcatttgaaaatgccaaattcgtttaatttgtgtttttgaatgattccaatagaaacaaaatggcgacccgtttccggtcacagccgaatgggagcactgcaagggaacgcgcaccattttccgcggcttcacatgcggcctgtg

SEQ ID NO: 95116 - DNA, 647 bp, Heterodera glycines
gtccaattaaggatttatgccattccttttactccaatgaaaaaaaattgattgtcatccaccgatggcaaacagtggtgaacattcctcgcgccgtcagcagcaacaacaacgccatcctaacaccacggcggaaaacaactcggacattgagggcactgcgcatcgggtggcgtccgttactttgaacacggagtccgactcgcgcacatccgccgacctgccggcatatccttttcggagtaaacggcgcaaaaagttgccacgtcgagacaaacaacagggggccgatatggatgttgatgaacatcaaccgccatggaaaaaactgtcggtgaacaccgtggacaatttgactcttccaagttgtaaagtgcaaatggactgggagcatggacatggacaggcactgtccactgccaatgacagcactcaaaaccaatcgtccagcacaacgagacaagcatcggacatggaaaacagtgtatccgaccagttttcccattcacaatccgaatctgaggccagcacttccaacattgacgcggatgatgaacaaagtgactggcccggaaatgaactcgctcgtcatccccaactgtcctcctcctcttcggtcattgtgcccttccaactcgccccaccac

SEQ ID NO: 95117 - DNA, 773 bp, Heterodera glycines
gttccctttcccaaatgccttttctgtcccttttctcttccgtctccgcttttgcccttctctctctcctttccttttcttcttctgtccatcacttccatcataaccatcactccgattcgtccaaaggacacaacggccatcatcagcagaaggaccatcaaacggcacaagaaattccttccaattcgttcccttgcgcctgcggcggtcattcgtccggcggggaaaatgcgcgatggatgaacggaatgccggcgaatggagttccgttgtttttgtttccggacaatgtcttgcgattggtcggcgtcgttctccgaagtgaaaatgcttttcatagggacaacaacgaattggcgcggcatcttttccatcttttggcccaccagttcccccgaaaatggtttatcgtcggaatcggcacaatgccatcgaatggtgcgaacgaaccgaaaatgtgggcccgcgaaggaatcgacgcactgaacgggactgtacagttgcaaagcccgcccggttacggtagctttccctttttggacggacggcgttttcaacgagaaaacggaagcaaaatttggtatttcgtatatgcggtggagccaatgacggacaaagcaaaggacggattgccaaagcaaagcttggcaaagtgtttgtcggaaggttgcccttctcgcgacaatttcgcctcactttgtgccaacaatcgccgtcagcttggaacggtcgtcgaatttgaccaaagttcggaaatgtccattttcgca

SEQ ID NO: 95118 - DNA, 228 bp, Heterodera glycines
atattattgtcagagaaaattttttaattagagggcaataaagaataattttattaaaagtaacttaaaagttaattgaacaaaatttttggttaattatatttaagaaaatatcgacaaagttgcaacaaatttttccagggttttgaatggatttttaaatttcaaaaaacaaaacaaaaaatagtggaaaatttttgaatttttccattcttagaaggtgtattt

SEQ ID NO: 95119 - DNA, 420 bp, Heterodera glycines
tggagggcaacccggcaccgacaattgtgtggaaaaagggcggccgaaaaatgccattgaccgacgaccgagtgcggtgccaaacggacggtgacacgggacatgtttctctgatcatttccaaatgtcggccacaagatggggacgagtacacattgatggtgaagaacgcgcatggcaagcacaaagttggcgccaagctgcttgtcacgccagcggccgaatcaaatttggacatccgggccaagcagaaaaaacgtggcacgggctttagcaattcggaacaggaaaaacagcgccaacggagtgatgccgagcccaaaagcaaggctgaacgacgcaaacgccaagtgtatgtggtggaggagccccgtgacacatttgttgtgccgttgaactcgcagcatgccaacgaaaagg

SEQ ID NO: 95120 - DNA, 467 bp, Heterodera glycines
ataatcattactcgcggcccggcagttacacgcgcgtgtacggccaacaatcgctgtacacgccatccgtcatggcaccagaggccaaattggccaccgaacggcgcacttattcggggtacaattatgtggcaggcgaacacagcttcaatctgtccacgaagccctggtcccagtccaattaccgcttcctccgcgtctctcacatttcttcggtcccttggtatttccacggccaaaccagcaatgtcagacattacaacagttaccgcccgccctccttcactccgcgtctgtccacctattggaaaagttatttctgaccagcgaccgttcagaatggcatttcgttgtccttttgaattctttgccttttcacctttcatttttccctttgctttagtccctccattatcattctgtgcatagaaaatgagcgtaaagtgtcaataaatgtgcacaaaagc

SEQ ID NO: 95121 - DNA, 508 bp, Heterodera glycines
gttcggataggttggccagatacgaacagtccatgctaattgagacgggacatgtgtacgcccaggcggcacgcgacaatgcgctggcggcacgcaacaattctgtgacggcgcaagagagtgcccgggccgtacgtgacatcaccgaccttatggtcaaacagctcgagtccaaggaccgtcaaatcgtcgacaaagactttcaactggcacaaaaagatgtgctgctggaagaaaaagaccggctgttacgcgagaaggacgagatgatcgcacgtcttcagggttatatcaacggacttggtgttccattgcccgcgccggcagaacagcagcagcagggcggcggtggccaatgataaattgtttgaacacttaaagagagagaggcctctgacagaatccgactgaccggaagaaaaaaattcgtggacttttcttttatgtggaatgttttgttttgttttttttgatgctttgcgcctaaaaaataaacattgcttctgac

SEQ ID NO: 95122 - DNA, 202 bp, Heterodera glycines
ggccgtgctcatcgaaacaacccttggtgacttggtcatcgacctttttgtcgacgaacggccaaatgcgtgcaagaatttcctgaaactttgcaaaaacaaatattacaatctctgccaattcttcaccatcgagcccaaatacatcgccccaactggtgacccaacgaactccggaagaatgggcgaatcaatttatggc

SEQ ID NO: 95123 - DNA, 605 bp, Heterodera glycines
ccaagtttgagcatttttatccacgatgatcagtagcagcaaattttgcacaaactttgatcagctttttaaccatttgcgtttattgtgttcaaatgacgccggtgcagcgcattacggcaccgaactgatgccaattatcaaagaaaatccctttttcggtgctttatgttcagtgatggcggaagagaagcaaaaaataagggcaatgacagccgaaatttcgtgtgcagcaatggcattggcattttcgttagactcgccaacggacgatgcgaaggacaaaaattgtgcggttgaccaaacattgagcgaatgcaaaaaatattatttggaggaaaacgaattggatggagaaacaaaggacaaaatgaagcagactttggaagaacatgaacaatttgggcaactgattgagcagaactccgtcgcctgtctccacacttcacgccgtctgttcgctgtccatgcccaacttcgtcccgtcacccttggcgatgtgcaacagtttggcattgtgctcaaactgagcacaaagaaatggcaaaacgaactgaaagatgcggtgtgcagccaattgttgctgatcaaatcacgcgcagggc

SEQ ID NO: 95124 - DNA, 757 bp, Heterodera glycines
attaattgaaaatattaatttgtattccggttattcttccgtaaaaaatgacgccaccttagccattaggcctagaaaaaagagctctttcgaatggtaccttcaaatcaaaaaacgactgtcagggagctgagctacagaaaaaaattccaagccaaggccaagccactatagcagtatagtgacaaaaattaattgaaaatattgatttgtattccggttattcttccgtaaaaaatgacgccaccttagccattaggcctagaaaaaagagctctttcgaatggtaccttcaaatcaaaaaacgactgtcagggagctgagctacagaaaaaaattccaagccaaggccaagccactatagcagtatagtgacaaaaattaattgaaaatattaatttgtattccggttattcttccgtaaaaaatgacgccaccttagccattaggcctagaaaaaagagctctttcgaatggtaccttcaaatcaaaaaacgactgtcagggagctgagctacagaaaaaaattccaagccaaggccaagccactatagcagtatagtgccaaaaattaattgaaaatattaatttgtattccggttattcttccgtaaaaaatgacgccaccttagccattaggcctagaaaaaagagctctttcgaatggtaccttcaaatcaaaaaacgactgtcaggaagctgagctacagaaaaaaattccaagccaaggccaagccactatagcagtatagtgacc

SEQ ID NO: 95125 - DNA, 1024 bp, Heterodera glycines
taaagataaaatacttgcgacaatattctttattctgttgtcttcatcgacaaaattgacacaaaaagggacataatggccactgcttgcaagttggaaatgagcttggacgagatcatcaaagcaaataagagcaagaccaaccaggcttcaattaatgggcgaaagactcaaatgactggaaagcgattgattcgcggcaatattgcgaagggaaagccattcatccgaaagcaaatcaatgggcagaatcagaccaagaagtttggacttaaacgcgttggaattaatgttcgccgtggtcgccctttgagaaagtctaaccgtgttgttgtcatgagaaaaaatttcgctgcgaagaacagagccgtaatttccgctacaaagaatttagtgaataaactcgtcaagaaagctcttaacaaatcgaatgtttcgccccgtggcaagcgttttatcgctaattctgcccgtcgtgtccgcacaattatgctcaacaaagtcagtccccgttctcgggtgatcactcgtcaacgccagcgaattgttgccgtacaaccgcaacagcagcccgtttttgttcaacgagttgtccgtgggcgtggtccaattcgttatgcgtccgatgctgcgttagttcctcagacgatgaaaatggttccgaagcgacgattccgcatcaatcctatgcaacaacagcaacctgtcctacttgtacagaatcaatcaccgaaacgccgattgccgtccttttcatcgatgagtgttcgtcaacacgtcaatgcattgcgtcgtgcgactactgtgcaacaactccagactcagtttgttaaccagcagctaccgattcgtcagcagtttcgagggcggcaggccatcactacccccgttgtgccaaatcgcagtcgaggcaaacaacaattcattcttgaccaacccgtgcaagcaggacctcaatttatgaaattttctccccgccgtcagcgccggcagactgcctctaccaatacgtcatcgttcaaca

SEQ ID NO: 95126 - DNA, 719 bp, Heterodera glycines
gcccttggacgcctttagcattcccataaacaatggcattgtcaattttggcacttctttgcttggcgcttgcacactttggcaccggtcaggagaaaaaaactgagccattggaccacaaatggacatgtggcaccacgtggaaatatgaaaacactggacttacggtttcgtggagccttcccgagttcctcgccgaaacttcggtggatgtcgattgtccatcgcgaaagaaccgaatgaacaattgttgttttgatcatgacgattgttattcaaagcaattgggacaaacgaagtgcgacgacgttttttgtgattgcttagaaagagcaactaaaggatcatcacgctgcgaaacttatgagggaccaggcttttgtcatcttgtccgcacgtatggcgcgtcggcctaccgcgcgtcggcccccccgttttggagcagttgtggcactgtgttgaacagcgcgaaatatttgggatgtccttgcggcacgtacaaaacatgggaacgctgcggttttctgtatatgggctaccgttacctgtgctatgcgtgctgatgaattttttttttaattgaatttggcatattttcagttatggcggaatgattcaattttcatgatatgcttagataattttgtgggcttttttctatatattcatagtatatgcatatttcttatattctaaaataaacattttctggcaaaaaa

SEQ ID NO: 95127 - DNA, 473 bp, Heterodera glycines
caacctttgagaattaaataattcattcatttttctatctatcttgacttagaagaagaaaatggcttcaactggctttagtgtctacgttggaaacattccatacaatactactgaggctgacatcggaagtatgtttagttcatgcggagtggtcactaatgttcgcatcgtgtacgaccgtgaaaccaaccgtccaaagggattcgcgttttgtgaatttcaagaccagcagggagctcagaatgcagtcacgaatatgaacggaattgagcttaatggacgcccattgcgtgttaattgggccaacaccaacaaatagaaggaaggtgatggatggtatacttttgttgacagaccatttcgatcataaaatcaaaataaacagtttgttctttgattaaattgtttgcttttctaagttggaataaacaatttacaaatttggaatatgctaggatcctacaaatata

SEQ ID NO: 95128 - DNA, 1021 bp, Heterodera glycines
gtttgagattccaaccattttatcataaataatagaattaactttaaattcatccgacttttgaatatgcgcattttggtgggcgttaaacgggtaattgacttcgctgtcaaagtgcgcgtaaaaaaggacggcaccggcgttgtgaaggatggcgtaaaccattcgatgaacccattctgcgaaattgcgttagaagaggcggtgcgaatcaaagagcgtaaagagaaggagggcggtgggcccgttgaagtcgtcgccttttcatttggcacacaaaaagcacaggaaacactgaggacggcacttgcaaaaggcgctgacaaagcattgctcgtcgaggtcgacaacgccacagaggagaagttggagcctatccatgtggcacgggcattggccaaattggcgaaggaagacaaatacgacttgctgttgttgggaaaacaggcaatcgacgatgatgcaaaccaaacaggacaaatggtcgccggatatttgaattggccacaggcgactttcgccagcaaaattgaagaggatggcgcttatataaaagtaacgcgagaaatcgacggcggattagacactgtgaaattgaaattgccagccgttgtcaccgccgatcttcgactcaatgaagttcggtcttgtttcaacaaacattgattgtttttgttttttagcctcgttacgccaccctcccaaacattatgaaagccaagaaaaagccattggaaaaaaagacagcgcaagaatttggcattgacatgactaatcagacagaaactttggaagtctccgatcctccagttcgacaggcgggcggttttgtggacgatgtgcctggattagtttcgaagctcaaggagaagggagtgatttgaccgacaaatgagttatatggccagaagatatatactatatatatttttacactttgtctattgagaagtcgttttttctctctaatttgcccgctttatcctgccaaatagctgtttaaattctaaattttgcttaa

SEQ ID NO: 95129 - DNA, 515 bp, Heterodera glycines
tgacaattttggcaattttttgtttggcatttgttcaccttggcatttctggcaaatacgataagtcggatgagcacgatggcaaatatggtgccggtccacctggtggctactcacatgagaacaacaacaacaacaattatggtggcgattcttcgggcgaaaaatatgagacaatggaacatatgtggtcatgtgccaccaaatggcaatgggaaaagcccggcgtgtcaatgaaatgggaaattaccgacacactcaccgaagcggcggtggacacggattgcccatcacggaaaaatcggatgaacaattgttgctacttgcagactgaatgctacaacaagcaaataggacaaaagagctgtgacaaccaattctgtgaatgtatggagcgagccactgctggcaaaaaacgatgctcaatttgggaggggccaggcttctgtcgtcattaccgcttatacggcgaatcgggataccgcgcagcggcccccccgttttggagcagttgt

SEQ ID NO: 95130 - DNA, 475 bp, Heterodera glycines
gtccctttaagcagcgtgaggatgactttgaaaatagttagttctcttgagaatttgatcagattgactccggatgtccattcgattcttgtcctcgatggggacggagttccggttgtcagtgcaggcgaagagatacgaaatcggtcccagtattcaatttcttacaattcgcttgtcgagcaggccaaaaagttgggcatgggagaacagaaattttgggtgtttcgctacgaaatgaaccaggtggttatgctcaggagggatgcatttgccgtattcattatggcttctgcaaatgccaatatgggaattctctgcactatgtcagcgcaacttggaccaattttggaggaatgtaaagtcatcgtaaacgaagtcataaatggacagatggccgggcaaagtccgagataaatgaccaaatttttcttgtcgagaattttacatcataaagttttaactataataaaaa

SEQ ID NO: 95131 - DNA, 125 bp, Heterodera glycines
attaattcattgtttttcgtttcggcactttctgcccatttgaccaatgatttctgcccttccttttcctcactaatttgtccttttcgcctttcctcacatggcaattcgattaaattttggtg

SEQ ID NO: 95132 - DNA, 612 bp, Heterodera glycines
gtcggacattcaaaaagcgattcaggcactggaacgagaatacgccgaacagaaagagctgttcgaaaaatggaaggaagaaaatgcatccgaagctgatactgaaccatacaatgcatatgtagagcagttccgaggatgggagaaggatgtgatggacaatttgaaggaactgcgggcatccatcgcccgacagcccgtggcgccggagcccgagttgcccatggtcgacctggacactcagctgaacaacttgttggaccgtgtcgatactccgcaattcatcatggcttttatgagtatgagccaacaggacccaacgtttttggcaaaggcatttgaggttgtgatggaagagtgtcgtaccaccggcttctccaatccgattttgccccaaagtgccaccattccatctcttcggcctgtccaccgtctgcccactccgctccaccaacaaccgcccggcgtcccttccgcttcgtcgtcagcgcggcatcaatcggcgagaagtcctggctctttgtacctgccgcctccgctgcagcccaaagcgtatgtgcaaggctcatccctgctggggccatctcggccaacttccaccgtttcttacac

SEQ ID NO: 95133 - DNA, 475 bp, Heterodera glycines
gttaaataaacgaagtttctttaaagttgcaataaaggtgaagtcgtcataatacggggttagtcctgaaatagacattcctatgagcagaaaagaaccatattacatcgaccatcgccaagtttcatcggataatttattttttttttcggtagaacggtagtgtagattttttttgaaaatttcaggaggtttcctctgtgacgtaaagcgaaatctccaaaattttcaagagaatccgcacaaacgcactccctcaaagaataaattgttcgagaatttggcaatgcctcctgcgacttggttccctcttgctcggttcagtctaaatatggcgcagtttcttggacccagggatgcagaaacttccaagggttcccccaaaataaatttaggttcccccattttaagttttcgcagtattttgcccgacacatcaagtaacgcggtcgacagttgggttcccttaaaacag

SEQ ID NO: 95134 - DNA, 862 bp, Heterodera glycines
tgagaatgccatctcttcggatttgccccttcaatttccccaccaattcccttctaatttccgtccttttgcttcttttctgtctccaattctttcctctcaatgcccttcatcattcggtttttgttcgacgtgacttgagccgacccgcgccggatgatggcgtcgcgtccgcctccatcaacacggaggaggatttggggggactgaacaccgaatggctaactgacgatcagctgagcgaattggcctctgccgggagtaacgaagaacgaatgataaaaatgaggaccttttatgacaatttggaaggcgaagcgaagaaaggcgcaacgaagaaaatagtggaggaatgctacggatgggtggacgaagtggcgacggaggacgagcgaaacgcactgaagcaaatgcaccaccaaagccatgacgaatgcaaggccaaagtcagggaactgatgggacggctaagtgaggagagaagcgaacaagtggagaatcggatgggtttctgcgaacacgtctattacgggaagatggacggggaaggcgacggaggagcaggaacagctggagacgaacaccaccaccaccatcatcaccacaccaaaagacgggctcacaggcaacgcagagaccaccaccaccaccaccatggcgaacatggacttgaggattatttcaaaacgcatttggcatggttaacggatgagcaaaaagcggaaataagcaggatgaaggagtcagggaaaagccgacaggaaataaagcagaaagtgatcgaattgtacgacgcaaccactggagaagcgcgagaaaaggcaaccgaactgctgaagggcgggtgccgagagctgattaa

SEQ ID NO: 95135 - DNA, 674 bp, Heterodera glycines
gtttgagtcaataaattcggttaccaagcatataattgttttcatttcctgaagtatcgtgtgaacgaacagccactgagagcataatgccgcctggtttcaaggagtacttttttctcgacaaattggcaaaagcgtttaatattgtgaaacaaactgggggcatccgagcagccattaaacagcgttatttgatggacacgaaccgtgctggcacattgataggcgaggatcagtttggcaaccgatacttcgaagacaacacttatttcgtgccccggaatcgctacgtcgtctacgccgagagggtttggctcgactacgacgcctcgcaaatcccgcccgaatggcaccgctggttgcaccacatttgcgacaaaccgccgaccgttgagccgccgccggagcgcaagacatggatgttggaacatgagccgaacaattcgattgtaatgagcaaaaaatacgtgccctattcgaccacacgcccaaaagtggagggatgggtgccggggaggaagagaagcgaagaggggacgacgcactgagtgagggcgaaggaatgggacgaatgatcgacggacggacaaaagacaaacggacgaacgaacgcaccaccaacccattcagttgtaatatttgtgagaggagaaggaataaacccaattaggact

SEQ ID NO: 95136 - DNA, 749 bp, Heterodera glycines
acaataaagttgttttcgttcgttataaattcacaaataaatctccaaaatgctcctttcttccaactttgttggcgttggccgtgtcgcgtctcgtgccgttcaccgtttcttcctgtcgacttccgctgtgcgccttcagcaacaacacaaagaagaagaaaatatggacattgaaaatctcttctcggaacagcaaaatctgccgcaatcgcagagcgaagaccaaccgcaggtgttcgatgcaccgaagcgtcgcttcaacaaaggaatcaaccgtgttgaattgttgggcggtgtcggcagtcagccattggtaaaacagaccgcgcaaggctccgcttttgcctctttcaacttgtacacaaatgtggagcgtcgacttggcgatggcaccacaacgaccaacacggaagtgcacagtgttgtcgcattcggctccatggccaaatacgtggagaaaaacgtggaacggggcactcgtgtctatttgactggccgtcttcactacaccggcggtgcacttttccccgacgggacgcgctctccacgtatttgttcggtgaacttggaaagcatttacccgctctccaagcaaggcgcaattttgcgttaatgcgagtgaggcaattagaaaacgaattttggcgatgatggttgaattgaccagatgatgagacattttgatgatttgatttgtttttgtttattttttgagtcgttgttatgtcgtacaataatagaaaaat

SEQ ID NO: 95137 - DNA, 451 bp, Heterodera glycines
gccgccgatttcctcccaataaaaagcaccaaattctcattaacaaaaagccttcaaaaaaaaaatgcattttttgttgaacttcaagctttttgcatccatctttcttgtactttgtgtggtttcgtttgtcgtctgccaggacaagccagctgaagcatgccttcatcccaaagacgagggaactggcggcttggcactcacacgatggtggtgggacggtagtgattgcgaggaatttacctacaaagggcagggcggcaacacaaacaatttcccatcaaaggagctttgtgatgacgtgtgcaagccatgaatgagccgtggaaagaagatggagcgtgaagagacaagcaaagaagaaaattgaagaaattaaattcaaaaaatgaaatgtagcactaatgcctaatgattttgtggaataaacaaaacattgcaaaaaacaaag

SEQ ID NO: 95138 - DNA, 798 bp, Heterodera glycines
  unsure (1)..(798): unsure at all n locations
attctccggcacaatttggccgccattcgcgacattgtttacaccgtcgaattcgcattgggcgaattggtcgagtcgttgggacgcatctctctggacgtgagagaggttcgccaacagaaccaactccgtcagctcgcccgtcccgtcaaaacgacgttggccatgctgaaaagagttcgccactctttggactccacgggttggtccctgtccactttgtcccggtcggctggcacttacgcgggccaagacgcgttggaccaattcgttgccatgttgccccagctgcccaaagactgctacaagttggtccaatgggtgtattcgctgtccgtgtggcgtgacttgccccgcggcggtgccacttccgtgtttctgcccccgtcgtccggcaccgtccctttccatgccaaaatgcatcctccgccgccccctccggcgccgttcccccaacaacgaccctcctccccaagctcttctctgctcaactattattcatccgagtccatcgaagatgaacaaaataacaacaacgaagacagcttcagaaattgggcaactgtgccaatgaatggctcattgacggatcggcacggagggcaggcaaagggtggcagaatgtttgtcgaacaacaacaatggcatccacaaaatggtggagcattggcaaacgatgtgatggacggcggggagtcgaccagctcgaccagttcaattttgacggcagaagaacggacgggtggagggnggaggaggaagaagcagtggtgacgaaattcgacgccattcgccgga

SEQ ID NO: 95139 - DNA, 857 bp, Heterodera glycines
aaaagacactgtgataattagcaggtaaaacattaattggctttttccttcctcaaatgataatccttttcttttctcctttcgtcttgcacaaattttgcgttttccgttggaattcgaaaggcactcattggagaagggagatcatcccgaaatccgagagggaattgcccacgcgcgacaatggttcgatcgtcgattacaacaaattcgaattgtggagacgggagtacgaggaaggggttgcccaactcgagcaggaacatgtcaagaagctgaaagagttggaggaatcgttcttcaaagagttggatgaacagaatcggtctctcgacagtgaagtcaatgcgttggacattgccattccgccgcttggcaatggcgaggaatccctggcgaattgtgccacgcaattgggacagtgccaacaccacccgaacccactcagtgccaatcacggcataacaaccgcaattagcggcaaaaaattcctcagaagtcgacagaacgacgtgattccctcgtcgagtgttggtgccgagtcggcgctgcatttgggtgccattggactgacagatgcagcaggcacagcgaagagacgtactcagacgaagaaaagcggctcccctttcggattccttggcttcggcagaaccgaaggcgctgtcggtggttttgctggtgccatcggtggagggccgaccatcggaggaacgtccacttcttcgctgatgctcccttatcttttgtcggaatcggccatttcggaggacgtccattcgttgggcagcgactcggccaaccattgccatttggcggaacgttcgtcagcagggtgcggcggactgagtcaagac

SEQ ID NO: 95140 - DNA, 300 bp, Heterodera glycines
ccaacatttacgaagttacaatattttataagaataaggaaatggcgatagataaaaagggccacgtgactgttagttgtgcccgtgtgaaaatacagtttcccagttacgcttttttcggccgaagggtgagagaagttaacgctaaaatcaagagtttgcagaacgaatgtgacatgattgaggggaatgtccaaaagctgcgaagtaactttcgaccgaattccgcgaattgacacaaacgctgtattctgatgctgcttatttatatttattatgcataaactttaagcatcaaaa

SEQ ID NO: 95141 - DNA, 1049 bp, Heterodera glycines
tatcagagacgagggtttgagcacttaaaaattattttaaatcacttgaaaagaagcatgggttctttctctaaattggcaatcgaccaactcgaacttaaggggaaacgcgttttaatgcgcgtcgattttaacgtgccaattaaggatggcaaagtgacgagcaatcagcgcattgtggccgctctgtcgacaattaaatatgccattgaccatgaagcaaagtcagttgtgttgatgagtcacttgggacgaccggacggccaagcacaggcaaaatattcgatgaagccggtgcacgaggaattggagcgactgcttggaaagacggttgtctttttgactgactgtgtcgggacagaaattgaaaatgcgaccgccgacccaaagccgggcaccatcattttgctggagaaccttcgttttcatgtggaggaggagggaaaaggcaaaaattcggctggcgaaacagtgaaagcgtccaaagaggcggtgaacgcctttcgtgcatctctctcaaaacatggcaacctttacgtgaacgacgcatttggcacggcgcatcgagcgcatagttcaatggtcggctgtgcgatggagaagagggcgtctggttttctgatgaagaaggagttggagtattttgccaaggcactcgagtcgcccacccgtccattcctggccattctcggcggtgccaaagtggcggacaaaattcagctgatcaacaatttgttggacaaggtggacgagatggtcatctgcggtggcatggcattcactttctacaaagtgctcaccggcaaatccattggcaaatcgttgtttgacgaggagggttccaaaattatcaacgatttgatggcaaaagcgaaggacaaaaatgtgaaaattcaccaaccggttgattttgtggttggcgatgagttcaaagagggcactccattcgccaatgttgacgcaaaggatggaattccgaacggaaaaatgggcttggacattggtcaggaaactctcaaacaatttgccgaagtgattggacgtgcaaa

SEQ ID NO: 95142 - DNA, 469 bp, Heterodera glycines
gaaagacaaaacccatcatttaattatttccactggcacaaatgtgccgcaattcgtcgcccccatttgttcttttcgttgttttgctggcactcgtcccctttttgtccaccggtggaatgccacgtcatcgacggcaccaacaaaaggaagcaatggaaaatgccggcggcgaaatggctgacgacagcggcgacacttcggcaaattgcagctacacggacccgtactgctacaactcggaggcgttcatcgacgcggtgccaataaaagaagaaaaagggacgaaatgaaagggagagagaaggcaaatgactcaattttgacgataaaaggcattcgaagtgttcttctgtatcatcaaaattaattgatatgccaattgattagctaatttgtgtcttcttaatgacttaagccatggcatttccatttttgtcgcgtttctttccaattcccccccccccgc

SEQ ID NO: 95143 - DNA, 481 bp, Heterodera glycines
ggaacttcgatttaacgatttcctataagcgaagttatacacagaatgagttccgcttcttcacctgtgccttcacttatccttaactcgggcttcccaatgtctcaaattgggtttggcacttggatgtgcaaaccaacagaggtcaacgaaattgttaaaagtgccattcgtaatggatatcggcatttggattgtgcattcatttatcaaaatcaatcggagattggcgcagctctcaaagacatgctccaacacggagagattaagcgcgaggatttgttcatcaccagcaaagtttggaacacttttcacagctttgacgccgcattggcaaatgtccaaaaaagcttagaacagctcgggcttgattatttggacctttgtctgatccattggcccatgggttacaaagaggggacagaactcttcccaaaggacgcggagggacagaaagtgtttttgtcggacgtggactttt

SEQ ID NO: 95144 - DNA, 484 bp, Heterodera glycines
tatttaagttatattttcactacataattttgatttgctggtaaatgtctctgtacgacgacattggaattgaatcatcaacatcagtgcaggtcaaagaagagaatttggagaaaaaagctgatgactttccgacaccaaactctgctcaaaaaccccaaaatgtcaccgtctcagcagtgtcagcggtcaacaaaatgaatttgtcctttctcaaatcgcaactcgaagccaagaaagccattctacagaatgcggccgctgccgcttcgcaaaataaatcagcccccggcgttgccttcgcgcagccgttacccgccactcttccgaatatgcctcagctgctgaacaagaagggcggcacgttcaagctgaagccacacaaagcaattccattgcccatcgattcgaccggcgctttcactttggtgccgaaatcactgaaagaagacaaagtatttttgtttggtgaactgatggtgga

SEQ ID NO: 95145 - DNA, 705 bp, Heterodera glycines
gtccaattaagcacaggggaatttactttgggttacacagcttcaagggaatttactttgggttacaaagcttcaacaacatgcaaagtgtccaatcgtcggccaccgcggcagtgaccgccgcttccaccgttccgttgagcattcagaatgaaattttgtggatcaagcaggacgctctccaagttcgcaacgccgtcattctcttggagcaggagaaggacagtcttcgcaaagcaattcgcaaactcaagttggagaatggccgcctgaagacaaaggtgaaaaccttgaacgaaaaggtggcaaagattagcaacgaggaaatggacgatgaagagggaaaattggcgcctgaatctgaattggactatgacgaactaaaccgaggggatttctacctaatcggaggtgtccatgacccgatcagtcttcgttttgaagctgcgatccgtgaccaaaatgccgtcgaacataaaagtgccgaacgctactactggtacaaaatggcggaattctttggtgacgaggaagccatgaagagcattctgcacgcgcagaatgtccaacaggccgaagaggccatgaaaaacatcaaaggcttcgacgttgccgaatgggacaaagtcaaacttaaacattgggaggacggacagcgactgaagcttgagcaagtccgttggatcgaaaatttgctggtgctga

SEQ ID NO: 95146 - DNA, 822 bp, Heterodera glycines
gtttgagttctattattaaacttcctagaacaaacaaattgctttccaatttataaaatgagcagcagcaaaatcacgcgtgaccagctgaacgagagtgtggctgaagtcttgaaacaatcccaagagaagaagcgcaatttccgagaaacgattgaactgcaaattgctctgaaaaactacgacccacagaaggacaagcgtttcagtggaactgttagactgaagcacatccctcgtccgaaaacgaaggtttgcattcttggcgaccaaaaacattgtgacgaggccaatgccaacggaattccatgcatgacagcggacgacctgaagaagttgaacaaggacaagaagctgatcaaaaagctcagcaaaagctacgacgctttccttgcctccgaatcactcatcaaacaaatccctcgtattcttggtcccggactgaacaaggctggcaagttcccaagtgtggtgtcacacaacgacatgctgaacgcaaaggtggatgaagtgaaggcgaccgtcaaattccaaatgaaaaaggtgctctgtctggcggttgcaattggtcatgttgagatgtcgcaggacgaactggtctcgaacatttcgctgggcgtcaacttcctcgtctcgttgctgaagaagaattggcaaaatgtgcgctcgttgaacatcaaatcgacgatgggccccgcggtgcgtctgttctgatcggttacgatttttgcgtccgtatctttttgatgtgtgacctgaccatccaccgatcggccactgttgttgattttgttaaatgcgaaaaatgaatattatttgtta

SEQ ID NO: 95147 - DNA, 487 bp, Heterodera glycines
gtttgagtcactttctttctaatgttggccaccgttcgctttcactccgtcactaacaatcgcattgattgttgtcaacaaactctgttttcgctggacgatagtgagaatttgccggggacggacttttccgttgggaaagcgaagtcaaaacttttgtcggatgggcggagagagcagcagaaaatggcgaagaaaacgaacggcggaaaaacggagggaattggcaaaacagcggcaggtggcagcagagggtccgactcccttctgacggacgaagtccaattggacggaggcgccgccgacggcgcgtcggacgacgaaagcggcgactttttgcccattgcattgggcacaaaatgtgccgccggtcacgcagaggaaaacggccgggcaaattgggcggccaattggcgactcagcggacgacggtgtctgaagagggcgtccgttgttttgggctgctgtttcccatgggccgttggct

SEQ ID NO: 95148 - DNA, 479 bp, Heterodera glycines
ctttttcataatttgttcgcagcccaaaaacgaaagagaaatgctaagggcacttttgtcgccggaaatcttcgtggaaattgtgaattgttaccaggaactgatggtggtcgaaggctgtcttcagattccctgctgcgtggagtttccaccgctcagaaaatttgtggctgccaatgcgattcgttctcggcaacttcggcaggaacatttggaacggaagtggcatttggagttggcccgtgatgcatgtgtctcaaaattggcactgtccgaattgtcttgggacgcgagcctttccttcaaaactgtgagggtttgcatggaaaaactacgacggattggcccggaaaagtctgcccaatttgctcgtcttagcattcacctttcgaacagtccgaaattatttgtgatgttcaacggtcgcctctcagtgcctatcgattgggtcaaagaactttaaatgcaactgataatta

SEQ ID NO: 95149 - DNA, 187 bp, Heterodera glycines
ctgaacccggcaataaaaaagagacgcggagaaacggggagaaaaatcggcgcctaagaaaatttgattgactttgtcttttttgacatggaattttgcacttttattatttttgctgttttttttttttgtctcttttgctgcagctgagtgtctaactgtcgcgtaaaaataaatttgcttaaac

SEQ ID NO: 95150 - DNA, 646 bp, Heterodera glycines
ccaaaatggttaaattttggttgacattatttttcgtttttaccggcaacaatttgtattcaatttttgcgcacaaaccaaacttttctcagtgtggcatttccgactttgagcccgacttggacaatgtgccaaatgtgaaaatcggcacaaaccatatatataaaggacaaccagtggaaaatgccaattcaatgccatggatggtcactttgctttcattacaaggattatgcactggaacaatcatcagccacaaatacattttaacagcttatcattgcgtttccggcataatttctgtcccaagttcaatccaaatttcttatggaacagtcaatgttgctaatgaaaagcataaaacaaatgcacgcaatattataatccatccaaatgcttctctctcggaaatgcgtgtcaaaataaatggaagcgaatttggaacagattctgtttcaaatgatttagcaataatcgaagttgaaaatgcacttaaattttcaccaaatgttgggccaatttgtttgttcggcctcgatgcatccggaaacgacaaatttggcacattttcaccattaattaattcccaatttattattgctggttggggcttaactcagccaatgtgccaaaaatatccaactcc

SEQ ID NO: 95151 - DNA, 689 bp, Heterodera glycines
atttaagcttttccttctcccccaattaattccgttcgctttctccgctttttctctccgatgacttccccctttcactccctcgtggagtctcagcgggaattctttcggacgggcaaaaccgccgaattggcacatcggaggcagcagctgaagaaactgcgcaagacaatcctcgacaacagcgaatttctctgcgaagccgtgcaaaaggacctgaaaagggacgcgaaactgaattatccgctcgaaatttcgtctgtgatcattgaaattgaatatgtactcgacaatttggagcgatggacggcgcctttaaatgtcgaaaagactttcaccacacttctcgactccccgcaaatcgttcgcgagccgaagggcgtcgttttgctcattggtccatggaattaccccctcaacactttgctaatgcctttggtcgacgttttagccgctgggaatactgccattttgaaaccgtccgaagtcgcgtcgaacaccgccgccgccgttgacgaaattatttcgaaggcatttgaccggaattatttggcagtggtgcagggcggcgttgaacagaccggcgaattggctgaaagaaaagttcgaccacattgtggttcaccgggtcagcgctggtcgcccgccacatttccagggcggccgcggaacatttgacgccctgcact

SEQ ID NO: 95152 - DNA, 257 bp, Heterodera glycines
caaacagcagcagcgacgcacctgctgcatttggccgtgcattcgcgctttgctggagggccaacaccaacagcaaaaacagccaaacccgcaactgcaggtcctaccgatgggaatgcagcaaatccaaggaagtggaggaatgtgatccttcagcagatggaagaaattcatccctatttgctttacacattgtaaaacagatcagctatttattattttataataatttaaaccgaataaaacgaaaatccgcg

SEQ ID NO: 95153 - DNA, 493 bp, Heterodera glycines
gtccatttaagtcaaggagtcatacatttaatgactcgatctcgaagtggcagtcgttgtggcgatgttgttcgttatgtgcttggacagaatacacatcagcagagttacaaccaacacatttacgatgacattgatgttttcctcgacttttcgcactgccgtccgagtgatcaggagcgtgccctcttctttgagttggaagcggtccttcagtttgcccagcgttccgccgattgtttggccatttacggcgctggtgctagtgccgaagttcgtgcagcactgcaaaattgtgatgatgctgacatacaaaatgcttcttttgccatcgtccgtcaattcgtccgtcgcattcgcaaatattttgaaacggcgcaacgaattgaaaaggtggtccctgagctgttgtgggagctctgttccggccctttgcctcccgttgagcagctcgactcggcccaggccctctgcaaacaactcgcccgactca

SEQ ID NO: 95154 - DNA, 599 bp, Heterodera glycines
gtaaaatatgcaagagactcacattgtcctgggcattggcacggtgtgctctctgttggcgatcatcgccaccgtcgtcactttgccatcgctgtactcggagatgaacgaaatgagcaccaaagtgcacgctggagttgaggctttccgcgtcaacaccgactcggcctggactgatctgatggacgtgcaagtggccgtgtcaccgccgtcgaagccccgtgccaaccccttcagctccatcttccgtgccaagcgtcaactgcccggccattgccaatgcggtccgctgcaacagccaagctgccccccgggcccacctggtccggccggagcgccaggtcaacccggtcagcccggaggcgcaggacagcccggacagccgggagcacctggacaacctgctgctccatgcgcgccccagcacatcccatgcccgcgctgcccggctggcccgcctggccgtcccggaggacagggaccgcccggacaacaaggagcccccggccaacctggttcacctgctccaggcggaggacagggaccgcctggcgcgcccggaccccaaggaccttctggacagcccggacgttctggag

SEQ ID NO: 95155 - DNA, 660 bp, Heterodera glycines
aagagactcacattgtcttgggcattggcacggtatgctctctgctggcgattatcgccaccgtagtcacactgccatcactgtactcggagatgaaccaactaagcaacaaagtgcgcgatggcgttgaagccttccgcgtgaacaccgactcggcctggactgatctgatggacgtgcaagtcgtcgtggcaccgccgtcaaaggcccgtgacaaccccttcagctccatcttccgtgccaagcgtcaattgcccggccattgccattgcggtcccccacaacggccaaactgccctcctggcccacctggtcctgccggaccgcctggccaacccgggcagccgggaagcgcaggactgcaaggacagccgggagcacctggccaacctgctcctccgtgcccgccccagaacatcccgtgcccactctgtccggctggcccacccggcagccccggaacacagggaccgcccggacagcaaggagcccctggccaacctggtgcgcccgctccgggcggaggacaaggaccgcctggcgcgtccggaccccaaggacaggcctgggcagccagggacgcagcggaacacccggccaacccggacagcctggaaataacgctgttatttataacaccattcctgggcccgaggggag

SEQ ID NO: 95156 - DNA, 762 bp, Heterodera glycines
tgagcgtaaaatatgcaagaaactcacattgttctcggcattgcctcgctgtgctctctgctggcgattatcgccaccgtagtcactctgccatcgctttactcggagatgaaccaactgaacaacaaagtgcgcgacggcgttgaagccttccgcgtcaacaccgactcggcttggactgacctgatggacgtgcaagtagtcgtggcaccaccgtcaaaggcccgtgacaacccattcaactccatcttccgtgccaagcgtcaattgcccggccattgccattgcggtcccccacaacggccaaactgccctcctggcccacctggtccgtccggaccgcctggccaacccggacagccgggaggcgcaggactgcccggacagccgggagcacctggacaacctgctcctccgtgcccgcctcagaacatcccgtgcccacgctgcccggctggcccacccggcagccccggaggacaaggaccgcccggacagcaaggagcccccggccagcctggtgcgcccgctccaggcggaggacaaggaccgcctggcgcgtccggaccccaaggacagcctggacagccaggacgcagcggaacacccggccaacccggacagcctggaaataacgctgttattttcaacaccattcctggcccgagtggagctcctggtgcgcctggccaaccgggaagtcccggcagtcaaggccaacccggacaggccggaggcgagggaccgcctgggcccactggt

SEQ ID NO: 95157 - DNA, 485 bp, Heterodera glycines
aattaaaaattttaaatactatttgtgttcgcttgtatgccaaattctgcttcaacaccgatggaagagtttgaggaaatggtcgctgttcttcagcttgatggcgtccttgactttgacgcggtgcgaagagcagtcagttctggtgcaatccgagtgcgcgaatgtgacgcggaaacgcccatggttcagattggatctcatttgtattctggacaatggtcacaaacgttaggcactgatatgcttttatgtccttcttcaatgtcggattaccatcaccatgaaggccatcagaggttggaattggtcgctgtgtcagacactcgtctctgtgcgcaaaaagttcttttagcaactgacgaaagtccgactaatggcaatggcactcggaatgaacaaagcacttcaaatagttcaaaggcataaagacaaagcatttgagcacttccagtttttttaaataaatattcacatatttggta

SEQ ID NO: 95158 - DNA, 615 bp, Heterodera glycines
ccaagtttgagaattatgaattttgtcgtccgtctttcatcaaaatcgcgtttcctccgacttttcccttcctcctactcgccattttcctccccattttcatcgtccccttccaccgcttcatcgagcgtttcttccacccctctgctcattatcacacaaagggcagcggaccaactccgtcgcatcgcccccccgggtgagcatttgcgcatttgtgtcgactcgggcggctgttccggtttcgagtacaaattgacgctcgacaagcgattggacgaggcggaggacgaagtgattaaagcgtcggagggagccatcgttgttgtggacaagttatcgcttcaatttttgcggggctcaaagcttgattttgctgaggatttgatgcggtccgcgttcagaataacggacaatcccctggccactttgggctgctcatgtggtgcaagttttgcaccgaaaaatcaaatcgaataagcaaaggacggaaacggggcttcgtttttatggtcattgcttttttacttttattattattttatttgtttcaatgtttttgtgtgcatttcactgccggtgtatttgtagggaataaaattcggatttaaaaaa

SEQ ID NO: 95159 - DNA, 1139 bp, Heterodera glycines
attaaaaataataattccaaaaatggcttcacgtgatgagattggccaaacggtgtgcgatttggtgggaaatacgccgatggtttacctgaacaaaatcaccgatggatgtgctgcaaaaattgcggtcaaggtggagtggatgaacccggccgggtccgttaaggaccgcattggcattgccatggttgaagaagcggaacgccagggcaaaatcaagccgggcatcaccacaatcattgaaccaaccagcggaaacactggaattgcacttgcttttgtggcggttgcgcgtggttatcgtttcattgccacaatgccatcgacaatgagcggagaaagacgcacacttttgcgtgctttcaatgccgagttggtgctcaccgatccggcactgggcatcaaaggctgcgtggagcgtgccgaacaattagctgccgccattcccaactcattcattccgatgcagttcgccaacgaagcaaaccccgaaatccattaccgcacaactgggcccgaaatttggcgtcaaactcagggcaaggttgacgcatgcgtttttggcataggcaccggcggaacgatcactgggtcaggccgttttctgcgtgagaagaacccagcaataaaattttatgcggttgaaccggtggaaagtccggttctcagtggaggcaagccaaatcctcacaaaattcaaggaatcggtgctggcattgtgccgcccattttggacacaaaaatgtacgaggaagtcgttttggtgcactcggacgaggccattgctatggccaaacgattggcacgcgaggagggccttttgagcggcatttcaagtggtgccaatgtggtggctgcgcttcgcgttgcgcaaaagccggaaatggccggcaaactgatcgtcaccgtgttgcccagctcgggcgagcgctatcttacttccgccctttactcggacattcgcgcagaaatggaagccatgtcgcatggtgaaacgctggaggacaatttgaagcgtcttcttaaagtggaggatgccaacagcaaacagtgatgaatttagcggaaatttttttaccggaattaaaatttaaaaaattaaaatttggctgtttgttttttttttgcctaaagctctg

SEQ ID NO: 95160 - DNA, 481 bp, Heterodera glycines
ctctcgtccccctcgttgttgtcctcctcctcctcctccgccgatgctgtcaaggagtaccgattggttctgttgggcacccaacacaaaaagccattgttcgaaaaaatgtgttcagcagcacaaaagtttgaacagcacattcaatacgcggacatttggtatttaacgtttcaattcaaagacagcgaagagccggttgtggtggaaataaccgacccaggcacagagaaaacgggcgaacgccaaatggccatccaacaaaaatcagacgcgatcattctctgctactccgctttcaatcccggctcatttctcgccttggagtccgtcacagaggactttcaaacattcaatggaaaaccgcccgccactctgctgctgtgcaacgaggaccaattggcggaggagggcttcgaggacggacacgaaacggacactgctgacgacggatacggcaccaactcgggcggagggtcgc

SEQ ID NO: 95161 - DNA, 420 bp, Heterodera glycines
agctaactcatcaaatattcccaatcaggaggtctcttgcctcgatgtattattccttgtcacagattgagaatcatctttttcttaacagtcgcgacctcaatccaaacatggcagcgggtgcttcgacttcacgaaacctcttaaatgttgcgtcagttgaaattgcagcgcagaacgaatgtttcaccgtttgggagccgctgcaacttcgtcaggaatggactatcagcaactttgccaaggcattggatttggctactcccggcatttgtatgcgaagcaagaatttccgtgatgagtcaatgccggaaatttgctggcaactttgcctttacccgggtgggaagcgcgaggagaacagtgggaatgtgtcgctgttcctcaaaatgtcaacgacgcagtcgcagcgcgagttca

SEQ ID NO: 95162 - DNA, 1269 bp, Heterodera glycines
cccagcccaaccccagaagtgaccttcaaagatcgttcagtgcatgagattcacttggagaatggctacacttatgttattgagcagaacttaaagcacttcgcctcggttatcaccgttttggccaagttcagtgagcaaattctgttgcaaccgaccgaagacggtttgatgctgtccgcctcttcctccgcgcggtcggcttacgcaaaagtgaaactgtgccgtcagttttttgaccggctgagggcacgcgaaaatttggggccggacggcgaagtgttctgtcggctggccacgaagagtttgatgcacattttcaaaagcgcggcccaatcgtccgtcggccccgtcccctcgtgctcacttgagttggacccccaatcggactttgcctacgtccatctccaatgtttgtccggcattcggcgctgttttgtgctgtcgttgcgtgagtatgccatggtctgtgacaatgtgttcaacgagcggcaacggctcaagaatcgggtgaccgcccacgccaaaatgctcgccactcttttgagtccgttggactgcagcgatctggaattggttgcgttggccgaccgattcaccgcctgccggtacatccctcgcgaggagtacggaaaagtcagacgaacggaggtgcaaattccggtggaccactgcgagcagtaccgcatcgaagtgcccacccgcgtggtggtcaacctgcgcgagttgcgccccatccttcagtttgccgacctttgtggcatgtccgtctcgctgcactttgaccgtgccggacgcccgctgattgttgcggtggaagagaatgtggactttgccgctgaatttgtgctcggcacccttgatgaacagttgccgctcaatgagcaacaacaacaaccgacgccgcagcagcaacaagaacagcaacccgtagtccaacaacgcgaagaacaaccgccacaacatcggcacaaccaaatgctgcggcaccattcgccggcccctgcggcagtcgcagaacgggtggaggaggaacacaacgaaacgccgccaaaccgtgaccaaatgttgatggtgcagcaggaggaggacgtccaactgtccatccgctcgacaccgattctcccgattgcagcgctgcggcaggaggaacacaacgaaacagcaccaaaccatggccaaatgtctatcggtcccacgcccattctcgcggtcgccgcaacggtgcagcagcagcaggaggcgcacaatgaaatttcacaaaatgat

SEQ ID NO: 95163 - DNA, 490 bp, Heterodera glycines
atttgaatttccttttcctttttcttgaaatgctcttctccctttcccatttctcccccatcgttcagtcgcttttcgcctctcttttcacttgggcagtgaccgccctcggcgccgccgttgtttttgtttttccgtcctcgaacagagttttcctcgatgctagcctcggcttctcttctggtgtcatgttggccgcttctttttggtctttgctttcgccggccatcgaaatttccgaaagacaaatggccaaattggcctttgtcccagtcgccgttggatttgcgttgggtgccttttttgtatatttatccgaccgattaacacaaaatttcaatggcagcgctctctccgatcagataaatcaattagagaattggcattcggccaatcagcaaaatggaattcatagtgaaaatgctccattcgattttgaaacagaccgacagaggagcgaaaatcccgaaaacgctggcgaattggccgc

SEQ ID NO: 95164 - DNA, 418 bp, Heterodera glycines
atcccaaaaattaaacttttttctccataatgctcgccaaccatcgccaacttttcctccattttctgttcgcaattgccatttttgtctttgtcattgcgccactgatggccgattcggagcacgaaatccacgctgatcagcaaagtgccataaatcccagagaaaaacgctggggcggcggatggggcggcggttggggacgcccgtggggttggggcggcggatggggccgtccttggggctggggcggcggatggagacgcccatggggcggctggggctggggacgatgagccgccgattccgtgccgtgttatgccatcatcagtcgtgccgtgtcagaaaaatgatttacgatttgaataatttttataattgatatgtgttgttcgagagataaacttttggctgataa

SEQ ID NO: 95165 - DNA, 561 bp, Heterodera glycines
ctccctcacccgcatcatcatcaccagcacaaatcgcacggcctctgggagctgaccagcttgaacttctcgtccacgcccgccgttgacaacgatgacaagcagcaccttgggggcaacaataatccggcattctattctcgctttacgcacgagaagcgcaatgccaaagcagcaaaagcggtttcggcgccaatgccggctaagcaaaacaacgatgccgagcagggcaaggtcaatgatgatggcattttcgctgtacaacaacaacattccgccgacgacaccaccgacgacggttgggaggaggatggcatttttgctcagtgccaaaaattgccgccgtaccaacagcaaaagtcgtcgttgctgctgacgccggccgccacgtcgtcttcctcggcaatggtggacagtgtgatcagttgccactcctcgttggcatcgacgtccgctttttctacgcagcaaaggtgctcaaacagtgccgaaatgctgacgagtggtgccggcggagtgatgttcgactcggccattgtcagcgacggcggcgcgccgtcc

SEQ ID NO: 95166 - DNA, 475 bp, Heterodera glycines
ccaagtttgagttttccaatggagcgttctttgtgcagtcggaacggtgcgggaaatgacagtgtggtgaatgtgagggatgacgaagtgcaggacgacgacgacgagttcttccacggcacggcatttgaaagtgacgaaggataggacggcatagggaaaaggcaaacgaaatactgtataatttgattaagcggttcgcggagaggacaaggagaaccgagggacgacggacacggcgaaatatggggttgactatgacgagatggacaaagggtctcaacagcggccacctccccacccttcggaccttccccagtcgacttcacttcgctacccgtcaaatctgtccaaaatcagcgaatcgcccgatgaattctctttttcgtttaaacgaggagaaaatgccatccaacagttcaatcgcgaccatgaggagttgcgtcgtcagaatcacctgcgcttgccctccgtt

SEQ ID NO: 95167 - DNA, 645 bp, Heterodera glycines
aggtttttaatcctttaaatggggcgtcgtctgcccaatgttttggttaccggaacgccggggaccggaaaatcgacgttggccaaaaaagttgcacaaaatgttggcatggagcatatcgacaccgcattgattataaaggaacgcgaattttatgcggaatacgacgcccaattggacacccacgtgctcaacgaggacgcactccttgaccatttggaagaacgctttggctctgacgcgggcggcctaattttggactatcactgtgccgaaatgttcccaaagcgatggttcgacctcgtcattgtcctccgttgtgccaccgactcgctgttcgatcggctgaccgaacggggctattcggagaggaaaagacgcgagaatttggaggccgaaattttcggcatcatcgcagaggaggcaaatgccagttatgacgagtcggtcgtgcacgagttggagaacagcacagccgaacaactggaggccaacgttcggacggtcaccaatttggtgggggcgcacaaacagagaaagtgaacgaaaaagagcaaaggcaaagcagcggatttgtgtcataaatttcaaagcattttttgttgcttctaattttattgcaatttttaaatttaacatccgaca

SEQ ID NO: 95168 - DNA, 1294 bp, Heterodera glycines
tgagaatttggggacgtgctgttattctcatttcccctatgattgcctctgaaaacaatcacttagaagcccaaaatggcaacagtcccgagggagaagaagagtcgaattgcggaggcagtgcttcgccttcgtctcttcgcgactgtcattctcgagcatcgaccaacgaacacaccaacatttctcatcactctcttcacgatgacaatgcaccaccttctccctccttggccaatatctcaacaaacattgaactccatccacacaacaatgcgcttggaggttcctcctctcataaattcatcaaaaggccattgaatgcttatatgatatggacaagacaggaaaggaagcgaattttaacggacgatcccaaaatgaagatgaacgaagtgagcaaagctattcagatgggcgaaaaatggaagaaaatgtcggacaaggaaaagaaaccttacttcgaaatggcaaaaaaattctctgaagaacacaaattggtgcttcaagaacaccctgaactgcaatatgcgccctccaaaaagaaggtggtgaagaaactggccgatggaaagcaattgtccgtggtcgattcttcgtccgtcaagtcgtgcaccataacacccgacgcgtcgagaagcacaacgccgcggggttcttcaaatctgatcacaccacaaccggtgtcacagagtcaaatgttttctccgtttcaatctccaactgtgcaacttgctcaggtccttcagggagtgcgttcggtgaccaaccaggctgccatctcttctaattcgcccatccaaaatccgttgcttggctcggcttcgacctttccgcaagcgttcctccaatcccattcgttacctcagcgtgtcgctaattcctccgtttctttgctcggaggaatgtctcagtcgggtaccacgccagttagtgctgctactcggaccacgcctggtcaaatgttggacctctactacacctcactttgccagcctgccttccccagcataaccgagaaccctgttaatcctcttggaatgtatccttcacactatttgttggagcagtacaaccagcatctttctcagcagcaacaacagcagggaaataacggaggcacatccaatgcatctgcaaatgggggtggacggttttagcaagtggatcaccgatcgatcactcatgcctaatcaacttgatcatcctcaacacatgtcattttgtgctatgctcctcccttcgcatccattcgaatctcctcttttcaatgttcctcttcaccccacccaat

SEQ ID NO: 95169 - DNA, 480 bp, Heterodera glycines
cactgtcgatggagatgaaaaacgtgcagtgcgaggagcatttaatgtgattgaccgttttatctctgtcgaggaatgttctacggataagttcgacgatgagtgtgccaaaaaagagggcgcactgacggatggacaaaaagacgtttcggactcactcgcctcggagtgtcaacaaattcgtcagaataagcgccaatttgcttcaaatgccgtccgacaatacatgaccggtgcgcgctgctctctattttttgcgtctccgatgattcgtccgtacaatgtgtataaaattgctgagcaaatggtcgaccaaagtcagaaggaaagtctcacccgtttcctggcacgggttatccccgtggaagagacgtgccatgctaatttggacgaaattaagacattgctgtcagaaatggtcgtcaaacatttgaagggagagaagaaggacactccgccaacttacgcagtcgaattcaa

SEQ ID NO: 95170 - DNA, 479 bp, Heterodera glycines
gtttttagaccagtctcagagtcagtaactgaatattaaaaatgaaagtggaaaagattaagacaaggagaggcaagaaatttcttgaggacagagcaccgaaattggtcgaaaatgacaaagtgacactttttgtgaagggaaagaaatgttcagtgatgctcaacaaaatacttggcgaactttaccaactgaagaagccattggccaatcgactgcaacggttaaattggcccttttttaatgattttctcacaaatttgacgcttctttatttgtcttcgggtccagcacaaagaaacggccgaattcattgctttttggcagaatgtacgaccatcaaatgttggatatggtcgaattgcaagtggagaattttgtctctagcgacgaatttaaacaagtcaaaagcgtaactttggggtcgaagccatgcatcattttgcaaggtcacctttttgagtctaacggaatacttc

SEQ ID NO: 95171 - DNA, 461 bp, Heterodera glycines
gtttgaggaaaaagtaataaaaagatgcttgttcgccaaaacaaaattatcgctgccgctgcccggggcgttttgttggtttccaaccgttcgacaacgcgtacgcctaccatgtgcgcaccgccaatgcgttgtccgagtgttcctaaacggttcggcatgttcttcttttgctgtgtgtccattttgggttatccgacttatgtgatgctgaaccttgacaatgtgcgtccgttcaagcagacgcacttcaacgacgagctcaatgagaagctggaggagcgccgtcgcttacgtgctgaaggcaaattgaacgttcttcaaaagaagctgtgagcacaaagatgtagaaaaggaatgacaattatagcggaagatgattaattttgctgacaaaacattgtcaaatttagtgctatgaaacatacgtgatcgtataaatttgtttttccatgtaaaaa

SEQ ID NO: 95172 - DNA, 431 bp, Heterodera glycines
gtttgaggcacattaaatgaaatttatggcctcgatggtgacgtcatttcctgtgtcattttttctgtttttttctacggctctaatccacggcacaatgggaggccttttctggtcgaaaaagccggcggattcagcggacgattcgctgtggagccgataccatgatcaaaatgcaatggaagagttgttggagaaggtgcacagcaaatgccccaatgtcactcgtctgtacagcgtcggccgatcagtccaaggccgcgatttggcggtcattgaattttccctccatcccggacggcatcaaatttgtaattcaatgtcgccatttgttagcagaggcctttcagaattacaaatgaccaatcaccgacaaattacctcgtgaaaaatcatagataaaagcatagataataaaaatctgagatcgg

SEQ ID NO: 95173 - DNA, 481 bp, Heterodera glycines
aaacgatgagtgagatgaatatcaattcttcgtctctaagttcttctatgctcgtccgcgacctcactctcaaaccggacgtatcaaaaccacgctgggatcagtcgacttatcaaggccgggcgcgacactttttcgctgtgttgaatcctcttaatttgtttacctccaatcaaggattggaagaaagtcgcaacattgtcttagattatcgaaaaggcattttttccccagaattaacagttgagcgtttatggaaggccaaacatctgtatgaatcagcttatcatccgatgtctgaccaaaaaatgttgccttttggtcgaatgtgcgcccaagtgccatgcaatatggttttgatcggtggcatgctcagtttttataagtctccgttggccgtcgttttttggcaatggaccaaccaatcattcaacgccgtcgtcaattacaccaatcggtctggtgactctgtgagcactga

SEQ ID NO: 95174 - DNA, 420 bp, Heterodera glycines
ccccgagcgggacaccaagatggacaccaccaatgccgaggtgatggacaccaagaaggaagccaacgcggcagctgcagcgccggtggcggcgtcggacaacacggcaccagccccaatgacatggatgatggacggcattgtgccacgcgatgtcaatgtgatggtggaccgtaccacgaaggagttgcgcaaaaccacggagacggacggcttctacgacatgagccagcgggcacaggaacgtgtgatgttggagacagccggcaaacagggcgaaattgtcaagacaaagctgaaggaagcaattgaggaggcccgaaaaatgatcgaacgtgctcttggcacagtgatttcctactcggaagcgccaatggagtccaaaatgcaattggaacaggtgttcatgacgctgacgga

SEQ ID NO: 95175 - DNA, 620 bp, Heterodera glycines
ttgagcactgtgtttaaataatttgaaaaaaaagttcgcatcaactaaaaaaccaaaaaataaaaaagtatttgtaacaatggcaatggctgatgttaagcccaaccatactttgtacatcaacaaatgaaaaagtgaagaaagaagagctaaagaaggcactgtacgcaattttctcacagtttggacaaatcatcgacattttggccttcaaacacttaaaaatgcgtggacagtcccatgtcattttcaaggagataaattcggccgccactgccctccgttccatgcagggcttccccttctacgacaagccgatgcgcatccaattctccagggaggactctgatgtgatctccaaagcgaaaggcacttttgtcgaacgtcccaagaagaacatcgccgtgccgaaaaagaagaaaaaacttgccgagggtccgaccaaaaagagcaaaacgtccggcaaagagggacaacagcgttcgaccgcaccgcccaacaaaattttgttcatcaccaatttaccaccggaatgtacggaggaaatgttacgcgttgttttccaacctttgcccggccttcgcgacattctccaagtgtccaaccgtacagacattgcc

SEQ ID NO: 95176 - DNA, 719 bp, Heterodera glycines
agttgtcgaagtgcattgtcctcgtggactacgccaggcagcgccaggaatggacgttcaacaaagtgagccaattgtcgacatcggtcgttgagttgcgcaacaaaatcgaaacggaggcaacgcgaacgcgaaagaacccgggggaagtgctgctgaagatcatccgcttctattcctccaagctgaacgttcttatgagcaaactgcgcgaccgcagttcggaggtgttgctttcttcttcgatgcagaaacaaattctgacattgactgcgtacgttcagcaattggatgacaattttgtgaaggcaaaggacatcgacgaggtcaaacaggaggtgctcgaagaagccaagcagaagctgttcgacatcgctcgttggtcggcttcgctgagccttcgcggtccaccgaagacttcgacggctgacgacgtggaaaatgaaaacctaagcagtaacatcgaaacggagccgaagcaggaggagaccaaaggggaagaggaggagacgctgcagcagtcgatgaaggaagatgaggaagaaaagggcgaagaggaggaggacgaggaagaagaagaggaggactaagcaaattaacacagtgacagcgaaaaagaacacttcgcctaatttgacatcctctaattcaaatgagttaacatataagacagttttgacgtcgtaataatttaattatgcaataaagggtacgacatt

SEQ ID NO: 95177 - DNA, 511 bp, Heterodera glycines
ctcgaatagtggatcccccgggctgcaggtaccaggcacgaggcaagtttgagatttagacaaacaatttcctaaaaatgttgagccgattttctaaaatcactgttcgtggctatgcaaaggatcttaagtttggttcggaagggaggaaagctatgctctccggtgttgacatgttagcggatgctgtcgctgttacgatgggtcccaagggaagaaacgtggtcatcgaacaatcctggggcagtccgaagattaccaaggacggtgtcactgttgcaaaggccattgacttcaaggacaaattccaaaacatgggcgccaaacttgttcaggacgtggcaaacaagacaaatgaggaagctggtgacggaacgacttgtgccactgtgttggcacgtgccatcgcaaaggaaggcttcgagaacatctccaaaggtgctaatccggtggaggtgcgcaagggactgatgaacgcagtggaccaattggtcaaggaactgaaggcaat

SEQ ID NO: 95178 - DNA, 788 bp, Heterodera glycines
gtttgagaaaatagttaaactatttgaatttatttctcttgcatatggcgacacccgcaacaatcaaaaaacttgaagaaaaaaagctgttggcacagcaacgtaagcaaatgcagcaaaaggacggcagcaacggaaacgcgggggcccaacttttgtcgctgagtgagcagtcggacgcgccttcctcccaccttttggtgcgcaccgaaccggtggagggagcaccgccacggcacatcgatttgcgaccattaagcggcaattattcgaatttccgtgagcgcagaggggaggatttctctaccgatgtgagtgctgaacgcccgtacggtttgtcgaattacaccaacttcgacgccaacagcggtcccacggcgtacgcatggccgccacagaattatcagccggcgtttgggcctccgccgccgctgcttacacagcaacaaaatatccttcagccactctctcgtccgtcaacattcaacacttatcgccgtccacgcaccgctgctaatttttcgggaaaactcaaaaaacagatatagttatcaaatggacagtttcggacggaattactcactgtcggatgacaccgctggagaggcaatgctcgacggattaaacatcaaccttttgtttaaagtaataaaaatggcgacgaaagcggtcgccaaattcgttgtgaccattttgaactgactggaatgagatgcgttttttgctgagctgtcctttcgaacgtttcatccgttgctttttgctgctcattttaagctgaatttggt

SEQ ID NO: 95179 - DNA, 160 bp, Heterodera glycines
  unsure (1)..(160): unsure at all n locations
gtttcgtctgtcctttctccttatgttgtccattttcctcacttccgtgcattgtattaagccttggctcgggcgtatatatttatttggatgagtcgacgccattccgccaaacttccctttgatgcttttttgtgaaatcggtaaaggtcgcttcngt

SEQ ID NO: 95180 - DNA, 694 bp, Heterodera glycines
tttgtcaatttttgacgagttccgtcgcatggatggtcgtcagattctgtatcaatttttaaatttcgccatgattgtcagttcggctctgatgatatggaaaggtcttatggttgtgacgggctctgagagtccaattgttgttgttctgtccggttccatggagcctgcgttttaccggggtgaccttttgatgctcaccaatgacttggacgacccaatcagagccggcgacataactgtgttcaaaattgaaggtcgtgacatcccaattgtgcacagagtaatcaaagtgcacgagaagaacgacgaagagaccaagtttctgaccaagggtgacaataacatggttgatgacagaggtctttatgcccccggccaatactggctgcaacgcaaagatgtggtcggtcgtgccaaaggatttgtcccatacgttggcatggtgactataatcatgaacgactatccgaaactcaagtacaccgttcttgcactacttggtctcttcgtgcttttgcatagagaatgaatggagaaattgattgcgaataagtgttgtttttttttaccgaggcttgatttgtttctcatctgtccattttcttttcggttcggttctatcatcttttttattgctttccttatttatgtataacttttcgctttaactaaatgattaaaacgttgttgc

SEQ ID NO: 95181 - DNA, 582 bp, Heterodera glycines
gtttgagccaaaatgaacaaattgtttggattgctaatgctttttgctgctttaatggctcatttcattgattgtcgcccgatccgatcatcaaaacgacttgtcaaagttggagtccaattggacaacagcgaaaaaactgcttcagcatcaggcaacacatacaaattggagttcaccaacctttcctacaaattggtgtgccaagtcaaattccgtattgaactgcctcagacggcaactttggacgagtattggaacattaatcccatcggtcctgctgatgaccacctgttcacattgcctgttgaacaaatgtacccgggccgttccttcaccagtgctcgcgtcaaactgaacggtgttggagagccgaaagttacgataatggatactgtggatgttctgagcacaaaaccgtgcccaacagtgccaaacttttaatttggtaaataagcaaaacgcgagacttcaacccatttacatgataattgaagtgaattaatgataatgttcaaccatttctttaataattgttcttttttatttgggtaaaatttgcataaaatttggttttattaa

SEQ ID NO: 95182 - DNA, 798 bp, Heterodera glycines
agatgttcggatgtcgcaaaatttattctattaaacaaatttagtagtttttcctccaacttcagtttcaaacaaattattcccattcgaaccattttcacaattcctttgcataatgcaaaatttgtttcccggcaaatttggtcaagccgcgcaagcggccaacacagcccaaatgcaaatgaaagcggagcatgaccctagcgcaggatttccgtggtgggttcgatttctcgccaagggccttggcatcgtcggtggttttgttgccatatttttcggagtccttgccctcttcaccatccatcccatgtgcatggtcgcagcgcttcttcaactcgccgctggttttttgaccattgcccttgaagcgcccttttgctgtgctttcgtcgatttcatcgaaagaattgctcaattttccgagtcgcgtgcgtattggcaaaaggcagcactttatggcgggatgggtatcgtccccattttgctgtgtgccgggactgagactattttgggtgccgggatgatatgcgcttcgggcgtcgcctacggttttatggcattgggaaagaaggctgaccgtactacgatgttaggcggtgctaataccgctggacaggacccggcatggagcccacaactgaaccagccatttccacgacctgccggtttctttcagccctaagtgattggagagaccgatgatggatcattttcttattccaattctctcattttgacacttacgtttgaaccctaaaaccctttcaaaagcccgctggaaaattgtgcattttt

SEQ ID NO: 95183 - DNA, 419 bp, Heterodera glycines
gcctcacaatgggccttcctcgaacagccgatccaccaacttctgcagtgtcccgctgactacggggcctccgaagcacaatttggacaaagccgtgccattgtcgtgggcggtgccgacagtgcgtttttgctgcagaaaactcggtttgacgacgactggaatggacccagcaccatgtccactttgctgcttgctcaatacttgcaacagtctgagggaccgctgtggaatgccgttcgtggcacggggctcgcctacggcgtcagtctgtacgttatgccggatcgcaaagcattgtcgttggacctgtaccggtgctctgagctgaccaaagcatacgaacagacacgggacacaaccctcgctgtgctcaatttggaccgacttgacacgaatttgctggagtctgccaagcg

SEQ ID NO: 95184 - DNA, 475 bp, Heterodera glycines
aaaagcgatggaaagtggccgtagcgacgaagtgctggcccggcttgaggctgttcggcgccgtgtgctcgccgcaccgatgaacgtccacttcggcggagatccgagtcaaattcggctcggcacatgttcatcttccgcttcgtcgccgccaatcacggacattgcctcacaatgggccttcctcgaacagccgatccaccaacttctgcagtgtcccgctgactacggggcctccgaagcacaatttggacaaagccgtgccattgtcgtgggcggtgccgacagtgcgtttttgctgcagaaaactcggtttgacgacgactggaatggacccagcaccatgtccactttgctgcttgctcaatacttgcaacagtctgagggaccgctgtggaatgccgttcgtggcccgggatatgcctacggcgtcagtctgtacgttatgccggatcgcaaagcattgtcgttggac

SEQ ID NO: 95185 - DNA, 404 bp, Heterodera glycines
tctgtctgttcttcgccaaactcattgctcttttgtcaccgccctttcatttttgcctcaacggtcgtgcgacgtcaaagatttaggccatatcggtgaaactatttcgcacaatttgccttcaaagcgctgttttttgccggggatttgcgccgattttcgttgtgcccttgtctctgtgagcgttgaccgaacaattcaggttcaccaatttcccttccccactcaaagttctttctccgccttccttttccgtctgtcaattctgacttctgttctctacgttcttttgtggactctttttgcataaataaccattggcattgatttgttgtgatctttgaatgtctctaaattttaaattgtgaatctgtgatacatacgaaataataaagttttttgtt

SEQ ID NO: 95186 - DNA, 460 bp, Heterodera glycines
gcaatttgcgcgttaattgaaagagcccagaattatgctggacactcgacgtcaatcgggcgcaattgaccaggctgaaatcctcataatttacggactgcgcattgaacatttgtattataagtattcttcgaatgaggtggaagatgaacagctgatggactcgttgtgcaaaattgtctatgcgataggcaacgcgccactcgcccgacagagggcaatgctttgtcaaatttaccaccacgcgctgcacgaccgatggcataaggcgaagaatttgctgctgatgtcgcatttgcaagcactggtggaccattcggatgccagcactcaagtcaatttccaagaaaagacaccgacccaaaaacaatcgaattaagattttgtacaatcgcacaatttgccaactcggactttgtgcttttcgtcatggatttgttcgtgaagcgcatcagaattt

SEQ ID NO: 95187 - DNA, 476 bp, Heterodera glycines
gctaatgctcgttggtcttgaccatttgcttcccgtccgtccggttggcctttgtctcattgaatattcgtccactctttcgccctccttcctttttgtacatttcattagcaatttctccaaaagttcctcttccgccggcacttccgatcatcacatcactttcgtttccctccatacgactttgggtcttttgagaatggtcatgggcaaaatggcccaacgattgaatttggacacctttcatttcgtttccgtctcggatttcctcggcgattcgcttctgttcgactgtgatcgacttttctcatggatcacgaaggaagtccttcgctccgttctccccgaccgcccccaactcgtcgtcctggacgaccttttcctttctcacccgtccattcgtcctgccaaactgctccaatttctgctcgctctctttgtccgtcttcccgaccgttccttcttcataatggcca

SEQ ID NO: 95188 - DNA, 792 bp, Heterodera glycines
ttgagatgcatttgttccatgccttccttcaccgttcactgctgatgaatttgccgccttcgtcctcttcttcccccgtcctgtttaatcggctgaccaatcgtcaaactttggctttttctgccattgtccgtcgtgtaactcgcggtttttctactcgtcaacgcaatctgtacaaagtgttgggcgtttctccttccgcctcacaaagcgacatcaaaaaagcgtattatacactgtccaaaaagtatcatccggatgtcacaggttccaacgaatcgtgcgcaaagaaatatttggaaatcaaagaggcttatgacgtattgcgtgatgaaaagcaacgagaagaacacgaccgatggttagcggccgaagaagttcagcggcaacgtccaattaacggacgacagccgtatgtacgcagacagaaagtgtacgacgatttgtggccaaacaatggaaccttttcggatgaggaaatacgaaggatttggcgcagtatgagtggcaacagcgaatttggacggtcgaattgggaatttgaaacggaggtgaagcgtaaacgacagatggcatatgaggaacagacgaggagaagaaatgagtgggcgaagaacgggttcggccaaaacaatggtcgaagtgattggactgaccaggaccaatacaaaatcattggcaaaattctcctctgttatgtgctcatcacttttttcatcgaaattttcagcgcttcccttggacttttccgagacccatttctgccgccatataacagagaagaagacatca

SEQ ID NO: 95189 - DNA, 524 bp, Heterodera glycines
gttccttttaaaccaattaattacagttgcacttgcacgttgcactttcttgatttcttcacaacaagaacatttcgcggtaaccaacgcgacttggccagggagcgcaatctgaagaaacagcaacagcaaaaaaagcaagagcagggcacgtccactgagaaacggatggaaagggacgcagaagcaatgcgcctaaaacagcagaaagctgcagcgaaaaaagccgaagaggaaaaggcaaatgcacaagcgccgaaggtggtgaaagtggaccctttgaagggactgtgacaagcgaaaagaaccactcggccaggggatgcacaaactgacgcttttccgtgctttatttagtccatttttcgaattcttttcagcaaaaaccataattaacaaaacttctgcccataaacaaaagcatcgcatttaagctatgtagttgaacgccttcatattctttcaaatgcttcatgtttttatatgtgtgttacgcttcaataaaggctatccgtttaaaaacc

SEQ ID NO: 95190 - DNA, 528 bp, Heterodera glycines
aaccaattaattacagttgcacttgcacgttgcactttcttgatttcttcacaacaagaacatttcgtataaaatgactcgcggtaaccaacgcgacttggccagggagcgcaatctgaagaaacagcaacagcaaaaaaagcaagagcagggcacgtgccactgagaaacggatggaaagggacgcagaagcaatgcgcctaaaacagcagaaagctgcagcgaaaaaagccgaagaggaaaaggcaaatgcacaagcgccgaaggtggtgaaagtggaccctttgaagggactgtgacaagcgaaaagaaccactcggccatgggatgcacaaactgacgcttttccgtgctttatttagtcaatttttcgaattcttttcagcaaaaaccataattaacaaaacttctgcccataacaaaagcatcgcatttaagctatgtagttgaacgccttcatattctttcaaatgcttcatgtttttatatgtgtgttacgcttcaataaaggctatccgtttaaaaaaa

SEQ ID NO: 95191 - DNA, 363 bp, Heterodera glycines
cgcatttggcatatgcttttgttcccccatcgccacccgcgcttccgtgagaattggcgctccttcctcggcctccagcgcaacagtcgccgctctctttggcgtcacattttactgccctcctcccacgccacgccctattcactgaacgcggcctcggcctttgacgaggagcagcagcgactggtgacagttaaaactgacattggaaacggacacagcacaacacagcaacaggaagggacgccgctgattgccgactctccccaaagttcgaccgaaacgaataattccgccgatgacaacattttaatgatttgatgattattacccttgtcctttcctcatcgattccttcatttt

SEQ ID NO: 95192 - DNA, 561 bp, Heterodera glycines
ttactccaattattaaatcctccgcgtcgctcaaattttggtcaaagttttttgatactcgattaaattggcattgtaggagaaattcgacagcgaaagttgtacccaaaaaagtgcttagagataattgctatcagagcacttcgttggactcgggtcttcgcattgccacgcttccggcgtatggacaatttacgacaattggcgttgcgatttatgctggttcacgaaatgaagtgcattaccctcccggcacagctcatttcctggagaaaatttcttttttgtcgtcacaacaattcccagacaaagcgcacactttggatttgttggagaaatttggcgctctgatcgactgtcagtccacgcgtgacactttcgtttacgccgcttcatgtcgcgttgagaatgccttcgacgtgttatcaatcattgcggacgcggttctgcggcccaacattttggacaatgagacagcctgagtgtgaacctttactcactgattggatacatcaggctgcttttcgctcgaatacgggcggtctttcccgccaatattac

SEQ ID NO: 95193 - DNA, 475 bp, Heterodera glycines
caattgtctttttggtctgttgcaatgcaatgccaaatttcccgtgctgcccgggaagtcagcaagtggttgctgtgatgtccaattacattggcactttcactagtgaggacaaatctacagtatgctcaaccgcaaaaaatactgtggatggaataaaaagtgaactgtcctctcgcggcggatgcccaagcggaggagaagcacaaattgtgaacgaaatcgaccgacagctgactaacattgcgaaaatgaagatcaattatgaggacgggtgcccgtacaatttgggctttgctcgtgccatgttcgacttggccgctgctgctgctggccatgcgggcaacggcacagaatggcaaacaatgaaaggacaatttgagcaggaaagccaagcaatcaaagcaattggccaagaaatgaacattgaagttactgatgtgcattttggacatccaagcaaaggattttccgc

SEQ ID NO: 95194 - DNA, 392 bp, Heterodera glycines
tcattaattaaattaaatatatttttgccatgtcttctctgctgctctccatcttcccaattgtgtttttggtctgttgcaatgcaatgccaaatttcccgtgctgcccgggcagtcagcaagtggttgctgtgatgtccaaatacattgacactttctcttctgctgctgactagtctacagtatgctcaaccgctaaaagtactgtggatggaataaaaaatgaactgtcctctcgcggcggatgccaaaacggaggagaagcgcagattgtggatggaatcgatcgacagctgaagaacattgcgaaaatggaaatcaattatgaggacgagtgcccgtacaatttgggctttgcccgtgccatgttcgacttggccgctgctgctgct

SEQ ID NO: 95195 - DNA, 704 bp, Heterodera glycines
acaaagccaaaattcacaacaatgagcatcattcgacgacaattcttcgccaccaaactgttctctccccaattggctagcaacaaaatggctgtgctcccagtgcgccattgcgtaagcgtcgccacgccaacacaaaatgatgtgccatacaatccgtcgcccaccaccgcgcaaactttggacaccttaggcattggcacgacggtgcagccaccggagccaaaatggcaaaaggccggactccgaattgagctaaactgtgccgacgagcaaatcttccagagcattgtccaagagatcgtcgatcggttcggctgggacaactccgcctatgactacgccatgtggcgaaaagcgtttgggcccaacaatttcggcatgttcttcgccctggacgaagaccgattgccgatggcgtccacaagcatggcggtgtacccaaaaattgcacattggagcatgtattacgtgaaggaacgctaccggggacaccaattgggccgtgcgctcactcgacgagccatggaaatggctggggacagacacattttcggttacggagttgctgaaatgtgggccaaatacgcggaggagtacggcatgtgccatttcttggactggcagctgtggtcactgcttgtcaaaagtgccgacgtgcgacccgagcggctggacaacgattcgagtgtggtgctgaagga

SEQ ID NO: 95196 - DNA, 913 bp, Heterodera glycines
ataaaataaatttggatgcatgagcgggtaaacacaaacattctttgtcaacagtaactcgtgaaaaatgggtaccactgcgtcctcccaacttgagaaagaactcagtgcggaccacgtattttcgaacgagcatttctatggtctcataaatttcggcaacacttgttatgcaaattcagtgatccaagctctgtatttttgcaaacagttcagagaaaaaattttggcgtacaaacaaacacacaaaaaatcagggatgcaacgcgataatttgctcacttgccttgccgatttgttctcaaacatttcgagtcagaagagaagggttggaacaattgctcccaaaagattcgtcacaaaattaaagcgagaaaatgaattgttcgacaactttatgcagcaagacgcacatgaattttttaattatttgttgaacgcaatttctgaagttttaatggaggagaaaaagaaggagcaattgggcggaagcctaaggaaagccaacagcgcaatggcaccaaacaaacggtcgttttccgcgaatgcaaaaggccaacccaacgatttgtccgcaaagcaattgaccagcacttctgacatcactggtcaacaggagttgacgtggattcaagaagttttccaaggaacgcttacgaacgaaacgaaatgtctgaactgtgagacaatcagcagcaaagacgaggactttttggatttgagtgtggacattgagcagaatgtttccattagccattgtctgcgcaatttttccaacatggaaacactgtcgggtgaccagaaatatttgtgcgaaacatgcggcagtaagcatgaagcccagaaaaggatgcgcattcgcaaattgccccaactgctcgcccctcatctgaaaaggttcaaatacgttgag

SEQ ID NO: 95197 - DNA, 284 bp, Heterodera glycines
gagaaggagtcaagacagaacgaaacgggaatgttggtagttttcgagcagatgaaagtgatcacagcgatgatgaggcgacgtggaacggaaattcgactcagcagttgtgaattctgtgacggtgttgttattgagagatcaaagacaggatgataaatatgatatttatttttgttacagaaacgcgggctctagtgcactttatgagtccaatcaattgaaaatactcggtttttatacaataactttgtacatgttcgaacaaaccctatctttttggt

SEQ ID NO: 95198 - DNA, 161 bp, Heterodera glycines
ctttattattctgctttgttaaggaaaaacgtcgcatgagccctatgatgccaaatttacttcgatgaagtacttcatttcaaggaaacttgtttttcctctagttcatcagtggacttccgcatatttaatcacgcttcattctactttttctgaaaatt

SEQ ID NO: 95199 - DNA, 488 bp, Heterodera glycines
atttcgagcttttaccaaaaaaatggcatcggagaacgaaattccggataaattcttagggaaattcaaattggaaaagaatgagaagttcgacgagtatttggccagcaaaggagtttcgtggattttaagaaaaatgatttgttttacgacggtcacaaaaatttcgaaaaatcagaagcggaaaagagcaaatacaacgcgtacaaccaaagttcgaaacataacacaaattgggagggatggaaaatcggagaaactttcgaaggcattgggttggacggcaaacagcacaaaataaccttcgatttgagcgacaacggcgacacactgacggagaagcatttgcgcatggacaatccttcggacgtgggcgaagtgtaccgttactcggtggacacagacagcggacatttgattctgactctctccaacgaatcactcactgcccgccgtttcttcaaacgaatccaatagaatttgacttg

SEQ ID NO: 95200 - DNA, 66 bp, Heterodera glycines
aaagggcagttgctgctgttgctcccgcaccaaatgctaacgcagcctcggctcaaacaacccaac

SEQ ID NO: 95201 - DNA, 493 bp, Heterodera glycines
ctatggtccgtatttccgttgatgttgtcaatgatgcgtaccagtttataaatccgtgtaagcagcgcgaaatttcccttcggaatctgcaaattcctaccattgaaaatctcggagttaccagggatcaatttgatgtcattgatttgactgacaataatattcgaaaattggacaatttgccgagattgaaacgtttggaaactctgcttttgcacaacaatcgtgtcgactttatttcaaaggaaatcggagatcaattgacgaaattgtccacccttgtgttgactaacaataacctggcacaacttggtgatattgacgttttggcctcctgccctcgtttggaatatttgagtctccaagggaaccctttgacccatttgcccaaatatcgtcagtacgtcatttataaactgaagaatgttcgggtcctcgattataaacgcattcgccttgcggaacgccaagcagcgaagaaactctttaaagg

SEQ ID NO: 95202 - DNA, 186 bp, Heterodera glycines
tgacaatcgcgccggacctgacccacacaattacgcgcttcccgccggcctgatcacgagaaggactgaactcacgaactgaaccgaaggatggttgaactgcctgaacgatgcgcgttgagaaatcggatcatctgattttttgtatgtaaaccccatttcacatgatgaactctctcaaactgt

SEQ ID NO: 95203 - DNA, 733 bp, Heterodera glycines
attaatttccggcatctatttctaccaatcaccgagccccagacccgaattcgaacaaaaattcgaaaagtcaaattttatgaattttgagttttatatcaattaaagattaatttccggcatttatttctaccaatcaccgaaccccagacccgaattcgaacaaaaattcgaaaagtcaaattacacacacacttattgtgctttactaattgtatgtactttgtctaatattcctttggtaatttatttaattaaaaatatattttattgaaaatatttttctattaaatttaatttctcataatttagaaattgccagtcgtggagatttgattgcattactcaaaacctaacgatacgatgtgtttttcaagagaaaaaatggcaccaagaatgccgttaacggctgtcggtggaataccaaaaagcaatgcaattggtctctgtttgatttgcaaggaactttcttttggcaaacactacggttgtataagttgccttggttgtaaaactttctttcgtcgtgctgttatgcacaaccaggacactgtgtgcaaaaagccaggcttttgtgagttcgaagtgtcggctcgtcgactttgtcgttcgtgtcgatttcgtgtctcgacgatgggaatgagtcacagaagcactccaaccaaagcgtgatttgatcggccggcagagacgtcgacgctaccaagcagttgcatcttcggtcacccctccc

SEQ ID NO: 95204 - DNA, 505 bp, Heterodera glycines
cgaacattaattggcaattaattaagtcgttttgtttttaaatgacattagaaggcgaaagaggtggattagatgcacttttgactgctcggttggatgaggatgagcaattcattgcgacaataaattacctgaacgacaatttgcgtttggatgccgaaacgacggagcaaaaactcagaatggtattggaggaccgggagctggagctgaaccaacagtacttggaacagcttgaaaagatgaatgaccgcgtgcagggatttgtacagcaaattcggtcgatgaattcgatttgctgcgaactcactgaacgcattcaaacgaacaaggaaaagacgcgcgagttgctgaagagaacagccgttctgcagacggaaaagcgcgaattgggtgccaagaatgcatttttggacgaatttttcgccaaatattccctaaacgaagaggaggagacggcattggcactacccaatcagcaggggtcgccttccgacgcattttt

SEQ ID NO: 95205 - DNA, 504 bp, Heterodera glycines
gggctgcaggcttccgcgagcggctgacccaccacttttacgcgcagtatttggacgggttcaccttctacaaaatgaccaatttggacaatcgaattgccaacgcggaccaactgctgacgcaggacgtggaccgcttctgcgagggcattgtcgagctgtactccaacctgtccaaacccttcgtcgatgttttgctttacgtcagtcgcatcggcgcttccatcggttggcaggcgcccattcagctgttcgtctatttgctcttctccggcacggcactcacttatctgcggaggcccattggccgtatgacagtgatggaacaacaattggagggcgactaccgtttcgtcaactcgcgactgattgtcaacagtgaagagattgcattttatcagggcaatgagcgcgaacgcgtttctgtgctgaacgccttccaacggatgatttcccatctccgttcgctgattttgttccgcttttccatcgctttcatggaca

SEQ ID NO: 95206 - DNA, 870 bp, Heterodera glycines
  unsure (1)..(870): unsure at all n locations
attttgttcgccatttttgcagtcaaaacatcaccaaaccgacaacaaaatgtgacgagcaagaaaattcttccgccccctcctgttcttcttcgtctgctgcccttgtccatgtgcaaaaccgtggccaatggccggtggaagtgttggccaaatttttggccgattgttttgtgctcggcgactttgtctcggaatatttaataaacgcagttgctggacgaagtttggccgcacatgaatcgaatgcggtgggaggacgaacattgggacggacaaatccaacgctaccgggagagggaacaaatgctggaaaattggcttcccgaaaaccaagcactgatccgacgcatttggcacacttcgtttcccgccccatttgagccgtcgccgtacgtacacattctcgacctgcaccaggacggattcatcagcccacatttggacaagtcgaggtattgcggccgggtgatctccggtctgtcccttctgtccgcttctgtgatgcgaatgcggcacaaaagtgccgagttggggcagctgtgcgtggccgatttgttgctcagccggctcagtctttactggctcagcgggtcggcacgctacgacttcactcatgcgctgttgggggccgaagagagtcgctttggcacccaaacggtgccaagggagcgacgcattgcgctcatttgccgggaagtggtggtgccaacggcgaaaagtgaccaaatcgactgacaaaacgaatcaatgaatgggcgagagcccaaattttgcttatttattaatttttttttgtgtgtgttatttaattttattcgntttttgtgatcttttttttgcatagaatgaaaaattatgatgaatgtt

SEQ ID NO: 95207 - DNA, 943 bp, Heterodera glycines
aagtttgagcgtgaatttgtctactcaaaatgtcgccaaacacactttgtagcattgtttgcctgcttttggtctgcaacttcatctgggctgatgatgaacacagaagcttcgcagaggaattagtgagacgcctgcgacgttcccatggttactcagttggttatggaggcaattgtgcatgttcttcctccgcctacccggcgaccgcttcacacacttcatacacggcacctaaacaaaccagttactcatcttactcttgctccggttccggctgtggtcatcaagcctaccagccaccccaaaaaaccagctaccattggtgcactgggactgcctgcaacaaagcgcaggctgttgctcatccagttccggtgagcagcaacagttacaagtcttcctgcacaacttgtggctcaagtagtcaccagcaacattactcaaccgtcacagaaacgaaaacagtgtaccctgtgaagacgtactcatggtgcacgggtactgcttgcggtgctcaggctcaacccgttcaacccgttgccccggcagcaagtggtggtggcaccagtattagcaccggcagttcgtgcagcagcggaacatgcggacaacaaaaacaacaggttcaacctgttgcccctgtccaaccggctgccccggctagcaccagctcgtgcagtggtggcagttcatgcggtgccgcggcacaagaggttcagcccgctgctgaaagcagcagcggtagctcaagcagtggtggctacgacacacaggagactcaaccgagcggcagcgatagcagcagcggtgcgtgcagtggagcttcttgcggagaagcggctcagcctggcgccagcagcagctcctcatgcagtggtgcatcatgcggacaagcggctcagcctgccgccagcagcagctcctcatgcagcggcggcgc

SEQ ID NO: 95208 - DNA, 324 bp, Heterodera glycines
ggaaaattttggaaatagcggacaaagagaaaatttcaggccttttgcgcattgtcgagtcttttatcattgattccgaatgcatccacccaattaggaagcttgaatatgcagcagaatatcggatgagccgactcgctgacacagtgcttcgattatttcctactcaaattgaccggctcgattcattattcttatatttagcagaaaatggagagacattggccgatgttcacttggatgtacttaaaatgcttgacattcatgattcatacattgttatgtaaaacaaattcttgctcttgacaagattttatctcttat

SEQ ID NO: 95209 - DNA, 862 bp, Heterodera glycines
gctcaccttctctttcttaaaaaaacatcaagaaatcgacaaaaaaattcgttctctgtgtacaaaacgcatacgtctctttatttcaattaatttgcttataagcaaagtttcctaaaatctgataactgaattgtcgttgctccgcatttgacaaaaaagaaaatgactctccagtggaccgtggttgcgttcatcctttacgcagaaatagccacaattattgtgcttcttttgccatgggttcggccgacaatgtggaaaaaagtgtttaacagtcgcgttgtgcacaaactcaaacagttttccaatgtttacgcctacgctttcatttttgtgctcattcttttgttcgttgatgccacccgtgaggtgcgtaagtacagccacgtggacacgactagagagatggtgggacgagtggccgaggcggacgccgtcgttcacatgcgtctcttcagagctcagcgaaacctttatttgagtggtttttctctgcttatggcactgattatcagtcgcatcgtcactttgctcgcccgttgtgcccacctcgaattggctgctgaggcggcgatgaaacaggcggaaggggcgggcaaagcggcgcaaactctgctcggaaaagagggcgatgtgaatagtctgtccggcgaagaagcgaaaaaattgcgaaaccgaattggaaagaattgggagcgaagtttgaagaaaagcgggagacgggacagagacgcaatgaaagcgcaggcggagaatttgcaggaggaatacgaacgcgtgtcgcaacagttacggaccgcagaggcttcgcacaatggtaacaaaaagagtgattgaagacgaacgatcgcacaaagaa

SEQ ID NO: 95210 - DNA, 440 bp, Heterodera glycines
agaaagcgaagagttaattgccaattaaattcaaatggcataattggcattgacggcgcgtgaacagtaaaatgaattggtatcagacggaagaaatggtggcacggcccatcgctggtggccacctccttgaaaatattgacccaaccaaagtccgcttgttcgttaaaatctttgcaacgcaattgcgtcggcagcccatcttttctcggaatgtgcaaccatttggacagaacttggccagccgttgcatttggcccatcaaaatcaccaaacgcatcgggcaacagaccaaatgaatcgattgaactcaactgattgacatcagtagaattgtcggtgaaatgagacgaagtccactcttgtagtagttttttcacggtgttcagtatttgcttcgttttcactgttgttgttgcacataaacccgcgtttacgcc

SEQ ID NO: 95211 - DNA, 518 bp, Heterodera glycines
aaaagctggagctccccgcggtggcggccgctctccaactagtggatcccccgggctgcaggaattcggcacgagggtttgagagaaagcgaagagttaattgccaattaaattcaaatggtataattggcattgacggcgcgtgaacagtaaaatgaattggtatcagacggaagaaatggtggcacggcccatccctggtggccacctccttgaaaatattgacccaaccaaagtccgcttgttcgttaaaatctttgcaacgcaattgcttcggcagcccatcttttctcgggatgtgcaaccatttggacagaacttggccagccgttgcatttggcccatcaaaatcaccaaacgcatcgggcaacagaccaaatgaatcgattgaactcaactgattgagatcagtagaattgtcggtgaaatgagacgaagtccactcttatagtagttttgttcacggtgttcagaatttgcttcgttttcactgttgttgttgcacataaacccgcgtt

SEQ ID NO: 95212 - DNA, 504 bp, Heterodera glycines
caaggcgcttcgccgtcagttgcccgtcactcgctccaagctgaactggctgaacttccactccttccgcatcactcaacaggacatgaaacagccgccgacgcccaccgtcgctgtccaacaacagtcccagtgaaaaacaacaaatgaacggactgacggacggatgaatgacaccgcaactaattggagagagacactttcgcgtcctcaccactcattttaattggtgtactaaatcataatctgcttgtgtctgtttcatctccttcttcatttgtccgtgtgctttttcgttttgtgcccttcgtgaacattcgccatccaaaaattaagaatttggcgctatctcacaccacctctccgactgatcagtgatcagctttgtcattccctgctgctcgtattgactcatctccgccgtttgcgattgatttttgatggattttccctttcttttctgtttgtaaaacataccctcccccactcttcagcataaattat

SEQ ID NO: 95213 - DNA, 554 bp, Heterodera glycines
cttcgaactagtggatcccccgggctgcattaccccggcacgagggagatttgttacaaacgcttggaacttgcagtgagaacaacaattgcaacaatttttggccttgagccaacacaccatcagttattctgttcaacacttagtacgaccaaagaagacccctttcaattgcatgtgaacatggccgagaaaaggaagcttctgaacgaaattgataaatgttataaaaagatcgacgaaggctttgaaattttcgatgacatcatggagaaaatgaacgaagcaaacagcgacaatcaacgagagaaattccaggacgacctgaaaaaggagataaagaagctccaaaggttaagggatcagatcaaaggatggcaaaactcttcggagatcaaggacaaggactctctgtcaaagtttcgaaaactgattgaacaaaggatggaaatattcaaggacgtggagagagaaaataagacgaagccgcacagcaaacagggactgtcagcggaggacaagttggacccgagggagaaggaaaagtgcgagac

SEQ ID NO: 95214 - DNA, 1073 bp, Heterodera glycines
gaacatttacagtcaattggacccatcacaacggaagggactcgacattgatggtcactcatacggagttcatttttactcgctgcccggaatgtcgtctttgacctcattcgactggcacccgaccatcagtgatcggttggcacttttacctgtccaagaaaagccaatggcttttgcacattcgattgcctccacgaaacgaattgccataattaaacttcgtgatgacgtcaattccgtcatcggtccttccggtgacttttgcatttcggcggggccgcagctgaactttgaaaacggcgagaaattgttggccaaacccaactgcacttctgacatagacactgaaacactgttcaaacgacgggtgctcgccggctacggctacggaaattcactgaacgcattggcaacactgctcgaatattcgaagaaggccattgagagggaccaattcgcttcggatgatttacgcttttgctgggattggctttggatgcaattccaatcggcagatgctaacgaaattaagaagaattacggaaccatgttcgctggcgttaaacacattttgaaaggcacaaagtccaattcgaccatcaaacaggacgaaattacttacagaaaccgaatttttgtcaacgaaaaacgactcaaaattttgcgtatgtgcaattggcccaactgcgccgtgagggacgagtgcaaggcgcggtttgacgaaatcgcggctcaaaacggagtcttcggtatcactcgcgcggcggcgttggcacttttttcagtgcatggaatgctcagcaaagagtatttgactcatttgagcgagttcactcattcgcgcgaatttgccgaaacatggtgccgttccccctcctttgtgaccaattatcaacgaatggccgatacggtgctgaacattttgcagaagtacgacggagttcgggtaccgaactatgaaagtgtgtgcgagggactgacaggggacgattatttgctggcaattgttaagttcctcgccagacgtgacaaaatttacaatcggatttacaacgaaatcttcgaaagta

SEQ ID NO: 95215 - DNA, 604 bp, Heterodera glycines
agggcgtgtttcactgctgctttttctgttccgtcgcaaaaggggcgatattcccgcggagaattaatcgagaaaatccgcacaacgccacgcgaccaatggacagaagcaaaacgaacaaagggagaagagaaaggcaatcgctggcagacatttcccaagaagtgatcagccaaatcctccgtctgtttcccttctcttcttcttccctccgcgttcacttctctccattctcttcgtccctgcttttccgtgctaagtctacttcatctgtccaacagctcaaaaagcaacaaaatatcccctcacaatcactttgtcgcgctgtgatcaatgacaatgcgaatgtacaaataatggaccgaattcgccgtgtcgcctcgaatttgtcgctaactgcgaagggacaaagagaacggcgacaaaatttggcattactttggggaagaggagaagcgaagaaagcgaaaaatggagaacaaaaggaaaggacgaaggaggagggggcattgagcaaattgtgtaagatgtccgtcgacacaatggcaatcactgcgcttccgctcgactgttggcttaaggaacggctcaaaaattgggtcca

SEQ ID NO: 95216 - DNA, 635 bp, Heterodera glycines
gtttgagactgtttggctcgaaattcataccattttttcatacgattctcatgagcagtggtatcattgaatttgctgtggccaggggattgcacgtcaaatgcagagaaacggcagtgccatatttgcgcagttccattcgccgttttcccgttgatgaacaacgcgtgccatggaatgtgcctcttgtggactattctccgtgcgattacaccgctgattcggtgcacggaaagccatgggtttttccatcggagccgtcaagatgtaaattcaattcgatggacgacggggtgaacagagtttcgtttcacggcagttacaatttggacaccgatgggaggcctctaaaccctttcggacggacggggctcagaggcaggggactgtttggccgctggggtccaaaccacgcggcggatgccattgtgtcacgacggctggcgaatggccaattgcaatttgtggctattgaacggcgtgacactggcgaactcgcactgcccggtggaatgttgaacaaaggcgaaccgccgactgaagccgccgtccgggagtttagtgaagaagcaatgggagggcatcgacgggaggacaaattgggacatttttggaaaaaggggaaaactgtgtac

SEQ ID NO: 95217 - DNA, 470 bp, Heterodera glycines
  unsure (1)..(470): unsure at all n locations
aagttttctaaaaatggaatttgttctaattgttcgtttgcctaacgacctgaagtacataaccgtccggccatcgagtaccattgcgtttgttaggggaatgacagcatcactgatgggtactgcaacggaaaatgtgcgtctccttcttgatgggatgcctatgcatgatgggcgaactgttgagcactacggattgacttcagacagccgagtcttcgccgagctgatcaacaagggaacggacggagcaggcagctcagcagggaagaccggaaagccaccggccggacgatgatgtgcgcccgtcaaattcgaaattgtcgcatgaggcgttatggggggcaaacgaatggacgagcacagaaaaccaaccgacaaattcttttttcatttgttatttttaatttgttgatccgtttcgtgttaaagaaaaattagttgacaatgcgtaaagtgaaccngaaaaa

SEQ ID NO: 95218 - DNA, 529 bp, Heterodera glycines
ggaacccctcgccaattgagtgcgttttttggcattgccatggcttttcccctcctccccttcttttttctgtttccgcttgccctcgtccctctccaaaggacagctgcggttcatccaccgctgttcaaccgaattgtccccaccagcgaacggacagtgaatctgactttgacgcgggattttggcgaggcaaaagcggggaacgatgaaagcgcaaataattcaaatttgaccgcatcaccggtggaggcgaaaattcatcgactgaaagagctgagaaacgaaatgcgtgcattgacggcgatgatcaaagaagaacgacgacgaagcaaatccaaagacattcggcaccggcaccgatcaatcgcggagaaaatgcgcaccgaaatcagcagacaatttcgaaaatggcgcaaaaaagtgctaagcaaaattcacttggttatgcaacgattggaccaattggagggcgaaatgcacaggacaaaggataatttgcaaaaagtgatgcacgacaacggccggg

SEQ ID NO: 95219 - DNA, 475 bp, Heterodera glycines
aaaagaccaaaaatgttttatcgacgaatattcgctttattcttgtgcattttcgtcattctcttcacattacaatttctccccgtcatcgatggcatgcaatttgatgtggtccaatgtggccattcaaaacggtgcgaattcggcggttgtgcgccaggcaaagcgcaaaacgcggcatcatgtgcctatttgttctcaatggagccggaggggccggacagtgttcgaatggaaatgtacactttacgcaacgtgccggacgtcaaatatgtggcagttgcattctccgatgacacacaaatgggtgacgatgcggtaacatactgtgttttgactggcaacggacgggtggaggcgcgcctttcggtgaacccggccaacacaaagaacaatgtgccggcgcctgcgggggcggagaatggctttctcgagctgttggaaggaaaagcggatgacaacggcatttactgta

SEQ ID NO: 95220 - DNA, 506 bp, Heterodera glycines
agttcccggatgagcctggtttttttgttcggataggttggccagatacgaacagtccatgctaattgagacgggacatatgtacgcccaggcagcgcgcaacaactctgaggcggcgcgcaacaattctgtgacggcgcaagagagtgtccgtgctatggtgaacaaggaccgtttggtggcagacaaggaattactattggcacaacaaaagatagaactggacgaaaaggaccgcttaatcgcgacgctgagggacaccatccagaacaaggaccagaggatcgtttacttggaaggttatatcaacggacttggtgttccattgcccgcgccggcagaacagcagcagcaggacggcggcggccaatgagagagagaggcctctgacagaatccgactgaccagaagaaaaaaattcgcggacttttctttgatgtggaatgttttgttttgtttttttgatgctttgcgcctaaaaaataaacatggcttctgacaaaaaa

SEQ ID NO: 95221 - DNA, 467 bp, Heterodera glycines
tgagatttttcggacgaatgcgcacttcgaattcgcagcggcgaggaaaagccgcagagggaaacgcacgcgacggccattccgttgccatcggcggccaatttattccttttggtgaagaaaatcatcaccgaatcaaccaaattgttcgctgacccaaatgcggtgctcagcaaattggtggagctgttccgtcagtgccttcgtcagttcgcccacgggtgcctttccgcctttttgccccaggcccttcccggcgtttcgccgggggcgggcggaataatcggcgcctccacctccattctgcagaatttgatgcgcgacgacagcgtcgtccgactcgacgccgaccaaaccttttttacgtgttgtgtcctcgccaccgccgattggagtgcggagacgaccatgcaattgcaggacaaactgaggcaaaagatagcggacggcgacttcggtcaggagac

SEQ ID NO: 95222 - DNA, 961 bp, Heterodera glycines
ctcaaaacgaaggatcactaaagagaattcttttttaatcattctcgaaaatgccaccgacttgggccttagtgccgcttttgcttctgttctttgtccatttcattgatgtcggattcgctcgtcgctacaaagcgtcaacaaaatacaatccgccggcggaagaaacgacgacagaaacgacagaattgacaaccccaacggaatgccctgcgccggtgtgcccatgcgaatgtcccaccgaagaaacgtctgaaacgcctccttcgacgggcgggggagggggcactgacgacgacatcgtgacctcgccggaaggagaggagacgaccacgcccgtctccgggtgtgttccgggcccgccggggcctcccggcccaccgggcccagcggggcaaaaggggccccagggaaaatgcggcgacaatgcgagcaaacgcaaaagggaagcagcagcagtgccgaaagagtttatgacgaatttggaaccgaatgtgccagtcaaacgtgcaaaagaaggagaagccgttgcaaagacgcattttgcacgtggccatgtcaaggggggctgtccaccgggtcccccgggggagcctggcactcccagggcctccgggccctcccggagacccggcgccatgcccgaagcacatgaaaagcgaagcgcaaagcgtcgatggcaaacaactggctaacagaaacaaacgtggggagacggtgctgaatgctgcaaaggaggggaccgaagtgaaacgccaaattgtgcgccatggcattggaccgcccggccccgccggaccgccgggagaagcgggcgaagacggagagccgggcccttgcgaatgttacaaagaccaaaaaagtcaatgaacgaacgcaatttatgcgaatagcacacgaaataaaactagcaaatttaatgttttttaaatttattttggtgaaaaaattttttattgct

SEQ ID NO: 95223 - DNA, 691 bp, Heterodera glycines
cctcgtccgaattcggcacgagggtaaatctttgttttgttaaaaatgctttctctcgcaattcgacgtttcatcgtccaacattcaaatggcacatttatgagcactaattttgtcgcgacatcgtcaaactttttgctgatggaccaagaaaatgacaaagagacgaagaaggactttaggaaaattgtgaaactgctcgaacgaagtccgactcagaaaagaaagaaagagcaggaaaaagcggaagaaaatgcgaaaagagacaaaagagaagagaacggaagggaggaggaaaggaccaattggaaggagcacatcagcaaaagtctgcacaaaagttacgacgaatacgcgacgaggaaaagcatggaaagttggaagaggagggcccgaagggacacattttgctatatgagagaccggaacttgcccgacttggtcacttacacccatcggtacatcgaaggcctaaccgaactgaacgggaaaaacaatcagaggtccttcgaggacaacgagttggttgttgttgtgttgaaatttgtgatgaacgaattgctcaaagggaataatgtccaatcggcgcggaacgaacgcatagaaaaaaccgaaatgattctaatcgtcatcaattcggaatattaattgtttctttccttgtttttagtgattaaaaggatcaattatc

SEQ ID NO: 95224 - DNA, 459 bp, Heterodera glycines
gtccaattaaggttcggttaaattacgtgctgggaagaggtggaaagagcgttggacgaattgattgagcaacgccgccagcggggcgtactgcccgaggtaaccgaatgggtaccgcccgctggcggaggaaggaggagagggaggaggtggaggggaagtcgacaacttcgtggaagtgctctgttggtttgtcgtgggagattggacggggcagtctcaccggatacatcatccgcagttctttcgttgacccgttttacaaaaaatgcaaagccaggagaggaaggagaccactttagtggcctggtcaacggaaagctgaccaaacatggccaccggcggataaacaaattgatcgaacgcaagaaacaatggacgcaaaattcatgatcagcgctttttcaaaccaaaattcattgtaaaaattttttaaaaataataaaaacatttggaaaa

SEQ ID NO: 95225 - DNA, 1118 bp, Heterodera glycines
caatgccattgcctattcgcttttttgttcttaaaatatgccagcagaatggacggaatggcaaattcgtttcgctgctcactgccgcccttcacagggaattgtcgccgccgcatttccgacgcttttttgcctcgaccacttccgcttcttccgatgatggttttgttgttgaaaaggtggagaatggaaacgcaaaaaattacgaatccattgacggcgcatggaaatgcacaaactgtgctcatctgaattggccccagcagcgcatttgcaaacattgcactattggcatacccaccgaagcgcaaatggcgattctgaaacaattgctttgggtgtgtccaaattgcactgctcgcaacaccggcgaccattgcggaaactgtgccttggcccggtgctcagtgtacaaaggcttttgggtgtgctcacggtgcacgtggcgaaacattcccgtcaatttctcatgtcgaaaatgcaaaaaaggcaaacagacggaggagcaacgccaactcatccagcaacagcgatgggtgtgcggagagtgcaaacaccacaatttcaaggaggaatgcttcagttgcggtgcccctgagtccaaacggttgcccgatggcgtcggtggcgagtcattgcccgacgggtcgtggtattgtgtcggttgcggctttctcaacttccccaactattcgaagtgtcgccactgtcgcagagaagaaccgacggatgagcaacttggcgtcattcacagttcgcgttggcaatgcgctgagtgtcattttgacaattacgagtccaatttgacgtgccaccattgcgacgcgccacggcccacggaagggcaactccctgcaacttctgattgtcagtattgggtgtgctcaagctgtttgtggcgtaactttcccacccatttgtcgtgccaaaaatgtatcaaagggagggcaccggaagagaatcgccaacaaattcaacaattgcgatgggtttgcggaatatgccgacaccacaatttcaaagaggactgcttcaaatgcggcgccccaaagtccaaaggcttttcctgcggaatcggtggcgagtcgttggacgacgggtcgtggtattgtgtcagt

SEQ ID NO: 95226 - DNA, 721 bp, Heterodera glycines
tttccgtataaactctataagattatgatgaaaagttctgctgatgctgagcagttcggccgtctttcgttttcgatcaacagtttattcagcacccaagaagtggcatcgtcttcgagtgcgtcggacccgacaacacaattaatcatttcatcactgaattctgtcagaaaaacaaatgaaggcacagtggaaaatgcgacgaaaaagactgacaacaaagaattgagcaccgacgaggatgagcagcaaaatgtggcgagcacttcgacgccggaggacggagaattttcaaaaatcagtcgtattcgaaagcgccgctacagtcaggcacgaatacagccgacgagagtgaaaaaagtaatgcaaagtgacgaagacatcggcagaatggtggccagtgtgccggtggctatcggcagtgccatggaagtttttgcggagaaattgttgctcgcagcggccgaaagtgtccagcacagttcaaccaaaacgctctctccaatgcacatcaaaatggccgtttctcgcgttccgcaattttcttttttggagcctatgttgagggatgttccgatgaacccgaaaatggccccctcttttggacagcaatcgtcttcaacgtccaacggcgaatgaggcgatgctttccgtttaaatacctctcacattggacattcatttaacaaggctttactgcgattggttcagttaatctgta

SEQ ID NO: 95227 - DNA, 1242 bp, Heterodera glycines
agacaatgggatttcttggcaaattgtcaattggtttgtcggtgatttttcttgggatcgctgtttggttcagcaccagcaaatttttgccaaaggaatatcacctaccaccacctccggcattgactggcctcctaacggtgaacaaaccgaaggtgttagaaaaattgttggagggacaagttcttgggcctgaatcggctgtcatcgaaaatgatgtgatttacacctgcacattggatggaatgtgtttgaaaattgtggacggcaaaattgagaaaagtgtcccagtgacggcacatgcgacaaattgtgatggaaaacgcaaaacaattccaatttgtggacgtccgcttggcattcgtcgattcaattcacaacaattcattgttgctgacgccgtgcttggcttactgctcatcaattttgaagaagagacaaaagaagtgctgttgccaagtataactgttgtggacaagaaacgcttgggcttcccagacgatttggacattgtggacaatgacacaattttgttcaccgatttgtccgcaaaatatggctacagtgattgtgatttggcattttttgagcacgtccgggacggacgtctgcttgaatacaaagtgtccactggtcaattgcgagttctgatggacggtttagcagttgcgaatggtgtccaattgcaccctgacaaaaattctgttttggtatgcgaaacggccatggctcgtatacaccgctattattttgctggccccaaaaaagggatgcagcaaatttttgtggacaatttgcccggtttccctgacaacatccgaatttcgcgcagcgcagattcattttatgtggcgttacctttccatcgaagtgaacagaagccacacatttttgacagacttggcccatggcctttggcaaggaaattcattggcgaacttttgaaaattctgcctgacaacgtcctgcagcgttttgttgtcggatcgacgcatggcattgtgttacaattggatttgaacggcatgattttgcgctcttggcacgaccccgagggatcagtgatttcacacatttcggaggttgatgatgatggaggtgattttctgtatttgtccagttttgtgaacaattacattggaagaatgtcgaaggaatgaagaatccaaaatttggaatgaaaagccgataaaactgcccaattttcaaaatattttttttgataaattcttgacttttaaa

SEQ ID NO: 95228 - DNA, 548 bp, Heterodera glycines
gagctaaaatattacttttgacttttcaaaatgtcatctcgacgtggcggtggtaataatgttgagggaaaggtttacgttggcggtctgccagaggacgcaacttccgaagagctcgacgacgtcttccacaagttcggcagaattcgtaaaatttgggtagctcgtcgtcctccaggttttgcctttgtcgaatttgaggacacgcgcgacgcggaagacgcagtgcgatcattggacggaacacgcatttgcggtgttaaagctcgcgttgagttatcaacgggccgttctcgccgcgatcgcgatgaccggggcggtggtggtggcggataccgaagcggcggcggtggtggcggcggcggttaccgtggcggtggagggaaccgcgactattcaagatctcgttcgcgttctcgttcgccgtaccagcgtcgcggaggaggaggaggccgttctcgctcgcgttcccgttgaaaaatgggagggatctacaatttccgaagaagttgtgacgaactgatgcgatttcaaccattggcgatttt

SEQ ID NO: 95229 - DNA, 496 bp, Heterodera glycines
gccaagtttgagcccacaaatctgctgactaattccctactcattcactccgttccgaaatgccgaccactgtcgtgcgcacaacaaccactcggacgactggtggtggtgtacaccaccactccatcagaatggtgccgatttggtcgattaagctgatcactgcagttttggcccttctgatgctgatcctcatcttcttcctgcacacggccatttggcaatattacgtggtcactttcatcgtcctcgtgctcacttgcggctttctgctcggctgggcccttccgccggtgctcaatcgtttcctcaccttttaccgatcggaccaaatttcgtattcgatcatcgccggactgaccattctctcgttgattctctgcgccgcttatttgattcacaacgattactacaaacacggggacaactacaaaatcatggtcggcgtcaccatttgtatgaccgtggagaccttgatgtgttgtgtgttgctttc

SEQ ID NO: 95230 - DNA, 516 bp, Heterodera glycines
gtttgagtcattctctaagataagatcattagcttaacaaaatgcccggcttcgtaccgccagtccaatcaaagtgcccaaaatgtgggaaatcggtttatgcagcggaaaaaatggttgctggcggatatgactggcacaaattctgcttcaagtgcgaaatgtgtaacaaattgctggacagcactaacgcgtgtccccacgaggctcaattgtattgcaaacagtgccatgggagaaagtacgggccaaagggcgttggcttcggaattggggcgggctgtctgacgacggacagcggggagaagttcggcaacaaacgcgtcgagaaccgaccccttatggccgaggcgttcaccgctccgatcaatccgcaacaacaatgaaaaatggacggacatgcgaaggaagggaaggaagagcacggacactcccatcgattgaattaccaaataaatttaaaatacaagcgaattgttgtattaagacaataaaagtgtaaagcgggaaaaaaaa

SEQ ID NO: 95231 - DNA, 574 bp, Heterodera glycines
aaacaaaataagaaatcagaagtcgtggcagccaacgagaagaaacaaattaagaaatcggaagttgactttcccgtggtattgaagcgtggggtgcagggacgtgtgaaatggtactcgcccgaggatgcctatgggttcatccatcgttacgacgtcgacgaagacattttcgtccacggctcctccatcgtccgcttcaacattcgcaacaaaaaccagcatcccgtccttagcattcagcaagaggtggaattcgatgtgatcaaagtccgcaagggtctcgaggcgcgttgtgtctctggcccgggtggccgacttgtcggacgcttcttcaatattcctcgtcgaagtgtctcgggtgctaagaatcagaaacatgccgtcaacggtggtttgcgttcgattcgccgacgcagcgacggcgaagccatcagagaaggagaagggacgcgtggactccaacaaaaaggcagcggttgagaagaacactgaagacacaacggcagacttggccaatatgcgccttagtgaggacaaaaatgacagtggcaccgtggcggacacggaggag

SEQ ID NO: 95232 - DNA, 519 bp, Heterodera glycines
gtttgaggcgcttttgcaaaaatggtcaaaatcatgaagccgggacgtgtggtgattgtgctcagtggacgctatgcggggcgtaaggctgtcgtcgttaagagctatgacgagggctcatcagagaggccgtatggacatgcattgattgcgggaatcgacaagtatcctctgaaagtgaccaagaaaatggggaagaagcaagtggagaagcgaattcgcatcaaaccattcctcaaggtcaccagcctccagcatttgttgccaactcgttgcatattcgaggccgatttggacaagagtttggtgaacaaagagtggatcaaagagccgcgaaagaagaagaatgccatcattagcgtcaaaaaagaatttgagactagctacaaagccggaaagagcaaatggttattcacaaaacttcgtttctgagcggttacagaggggaaacaaagcgatttccttatttgcattgttgttgtttttgtgttatgagtaaagatttaaagacaaaaaaaa

SEQ ID NO: 95233 - DNA, 693 bp, Heterodera glycines
ccatttaaggtgcattaattatgtcacaatcaccgcaaatggcgactttcagcggtctgacagcaaatatttaccacgaaaaacagaagaggcaactttgcttgctccacacactgaacaaccttttccaacgtgaagaatttgtacgggatgaattggacgaaatttgtgaaagactcgacgacagcaaatggttcaacacccaccgttcatggcttggacttggcaattatgatgcaaacattttactctgcgcgttaaaaacacgtggactggtcggacgatggttcgacaaacgaatgccagcttcttggatccggaaggaagtgatagtcgcatacatcttcaacatcccatccaccgggttcatgccattgccatttcttaacggacgccattggttcaccatcaaacaatttgggcccacttattacaatttggactccaaattggccgccccaacactgatcagcacagccaatggcattgtccactacatcaactcacttttggcccaaggcaacgaactgttgctggttgtccgccccgaaaatgaggccaattgtttgctggccaatggcgaagcagaacatggaggaggagaatgattaaatgataaatgaatgcctcaacaaatgtgtcttaaatatttaaatttctttccacatttcaagtcatatatatttatatttc

SEQ ID NO: 95234 - DNA, 676 bp, Heterodera glycines
ctagtcttttaattacgggttctccaaaatggtaaaaacattgtggattgtcagacacgccgaaagagaagacaacataaactcgaattggcaaaaaaatgcgaaccctcaaaaattgaaatcggataacagtccattatcgtcgagaggcataaaacaggccacagaattggcagaaaggttttcgaatgtccaaatcgatcatatttttgcgtctccttttgagcggactgtgcaaacagcgacttttcttatctcacagaggaaaattccgatcaaagttgagcccggacttgcagaggctctttacctttgcgaaagtccgcctggctttgaggaatcggctgaactccgtaggcggtttcctctcgtcgactccgaatatcgctcaatttacgaaaaaccaatgcccagggaaggctttggagatgagtcatgcattcaacgaatacgccaaactcttgaagagattctgaggagatacaacgaagcaacctccatcgtttttgtctcgcatggctcgcccattggtgctcttcacgaagtgttggtcggtgattggaattatgtcggccaagcgacagtcagcaaattcgtcgagacgggggatggcaccggaaaatttagacaggaatttactagcgattcctcgcatttgtcggacaaagaaaatttg

SEQ ID NO: 95235 - DNA, 659 bp, Heterodera glycines
ccaagtttgagatcagctactgctgcgcttcctttcatcaaaagcatttgccgtaactccgttcgcacaatgcgcgtggttccaattccggccaacaccgacaattacatgtatttgatcatcgacgatgacgacaaataccaaaaaggacatcgaccggcggcactcgttgacccggtgaatgtggaaaagtgttttgaagttgtcaaaacggagggcacactgttggaggcggccctggtgacccaccaccattgggaccacgcgggtggcacctaccaattggcaattaagtcacggagcgggttcagcgacctcttgatgaagcagccgctgtgcattatcagcggtgacgcggagcgagtggaacgcactgagaaagtgatagcggacggggagagcgtgcagctgggcaccaatttgagcgttacggcgatgtacacgccgtgccacaccagcacacacgtctgctattatgtggttgaccagcgcacaaatgaacgtgccgtgttcaccggtgacacgctgttcatcggcggttgtggtcgctttttttgagggcaccgccgagcaaatgcatcacgcgctcaacgaacggccttgccgctttgcccgacgaaacgttggtttactgcggtcacgagtacacggtggcgaat

SEQ ID NO: 95236 - DNA, 444 bp, Heterodera glycines
caagtttgagacaaaaatatttctgatttgctgttacaatggtgaatgttccgaaggcacgtcgaaccttttgtccaggaaagaaatgccgtaaacacacgaaccacaaggtcacccaatacaaaaagggcaaggagtccacgtttgcgcaaggaagacgtcgttatgaccgaaaacagaaaggttatggtggacagacgaagccaattttccgcaaaaaagctaagacgacgaagaaaattgtcctccgcatggaatgtgttgagtgcaaacatcgtgttcaaaaagcgatcaagcgttgcaagcacttcgagttgggaggtcagaagaagtcaagaggtcaggtgatccaattctgagtttgtgatctcacctcttttgttgtttggtcgctgttgataaaccgataaatttttttgttgaaaaacaaaaaagaaacaaaaa

SEQ ID NO: 95237 - DNA, 853 bp, Heterodera glycines
gagcattttttctatttttataaaatgcttccgccgggcgaatggcgcatgaccgacctgttgctggacccggccatccgcacatgggtgttcgtgcccattgtgttaatcacttttttggttggcattgtccggcactacgtgttcctgttgctggtcaccaagaagagtgctgacctgcagtcagtgcgggacagccattggctgctgaaggcgcgtctgttgcgtgagaatgggcgctttttgcccgccgattcgtttgcccagcggcgctggctgctgtgtgacgagcagcatggccagctggtcaagcggcaggacaaacagaacacgcagccgaacccgatgctggacccgtccacgatgacggagatggtcaagggcaacatgctgaacatggtgcccatgctggtcatcggcggttggatcaactggaccttttccggcttcgtcaccacgcgggtgcccttcccgttgacacttcgcttcaaaccgatgcttcagcggggcgtcgatttgcagtctttggacgcttcatgggtttcctccgcttcatggtacttcctgaacgtgttcggcctccgctcggtgtacgcgctggtgttgggcggcgagaatgcggccgagatgatggacgagcaggcaatgctcggcatggcacagccacagatggtcgcgccgggccaagacccgaagggggcgttcaaatccgaatgggaggcgctgcagctgtacacgcacacgttcaacccgagatagaaaaacggaaagaaaaccgtcgataaaaatacacaatttttttttgtcatttcgctaaacatattcattcgtaaagtaaactttagcgattttt

SEQ ID NO: 95238 - DNA, 541 bp, Heterodera glycines
ttttgtatcaaatcgtttaaaatcaaaacaaatgcctcaaaacgagcatattgaactacacagaaaacgccatgggcgaaaattggatcacgaagagcgcacgcgaaagaaactggccagagctgttcatgaccgttcaaaagtggccaagaaattgcggaaagggaaggcgaagttgtaccacaagaagagatatgcggagaaggtccaaatgcgaaaattgatcaaacaacacgaggagaagaagcaaaaggggacgacggacactcaaacggagggagcagtccccgcctatttgttggaccggcaaaaggaaacggcggggaaggcactttcgactgccatcaaacagaaacggaaggaaaaagcggcaaagtaccaagtgcctttgccaaaagtgagggcggtcagcgacgcggaggccttcaaagttgtcaatacgggaaaaactagacgaaaagggtggaaaaggatggtcaccaaagtcactttcgtcggcgaaacattcacacggaaaccggcaaaattcgaacgattcatt

SEQ ID NO: 95239 - DNA, 504 bp, Heterodera glycines
cccgattgtccatcttctttctgtgcattatcacattccgactaccatccaaagcatttcgtggcccgtcgcactcagtggacgcgatttgatctcaattgctaagacaggctcaggcaaaacccttggatttattctacctgccatcgttcacactatggcccagcctccacgtcgaccaaatgatgggcctggagtgcttgtgctgcttcctactcgcgaattggctgtgcaggtggagcaagtggcacgagaatactgcaagctgatgaaattggatgtgacttgttgttacggtggagcaccgaaagcaggacaggcaaacgatttgcgaagaggcgtcgatatttgcgttgccactccggggcgcattctcgactttatggaggccaataccaccaatatgcgtcgctgcacttttttggttttggacgaagctgaccgtatgctcgatatgggatttgaacctcaaattcgcaagattgttggccaaattcggccgga

SEQ ID NO: 95240 - DNA, 481 bp, Heterodera glycines
atttacaaattaaacgacaatcaactaaactcctcaattagcaaatccttaattaacttcccaaatgactcatcgccaacaaaacgaaggagggggtggagcagtgacgccgaacgcaacaacgacgggccatttgcaggagcaaatggccaacgccatggaacgcgtgggggaggcggcgcacaacgtgggccaacgggtgaccgatttcttccagggggacccttttgggacgctaatcggacgcaaaatcgaattggccaccgatgctacgaaaatggccactgaaaattggggactgaacatggaaatatgcgacttcatcaacggcaccaacgacggaccacgagacgccgttagagcgatcaaaaagcgactgcaaacgcaaatgggaaaaaacaacgcaattgtcatgtacactttgactgtgttggaaacgtgcgtaaaaaattgcgaccaccgttttgctgtgctcgtcaca

SEQ ID NO: 95241 - DNA, 488 bp, Heterodera glycines
gaagaacatcatgttatgtttggtgccaaaccaaaccaacattggttggttagagttgcacttttggacgccgtcacatttcttgcacccgccattcatgacgacgacttggaaagatttgtccaaattgacattgacgatgtgttcattggtgccattggcagtcgaatggttgcggatgacgtggactatttgtccattttgcagggcaaactgcgcgaacacattgccgactttcatttcacgcttggcttttctggcaatttttttcgtcatggtgacccggcagaaattcaaggagacgaaatccttgcaatgcgaacaaattccactgattcccgcacatgtggcgtcacaaccatccgccagaattttctgcggattatctgcttgcattgatgacacaaaatcgtgtgtttgctgagaatgttggcatttctgccaatctgagctatgccgtttcgccacaacattctggggtttatccg

SEQ ID NO: 95242 - DNA, 495 bp, Heterodera glycines
cacacattccgacgcaattacttcattattttgggattagtacccaacgcttttcttttgcagcttttgaacaatgagcggtggcatttatggcggagatgacgtcggtgcattggtgttcgaccccggctcgcacagtttccgcgtcggttacggtggcgaggagttcccccgctttgacattccggcacgggtcggcgtctgtcctcggccttccgccggcactgacgcgtcccaaaccgctgacgccacaattgaagaggtggcctcaggacggggggccaacgccagcaacaaattcgaccattacattggcacaacaaagctgaatgtgccccgggccggcatggaggtgaagccgtacatgcgggagggcatggtggaggactgggaactttttgagaagatgctcgactacatctacgggccgtgtcttggagcagaaagccgtgagcatggcgtactgttcacagagccaccatggaacccaaagga

SEQ ID NO: 95243 - DNA, 593 bp, Heterodera glycines
tccgcccaatttgcgatgccaaaacaggcaactatcagcctcagcagtgtcgggatgagaaacattgcttctgcgttaattacctaactggagtacggcaaaacaaaaaggaagtgccaaccaacgaaattttgcattgtgaaggcggccaagtcgatttttccatcgatgatagccatatcattaaatcggagaaaggtgagggagaaaaaggcgacgaggagctgatcccgatcggatcgccggtctgcaagaagccgagagatgcgggccacagatgccatggccgagctggcggaccaatcgcggccaaaaaccttaagtggtattttgacacggagacttttgaatgtttggcattttcgtacaacggctgtggcggcaacggaaatcatttcgactcgcccgcagattgttgggacaaatgcaaacttgtggacctcgccggttgtgcggggatgcgcctgccggcaacggataagcagggtcacacaatcatttgcgccggggctggctacccatcgcctaccgcggcatgtccgtccggctatcggtgcacaatgttggcgcacatgggagtttgctgtcattca

SEQ ID NO: 95244 - DNA, 294 bp, Heterodera glycines
ttgctggccgaatttcagaacacccgtttcattgcggcagcgattttgggggcaacgaatgccgaaaaaacaaaggacggcgggcgggagaaggaaggagtggtcagttttgagaggtccaagcacagtgttccgcgcaacatgtggtacaaaaagttggccaaacgtacaaaagccaaacaccaacaataagaaataattgattattgcgattcaatgggagtgctgttgcgacttttaaattgtcattttgtactgttgtttttgttgtttgttcataaaatgccaagaaag

SEQ ID NO: 95245 - DNA, 571 bp, Heterodera glycines
aaatgaaccaacagaaaagtgcgaagcgggcgacgcgcggacaacgccaaatttatgaagaaaacaagcagactttgttatgctatgtgctggccagcatttgctcttccgttttggtgttctctctcaattactttctttttctgccgcaaaagggcgcgtggattggactcgcgttaagctctgccagtcaagcattttctgtgattcttatgtctatgatgatgaaaaccgtgcggaatgagcgtaatcagttggtcgatgctgggttggacctcaacgatccgaatgcgtttggagagtactgcaaagacatcgtcattctgagtgtgtctgcacagcttctgagtctgatttggaccggcttcttcttcgtcctgctgtccattccctttttcacactttacaaactttggacgaacattctcggcccttggttcttcagaccgactcttgacgacgatgagaaagaggacaagaagaagcagaaaaaacccaaatttgtacatgtgagacgatgaccaattgctgttgttgtttttgtttcataaactcccttataaacaccgag

SEQ ID NO: 95246 - DNA, 477 bp, Heterodera glycines
attagttatatacattatatttaaacggctcttcaattatgacgtcaacctcgccacctttgaccaacggtgtcgccaatcatttatccgagaacggttcagcgacaagccctgaactgatcgtgttcggcagcattgtgcaagatttggttagctatgtggaccgcttcccgaagccgggcgaatccgttcgtggccacacattcaaaacattttgcggcggcaaaggtgcaaatcaggcagtgatggcctcacggatgggcactcgtgtgacaatggtcggcatggtcggcgacgatttgtttgcggccgaaaatgtgcgatcaattgcccaaaatggtgttgatgtgtcgctggtgaagcaattgtcgggccaaacaacgggcaccgccacaattaccgtatccggagacggtgagaattgtattgtggttacattgggcgccaacacttcattgggcgctgaatgcgcacttg

SEQ ID NO: 95247 - DNA, 627 bp, Heterodera glycines
cttcaaaaatagctgaatacgaaaatgacaaaaccgcaacaggttcttgttcttgatccgaataacgaactcagcttcaagggaccgtttactgagtatgtgaatgccaatctcacactgtcaaatccctcgcgaaaggacgtttatttcaaggtgaaaacgactgcacctaagttttattgtgtccgtcctaactctggtgttatcaaggcgaatgataaaacccaaatcaacgttatgctgcagccggttgaatcgcctgagactctcgagagtgagcggagccggcacaaatttatgattcagactgcatttgcgcctgatgacgagcagcttcctgtggaccaattctggaaaactgttgacccaacattagtcatggattcaaagctccgagtggtgttccagcgaccttttggatttggcgatgaaaacaatcgggacgaaaccaatgcgactggtccgtttttcaatttcaacaaaacgggcgaaccgaaaaacgaacagccaacgcaaactccaaaatcgaccgaagcaaattctggcgatattcaacttgctttgcaaagggaagttgaacttcggatgatgtatcaggacgagaacaaaaacctcgaaaaggagaat

SEQ ID NO: 95248 - DNA, 596 bp, Heterodera glycines
ccctcaaataaatgggccttttccgtgtgctcatctacggcattattctcggcgtttacgccagtgcgttgttttacgatgtccgctttatgccgcggctgggcgtcgtctggtgggtggagaagctggtgatgttgtccatgctgaatttgtctctccaatcgttttacgctttgctttgttttgtctgtgcgctgttcgattggaacgaagaatttgtgcacggcgaacagcacaaaaaggtgaaggcgacccacgtgcccagctattggcggcgcagtcggctccaccgcatttgcgactttgtgtacgccaccgccgcatttcccgtcggaatggcaagttctctgatgttttgggctctttatgtggccgaccctgagttggtgatgcccgcctgggtggccaagctggtgcctgattggcttaatcacgtgtctcacacggcccccgtcgcttttgtattggtggacactttgctgacttgtcaccatgcgcccgatcggaagattggctccactgttgtcgtcgcacttttccttttctacgttggaataattatatccgtccgtctgatcagcggtcattggctgtac

SEQ ID NO: 95249 - DNA, 489 bp, Heterodera glycines
ccctttcgtttcgtcctctctatcagaattggtgctgctttgcctcattctttttgttccttttctgatgcttttccatcgtctggtgatcgaattctcattcgaagagagaatttcaaccgaaatagaccaaggcttttgaaaaggaatgaaaagagtcttttggctgagaatcggcagggaattcccacggcgacggactgtgcaacactcgtgctgttctgtcagttgggctcaccatccgccgaagaaagttgggttctcttcacacaaagggcgaaaaggatgaagcatcatgccaacgaaatttcgtttcccggaggacggatcgagcagggagaaagtgtagagactgcggcgatcagagaggcggaagaggagatcggactggaccggaacgacgtggaactgtggggcactcttcgtccgctgttcttcggagaggcgggcgtcgtcactcccgtggtggcaaccattgggcaaaacgtg

SEQ ID NO: 95250 - DNA, 463 bp, Heterodera glycines
agttgctccgtccgccatgcgacaacaacacggcccgggccaaaaacgtgtgtcacgcgttccaatcataattatccctgccggtgcaagttcactcatcacaatttacaatgcgcaggaaattttgcaggatttgcgttacgtaagcacagaagaaaaaaagcaatttagcagtaaacgagagaatgagctgttactgcaaatcccaaagaatggcgtcactgttccgtaccgagtcgtagacaatccaacacgattgaaggacgaggaatgggaccgagtggtcgcagtgtttgtgcagggtccggcctggcaatttaaaaattggaaatggaatggcaatccggttgagatatttgccaacattgctgcgtttcacttgcaattcgacgaacttccaaccgatccaaatgtgaaaaagtggagtgtgcatgtgttgaaattgtcctgtacgaaaaggcat

SEQ ID NO: 95251 - DNA, 555 bp, Heterodera glycines
gtcgctcatttgtcgccaaatcatgcgactgaatgtactgctcgcaatcctcgcccccctcctcctgctaattgcaacagcaacgctttgtggtgccaccggcaaagaagcggcggccaacaaaatcggtgtcgccgccgtcgctttgtcagaggcggacaattcgacgacgccggcgccaccgccgccgccttcgccgggtggcagcgatgacaagaaaaaggacgatgacgatattaagccggacgaggatccggcaaaaaaagggcaacggaacggacacgggcgacgacggcaaaaaaacggacgaagcgggcggagcatttggcgcggggtccatttttgttgccattcttttcggcatggctttgatgttcggactgatcaaaatgtatgtccattgggagaagcggcgcgagtcgggacccaccgaactatcagatgtattgaaaaaacatggaaagcattgggccaaaacaaacaaagatttccttatttcatttgttgttgttttttgcatcatttttatcacttctcattaaaatttctcttacc

SEQ ID NO: 95252 - DNA, 672 bp, Heterodera glycines
ctcacaatggcgtcaaaaattaaaccattaatttgtccgtcgatattaaatactgatctgtcagatttggctaatgagtgtcgaaaacttatggccgctggtgcggattatttgcatttggatattatggacggccatttcgtgccgaatttgacgttcggacatccgctcattgaatgtctgaggaataaattgggaaatgacgcgaagttggacgtgcacatgatggtgtccaacccgtccaaatggctcgaccctctgcacaaagcaggcatcgatcaattcactttccattgggaggcactcggagaggacgaagcggtggacacactcatcgaccgagtcaaatccaagggaatacgatgtggactgtccatcaaaccaatgacgccgctggacaaactgatgaagttttgcgaaaagatcgacacagcactcataatgacggtcgaaccgggattcggcggacaaaagtttatgcaggaccaaatggaaaaggtgcgccaactgcgaaaagcgtacccaaacttggacatccaagtggacggcggggtcggactggacaacatcgaacactgtgcgaacgcaggggccaatatgatcgtttctgggactggaatcgttcggtcggctgacccgcgtcagacaatgccaaagatgaaggaaactgtc

SEQ ID NO: 95253 - DNA, 577 bp, Heterodera glycines
cttaaaaatgcacaagcagaaagtaatatgaaactaccaatctcaagcaacaaattcaacaagtacgaactctacaaatttcgacatgcgactatggccatcgttgaaaatatcggattttctacttctaacagctccgcagtcagttccttgtcttttctgcttagaacttattttgagcaattgtgtcgcgactcgcttaactcggccattaattctggtcgtgcagaagttggcttggaagatgtttcttatgttttcggagccaatggaattaatataactgaacttcatgattatatccagcaagttcaaccatatgcggctgatgagcatcctttgtttcccgtcactgaaccattaaatgtgccgccgccttcctctgaaattgcggacacatccgagcaaaaaaatggcgagagagaatcagcagggaatgacggggctgaagttgacgaggaagggaatagggagcaaaacaacaaacactccttgaactcattcaactcgaggtcggtcatttctatgatttttaagatgatcaatatatttcaaaaggtccaatgttcgaaatgca

SEQ ID NO: 95254 - DNA, 240 bp, Heterodera glycines
gtccaattaaggcatccgtaatttgcaattccgtatttttaatcgtttttttcatttaaatgcgcaatttacgccttttcttaaccctttagaggagcaagcgctgatgtaccaatatgccgacacgttggctgtccgtgcctttcttatgatggccgatctgtccttcgttttggagcagaggccaaacgcggaatttatgtccccgacgggagaagtgccctttctgcgtcttcagaa

SEQ ID NO: 95255 - DNA, 752 bp, Heterodera glycines
  unsure (1)..(752): unsure at all n locations
gcaatatttagccagaaatgttcaagaaattcgattcggcagaggatgtggtcggttcccagcagctcaaaggatctgtgcagaagtcaatccgggccaagctggttgagcagtatccgagcattgagccgtacatggacgccattctgccgaagaaggagaacttcaagttggtcaagtgcaaggaccacctggagctgatcgcggacgccaacggcactgtccacttcgttaaaagccgtgatttggcaaattatttcccaactctgagactgctgcacaaatacccgttcatgcttccacaccaacaggtagacaaaggtgccatcaaatttgtgttaaacggttcgcatataatgtgccctgggctgaccagcgcgggtggccgacttttggacgattgcaacgaaggggcattggttgccattatggcggaaggaaagcagcacgcaatgggaattggacaaatgaagctttcgtcggcgaatgtgcggtcacaaaatgttggcattgccattgacaatgtccacttcatgaacgacgggctgtggcgattaaccactgttcaatgagcacagaacaatttttttttaaattattgtttaattgactctataattaatcgctttttcaattttaaattgttgatgtatgaggaatcatattttttcgtgctttatttgcaaaatgaaatacacaaaattttcattcgaatgtttacattaataaatgtgaggtgattanaaaaaaaa

SEQ ID NO: 95256 - DNA, 500 bp, Heterodera glycines
gaataatgtcttctcgaagaaatgaatatctcgatgcgaaggttttaggtttttctacaataatttttcgaaaaacagttaagatttatgttggtggtttacctgaggatgcaacttctgaagagttggacgatgcgtttcatcgctttggacgcatacgaaaaatctgggttgctcgtcgtcctcctggctttgcttttgtcgagtttgaggatgcacgagatgctgaagatgctgtgcgtgcactcgacggaacgaggatttgtggcgtcaaggcccgcgtagagctttctcatgggagcggaagagggggcggacgcggttttcgaggcggagggggacgttatgacgaccgttatggtcgtgatcgttatgaccgtgatcgcgaccgtcgttatcgttcaaggtcgcgttctcgcactcctcgccgttcccgaagccgctctcctccgcttcgtgagcgcagccgatctccgagctacagccgtcgttctcgctct

SEQ ID NO: 95257 - DNA, 795 bp, Heterodera glycines
ttgagctgctataagagccatcccctttgattgaaagccgcctttacccatcgaatgctacacccttcaacccattgcgcgcgcaaaatctcacgcaagcagtacagcaacgcgccggacggagcggaagagtgtggcggcaacgcggacgcgcttttgcgcaaagcgagccgaaagctgtcacaactaagcgagctgggcgacttccagcagcgctgcaataccgccaccagtcgccgtcgctgttcatcgacggaatccttgctggcggcgctgaatggtcacggctctgtggtgtccgcaggcgccgactcgtccaccgccagccatcgttcatctacggacgacctgaccgtgctcgactgctccaaccttagccttggtcagttgcccattgaattgctcactgaacactctgaggaaattgagcatttgattctggacgagaacgagcttgacgagcaggccttggaggacatccctcgcctggacaaactggagacgctgagtttgaatgggaacaagatcaagaacatcggtgtgttcctgcagtatctgaagcgcaagtgcccgaacctgaagttcttgagtctgatcggaaatccgggctggccccacccaattctgaacaacaacttgcaactctaccgcacttatgctctttccgccgtccgtcttttcccctccttgcaatttcttgacaccgcccgtgtctcatcgccagcatccatcgccattttgggcgaacagtgccaacagcgccaccaccagcagccaaatgccggcaacaaaaag

SEQ ID NO: 95258 - DNA, 761 bp, Heterodera glycines
ctgtgatgagtgttggcgtactttttcgtcttacaattaggccaagcccggcggggcttcgactgacttgttttttggccaccaattaccatcacaatcttcatcagttcaacaacaactgcttggtgaggaggcatttctcttgtacatcgcggcttctgttggccaccaccaccgacaacaaaggcgatgccgcatcggcaaaacagcaacagttcgccaaaatagaattgaagccgaaaacggggagcgacggtgctgtggcggagccggaacggacatatttggaggaaatgctcattgaacgggatgcggagccgaagacggcgggccaaaaagtaaaacgtgcggtggagacaaccttctacatttcgtttggcctcatctcctgcgccgttctgggcgtgatgacctacctcgtgttcaaggagttcttcgccttcaacacgccccagggcgtttaccgcgatgcggtgaaaagggtgaaggcggacgagcgctgtcgggaaatgttcggcaagcgaatcatgacatttggcgaagagtcgggccggggacggcgacggcacattctccacaataaatatgtcaaggacgggcaggagcggttgagcgtgatgttccatgttaagggtgacgcgggcattgggaaaacgtacgcggagatttacaagggcgaggacggcaaatgggactatcgctttgtactggtagagagtgacgggtttccgaagaaagccattttcttaattgacaacagg

SEQ ID NO: 95259 - DNA, 476 bp, Heterodera glycines
ctccacgccaattttgaagtcggtgaggagcagcggcggaggatcgccatgttcaaccaatttgagcgttgctgagggctcaaaaaacggtggaggcagcagcgggagcgcaaacgcacaacaggggacaaatggaagcggaaacaaccttttcattgctttgttcgactacaatgcacgaacggatgacgacctgaactttaagaagggggaagcgttggaaattctgaacgatttccaaggcgattggtggtacgcgaagagtttgatcagtggcaagtgcggctttatcccgtccaattacgtcgcccgcgagtcttccatcgatgcacaaccatggtatttcggcaaattgcgcagaatcgatgcggaaaagttgctgatgttgggcgtcaatgagcacggggcgttcctcgtccgcgactcggagtcgcgtcacaacgaattttcactgtccgtcagggacggtgaagtgg

SEQ ID NO: 95260 - DNA, 673 bp, Heterodera glycines
ccaagtttgagcaatgtttttgggagctcgttcagctcttttcattgatcgtaaagatgccggccaaaaattggctaaggctttagcccatattttgcctcaacgtgataacattgtggttttggcacttccgcgtggcggagttccagtggcttgtgaagtcgctgatgcctttcaggctcctctcgatcttctgatggtaagaaagataggtgctcctggtcatgaagaatatggaattggtgctgttgtggaaggaaatccgcccgagctcgttatgaatgaggaggctgtcagaattacacgaccatctgaagcatatgtgcaacagcaaatgcagaagcaactcaaagaaatggagagacagcgaaaaacatatttgggcgacaaaccgccggtgtcgctggaagggcgaattgccattgtcgtggacgacggaattgcaacgggtggcactgctcgagttgcgctcaaagctttgcgtcagaaaaatgttagtcgtgcaattttggcctctccgatggcgccttccgacactttggccgaattacgcgctgaaggaaatgaagtgctctgtttggagacaccgccgaatttcagtgcagttggactccattaccaacgcttcgatcaaaccagcgacgaagaggtcatccgctgcatggaaaaagca

SEQ ID NO: 95261 - DNA, 525 bp, Heterodera glycines
atcaatttgtataactcacttcaacagaacaaaaatgggaaaagttagcaaaacaaaatccgcaaagaaatccgccggaggcagcggaaataaaacggtgatttgggcggtggaagacattgtggacggaccgaaatacgaaacaattgggacgaagagacagaaactctacaaagtgcgatggggagagacgtacgaattggccagcaacattcccccgggactcatcgatttgtacgaaaagcgggaaaagaagcaaatcaaaatcctcggcccattggtcaccagcgaatcttcgaccagcgaagggtcgctaagtccgaaggagagaattccgctccatcagacgaaattcgccattgaaatcggtggcaaagtgaagtgcctcagttacagcgaagtgcgcaacacttacaaagaggaattgttgcagtatttcgaggaaagggccaaaatcgacgaagagtaaagcggaaggaaaagccacgcaaaagcattcacaaataaattagcatcgctcaactc

SEQ ID NO: 95262 - DNA, 592 bp, Heterodera glycines
gtccaattaagccgttttactgacattggcaacaagaatggaccgcttggagttcagggatttcccttcctctggtggcggtgcttcgtccgaatttttcaattccgactccgtcaataataaacctcctcctgacccggcctttccttctggcaatcttttggatgtttcttcgtccagcgaatcgcaaagggatgactcctcaaaagtgcattttctttctctgagtttttaccgtcgcttctttgatatagacgaagaacaggtttttgcccgtttgttgaacagtgcgatgcctcgccggacgggcaatttcatctccgattttgtgcagccgaaccccgatttgaggggaccattttgggttagtgtttcgctcgtattttctattgcgattgttggcaatctgtcgcgttttttgcataccttcggctccgacgaattgtttatcagcgacttcagctttgtcactggtgccacttccctcgtgttcgggtacgtgctgacaatgccttctttggtctatgcctttctgtggtaccatcgtccgctcaatctccaatattcctttcttcaatttgctgtgtgcctt

SEQ ID NO: 95263 - DNA, 575 bp, Heterodera glycines
ggccattggccgagtacagaaaggcactcgaagagttctcggcagagcgccagcagcagcgtgaatcaatcaccgattcgtcttccgacccgcctttggtggatgagtttttggagttcgtcgctttgtccggtcaatcgcatttgccatggactttgattcagcccgtcatcgtttggaagcttcaagctgtgatggacgccgtccacgtgaaggaagcggaggcgcaacgcgacgatttggccaaagaagcgctgataaacgacgccgagattaaggacacaaaagcatttattatggaaaaggcacgctcattcgacggcattcccttcacaatccaacgcctctgcgaattgctcacatcgcccggcaaacattaccacggcaccggcacttatttgcgtgcgttggagaagaacatcaacgtggttacaacggtgacggaaaacggaatgcgaataacgggcgctgatgaggaggaagaagcggaaaaggacgcgccaattcgagtggagagcaatttcattgtcagcgtcgatgaaatggacgaaccattggcattgaaattggagaga

SEQ ID NO: 95264 - DNA, 531 bp, Heterodera glycines
gcaacaggaacaatgctttgtttaatgtgggaaacttttccatttttgtcttggacaacgccaattgctatgtttgacacgtgccttgttgcgatcgagtcgcattttgattttggatgaagcaacggcttcggtcgacatggaaactgatgcgcttgtccaggaaacaattcgtcgtgagttcagcgattacaccgttctgacaattgctcataggcttgagacaattcttgacagtgaccgtgtcatggtccttcaacaaggaaaagtggaggaattcgattctcccaaagatttgtcggatgatttgaactcggcattctctgccatgttagccggcgccaaacttaccaaatcccatgaaaacgcataatgactgacagaacttatcgtactgaaattttcaaaatttcccaaaagttcacatttgcataatttatcttctctcatctgattacttgcaacaatctctatttgttttctttgaattgttaattttttttaatagctttaaaaaataaaagttgaagc

SEQ ID NO: 95265 - DNA, 725 bp, Heterodera glycines
caaaaattttcaatttattattgctgagcaagtgggtatttaagcggggtttccttttgcaattaattaattgtaattaattgatcgtctccccaatggcttcttcactcaccattgaaaaacgctgcaaacttttcaacacaaaacaaatggaatgccaattcgatggaactgaagccggaaaatgtgctttttgtgtaaagcttccgtgtaaatttggagcagttaattgtgcagaggaagtgagcatctcttgtgtaaatccgcaagaattggaaaaatgctgcaaggcgcgtgacaacgaatgctgcgtgtgtgtgctatgcgagaaaaacaaagttatgaaggttttggtcgaatgttgcggaaagcgcaccgaaacgagtgccgaggccgggaaagcgctttgcatttgtgtgccgaaaattggtggaggcaaatgtggaggacaagtgcaagtgaaacaatgcgatgcgaagctggttgacgagtgctgcgcagctaacacggagagtggcgactgctgttgcgtctgtttgagctgcaatgaccaaaagtgtgtggtcaccgtccgttgtcctgctggagaagcaaagtcgactggtccaacttgtactgcttcaaaatgcgaaagtgtgaagtgctgctgaagtcaaaaaactgatcgaagactgaaaggatgcatgcatttaactgactcagttttaaaaatgctttttcaatta

SEQ ID NO: 95266 - DNA, 528 bp, Heterodera glycines
cattttctttctgtgctatgacatccgctgaaacggttaaagaagagccggggcgcgagtttatgtcggcagttaaaggacgacgtgagcaggacagaaaggaatgggcagcctattggaatattcgatggaaggaggtggaggtgcgatggatggaagtgcttatatcgacatggaatcttggtcaaatgtattgtcagcatgtggcgtggacaaccatgaaatgcgtgaaagataccaccaagttcgacttcgctcgcgtagccaaaatggaaagtacacgtacacacttacgacccgaacctttgaagacgctgatggcaagaaacttccccaaccggttgaaacacggaagcagttggacaggcgcgagtatcagagctacttgaaacttcgtgacagaagccgtcaatcaattcacaagaaacgtgtgtgttttgttctttttactatttcataagttctaatttttaattgtaaccgtttaatcgattttgtatcatattgaaaataaaacattttgtccac

SEQ ID NO: 95267 - DNA, 188 bp, Heterodera glycines; identical to SEQ ID NO: 80569

SEQ ID NO: 95268 - DNA, 862 bp, Heterodera glycines
atcacaacatttggtgcaacaatttgaccaaacgatgttaagcgaaaccgtgaaaatcggatttatcggagccgggaaaatggcacaggcattggcgagaggacttatcaattcggggcgttatccagcagagaatttgatggcgagttgtccaaagacagatgagtcactattggagcaatgcaaaaaattggggattggaacgacgagtgacaacacgagaatcgctcgagagaatgacgtcatcattttggcggtcaaaccgatgaatattagcaaagtgacgtccgaaattgcacccaatttccgaagggagcatttgctaatttcaattgccttagggattacacttcgctacatcgaacaacttttgccttcaaagtcccgcgttgttcgcgtgatgccgaatacccccgccgttgtcggggccggtgcctcggcttattccatgggctcggcgtgccaagatggcgactcaaaagtggtccaagatttgttctccaccgttggatattctgttgaggtgcccgaaattcacttggacccaatcaccggattaagcggcagcggaccatcttatggcttttcaatgatcgaagggttggcggacggaggcgtaaaaatgggccttccgcgagaattgtccttaaagttggccgccatgtctctctacggcgctgcgaaaatgtttctcgagacgggggagcacccgggcgtcctcaaagaggcggtgcagagcccgggtgggtcgaccagtgtcgagatccccgaattggagaagggcggcatgcgcgggttgctgatcaacgcggtggaggcggcctctgagcgctcccggcgaacgggcgaagcggcgctgccc

SEQ ID NO: 95269 - DNA, 657 bp, Heterodera glycines
gataaactttgttttatgaaaataagccggtagactttttttgtaggccgggaatacctcaaaaaattgatttccgaacctgagtccttggaaaaccaaacaagaaccctgtttccgatcccgtaccactaacaacaatagatatgaattcagcagaaatggccagcccctccattgacattggtctgcttgtcctgcgcggaaatgaggaattaatacggcaaaaattgaaacgccttttggcaataacaatgccaaaagtacgtcaaaagttgtacgtgcatttggagcaaatggacgtcatccgggcacttcttcccgccatttacattaatgcggcatccattgcgccgaaaattgatctccgagtccttctgaaccgaacgaccagcgtcccagttgaccgggttttctatgacgaggtcaaagacccaagccatccgatttttccgatgcttcgcgaagagaatgggccaactttcaagatggattcttttgccacctcccatcacaaacttccggaaaagccgtatgaccatgtcgtgttgggcgggacgttcgaccgattgcacaacgggcacaaattgctgctctccgaggcggcaatgatggcacggacaagaatcacttgcggagtgacggacggaaaaatgaatg

SEQ ID NO: 95270 - DNA, 488 bp, Heterodera glycines
ggcacaccttttagtcgcctttatcaattatcacaatggctcccaagggtaagaagatcgccgccgctcccttcaagacggccgccaaggctggcgccgtcaaggaccctcgtttcgagaaggccacccgcaacttcggcattggaaacgctgtccagcccaagcgcgacctcacccgctacaccaagtggcccgagtacgtgcgcctccagcgccagcgcgccatcctcaagcgccgcctgaaggttccccccgcgatcaaccagttctcgcgcgttgtcgacaagaacgttgcctcgcagctcttcaagctcctcaacaagatccgccccgagaccaagcaggagaagaagcagcgtctcaaggccattgccgaggccaaggccgccggcaagactgtcgaggctggcaagaagcccgttgttgtcaagtacggcatcaaccacgtgactgccctcattgaggccaagaaggccaagctcgttgtc

SEQ ID NO: 95271 - DNA, 1016 bp, Heterodera glycines
aattttaaatctattcttaaaatggtgaatttttttgttatttttgtgccgtttttgttgttgattgtgtcaaatcagttgaaagccgaagaaacggaagaaaatcgacataaaacggaggaaacatggaattatgaggagcccgaagaatggggaggaaagtgccaaaagggcgacagacaatcgccaattgacattcacaaacaatggttcattgattataaaattccggcaatttcatttgcaaattacgaaaaaaatggaactgtgacaatgaaaaacaacggtcatacggtggtcgtaagcggatttgacacttgggaaaagcagccgaacatcgccgacggaggctttgggagcaaatacatgttgagccaattccattttcattggtctcaaaacgagaacggaagtgaacatacggtggacggagaacattatgacgcggagcttcacttggtccatgtcaaagaagggctttctttgtcagaagctctcgctctttctgatggtgtcgctgtgttgggcattttcttcaaaagggcgtacgttggaagcgcacttttggcacttcaaaacggactaagccaagtgacgaataaagatgactccgtcacaattgaacattatgagcccaacgatcttttgcccaccgcttcggaggtgtttttccgctacaacggctctctgaccacgcccgactgtaacgaagcggtcatttggacagtctttgccgtgccgaagtccatcagcagagagcagatacaattgttacgagcaattaacgggcacgacggaaaaccgatcagttcaaatattcggccggtgcaaaagttcagcagaaaagtgcagaaattcggctacaacaaagtgtcgattttgccataaacatccactggcccttctaatggacttttaattaattaataattaattactaaatagattttatttaacaaaataatatttgtcattgcaatgtttttgttcaataaaagttacgataattaaaaaaa

SEQ ID NO: 95272 - DNA, 475 bp, Heterodera glycines
attttctgatggattttgggccgcgcgacgacgagggaaagccgtgcaaggcgtgcttcagcttcgaggacatgctgcggatgatgggcaaaaagaagacagccgatcggcggaacggcgaagcgcaaaacaaaacggcgggggacgaaccgtcgacttcgagcagtccttcggcggataggaggaggacggactgtccgttggacaaagacgaattgggaaggtcgacttggaatttgatgcattcgatgtccgtttattacccaaaagagcccaccgaacagcaaaagacggcgatgggacaaaccatcgacggaatttcaaagacttatccgtgcgaccattgcgccgccgactttcgcgccgatctccgtgcccatccgccccttttgaattctcgcgacgcattcgcccgttggatgtgcgaggcgcacaaccgcgtcaatgtcaagctgggcaaagagcgcttcgactg

SEQ ID NO: 95273 - DNA, 216 bp, Heterodera glycines
gtcaggtaaaaatggtgcaagtgataataggcaacaaataattttaaatagctgattttaggctttgtttcgaccggacaattatcttaaccggcttaacatggccgagaaaaatcgctcagaaatggtggacatcatggctgcaattgctttttgcaaccatatgtcaacggatgcctttctattggctgctcggttgtgcgatgtgtttatgac

SEQ ID NO: 95274 - DNA, 631 bp, Heterodera glycines
agcagttgcccctcaggccatcagcagcagatgaacgcatgccaaaaactcaagcgtccgactccgccaatcacgacttactcatccgtcgggccggagagggactgtccgctgcgcaaagaccgcgctgaaccgaactggaccgagacggatgaggcgatttgcgacgatagcgacctcattggcattatgcagcgccagtatgtcaatttgccgcacagcacacaaaaggcggcacgtcgcacgaacgcagttcgccagcgaatggttgcggacgcgacggagtcgtccgactgctcctccgacgtcacaacacccaacggtgccattatggaggaattggcatcgctggcgacggagggcgacggcgcggcgatggcacgcgaaaatggcagtgagaaaagcacaagcagcagcagaacaggcgttgactctctgtccgccttgctcaatcggcgcgtctctcctcctcaccaccactctctgtcgccctccgccgctctttccgggggtgccgcgtccattcagttgcgccgtgccacatgcggtgaactggacaagtcaaagcgcggcgaacttggccacagcattttctatgtggatgagcccgactcgccgtccgcggatggac

SEQ ID NO: 95275 - DNA, 777 bp, Heterodera glycines
ccaatacactcgtgaagagttgcaactctttttggagacaatgcgtcgcttcaagtccagcggcctttacaggcgtttcggaatgatccatcgccggtcgggcgtccattcggggcccgccttcttagtatggcaccgcgaatttttgaaacggctggaactcgtctttcgcgctttgcatccggagaattcggagcccattttgggcctgccctattgggactcgactttggaccacgacttaccatcgcccgaggattcggttatgttcagcgaatatttactcggagaaccggacgaagcgggctttgtgaccaacggattatttgccaattggacgacgatggatggtcggcactccttccaacgaatgttcggtgaccaggacgacggcgaattcattaacgacgcacgcattgattgggtgatgacgcaagacatcgtggaaagcgtgatggcattcactctgccgacacagaattgcatcaattacgaagtggacgaccgctttttggagtattcgcatgattatgtgcactatttcatcagtggcgacatgcaggagaggttcagctccagcaacgaccccatcttcttcatgcaccacggctttatcgactcaatttgggagcattggaggcaaaacaaacagagtcggctccaacgcgagacggactttccgcgcaatgacgccgcgtgtgcgccgcggtggcacttctcagaagagttcatgccgatgctgcagccgttgtggaacatcgacgtgctctccaacaa

SEQ ID NO: 95276 - DNA, 987 bp, Heterodera glycines
aattgtcattcgttttcatttctctacattcggtggtattcctcgattcgtctttcacacgcattttaagcatcatcaaatccaattcaaccgcagcttacctcaaacaatgtcctcctcttctggtcacccgcaaacatcaagcgcatccgcaatacgagcattgcaaatggagttgcgctcattgcaatcacaaccattggagggtttcactgtcacctgtgatgatgacaacatgttcaagtggacagtcggcatttttggaccacccggcacattgtaccagggtggctacttcaaagcacatttgaaattcccaacaaattacccatactcacctccaacaatgcgtttcattcatccggtgtggcatccaaatgtctacgagaatggcgacatttgcataagcatattgcacccaccggttgatgacccgcacagtggcgagatgccttccgagcgatggaatccaacacaaagtgtgcgcacagtgttgctgtctgtgatttcgctgctcaacgagccaaacacgtcatctccggccaacgtggacgcatcggtgatgtaccggaaatacaaagaccacggggaaccagagtatgcgactattatcaggaaacaggtggaaaagtccaaagaggaggccaaaaaggacggcatcaaagtgccggaaaccatcgacgaatacgtggtgaaagcgaagccgagagtgcagggcaacgagtccaacgatgtgattgagctggacgaggattactacgactacgaggacgacgacaccgatgaagacgctgaatacggcggcgaagaagagcaggacagtggccaaggagatgacgaaagttgagcggaactactaacaaatgtgtctaaacgttttctgtgtaaaaaaggacaatcaaccaacgatttgctctgctgtttgacataaacaattaattcaacatgcaaaaatgttttccatgtttttttttgaggataaaacat

SEQ ID NO: 95277 - DNA, 456 bp, Heterodera glycines
gtccaattaagattcattttgcttttttgtttcttcctacatatattccatgtaatgtgtttctctactaaaaaaaaaatgacaagttttctcgcaaaaacgaagacaatgtttgccaattctttcgattgtttttctgcgtccgaaattggcgcgtttgaggcggagcattgctgtgcatgcggcacaacgcatctttgggccgacaaattttggaaggttgcatgttccgtggactctgaaaagttggcatttcgcggacaggcgacgacagccatcggcgccgcctattggcatccgatgttctttacggaaactcgtcgttcacgcagtgcggtccaagcacatttaaaatgtgcctcttgcgggaaggaagtaaacaaagtttacgaagggacggacgacgccggcggggggtcgcgcagcgcttttggtcattacaccgacacggaaaag

SEQ ID NO: 95278 - DNA, 805 bp, Heterodera glycines
agtccttaagatacctgaacaagttacctgaaactttgtaaacataaattaatatttttgtaaaagaagaggattgaaacctatttattgcgtcatggcgaagtggggagaaggggaccctcgttggattgtcgaagagaggccggatgccacaaatgtgaacaattggcattgggttgagaagaatgccactccttggtctcgggaaaggcttcgcgtgcttttgttgggtcaaaccttggaaaaagggccggtgcgaattgaattttccgacttcaaaaaattggagggcgaagcgacggcgaacaatcggaaggcgaaactgattttcttcttcgagtggtccatcgacgtcaatttcattgcaactgtttctggttccgaaactgagtacaaaggaagtgtggaaattctgaatttgagcgatgagaacgaggcgcacgaaattgagatttccgtgcacattgaaacggcgggcccacatgaaaacgaaattcggcacattctctccaccgatgggctctcattcgtccgttccaaagtgggcacttacgtgcgcgagttgaaggaggagttcagcaaagggatcattttgccggtggacagcaaaggcgccattcgtccgcaggcggtggcaacgcaagggaaaacggtggtggacaagaggcgctttcagaatgataagacggaggagaaagtgaccacggcggaaactcaaaacgctctcaaaactggtggtttcgaactgaccgagacattcaaagtgccgcccgaacgcctttttgagattttgactgcgtctgag

SEQ ID NO: 95279 - DNA, 525 bp, Heterodera glycines
actagtggatccccgggctgcaggaattcggcacgagggaccctacacccatcaaaattaaatcagaaaaaatctgaaaaagtcctagtttcttctgttcgaatggatcgtctctcgtggtatcagacgggcgagtcgatggaggaaattctctgccaagcgggcagtgttggcatttacgacggggacctcaaacagacgtcgttcgaacagggcaccgcttcactgacttatcagcgaatcatttgggccgattcgactgatccggattgtcgccttgttcttcaccattcgatggtccacaaaatagaaaaacagcacaaaacaatgtttggacgtggcggcaaaatcattgtgacggtaaaacccgtgacgcctggccacgcgcaagggccaatcgcggcgagcggcacaaattcactgcgattcgtcttcagaaatgggggcgaggaggaattttacaaacgttttcttgatgcgctcaacaagcaaatgtggcagcgcacttcgtccacttcaagctcc

SEQ ID NO: 95280 - DNA, 542 bp, Heterodera glycines
accatgattacgccaagctcgaaattatccctcactaaagggaacaaaagctggagctccaccgcggtggcggccgctctagaactagtggatcccccgggctgcaggaattcggcacgaggggaattttcatcttagatttctctcccatcaaaattaaatcagaaaaaatctgaaaaagtcgtagtttcttctgttcgaatggatcgtctctcgtggtatcagacgggcgagtcgatggaggaaattctctgccaagcgggcagtgttggcatttacgacggggacctcaaacagtcgtcgttcgaacagggcaccgcttcactgacttatcagcgaatcatttgggccgattcgactgatccggattgtcgccttgttcttcaccattcgatggtccacaaaatagaaaaacagcacaaaacaatgtttggacgtggcggcaaaatcattgtgacggtaaaacccgtgacgcctggccacgcgcaagggccaatcgcggcgagcggcacaaattcactgcgattcgtcttcagaaatgg

SEQ ID NO: 95281 - DNA, 399 bp, Heterodera glycines
gtttgagtttgctaaattcggcgctacagtatgtgccatcgatctcaggccgcgacggactacggtatctcttcctgttgctgttcctactgtagcacatgcaattgttgctcaataacggctgtgccattgccgacaactgctcaaccagtggttgcagctgtgaccgtaactgtttcatctcatcatcgtgttttaccgtatcatcggccgtcaatgatcagaatgttgctgctggctttgctgatggtgtattgttgttattgccatacggtacaatgcagcccgagcactgtatggaatacggtatcgggtgcggaagacaacattgacactgtagtggcggcggctaacaatggtggcggagccacatttctggtgccacagcagcaactgctg

SEQ ID NO: 95282 - DNA, 819 bp, Heterodera glycines
ccaagtttgagccgcaactgtcgctgtttggggacccgcaactgttcgctgccaccgtctccaacccaaccgtcggtagcacaaacgcggcagcccccgcggcggagtcggccgcggcgctgcaaatgcacggacgacagcagcaactgcggatgagaaaggaaatctatcggtacacttgcgaagagccgttgtacgccgctgcgtggtccaacaaattgtacccggacaaacgcttccgattggtggtcggtactctgctgctggacgaagagggcatcagcagcaacaagatgtacatcattgaactggacgaaaatgtcggcgaacttgtcaaacgattcggaattttgcacgggtacccatgcactgccacgcaattcattccaaatacggacgtttcccaaccagaattatttgctaccacttcgaattgtctgcggattttccgataccatccgtcctccgcctccatctcccaagaatgcgaactgagtgcgacaaaatcgagcgcctattcgtcaccgctcacaaatttggattggaatgaagtggacccttcccttgtggcaacgtgcagcatcgacacgacctgcacagtttggaacattgagacgaatcagccgattgggcaggcgccgtccatcaaagggctgcaaaagactcagctgattgctcatgagaaacccgtgcatgacattgcattcacccgactggacaacggacgggaccaattcgccaccgccggcgccgatggaagcatccgacttttcgatttgcgggcacttcaacactcaaccattttgtacgaagatgccg

SEQ ID NO: 95283 - DNA, 1188 bp, Heterodera glycines
  unsure (1)..(1188): unsure at all n locations
tcgacaaagggcacagaaaggcggagttggcaaacgcgcaaagaattgctgagctggagcaacagttggtcacacaaaaaggaatggaaaagcaaaaaattgcacaagcggtcgaagaacagcggaaattggacgaaagtctttccaaaatggcgttggaaattgagcggagacggaacagagaaatgaccactggcgcaacacaaactgatcacctcgtcggctcaacgcgcaatgagtcggatgaagccgaattggacgcgcaactgaagcgggcggcgcttgcacacgccgaacatttggagcgagtgatcaggacacagaagcaaatccacgacatggagactcagcagattgtgcaggagacaattgccattgagcgggacaaatttggcaaacaaattgaaaatggactcgtaaagttggcggccattgaagaaatgctgaaaagtcgcgcaacaaaagatttggagaaccgaagggccaaaatctattggacaatttgccattcgctgacggacgcattggccaatggcggcacggcacagagccaaaaaacgacttactataaaacccaactgctggaacagattgctgttctcaaaaaactcgtccaaaatgacgcttttgctcagtccgtttgcgcccatttcccatcggacgatgccattggacggggtgtgccgacggagcagggattggtcaaacgcttcgacggggtgtacaaattggcccgctgcacggcacagattggcgacgagggcggcactctgtggcgctacatcacctcctggctccagtcgctgttcaccttcgagctgccctacgcgtactccgccgacgaccggctcgacctgaacagatacgacccgtacgagctgttggcccgctgccggcactttgtgcagcagagggacctgctgaacgcagtgcgggtggacaatctgatcagaggcaagtcggcccgcattttcagcgattggctcaaggacgccaaattccatctcgaagtgcgactgctggttgagctgctcttggcacattcccaggcttcgggaattaggacgacatattgaaaataggcggaaacgaaacaagaccagtttaatttgtccaaaaaatattgattggaatgataaagtttagacgacccttttacagctntcgacactaaaatgaacgcaaaaa

SEQ ID NO: 95284 - DNA, 461 bp, Heterodera glycines
tttcgcctttatcaatggcctttcaacaacatttggtcaacaaattctctccacttctgatttccgtgttttcgcctctccgcaactgtgccaacttcgctgcaacaacgcaaaaagcggcgcattctccgctgcccttttcgctgaaaacgatggacgaattcgacgaggacgcggcgatggcacagcgaccgatgcccaaatggaaaaaggccggacttcgaattgagcgtaactgtgccgaaaaccaaatttttctgagcattgtccaagagattgtcgacaaatttggctgggacaattccgcccacgactatgacatgtggaagaaggcatttgggcccaacttcagcatgttcttcgtcctcgaccaaaacagagtgccgatgggttgcattagcatgtcattgtacccgcaggtggcacattggagcatgttctacgtgaaggacccctatcat

SEQ ID NO: 95285 - DNA, 754 bp, Heterodera glycines
caccctttgaggattaaaaaatataattcggaatgggattttcgacaaagccaataattattgacggaaaagatcatttgcttggacgtttggccgctgtcacttcgaaacagcttttgcttggccagaaaattgttattgtgcgatgcgaatccatcaacatttctggcaacttccaccgttccaagctcaaattcctcgcatttttgcgcaaacgctgcaatgtgaagccatctcgcggacccttccactaccgtgcaccatctcggattttctggcgcacggttcgtggaatgcttccgcataaaaccgcacgaggtatggaagcactgaaaaagttgaaatgttttgacggatgccccgcagccgtatgacacaaagaagaaattcgtacttcccaattctcttcgccacatcgcattgaaaccgcgacgcaaatattgcacagtcggccgtctcgctcacgaagttggttggcagtatcaaggcgttgtagagaaattggagacgaagcgaaaggtcagaggcgctgctttccatgagaagaaaaaggcagtgctgaagctgaagaggaaggcggtcgaaaatgcaaagccaaagacggcactgttcgacaaaattctcgagcaatacggacacgcgtaaagaagacgacgaagaccagtcagaaatgtgggaccgtttacggtgaataatcaccttttttgttgttaccatttgttgaatgaaagtatttcaaaaagaaaaatttttc

SEQ ID NO: 95286 - DNA, 648 bp, Heterodera glycines
gagattctttttttatatcattgaatcccacgtttgttcttattaatttgccagccttttcgaatatttaatggcaacgcaaaatggcgccgcaatggcaacggatcttctccaacgaaaggcttttaagattggcatcatcggcggcactgggctcgaggacccgcacataatggagcgcagcggcgaagtgcgcgtcgaaacgccgtacggacgcccttccgacgcactcattgagggaaatgtggcgggtgttccgtgtgtgctgttgtcacgccatggtcgtcgtcatcagcagtctcccaccaacataaattatcgggcaaacatttgggcgctgaaaaaggccggcgtcaatgtcatcgtcgccgcgtgcgcttgcggctctctgcgggaggaattggagcccggcaaattggtgctgatcgactcgttcatcgaccggacgacgaagcgcgagcagaccttttacgatggactgccgggtcatccgccgggcatttgccatatgccaatgcatcccgcgctcaacgaacgcctgcgacgggcgctgctcgccacggcgacgcgtttgggcgctgcacacagcgaccgcggcgtgttggtgtgcgtggagggaccacgcttctccacgcgggcggagagcga

SEQ ID NO: 95287 - DNA, 475 bp, Heterodera glycines
tgaatccgtctgtcaacaaaattcacttctccaaagatgaattggacaagattttgagggatgctgacgagcagagggattttcccgcgttgctccgttcgcttggccaattggcttttcgtcccaccgatggcttttccctcccttcgtccgctctctcccaaatggcttcccattttgcttcgcttagccctttctccgcttttcactgggccaatggactcttcgctttgctcccatcagcagaaaaccatgccaattccgaagtgctcattgtttcgcttcttcgctcgttggttgacaatgtgccccttctgaatgccaacaaattgcgtgcctttgtcaaaactgaaatttcgcggcaatgcgtctcattttggcaaattgggaaagcgcatttggcatccgcactcactttatgtgtgctacgaatcttgctgatggaattgtcctatttggaggcaattcaaaacgg

SEQ ID NO: 95288 - DNA, 838 bp, Heterodera glycines
ctttagtatttttcttttgaaatcgtataatggtcgagaggcgcaaggaatcgcctaagcgtcgccgccgttcgtcaagttcttcgagttctggaagctcttccagtactggttctagctcatcaggttcatcttcgtcctcttccaccactgcttctcgttcaccttccccaaagaaacaaagagcagctgctcgtccttctgctcgtgacgatcgtactacacgtcgttctccaagaaggtcgcgttctccccatcgtgtccaaccgaaaacagagaaaagcactgtcagctctcgccgttcaccgtctccccgtcgtcgtcgtccgtcgcctcccagccgcggcccgcgtcgccgttcgcgctcgcctcgtcatgaacgcgcggctccatcaccaccaccagtgaaaagggaacgtactccggaaccaccgccacgccgactttgtgttcgaaatctaagcagaaatatcacaaaagcgcacatggaggaaatcttcgctctgtttggggctctaaagtcctgtgagttgccaatggaccgtgtgcatgtgcatttgcccccggggatacggctatgtggagtatgaaaaggcggaggatgcgcgagaaggctctgaaacatatggacggaggtcaaattgacggactggaaattcagtgcgaaatgacttttcctttcaaagggaccggcggaggtcgtggtcattcgcccgtcgggattaattctatgggcattgggatcaagcgcgagcggagccgttcccctgcgcgtcgttttgccgctcgtttgtcgcctccgcgtcgcggccgtcgctcgcgctcgccgactccgatg

SEQ ID NO: 95289 - DNA, 563 bp, Heterodera glycines
gtccaattaagatgttggaaaaacctattttgtaccgaaattatctttcttcaatctcttccgctctgctaatgagcttccaacgagcacaactacaaaaggttgctgtgcattgtgaagggacaattagaagttgtagcaacagcagcagcagttcatctgatgacactcatccaacgtcgaagaaaatgccgccatggcaaaaaaactgcgaattttgtagacagcgcacagactttcgactattggacacgatgtgaagacagtgtgatcgaaaaggaatttcaacgtggaaaaatgatactgatggtcaacaaacagccggccgtccattccgattcgttcatttacaatccgaccaccagtaaataccaaatgcaaagtgcgccacgccttcgattgttcgattgccatgaaattcgtcaagttctcagcccctacggacttgaaattggtacattgaattcggcattgttggattattatcatgacgataacgatgtcatcgacatagatttgcgcgcacttttcggcacaaacataatgttgaacgaaccgcccaa

SEQ ID NO: 95290 - DNA, 543 bp, Heterodera glycines
agattctttattcatttttcatatatcacctacaacaatgcaacatgcgagatgcccctatgttaaagaaaatgcaccattgccgacaaacatcaaagaggcattgccaaaggatgtgtcggtgaaaattcaacaaatccatgacgatgggtcgttgagcgcggagcaaaaaatggagcgaattgactcgatcatttgcactctgccggagaatgtcattgaccaaattccggacccgccagaagttgcgcaactcccggctgatgtgcgccagcgcgtcaaacaaattgaacgccagcagggaaagtcattcagcactaaatttgaagagatcatgaaatatgtggacactttgcctgaaggcacaaaatcggctgccaaaaacattttccattgaatttttcatggaaaaggaggagaggaaagaagtggaaaaagcagcatggattaatgaaagcaaggctaaacaatatttattaaatattttattttttggtaaaatatttccaatttttcatttccaataaatatttttgctttgtc

SEQ ID NO: 95291 - DNA, 655 bp, Heterodera glycines
gtccaatcaagataaaaaaacggactaaaaaaacattttcttaattcgccctcgaatgtctctttcttcgatccaccatatgtcacgtctgaaactttggatgaccccagtgcgcgacaatcactttgggttggatgacctcaaaattttcaacagcgatggttactctgaaaatgccccattttctcgtgagagcagccgaaactcttccgcggatggcagcatcgcatgcaacgcggatgctgctgatgcggtcattaacatgaaaattggcgtctggaaaccattgcctcagaaaacttgtggcttctgctacatacaatacaagcgtcactgtcagcgactcggagttgcatttccgcgtgtcaccgataagggcttctgggtcggacacaccaccaaagacgagcacggggatgtcatctgtccggagttgcgcaagctgaagtgtccgttgtgttacgcttctggaaagaaggcgcacacattgaaattctgtccattgaacagcatcaaagggaggcgtgacgaagcataaagtttcgtagaacaactaccaaaataacttgtttgtcggattgtttttgtattgaattttgttatcaccttgcttattgttagtttgtccaccattgctattctgttggtttgtcat

SEQ ID NO: 95292 - DNA, 636 bp, Heterodera glycines
gtttgagagaaaatgccaaacattcgacagcagaagaagcatgaaatggtggacagtgatgacgaaaggaacgaatacggcagcactaaggctgaaccatcgccattgactgatcaatcggcgacgtcgatgatgactcataatagcagcaatgcggcggagggaggacacatcattagcagcaacggcggggcccaaatttgtggtggcaatggcacagtgccaatgccattgatttcctgctggtccccgtgctctgcgagttcagcgggggacccgctgctgtggtacgagacggacaaatgccagtactgcaaccaaaagtgcagaaagccccgtcgcctgttggactgtctgcactatgtgtgcgaagagtgtgtgcctgaacaatgcctgctgctggacaatttggagcccgacgaaatccgatgcccaaattgcagccaagttgaaatgtcttcaatttcgggtcaatccactgaaagttcgcgtgtggaaatctgtatcaaacacaaggagaactttacccgtgtctgtctgtcatgtgcgcgtctcctttgtgtgaattgcgagcagcagctgtccttgcccaccgcgcaagtcaacaatatcactaacgttgttgctgttccgcaa

SEQ ID NO: 95293 - DNA, 255 bp, Heterodera glycines
cacgaggagcagattgaggtggacgagaaaatattccgctggcagatgaacgaagacgcaatggcggacgaaaagctcgcggatggaattcgccgctttgccgtcgatgctattaaactcgaagagttgattcgatcgaacctttgaattaaaaagtatttgttgcctcttttttacgagtgatagaccattcccagctcattcaaactgttaattatctgaatttatttgccaatttaatacaacaatttatta

SEQ ID NO: 95294 - DNA, 513 bp, Heterodera glycines
ttaattgaataaaaattatttcatcaatgtcctttttactttttgtgactattgcttttgccaatttggcaccaaatgcttttggccagcaatggccaaaagcaacaagtgatgaaacggttccggcaacaattgttgtgacgggaggctccagagactttggctacaaacggttgaccgcctcttctgcgttgggcaccggtgatcagttcggagggccaaaaagcactgatccgtgccgaaaagggcgcagtgatcaaaaatttgatcatcggccaaaacggggcggacggcattcactgctatgacgggtgcacgctgcaaaatgtgtggtgggagaaggtgggcgaagacgcggccactttccggagcagcagcggatgcaaggagtacaattttctggtgacgggcggcggtgtgaaaaatgccaaggacaaagtgttccaaatgaacggcggtggcacgttgacgatcaaagattttgtggcggaaaacattggcaaattggcgcgc

SEQ ID NO: 95295 - DNA, 552 bp, Heterodera glycines
aattaataaattgaataaaaattaattaatcaatgcattcctttcttgtactgaccattctttttgccaatttggcatcaaatgcttttgggcaacaatggccaaaagcgactagtgaagaaactgttaaggcaacaattaaagtgtcgggaggcgtcaaagactttggcttcaagcggttgactgcctcttctgcattgggcagcggtgatcagtcggagggccaaaaagcactgatccgtgccgaaaagggcgcagtgatcaaaaatttgatcattggccaaaacggggcggacggcattcactgctatgacgggtgcacgctgcaaaatgtgtggtgggagaaggttggcgaagacgcggccactttccggagcagcagcgggtgcaaggagtacagtttcacggtcacgggcggcggtgtgaaaaatgccaaggacaaagtgttccaaatgaacggcggtggcacgttgacgatcaaagattttgtggccgaaagcattggcaaattggcgcgctcatgcggcaactgcaaaacgcaatgccaaaaac

SEQ ID NO: 95296 - DNA, 794 bp, Heterodera glycines
ttaattaattgaataaaaattatttcatcaatgtcctttttactttttgtgactattgcttttgccaatttggcaccaaatgcttttggccagcaatggccaaaagcaacaagtgatgaaacggtttcggcaaccatcaaagtgtcgggcggcaccaaagactttggctacaaaagattgaccgcctcttcggcgttgggcaccggtgatcagtcggagggccaaaaagcgctgatccgtgccgaaaagggcgcagtgatcaaaaatttgatcatcgggcaaaacggtgcggacggcattcactgctatgacgggtgcacgctgcaaaatgtgtggtgggagaaggtgggcgaagacgcggccactttccggagcagcagcggatgcaaggagtacaattttcttgtgaccggcggcggtgtgaaaaatgctgcggacaaagtgttccaaatgaacggcggtggcactttgacagtcaaagattttgtggccgaaaacattggcaaattggtgcgttcatgtggcaactgcaaatcgcaatgccaaaagcgcaaattcgtggtggagaatgtcaaagtgactgggctgaaaacgctattgtgtggcctcaacgagatttatggcgacgtggcgaccatcaaaaatgtgcaagtcagcggaccatcgaagaaagtgtgtgccgaatttgagggcaacgacaagcaaaaggagccgccgatgctgcgcagtttcgacgtcgggtcgagcggagacggcaaaaattgcataatttcgagcaccacaagcggctgatc

SEQ ID NO: 95297 - DNA, 269 bp, Heterodera glycines
cgcaaattgcgcaacgatgtcgccacggaatgtgccaatgtcgccattcatcgccagcagcagcagaagaacggaagtgccatcatcatgcaaacttaagcagaggacggacgagtgggatgaagaatgatggtgctggtgccaacaaacattcaatgcgatgaaatgatataaagcataatatgtatttctcagctgtattccattgtattgtatattccattatatcgcctatatgcgtatgcatggtctcaaataaactcacctag

SEQ ID NO: 95298 - DNA, 486 bp, Heterodera glycines
tttgagggaatggccaaatcaactgaggaggaaagaattgcaaatgtccattttgaccttgaagtggtcaattcggattttattcgaccgatgcgaatgaactttcgccggagggggcgcgacttatactgggacatggcgcttgggcacgacagtgtcgccgcactcattttccacaccgaaaggaagcagttgctgttcgtcaagcagttcagaccacctgttttcgttaacgtcgtccggtcactgcccgaaaacaaaaacaaatctctcgccgaagtccgctgggagaattatccgattgaaaatggatgcaccgtcgaattgtgcgccggacttatggacgaaccgggcaaaacgccgttagagcatatgaaaaaggaaatactggaagaatgcggttatcgagtggacgagtcgaacatccgcccgattcggcgttatgtgacgggcatttcgctgtcgggcgcaattcaacatttgttt

SEQ ID NO: 95299 - DNA, 476 bp, Heterodera glycines
attaaatacacttttataatttcactcaccatttttcattttaaatggcgagtggcgaacgccaaaagttggtcaacaattcgacagctgaacgtccaattccgtcccaacatttttccgtccattcgaatggttacggcgccatcgccgccgatgcgacgcggccatcggtcagcggttcgtccaattcgtcgtccgatggctttcattgtcacgcggacggcgaccgacggccaacggacgcgcaaaacggcgcaagtgatcagaggagggcacggacagtgctgtggatgtccgtgggggtgtgctttgtgtttatgatttgcgaagtgatcggcggagtgttggccaattctttggcgattataacggacgccgcacatttgctgaccgacttggcgagcatgctcatttcgctgttttcgctttacattgcctctcggcccgcttcccagcgcatgagtttcgggtggcat

SEQ ID NO: 95300 - DNA, 464 bp, Heterodera glycines
  unsure (1)..(464): unsure at all n locations
aaaaacaaaaatttcttttgccattatggccaatccttcaaaaaatattgccatgctgcgcgaagcgcgctcctccccgtacattggcggcggcggaagcgtcggcactttgccacctgacgcgctgcctgcttcaggcccgatgcacacgcgcctgcaacgcaatcgtcgaccggattcggccaccgcgcccaacactgcacgactgcagaacgctgcaagcgctgaacattttgagcagttgaaggaactcatccagttcagcgctggctcgtcctcttcaacctctctgattgctgctggacgccattttggcactgaacaatccattgaaaattatgggcgactcaaagcggaaagtgtggnacaatttgtcggaggtcagcggcatttgtccgaccagcagcaccgttccgtccatttcggaaagtcgcgcatcaatcacttcaatgacagccaccgcg

SEQ ID NO: 95301 - DNA, 420 bp, Heterodera glycines
gtctttcaggcatgaccgcgtaagcagttggaacaccgagactgccttgcaagataatggttcgtggtcgtggatcattgcgtgatgctgctaaggaggaaatgaatcgtggaaagccgaattgggagcacttggaagacgatcttcatattctaatccaatgtgaggacaatgaaaaacgtgcgcgctccaaactcgacaaagccgtggataaagtgaagaaactgctcgtcccatcgcgtgacggaatcgatgagttgaagcgcaaacaactgatggaactgagcatcatcaacgggacttaccgtgctaacattgggccaaagaactcgccaaccgttcctcgtcttactcctctgtccatgctatcaccggtccactcacctctttcgccgcctcaccgtgtgcattccaccgttt

SEQ ID NO: 95302 - DNA, 481 bp, Heterodera glycines
  unsure (1)..(481): unsure at all n locations
attaagcaaaaatgcagcaaattcccattctttccctctccaatttcctccccattttctcacttatttcggtgccctttttattgtcctttccttccacggccttcggttgctcttgtgcacccaccaaattcaatgagtcgatgtgtgtggccaaatgggtgtcccatgtgaaggtgttgcaaaacacaacaacaacaaactcccaccgcattttcactgtccgacatttggaagtgttcaaaagtcccaacggcaccgctcacaatgaccaactgattgggaaggaaagtgccgtttggactcccatttttacggcggcgtgcggagtgagagaattggacactgaaaaggaatatcttttggctggcactgtggacaatttgggaacaatgcaaattaatctttgtctgtttattccaatcgaagacggacagccaaatgccgagaatggcattgtcgaatgggcganagtgccgga

SEQ ID NO: 95303 - DNA, 917 bp, Heterodera glycines
ctgaaggccatccatacggcacttttggacgaagtgatttcatcgggcggggacgaaattaacggggaccgattcgccgccctccggaaatttgtggaactgctcattcagcgattcccgaagaaaacatttgaacgaaacccgcaattgagtgcacatcccaaggggacggcactttcatccatcggaaagcctctgctgcgaagtcaacgggcgtttaaagtgtttgagcaaatgaaacgctttttggacgcaaaagcgggcgacggcaaagtgtccatggacgagtggagggcggagtttgatcaggcgaagaaacaaaatggcgacccgtttccggtcacagccgaatgggagcactgcaagggaacgcgcaccattttccgcggcttcacatgcggcctgtggaccgcttttcatgcaatgactgtgcaagcgtaccttggccaggagcagcaaccgctgaagccgttgaaagcaatccaaggctgggtggccaatttcttcagctgttccggctgtcgtcgccatttcatggcgatgaccacggagaaattcccaatggaggccaaaaatgtgaacaaaccggaagacgtggtgctgtacctgtggaaggcgcacaacattgtcaacaaacgactgcatggggacgaggcaacggaggacccgcagttcatcaaggaacagttcccgccgcagtatttgtgcccgggatgccataaaactccatcgtccgccagcgatggcaatgacccgacggagttggacccggagaagacactacggttcctgctacagtactccaccaacatcaaaccgcgaccgtagccacaccgtatgccccttctgttactgctgattcgtagatgataataaggatgatgatgattatggatgaaaatgaagcttacttgcca

SEQ ID NO: 95304 - DNA, 435 bp, Heterodera glycines
gtccaattaagttgacaattttcgaacttttgttgacgcattatgcacgagcgagttcaacaggatttccgttccagcaagttttcaacacgagccaatcaaaatgggcagcacggaaatcggagtcgcgaagttcgtttcgacaacacaaatggacgggcgtacacacgtcgcaacggcagttattcgtcggaaccgtcgtcgggtcgacgaagctccttttcccgtcatcaagatggtgctcgtacatacgtaccctccactgcagtacagcgaccgatcagcccgaatgggtgtgacagtggcggcatgtttctaatggtcgaccccttcaacattccaaacacattgggcgcccaaattcaagtatttgatctccaagagaacatccgacatattattggttactgcattccattgcgttgctgtgtgggt

SEQ ID NO: 95305 - DNA, 470 bp, Heterodera glycines
gatatgaattcatttatttttcgtcgattaccttcattacgatttcctacggcttctatgaattttcggaaaatgttttcaactgctgcttcgtcttctcagcagttcaatgtcgaaaaaccggtcatcaacaaaagcgatatcatggagcccgaggattatgatctcactgatcggaggaaatgggttatcgaaaatatttcgaattcaattggtgatttgactaagatgatttttgcggttatttacatccaagggaaacagcacaaagtgacccaggatgacataattcacgtcgaacataacattccgctcgatgttggagaggaaattgccctggaaaaggtcctaatgatcggaaatgatgaatttacattaatcgggcgtccgttactcgacccaaaatttgtgcatgttcgggccacggttattgagaagacgaccacctctcctgaagtgcaatacgattt

SEQ ID NO: 95306 - DNA, 641 bp, Heterodera glycines
gtttgagataattttcactgcttttgcatacattcattctcgcgcattacaaaatgtcgattatatcaagtaaaccgatgaatatctcgtttagtaattcctgtagtccggattgcccgggcctcacgtggtgctcctgacatccctaacagtgagaacatagacagagatgcggttgctggtttagtaaaaagtgttgctgagggttggtgttgtcatctggcggagaagaacacgttggcactgtttattccatccaaacttttctcatctactttatcgcgcgagaattttgtcgatctgttggagtactgtgaggagcacttgaaggtccgtcgcattttggcttgcttcaacaagtcggacatcaatccatgccagggcattccacgcgccctccgttgcattggcttcaccctcctcccgcccgaacgttaccccgctggcattgacaagaacaccatttttgcgatggtttacaaaatctaagcgcagtcgacgtccttctcccccccccctttctctatctttgtaaaagatcgacacaattttaaacgagttgtattttctatccatgtattcctacagaaaatagcgtttttcatccattcacagtgatgtcaaataaaagtgtgaccaac

SEQ ID NO: 95307 - DNA, 340 bp, Heterodera glycines
aatcattcgctgagaatgaaattgacaatattcgccattctgtttgtggcattgtttattgccatcgctgaagcagatggcaatgtccgggcaaaacgccatgaagaacgattgaagcgccaagacaaccgagctgatgaggagaaccgccaggtagacagtgctgatcgggagaagcgccaagacaaccgagctgatcgggagaagcgccaagacaaccgagcaataatgtattaagccattacggatgacattagattttccgacaagaaacgtctactatgaaaatgtttcaataatacaccgaaccttattatgtaaaataatcaaataaaatttt

SEQ ID NO: 95308 - DNA, 510 bp, Heterodera glycines
caattaagatttattttagcttaatttttcttcctaaaatggacatcgatgaattgaaaaaaatgagtcctgagcagcaaaacaagcttctcgaggatgttcgtcgtcaatcagacacccaatcggttctgtctttgttggcctccttctctgaaaaatgttcccaacggtgtatcacaagtccgggcaacactttgagcggaggtgaaaaacagtgtttgcaacgatgcgtggacagatggcttgacagcttcagcattgtttcaactgcttttgctgccaaggcccaacagatggcaggcatgggcagttttggctcgccagacggagggccgtctttttcatgagggtggacagctcattgatcgttgggaatttgattttgttgtttttcgcttgtttgatcttttagtggtttctttttgaaaacagcatcgactcgttgagcaatattttcaattttaatattagctcaaaatgccagacacagataaaaatttgtcaacaaaa

SEQ ID NO: 95309 - DNA, 1794 bp, Heterodera glycines
gtccggagtcactgaatgcgttcattgagtcatcgtccgcccaattgatttcgcgcaaagagaatttcaaattggcgcagcaaagctttctcgagtgttcccaatactacggagagggcgcctctgccgtgccggacgttttttcacccggattgcgtcattttgcaagcaattcaaaaatgcccttaatgaactcgaagcgcggaaagcatctgaaaaagttggcatttttgccataattcgtcggaagattgggaaaagtgcaatggatattatgactgccgtccataggttcgatttctcagtgctcacttccgaccaagttgatgttctgcttccaatttttcttgccaaattgatggacattgagcgtttggagcggaaattgactctgatgaagcctttggttttctgttcccgaattgtttggcctttctctgcttttccctctccaagtctctcttcgtgcgcctcctcttcccctccccccgtctctcccttctcttccacccttctctctcctccactcgttgtccctcttcgttttcgcgaattctgtgcccaacccattcgagcagttcattttcaacacaaaaacttctgacagagagagaacagaggcaaaaggccaaagtgactttcgcgcgtttctttggttgcaattcgcgcggcaatgagtgcaattgagggggaaacgtgtggagtgttgggacggcttcagttcgaagtgcatgcaatcgttggcttcgcccgactttgtgccggcgatgtgttcgaagtttcggtaaggcacggccaccagcgatggcgcagcagaggcaaaacgttggcggacaaaagccagcggtgggagcagcgcatgtcgacgatggacgtgctgtggaacgagccggtggtggtgaaggtgctcgaagtgaaattcctcaagtcgcgctgtttgaacgaacgccaatttgacccagcaaaattcgcattggcacagccccaattggtcacgatgaatctgaatagtgccgggagcatcaaactccgtttggtggtcacttggcttccacttttggcaacaaaaacaattggcgaaaattcgctgaataattgccaaaaaggaaatttgacggagagagaaaagcaaaggacggaccatcggacgaacggatcgaaacaaaacgccagactaacgcaaaatgaacagaaaaaaagagatgaggaagaaagggggagggaaatgcaacagcaaaacacggagacgaaggaggaggaccaatgccagaacgaatcggcggacggcgcagcggtcaaagtttgcctgagggacaaaaaaaggcaaagggagcagcgaattcagctggggaacagtgtcagcacggggtcgaattttggaattggcaaagagaaatggcgctgttcttccacaactttgctggacgacgtgtacaaagacttggccaagtccattccgactatcgatgaccttaccgttctacacccgtcccatttcgcgtctcttccctcgtcgtccccacgccatcggtcgttcgactcggaaagtgaccgcgccaaaacggaagcgaaaaatccgcgtcgcattttctcatttataaaacgcggacaatccgaagcgagtgccgatcagcagaagaaggattggagaaagtcggcgagtttaggagaaatcgcattggcaaaagacgaatgctttacgactacaaatgcggaaaaagcatcgccagtctctacggaaaagaatggaaacggtgcaaaaaggggcaaaccgagcagtgtgaagaaaggacg

SEQ ID NO: 95310 - DNA, 659 bp, Heterodera glycines
acgagggtttgagaaagtgctttactaataaattattcataatgaaaaggccttcttcggttgtcgcttttggtagtcatttatttgtcggctttatcctgttgtcgcttttcattggcactttgggcactgagaaaaaagagacgaaacctgccgctgctcattctcccgccgatgccaaacatccgccgccagtcgccgcccacgcggccgctggcgccggccacgcctccgatccgaaacacgcttctccttctcccgctggggctgctgctgctgcttcccacgctcatccgcccaatggcggcgccgcccacgcggccgaaccaaaacatgctgcggctcccgctatcaaaataactgatgaggccaacaatgtttactcggtgtgtgtggagagagacgttctgccggcgccggaaaatgcgtcaaaggacaaattgaaggcaatcgctgcgaaatgcgacgaatgcggggcggcaaaatgcaaagcgaaatgcgggggcaaagaagtgaacgacgcatgccgaacatgcattatgcaaaactgtccaccggcaaaataaaaaatagcagaaatgaggagggaaagaaaggcaaaaacggcacggaaagaggacaaaatgatggcacgacgagaaggaatggatgaatgaatg

SEQ ID NO: 95311 - DNA, 484 bp, Heterodera glycines
ttgaggtttagcaaaaatggtatcagcaattgcacaatatttcctagcctttcttctgtcagcatccgttatcgcatttttctcgtttcttcttctgactgctttgtccattttcaaaccatggaccaaaaggaacaaatcccatttcgtcgccccccgttttcactttcgtccggaagaagaagaagaggcgaatgcgcagttcccttgcctgctgacgcgggaagagacgagttggaaggggctgcagcactcggaacccgaactttacctgtcggtaattgtgccagcgaagaacgaggaaaaaagactccctcggatgctcgacgagtgtttgaaatatttggaaaagagggcggccaaggactcggaatttacatatgaagttattgttgtggatgatgggagcaccgacggcacagctgatgtggccttctcctacgcacgttctcaccccctttttattctccgacttccaaaaaac

SEQ ID NO: 95312 - DNA, 651 bp, Heterodera glycines
gtccaattaagtggatcttcaaatttatcggctaaattcgacataattgacagacgtattgcaagtttagagcagagttggcgtaatgccatgcccatctcatcaaattctgcaactgccggcacctcggccatgtcttttgattatgcagagaaccgatttttgctgtgtggcaatgctcgggggaatgtgtcggtcgtcgatttcgagtcattttccaactctctgtcaaatgccgaagtttacccgaggcattacgtcgtaattaacaccaataggaaaagtcatcacgaatttatggtcaatggatgtcaatggtatcccgtcgattcaagcatttttgcaacgtcaggaagagacaaattgctaaagatctgggatgctgatcagctcaagtcggtggaaaaatttgcattcgagcagcccatttccagctttcattggttcgttccgtgcgattgcaactcttcgcttattcccattgccacttcctcgtcaaatgtcgttttgttggacccgcgattgggtaacactgcacaacaaattcgctgtttgcagcaacgcatttggtcagtccgctgggaccgtttccgtgactatgttttggtgactgggagcgacagtggcgaaatcgctttgtgggacattaga

SEQ ID NO: 95313 - DNA, 342 bp, Heterodera glycines
gtgccaagtgccgatttcttcggcggcattggccaccgcctttcaggcgacgagaacgttgcgatggtgttcatgctgttgatgatcaccattttggcaacgaatacggccattctgatcatgcaaattgtcatgttttggacagttatctcacggccaagggcagcagcaggtgaacagcagacggagaagaaaaagacggacaactacaagaaaatgatgagcaacaccaatggaaaagtccatttggtgtcatcgcctcgcaattcggccgaattgctattgtttgaccgcaaagggaatgccgtcgtctgaacgctgtgcctttcggcaatttgctag

SEQ ID NO: 95314 - DNA, 416 bp, Heterodera glycines
ttacaaattaatttgttcaatatacacacataaacgatggagcttggtgatatggttttggcaattttggagttgatctgttgcttcttcgtgccgcccattgccattctgctgaagtcgggcgagtgcaaccaacaagtgctgatttcggtcgttctttgcattttgttgtggatccctgccgtcatccatgccatttggtactgtttcattcgctgaatgccatggcgaacaatggcattgaaatgattcgattggaccgtttcttattcataaaaaactattccgattttgggatttgttacatatccaattctcatcattttcaccttttctcatcaacatttcaaaaataaaatcgatcatggttgtaaaatttcaaatacaaaattaaaagaaaagtaaatttcaacccg

SEQ ID NO: 95315 - DNA, 240 bp, Heterodera glycines
ccctgcgcctcctagcgactcaattgttaatgccaatggccctcagttaaacaatcaacaaacggacactggtctcgtaaacattgttccgcttgcatggcaaccgccgaaattcacaaatggcggaatccaaggacaatcagagtcgaatcctatgctttttggtggaggattttcatttacgactactgttcctccagcagctaacggtcctttccaatttggtgctgcacctccagt

SEQ ID NO: 95316 - DNA, 658 bp, Heterodera glycines
gtccaataaagcgacctgttaacagcgatgggtcttccaattatccaaatttatatgatcgtcgccagacagttgtcaaagcccatcactggatattttatgggattggggaaagaacacccggcatttcggaacagagtgttaataccaatagggaaaactatcacaaattggttccacaaaattgcgaatgaaaaatttggacctcggctcaccaacttcagtggtaaatgtatcggaagagacagcgcttgaacaggcttcagaagtgatccatcaagtggccattttcggctacactgtcgtggtgttttacgcttattcctatttcacgcacaaagaggagaaggaattggcaagcgccgaggaattgagagagctgagcaaaaagacgagccaggagataatgcgactgaatgtgctggttacggaattgcaggacgaaatgcgaatgccgcggagggaccgaaattggactttcccatggtctggggaaagcaaaagtgcgttgcgtgaaagcgccgtcgttaacccaatgttgccaagtgtggtgatgaccgacagtcagccgaaagaacagaaaaaagacatgaccaaatcaatctcaaggacggaagcattgaataggctaacaaatgccaccgaaacttcatcgtaa

SEQ ID NO: 95317 - DNA, 744 bp, Heterodera glycines
acgagggtccaattaagtaaacttttctattttcctcgccttttcacaatgtctcggcatttttccttattttccacgaccggcagaatttgtgaactacggctgcagccaaagtgttctcgtcgtttgttttgcagcatttcgccttcaacaagttcgggtgctcatttggacagcggcagaaaatgtcaaaataaacctttatgcgcactgagtgcattctcacgggagcaactcggcacttccatcctccacccggaggcgaatcggtcgacgcaaaggattgtcctaatctcgaaaatttgttccctcggaagttcagctttcggtctcgtcatggttccgctggtcacttccgccctttgggagcccatcgccgaacggccggccatcgctgtgttcgccggcgtggccaacgtttttctgttgctcttcgctttcacgccaattctgctccatttcctgaccaaacgttttgtccaaaatgtgttcttcaacgaaagggagcagatgttcaccaccgtccactacaatttcttcctacaaaaacgcgctcttcgctttaccgccgatcaattggtcgatgcgtctgagctaccaaaggacaggcgcttttggctgccgttggccacttgcttggcccactcctacccaatgcttctcccattggacgccaattgctacagcgaccaaacggcgttcaaattgctcacaaaaaacataaaattgccgacgaaagaggag

SEQ ID NO: 95318 - DNA, 496 bp, Heterodera glycines
atttacatattttcccttttattttccatcataagaaaatgaacagtaagatgcacagatctttctttcattggacatcactactcatgcaaggcggtattttgtgtgcgccaataattgtcaatttacagagaaataaattgaaccatgacttcaaacttcgcaaaatgatgtccgctgaccttcccaatatgcctgatgaaaatctgctcgatttggttgaagctgaaatgttagccaaatctaatgatcggctttatccatttgaaaagcaccatttcggcatcaaagttaaggacgacattgaatcgaacacttacggctttttctattgtcaaaacggagtcactttccgattcagttcgagattggccttaaatgatgtcgagaccatccgacgccattatccaaattttctcggactttttaaagaaaatctcaaaagcaaatgggcgaaagacttggaaagtgtcaaggaaaatttacggtcggcaaa

SEQ ID NO: 95319 - DNA, 431 bp, Heterodera glycines
gattcttttatttaaataaatggataacgaaaaatatgccatgcttgtgcgttccgttcacaaaatcgtttctcttgcggacgaactcattgagcagaacaacgagttgaccgaatacgtccagggtttggagttgcagggccagcaattgcctgacctcgaaattccggccagggatatggtttctgctcttttgcaaaactatagtggccagagacacgcgacgggtgttcaggcaaagatggaacttcttagagaggcgatcaacaatatttcgaaacttgccgatttgttcgtggctcgtaactgttacttgatcaagcgaattcatgcacatttggagacggaacgcttccgtaccaatgatagagggattaactgaacgaatactgatcaatcaaatgctttgtttttgaagacaaatctacaat

SEQ ID NO: 95320 - DNA, 1507 bp, Heterodera glycines
gtccttaagtacccatttcgtacctacatttgacgaaaatggatggtgctgaatcagtcattttgcagtgcgcaactgagaaaggaaatggcgttggtccatcagtcgcggccgattgtgaggcgaacaaattggccgaagtcaccgagggattggcgagaatcaccgcgacggcggagggcggcgagactttctacaaccgagtgcaggagttcaaccgagacttgacgagtttagggtcgtcgttttgagggcattcgctgccgaaatacccaacgaaaaagagccgaaaacggaagaggagggcccaaaagccaaacagaggaaaatggacgagggaaaagcacccgaagcaaatgcagcgcaatcccagccccgtgccttttctgtgctcgatgccttgtccgcttctggtctgcgcgccattcgcttcgcgttggaagtgccaaatgtgacgcgcgtggtggccaatgacttctccgagaaggcattcgaagcaatccgtcggaatgtgcagctgaacggcgtccaggacaaagtcgaggcggtcttttccgacgcaatcgatttgatgatggcacatcgcaaattcggcaaaaggttccacgccgtcgacttggacccctacgggtcggcgtccgcctttttggacgcggcggtgcaagcggtgatggacggaggcttactgatggtcacttgcacggacacggccattctctgcggcaacactcccgaggcgtgcttcaacaagtacggctcggtcccgctgcggcacaaatcgtgccatgaattggcccttcgcattttgctccgtgccatcgacgcccatgcgaaccgtcacaagcgttacattgtgccgctcctttcggtcagcgtcgacttttacgtccgatgtttcgtccgaattcggtcgggcgctgcgatggccaaagacagcgtgacaaaactcgccaatgtgaactgctgcgccacctgccaaagtttggactttcagcctctgctcaaaaagagtgtcagtgggcccagcgtgcgcttctccaccgcccatttccagtccgaattggttcgtctctttttgggacagtccgacgcgtcgatggacggacgaatggtggccaaatgcgcgcattgtggggggacggccattcacacgggcggccccatttgggtggcgccgacgtgggacaccgaattcgtcgggaaactgctcgcaatattgaaaggcccgaatgcggggcagctgagacttggcactcgtgaacgcctggagggccttctgacggttctgtcggaggaactgcccgacgtgcccctcttctacgaacacgaccagctgatggtcgtcatgaagtgcccctcgcccaaaatgaacgtcttccggtccgccctgctcaacgcgggcttccgctgctccatctcccactgcaatccgcgggcagtcaaaacggacgcgccgacctcttttctgtgggacgtgtgccgtgaatgggcaaaacgaaacggaatc

SEQ ID NO: 95321 - DNA, 584 bp, Heterodera glycines
gtttagatcagtttttaaaatttcatccatttgacatctatttttgaaaatcagcagtttcttctttctgtttaataatgaaaagcgaaagaaaaggtggcctcgttccatcgttgtcgtccaagcgccaacagcaaagtgtccccagccattcggttccatccacggagccttcgcctttagcttctccgtcgttatttttggcatcgcaaaatgtcggagacaagggacatcaaccgccacaaaagcacgtctacagcgaattagccttgcgcaacaattaccaaatgttggaacagagcaggacatgtcaagcggctgtcagcggaatcgccagtggcattttggggctgaccggcactttgggctttctgttctatttcctttgtgttttcttacaggcttttgtctggcaatacaagacgggctttcgatggagtgcgtttttcacgagtcgttcgcttttcctcacccattcggtcgttagtggccttttcacttatgtccttttttgggtgtttgtctacggacttgtccatgtttattagctgttttgtaccaacagtatttaattttctttattc

SEQ ID NO: 95322 - DNA, 426 bp, Heterodera glycines
gtccaattaagcatataaaatttgccaatttgtttcccattttggaagaaatgtcccaagatttgttcggccacagcaaaagtgaggaatggaaggattcggacgagacgggcaacgactcggacaaactcagccaaatgtatgtcggcattcgcccggtggacaaatgcctgcgaattgcctatgccaaagcgatggacatgaagcatcagaaagtgattgtgatggtggagaatgacaacgattttcgcacctacgacacgaaggaagtgcccgtgggtgaaatcatcaaatattgaacattgttggctggtcgaaactgaaaaggtgtcgaaattgatggctttccggcggcggatgatttgaaaatttaaataatgctttttttccctctctttcactttgtcatttttgatcgtttgcctt

SEQ ID NO: 95323 - DNA, 289 bp, Heterodera glycines
tatacacaatgtctttaattaccataattaattaatcaattaattaatttttcataatttgttccttccattgttcgcttctcttctcaggttgattgatcaccgccaccacacatacacactttccgatcacattttgctatatgaattccttcgcttatttaccatcaaacaaaatatgcaattttttggaccaccaatttaaagcacatttattttcatgatttaaataaattttccaccaataaacaattttgctttgcttttttctaaagaattataaatcttt

SEQ ID NO: 95324 - DNA, 661 bp, Heterodera glycines
gcgtcgtcttccccttgtgccgagaattgcaccattttcccccatccaacgttttgaaaaacaattcccgaagatttattatgctccggaatggcgacttgacgaatcggggaagagaatgacgaggggtgtggaggagaaatactcgccgatgaataattacggagttacgccggacaagtgggagtacatgaacaaggtcgtgtggccccctaattacgtggtgccggagacgggcaaaccgaagccgagggaagtgttccattgcattgagaatatccacacggcaccgaaaaaaatgcacactgttcaccaatttgcgttgaatatggtggtggacgaggccattcagcagcttcgaaaccaccagaaaaagcctacttttttactggccgatttaatcgaagaggcaaaagagcgtgcaaggaaggagtttttcattgaaaatcctggaaaaatgtttgttgccgagacatttcacatccaatcgaaaattgtgaaaggggcgagacgacacgcgcacgagaaatggcacccgatgagataccgttacatcaatttgttcgttaggctgcaagaaggcgatccgcccaagtcccaaaaacgcgaacccgacgccgacggatgggataaaatggacaattattatgcttttttgcaa

SEQ ID NO: 95325 - DNA, 1039 bp, Heterodera glycines
aattagttgaaaaccaaaaattaattggccgtgacgaaaacaatatcatcaaccacagaaaaatgaactgctccagcgctgcaatgttgatgctgttgatgaccattttcactgtgctgtccaatgtcaacgaggtagcagccgaggagcacgagctggtcagccgcattaagcgcaacggctacggatacagcagcggttatggtggtggctgttcagcctgccaaagcagctgcaccacctgtggttacacatcctaccataccgtgcctgcggctcccgctcccccgccaccaccgccgcctccgcctccgcctgcgcccgtctacagccagtcttcctactcctcctgctccacctgcgggggcagctcctactcctcttacccgtcttcctcttactcctcttatcccgcttcttcctcttcctattcgtcctaccccgcttcttcctcttcctactcctcttaccccgcttcttcctcctcctactcgtcctacccgtcctactcctcctcttcctcctgctccacgtgcggcttgagcggctacagcaacagctggaacaacggtggcagctcgtccaacacgtggagcagcggcggctcgtccatgtcggcgggcaacggcggtggctacggctacggcggtggcagctgctcggtgtgcggaaagcgcaagtgagcgatgcgcagcgcgcgcagcgctgtttcggcacggacgcaacagcggcgagggcgcgcggacacggagaatgaactgacggaagaccattgaaattctcccaaaaatcttggacccatccccaaccacaatacccatccaatccgtcccacattttgttaggctcagaaagcacacattttaaatggcataattattttaaaaattttaatttaccaattggcacccaaaacagcaccagcacactttgtttatttaattgtttaaattaatttttgtttcaataatgttattttttgtttgtgtgatcacaattctccaccaccccaataaatgataaagattcgaagttgatt

SEQ ID NO: 95326 - DNA, 1092 bp, Heterodera glycines
caagtttgaggattttaggaaaaggtacacttactttctacaaaatgacctcacaacccattcgcgtattggtcactggtgcggctggacaaattggctattctctggttctgcaaatcgccaaaggggatgtttttggcaaagatcagcccattgtcctcgtccttctcgacatccctccgcttactgaagtgctcaccggcgtccattacgaattggttgactgtgcgcttcccaacctcttcggcgtcgaggcagtgaccacggaagaggcggccttcaaagacattgactacgcttttctggtcggagcgatgccccgcaaagaagggatggagcgaaaggaccttcttgcggccaatgtccgaattttcaaatcgcagggcgaagctttggccaaattttccaagccaacagtcaaagtgctcgtggtgggaaatccggccaacacaaacgcattaatttgcgccaaatacgcggccagcaaaattccggctaagaattttagtgccatgactcgtcttgaccacaaccgtgccatggcacaagtggcacaaaagtgcgcagatggaaccaccgttgggatggtgaaaaatgtgatcatttggggcaatcactcgagcactcagttcccggatattcgacatgccaaaattgccaaaggtggttccgaaactttggcctatgatgcggtcaaagacaccgcgtggattcaggaccaattcatcaagaccgtacaaaagcgtggcgctgtgatcatcgaaaagcgcaaattgtccagcgcaatgtccgcatcaaaagccgcgtgtgaccacatgcgcgattggttttttgtcactccgtccgacggtcgttgggtgtccatggctgtgtttttttacggctctcacggcatccccgagggattggtgttttccttcccccgcaccatcgatgcacaaaaaaagtggagagttggggaggggctctacctcgacgactttgccaaacagaagattgacatcactaagaaggaattgttggccgagcgcgacgaagcactcgcggcatgcaagtaatggaaaaggagagacaaacgtagaggaaatgaca

SEQ ID NO: 95327 - DNA, 421 bp, Heterodera glycines
gcggattgttctacctgcattccaagggcatcatctacagggacttgaagctggacaacgtgatgttggagagggacggacacatcaaaatcaccgactttggcatgtgtaaggagggcattcagggcgacaccaccaccaaaacattctgtggcactccggattacatcgcaccggagataattctctatcaaccgtacggaaaatctgtcgattggtgggcttacggcgtccttctgttcgaaatgctcgctggacaaccgccgtttgacggggaggacgaggacgaattgttcacagcgatcaccgaacacaatgtctcttaccccaaatcgatgtcaaaggaatcggtgctgatttgtaaaggatttctgagcaaagcgccctccaaaaggttggggtgcagcgcggacggagaacg

SEQ ID NO: 95328 - DNA, 411 bp, Heterodera glycines
  unsure (1)..(411): unsure at all n locations
attccatggaaattgattcgcacccatccgcagcagttcagcccgaaccggcaccaattgagcaccaacagcaaaataacacgagaattttgccaaaatcgaaaaaatggtggaaaaaagcactgaacattaggccgatggccaacagcagcacaaagcccaggtcaagttgggagcgcaaaatgcagaaaaaggggcaaccgccaccantgccggggcggtggaaggcgaaaatccggcaaacggttgccaaaacaaaaggaacaccggggccagggggttaaagggaccgccagccagcccgaaaaaaccaattaacgggaaggttaaaatttttccaagtgatccccaaaccgggcaaagttgtaaaggggtgaaaacccccactcttttggcgaacaattgtcaaat

SEQ ID NO: 95329 - DNA, 780 bp, Heterodera glycines
attttgttttatttattgcttctcaatttgttaaattttattcaacgcggttatcttatgtccgaaaaggacgtcccacttgccttttcgggaccggtcaaattcgtcagcaacgcgctcgccggaggcaccgcggcggttgtcacaaaaacggtgattgcacccattgagcgggtcaaattgctgttgcaggctcaggacgcgtcggcacatatcactgcggacaaacgctacaaaggcatcgtcgacgtcctcgtccgtgtgcccaaagagcagggcttcctggcattttggcgtggcaattttccgagcattgttcgctattttccttcacaggcgttgaattttgcgttcaacgatttgtacaaaggcattttgagcaaaaattcctcctcaaaaaatggtcaatttttggggagttttgccagcggtgccgccgccggtgccacctcttcgctgttcacttattggctggactttgcgcggactcggctcgctttggacattggcaggtcccgtgaatcgcgcgagttcactggtctcgccgatcttttcgccaaaatttggcgttccgacggacttttcggcctctaccgcgggttcagcgtgtccatttgggcgtccatcatttaccgcgcctgttatttcgggtttttcgacaaggccaaggcgtacgcgtcgtcggacggcaaacggccgttgtcttttctcgagagatggctaattgcgcagggagtcacaatggcctccggaatgttggcctatccgttggacaccgtc

SEQ ID NO: 95330 - DNA, 408 bp, Heterodera glycines
ccactattgagattttcttgctaaatttgtgccgaataaacgcaccttgggaatattttaccggattaaataaaaaaaaagatggccgagacaattaaggatgccacccatcgcatgggccgaatgcttccggcagaggctggcccgcgttatgggctttacgcggcactggcggcaattgccggattggcctattgttaccgcgaccgtcttggatttaaaaagtgaatggacggacggcggaacggattggtcacccaccattttgatgagagagggggcaattttgaattcggattgttccaaggtccacaaattttatggccaatggtcggatcttttttcatttgatgctttttggtttcttttcactgtaaaataaatactatttcaataaaaaaaaaaaaa

SEQ ID NO: 95331 - DNA, 447 bp, Heterodera glycines
agagcattaaaaatggcttcaaaaaaagccgatgaaaatgatgagcctgaaggttccgagggttctccaaccaacaaaaaccggtgggacgcggatgcggccaatttggaaaaggtgaccgatttccatgaagaaaaagatgagatgaacgaaatatcgaaggaatcgttgggcaatttgaaagcgcagcccggcgaaaagcgattcagcgtaaggaaggaggacgtgcaggcgattgttgacgacttggaagtgtccagaataatcgccgagaagaagctgatacagcacgaaggaaatctgaaagcggcactgctcgaccttatgggcttcgcggagaacaaccagtgaatggcgtcatacctaaatatatttctgtcaccaatttattgtttaaatcctttatcagcgattatcgtaaataaatacgatggcgcgaatgactaa

SEQ ID NO: 95332 - DNA, 396 bp, Heterodera glycines
ccgcattcaaatttaaattttcatttccatccttaaaaaaaaattcaaaatgaaaagccttactcaaattaccccaattattctcccaatatttttgttactcttggttttatcaccaccaaacgcaatcggccaagatttgtgccaatgggacagcggcaaatgctttgaccgagggtgtccatatggttgtccatatgacacggaaccagaatgtggttgtacttcaccaaagcatgacgccggcaagaagcaaaccaattagcctagaagccgagaactaaacaaattaacagaaaaaaggcttgaaggagggacgcaggatgaatatttgtctaaaaatgaaatacatggattaattaatgtattatttaatgatttaatccgaaaatgata

SEQ ID NO: 95333 - DNA, 483 bp, Heterodera glycines
atttacggcgtgtgcctaacggcactgcctggtccccttgtacccctaaaaattgacttttttaatccccccccccccccgaagccaaggtctgggctacgctcttggttggtttcaattggtttcgtttctctcattctccgatgcttaggtcggaagttcgtccgttccgaatgctgaagtcacaaatgtcgcaagtacttccgtcgatgttgaccaaaacaaagacaaaaaccgagtggcccagcagcctttcttcggtcggcggcgacgtgtcgtcagcgcttttgagaagatcgttttccgctcggctaattccggcctcaccattctcatgcccagggaccaccccgatttggcggcggcctttcgaattgcttccgagacgtactcccacgggtacaacactgccaacgcgtcaaaggcgttggaccgattcgtcaagcgcaaattgctttgcgtcgagcaaatgcaatgtttggc

SEQ ID NO: 95334 - DNA, 1170 bp, Heterodera glycines
ccgaggcgagggcggttttctgattaataacgaaggggaacgcttcatggaacgctacgccccggtggcgaaggacctcgcctctcgggacgtcgtctcccggtcgatgaccatcgaaataatggagggacggggagtcggacctctcaaggatcacattttccttcaacttcaccatttgcctcctgaacagctcgcacaacgtttgcctggcatttctgaaacagctagaatcttctctggcgttgacgtcaccaaagaaccgatccccgtgttgccgactgtccattacaatatggggggaacaccgaccaattacgaaggacaagtgatcagattctccaacgacaaaggcgaccaagtcgttcccggtctttgggctgccggccaatgtgcggcacattccgtccacggagccaaccgactgggcgccaattcactgcttgacttggtcattttcggtcgcgcatgtgccattagcattttgtccgccaatacacccggcgattcgctgcctcctttggaaacggatgccggagagtcttccattgccaatttggacgacttgagaaatgccagtggtgacgtgtcaaccgcggaccttcagctctaattaccctgcgtacaatgcaaaaacatgctccgtgctgttcaaaacgcccaccattgcttcaagaaggaattgaaaaaggtcgaagtctcttcggactacaaaaacgcccttcgcgtgtcggaccgccgattgattaagaattcctacctagttgaaacgttggaactgcataatctgctcattaatgccctccaaacaatcgtcgctgctgagaacagaagagagtcgcgcggtgctcacgcccgggaagactttccggttcgggtcgatgagttcgattacacgaagccaacagaaggacaatcgaagaagaaattggaggagcattggcggaagcacagcataatttaccaaaatgtggagaacggagcggtgactttggagtacaggccggtcatcgacacgacgttggacaagtcggagaccgattgggttccgccgaaaattcgctcctattagaagcaataatgacaaattgcaatccaattttgttttaccgtatttagctggttgtttcaattcgattggctttatgattaggtcttcaccgcaatttt

SEQ ID NO: 95335 - DNA, 497 bp, Heterodera glycines
atttttaagccaaatatttaaaatggaaaatatcgaaattacgcacgaatggagcggccaacaatgggattggcccctgcagcataatgacggggtggtgaaggttcacaacactccggaaaaatgggaagttgggttggacgtggcattcttcacgccaaacgaaattgaggtgaaagtggtcgcggaccatctgaacatccattgcaaacacgaggctcggagcgatgtgcacggctcagtgagtcgagagattaaccgctcgtataaattgccgaacgatgtgaacacaggcacaatcaaatcgcatttgactcagaacggcgttcttcgcgtctctgcgcagaaaaaatgagaggaaatggcgaaccatggaagaagagaagagacaaagtgttctgtttcacaaccaataataatcctgtttatttactttgctttttacttttgtaatttatcgccgtttcgcgaataattaaaaattgcgtccatcaaaa

SEQ ID NO: 95336 - DNA, 509 bp, Heterodera glycines
gtttgaggtaattgcatttacaattgtaatataaatgtcttatgcttttgttcgacaaccgcacaaaaattcggtgtgccttatgggatggccaacgacaaattcggtgattatcagacaaaggcacggcgctgaaactgaacaggcgcgcatttattggccaggaagtgggctcagaacgaagagcgaaattgaggaggagtttaaatgtgcccgcgacggcaaatacccagaagagaatttggaagattggtcaatcacaggcaaacggagtttgactcagaaggcgcttttccattacacggaccgtcgggcgggcaaaggctattccgactttgccaccaccctttactacggtcgcccttacatttggccgcccgttcgcgaaattaaccgatggcactttttcatttgtgtgacctttgccctggttattctcgtcgactgcaaatggtttgtttcgtccttcgaattgtttcgtccgcccaaatcggaagccgcgactttgg

SEQ ID NO: 95337 - DNA, 634 bp, Heterodera glycines
attgttacaaaaatgctttcttcttccgcctgctgtactctgttggccgcgctcatttcggcggcgtttttcgccgcggctaacccaccaacggtgaagcagtgcttgtgctccgaaattcagccctgcacccaaaagtacatgaacacgtggaaggcgtgcatggagcagtgtaagggccatctgtccggcgtgggtggcaacgtggacaaattgggccactgcatggacagcaactcggcactcctccaattgtacaatcaaatgcacccaatcgcatagccaaacggcatgtgccaaatcggcggcatcagctaaacaggtgccaaagcgataccctgaaacgttggaaattgctacaatcagtgagatcaatcggatggtcaacagcatgggcatcgaaggcgcaatgaaaggtttgatggatgccggcaaaaaaatgtacggctgcacgagcaaatgcatgaacagcaaggcgggcaactgcgagaagtcgttcaagtgcggcttggactacccgccggacaacgtggcggtacaggaagtgaagaagtgcgccctcaacagcggactgaacaccgccaacgcgcaagcgctgtgcaaatgcgcgtccgccgcgggcgttaaaaatttg

SEQ ID NO: 95338 - DNA, 917 bp, Heterodera glycines
gttacaaaaatgctttcttcttccgcctgctgtactctgttggccgccctcatttcggcggcgtttttcgccatggcaaacgcacaaacggtgaagcagtgcctgtgctccgaaattcagccctgttccgaaaagtacatgaacacatggaagacatgtatgcagcagtgtaagggccatttttccagcgtgggcggcgacgtggaaaaattgggccactgtttggacagcaaccaggcactgctccagtcgaccatcagatgcacccaatcgcatggggacgagtcatgtgccaaatcgccggccgcggttaagcaggtgccaaagcgatacccggaaacgttggaaattgcaacaatcagtgagatcaaccggatgatcaacggcatgggcctcgaaggcgcaatgaaaggtttgatggatgccggcaagaaagcgttcggctgtacgcgcaaatgcatgaacaccaaggcgggcaactgcgagaagacactcaagtgcggcttggacttcccgccggacaacgtggcggtgcaggaagtgaagaggtgcgccctcaacagcggactgaacaccgccaacgcgcaagcgctgtgcaaatgcgcgtccgccgcgggcgttaagaatttgacgccagccatctgcgcaaaggtcaaagtcacctaaacaagttcatgtcgtccgggcgctgctgatgactgactgatcagtgtagtaacagagagatgagcaattttagtgatcgattgaccgaaatcccccaaaatgttttgacaccggtgattgatcgatagttatcatttatcattttggtggtcccttccaccccatttgtttcccatgacatcacctttttcaatttaacacaaagcatttttctcttttcactggcaaaattgctttttcttatctgtagt

SEQ ID NO: 95339 - DNA, 575 bp, Heterodera glycines
cctgattacgccaagcttcgaaattttccctcactaaagggaacaaaagctggagctccccgcggtggcggccgctctagaactagtggatcccccgggctgcaggaattcggcacgaggaaagcttttaaatttttcttcactgctttcttagtcagtttgttatcagttgctctccatttttattttgacaacaaaacaatttttcccgctaaatttggcgaacgatggcttcttctcattgcgcacccggatgatgaaacgatgttttttggaccaactctgttgttcctttcatctatcggtgttcaattgcatttgttgtgcattacgtcggggaattctgagggacttggaacgattaggcgaaatgaattgtattcgtctgcttctgtttatggcatccaacccaaatacatctcttttgtggatccagaagagcgaagattcccggatggttttcgcgattggaatatcaccagcctttctgcgctgatttactcttacattcgacggctgaaacccgatggactgatcacttttgacgaatggggcatcagtggacatccaaacca

SEQ ID NO: 95340 - DNA, 635 bp, Heterodera glycines
gtttgagtaaaattcttgcatttttttcgtctctacctaatcatgaatcgtggacggaacaatcaaaattatttaattcatggaattagcaaatactggcaagtcgtcggcgctctgggtctgtgcgttgttatggtatgcatcacttatcaattgtttctgcacgtggacgaaaagcacaaatcgttcaaactgatgatcagtggacatttcaacgatatcaagcaaatcaacaacgatttcacggcgtggtcaaaaaatttcacatcgcatctcaatgagcgtttcgaacagcaacaggctcgatcaagggctcgtttcaaacaacagttggcgaattttgtcaaaatccgtttggattttgataaacaatttcaaaaaacaatgtaccgttttgccgaagttgagttggaaaccgtgctgaataaaagcaaagcctccggcggtggctgacattgacgtttgtttgttggttgttttttgccgctcaatgtgatctcctccgacttttggacttcaaaatttttgccccgttttgtgggaaattggattatttacattggtttttctttgttgctttgccagtgactgtttttttgtttgatgcgcaaacgaccacattattttgcacaaaa

SEQ ID NO: 95341 - DNA, 479 bp, Heterodera glycines
ccagtcgggagtattattttgtgattgttggtcgtcaggaccaacctctgttcgagatggacttcccgccaaagaagcgcgagcagcagcaggagacgcaccatttgctgcagttcatcgcgcacgccgcgctggacattgtggacgagcagacacttcgcgagacgcaaatgtattttaagattgtagacaagttcaacgaatggtttgtgtcggcatttgttactgccagtagaattcgctttttgatgttgcacacgcaaaaaaatgaagacggaatcaaacaattcttccaggaaatttatgagatgtacatcaaattctcgatgaaccctttctatcgacaagacactccgatcagatcgccaagttttgagcaaaaagcggcgatgtatggacggaagtttttaggggtttaaaaaagaccttggaaatttaagtttttgttgccatcagatttgtgtattttttgcattaca

SEQ ID NO: 95342 - DNA, 624 bp, Heterodera glycines
ctttgctcactccttccgtggcttcttcttcggggtgttcttccttcacaattaacagcttcacccaaaatttggcctctgttctctctgacaccaaacggtcaaaggccgaagtcgcggctttctttactcgccattggggcgagcaattcgtgccacagaaaaccctttgctcagcaccgaccattcccaaaatttccttggagcatttccggcattatttggacaacacagcgaagaaacaccgtcaatatttgcgagtgcgaaaaacacttcagcggagcaatggccatctcatcggtgagcaaatcgcaccggatgaaatcccttcgattttcttctcctccgccttttcataccgtgactcggctacttttgaagcagttttccttgagccccgtcaaggggaggccgacaaaatcatttccggggccgagcaaagacggggggccgtgggtattggttcactttatcgtcccgcgagttgtggctcgttgagttcgatgcaaagtgtgcaaatgagcattgctcctgctgccgaggcttgtcacgggcgaatgttccgcggatgccatcggctccaaatgcgcctcgagcactttgatgatacggtcggaatgctgc

SEQ ID NO: 95343 - DNA, 475 bp, Heterodera glycines
gtttgagaaatggcttcttctgctgctggatttgccattgtcaccggtgccaacaccggcctcggcttgcattttgttaaatccctatatgcttccggcacttattccgccattgtgttggcctgtcgaagtgaacagcgcgcgaagagcgcaattgaacaaatttgctgtggccaatcatcgccggcggaaaatggcaacggcacccaaacaaaattagaatttgcgaagttggatttgacctgcaatgattcggtccgcactttcgtctcccaactcgacgagcgtccctatcaaaagggcagtttgcgattgctcgtcaacaatgccggcattatgggccatccctttcaattggtcgacggcgttgaggtgcatttcgcctccaaccatttgggtcattttctgctcacaaatttgctgatcaaacacaattggttggcttccgacgcgcgcattttgctggtcacttccg

SEQ ID NO: 95344 - DNA, 347 bp, Heterodera glycines
ttgtgccgttcgtcgtaccaatcgttggctcatttgtgccgtaatcaaattcgcgtttattctgtagaaagggagggggcgggcacggcttcgggcattgaacacgcgctcaaattcaacaaagcgggagcagtgcacaaaaaagagttgaaggattacaaatgcgtcgaatatcttcaccaaaataattattccttttatgacaaggagtgtgagctgcagcaatttcgcgtggtgcaaccgacgaacaaattgcctgacaccgaaccgaagttcaaatcatcttaaaccgattgatttcatgaaaaattttgttttttaattaggaaaataaaataaaactaaaa

SEQ ID NO: 95345 - DNA, 658 bp, Heterodera glycines
ttgagtttttttattttattcttttcttgccaaaaatggtcgacgttccggctgattttgctgttctgctaaactccgcgccgccaattagccgaattgagtcaaacaaaatgcattggctgcgaaaacggcaacagacaaatgcgacggcattgcaacgcggcatcgatcagattggccaactcgcgacggagagtcgaggtttgaagcgtccggtgaccagttttgcgcgttttgcggattctcccgacgaacaggcgctgtatttgctgtgggaaccactcacttcggaccaaccgacggcaaacggagggccgtcctcacggatttatggatatttaaaagtcgtccgggaccgacgattgtatttggtggacggagaagggcgacagttcgtcacgacgcccctttgtgttttggactttttcattcaccaatccgtccaacatcagggcaaaggcgcccaattgttcagagcaatgctaaaggctgagggcgatttgggggcccatcgctgtgcctttgataagccatccgacgtatttctccactttttggctcggcattttggcctcgaaaggcccctttggcagccaaattcttttgttgttttcccctcattttttgagggcattaagccagaaaaagtgtcttctgc

SEQ ID NO: 95346 - DNA, 731 bp, Heterodera glycines
caagtttgagttaaaaattatggaaaaaagtgccaacaatttttcgaaaatattgtggacacaaaatgagcatcgtttccaacaaatttgtgctctcccatttattcgtgaacaaaaagatgggacacttgctgaggaacgctatcgccactacataatacaagacacactgttccctggagggattaagcagtgccatcgctgtggccgcttcaaaggccactgatcacccaaaagggcacgagcgtgccatgcttttgctgtcccatggcattgccattttggacaccgagttggacttgcacgatggcattctgcgcaagttgggcctggtcagtcgtagtgaagtgcacatgaactacgaccaatcgccagtgtgtcatcattatgtgtcctttctggcagcaacggcatcacagcaatctttgccggtgattgtcgcgtcaatgttgccctgctattggctctaccgcgaagtggccaaatggatgttggcagaacgccaaaaagccggcggcacaaacaccgtaactcagtaccacgaatggattgacatgtactgtagtgaagagtatgccgaggcggtggacgaaatgttggcacttgcggatgaattatcgcaagaagcggatcagcggacgctcgcgaaaatggccaccgtttttgagcgcagcttccaactggaatggatgttctggaagtccgcctatcaaatgtgccaatggggaatt

SEQ ID NO: 95347 - DNA, 1337 bp, Heterodera glycines
gtttcccttaaggctggaggggatttgtccgttgggtgccaatggccggggtcgaaagatgagtacgaacttcaggacgcaattggagttggtgccactgcgactgtgtttaaggcattctgcaagtcgaagaacgaaatgtgcgccataaaaagcataaatttggaaaagtgtcagacttcggtggacgaattgtcgcatgaaatacaggcgatgtcgctgtgttcgcatccaaatgtcgtcaattactacacttcctttgtcgtcggggaggaactttgggtggtgatgcgtttgttgaactgtggttcaatgttggacatattgaagagaaaaataaaggcaattggcaaagaccaggcggcctacggagtgctcgacgaagtgataattgcgacagttcttaaggaagtcctccggggcctcgagtacttccataattctggccaaatacacagggacatcaaagcgggcaacattttgttggccaacgatgggaccgtgcaaatcgctgacttcggagtgtccggttggctggcggccagtgggggagacctttcccgacagaaagttcggcacactttcgtcggcactccctgttggatggcccccgaagtgatggagcaggtgtccggttaccgatttcaaagcggacatttggagctttggcattctgtgcattgagctcgccacaggcaccgccccttaccatcgctaccccccaatgaaagtgctgatgctgacccttcagaatgacccgccttcgcttgagacgaacgccgaccgaaaggagcagtacaaagcatacgggaagagcttcagaactgtgataaaggactgtctgcagaaagacccgtccaagcggcccactgcttcggaacttctcaaatactcctttttcaaaaaggccaaggacaaaagttggctggtccattcgctgattgagaatctcggctcggctccatcaatcccaaccattcccaaaaaggttgcaagtggcaagctgaagaaggacaaggatggaaattgggagttcgaatatgacacttcggacgaggaaaattcgtcggaccccgaaaatgcgaccattcagcaaagcgcaagtggggaaagaccaactgtctccagggcatcgagcgaaggcaaaggggaggaacaaatgccgccgcttcaaacactgaacttggttttgcgggttcggaaccagcaaagggaactgaacgacatcaaattcgactactctccgaatgcggacagtgtggacggaattgctcacgaactcgtcaccgccgaactcatagatggccatgatctcgtcgtagtcgcggccaaccttc

SEQ ID NO: 95348 - DNA, 481 bp, Heterodera glycines
cttgggcaagcaaatgttgaattgttttctggacaatgactcaccatttaaattttgatcaatttctccaagttcatgagccccaattgttggcttctggtttgcctgaactgttctggaaatccttatacaaaaagatatccaatcagattttcgatgcaggaaaatattttgaggttatcatcgaagaaagcgaaccgaatgaaacaatttcatcgcaagtcaaagctatgagcgaattgaaaatggacgacccggaaaatgtttttctcattgaccatgcgtggactttccgtccgaatacagcacgttttgcacttcaacaagttgacggactgaggaagagattattggacatgttcaatatcaaagcttggtatgccaacaaagaatgtttaaaggacccttttgctgatgatagcgcagaccaacagcaaaagtgtgctgatgccgtagccactcattccgctgattgtgagga

SEQ ID NO: 95349 - DNA, 503 bp, Heterodera glycines
gtccatttaagattaattcatattcattttgtttcttggaacaccttatttttcaatcaatcgccttaaatgatctcctgtcgtcgttcggtcagcaaatgtttgctgccacaaattacgaatcggttgacttccaattttggccatcttcagccgtgctgctcatcccaaaaggtgccaatgtgtgcgtccgcttccaatcgttcttccgtgcgtctttcagccattttcccacgaatgctttcgtcttccgttggtgacaaatcacatgagcggccccaaatgtaccaacttgaacacattcagaaacggttggaatatacggtcccgctgatgttcaacgcacgtctcgactacactttctacaccaaagatgtctttgtggacaatcaaattctcgggagtcaactcagaagcttggaagggtttatgcatcacatttctctgatcactgtcgccgctcaattttgttgcacgcatatcgaaacgcaaattttgaacat

SEQ ID NO: 95350 - DNA, 614 bp, Heterodera glycines
  unsure (1)..(614): unsure at all n locations
gtccaattaaggaaacccaattatgacgagctcccaacccattatttatgagaaaattgtgcaacaaaatggtagcaaaaacagcgctgaatggtgtctggcctcggaacggcgactgctccaaaaactgatccatcataagccggtggggatcaatcggcacttcaacctcaacttgttggtcatttacatgaacaacattttcgactttgaggaggacattaactttgatgactatctgagcgaaaaggatgttgaacagttgaagaggcggcgtatggagggcaagcaggacgagcgaaggccaatggcattttcaccgtcctacgcaattcgaccgaccacgaaacaggttgaagaaaagttgaacgaatacttcgacatggagctgatcggggagaacgagtccccctctgaagaattggaaaagaaagctgtttttgaactgccccaagagtaccaattcaaggaggaaatggtcccacgataaatccatcacatttttggcatttaatacaatttttttacgtaataaccaaatcctttggtttctatcgaaattttctgtaaatgtgtaaaaaaatggcataaaaatacatagggaaaanaaaaaa

SEQ ID NO: 95351 - DNA, 399 bp, Heterodera glycines
ctgaaatttaatctatcatttgccatttgctgtaaaaaattgaatttttacaaaaaaagcgatggcagaagtgaaaaaggagcccatttttacggaagtgaagaaggagccaatttttgcagcggagacgccagcagccgagccgagaagggacagcgccgtgtcaacaatgccacccgactttgacgacgtcaccgcagtgattgagggcgttttgcgcgagacgcgggaccgtttccaggcgatggccgaccaaatcattcaccgcattgacgagatgacccagcgggtggacagcctggagaagaacatcaccgaaatgatggcctccgactcggcgctcgtggcgagcaccagcggaacagtggacgaggacaaccaatgatggacgacggagac

SEQ ID NO: 95352 - DNA, 578 bp, Heterodera glycines
gtttgagagccaattcaactccaaaagccgaaaatgtctcctgttattgcccctttcgtcctcgccatcattggcatcatcgccttgcccaccatcgaaggcgcagtcgggcgtcagcaagtcaagctgggcgagcagtacaaatacgagaatgtgcccggcaaattgatggtcaagcgacaaactgcggccagcaaggagccccagtatttgttcgccggtcaaacggcatggaccacggacggaaaagaccgctttggccatgccgagttggacttcgccactggcacaatgaccatccccaacttctccgagaacgacttgggctcctacaccttcccgcttgagcagcccaacttcagcgcagtgaatgggcccaacggatgcgagctgcagggtgtcggcgggacgatgttggatctgatcaaaaaagaatgagcgaagaacagcgactgatcggagggaagagaagaatggtgctaacgccggaatgacactcttttcaattgcattttaagcatttagcattaattaacactttggcatttgataatccagggataaagaacggacaaatc

SEQ ID NO: 95353 - DNA, 499 bp, Heterodera glycines
ttaagtccaattctttctctttgtctcgtccaatcatctttgccaatgtttgtccgttgtttcattttgcctttcatttctttgacattttttgtgtccttttgcacggcaatgagaagaaatccatcggattatgatcagtcacgggtgccgtccaatctgaggataatttcatggcttctcggcgtttggcgttcagagcatgacggcaaagcgatgtttcccaccatcccaaaattcacttacggcgaagaaatttcaattgcactttcggacacgcgaatgaacggactgccggcatttaattactctgcatttgcctggtcagcacatgaccaagacgagttgcacagtgaaaacggttacattaccgtatcaggcggaaaagtgatgctcactaccgtaatgaacaacggatttgtcaccgtcgaagagggccccgccggtggctcacgaatccgcttcaaactcgtggacattggccgtatcagtttcagcc

SEQ ID NO: 95354 - DNA, 546 bp, Heterodera glycines
gttcgtagaagagttccgttattcaagtgaagcaaattattagttcaagtcgaaatggctgagtctgagatggaaataccggatacgatgggcgaacgtatggaaaagcacaagaattcaggccagccgatgatgttgcaccccgaccacccggacaattgggaccctcgttatcacgaaaaggcggcgcatcttctctggtcagctccatatgatgcacgttatccacaagtacggaagcagcgtcagtgtttcgaatattatgtggatttctttcgctgcaaggagctgatgggcgaagactacaaaccgtgcaaattcttccagaatgtctacaaagacatttgcccatcattttggaccgagaaatgggatgagctccgtgaggagggacgttttcctgcgaagttcgaccgttaaattttcggcgattatttaggacacttttgatgtgatggtgacattcattgttagttgtattcattaatacaaattcgtgtgtcaataaattggcgatgtaaattaaagaatggaattttaaaaaaa

SEQ ID NO: 95355 - DNA, 470 bp, Heterodera glycines
cttgtgttgaaggcaagtaacaaaaatatcaacaccaaacagcagcagagtaaggattcgacgtttcagaaatggaccaaacacccgttgaagatcggtctgttgagctatgttccgatgacgacgaaacaaagcgaaaagtcgaaaccgattctgaggattactttatggtggaaaaacaattgagagaacgtcgtgttggaatacaaaatttctcttcgatggttttgtttgaccggaaagcgaagcagcgacaaaaaatggcagaaaagcggaggaaagagcgaaacaatgcgaaattgatactctatggtcgtccccgcaaaacgaaacaatgctcttcagttttttcaaaggaagactttgcgcaaattggaaagaaagatggcagttcagcaaacgaacgcattaaacgaattcgataaaatacttctttttgtttcgtttttattttaataaattacttttcc

SEQ ID NO: 95356 - DNA, 459 bp, Heterodera glycines
gtccaataaggcttttaatttatcctttattcaaacataaatcatggccgattcttctaaggtccctggcggtggcaaagtcgtcccacgctctgctgctggcggtggcttaagacaacggcgagctggtggggcggcaaacactggtcgtactcgaactgctggcggaggagggggcggaggaatgaacagcggcggactgtggcgcttttatactgaggactcgaccgggttgaaaattggacctgttcccgtgttggtcatgtcgttggtgttcatcgcttctgtgttcgtcctccacatttggggaaaatacagtcggactcattgaattctcactttgccgattcattcggtctatcggcaaaaatgcgattttattcatagtttttacaaatcacttccatttaatggaatatttgttttgtatgtaattctgataaagtctttgttataaaa

SEQ ID NO: 95357 - DNA, 306 bp, Heterodera glycines
gaacagcgcgagtacatctgcgacaaatatgccgattatgtgctgccacttgaggaggccgactggtacgggttggagctgaacacggcgtgccgaaaactgcaggacctcgaggacaacacgagggcacagccgatgaaatacgcatttgagaaggaattgatggcacaattgcaaagggaggcggcggcggacggcaccgaaaagcaaagacagcccaccaaacttgttggatgaggacaattaagaattacgccctgcaattgtgtgtatttttttaaattgaaattaaatttttgtttggtt

SEQ ID NO: 95358 - DNA, 255 bp, Heterodera glycines
atttggaactgtccgaatgcattcccttcgatttgtttcatcaacaactcattttcatgctccgttcctctctttcaaaacagcaacgaaacattttcaacgcattgaaaagttcagcggcggtgagaaatttcctcgtcgatttttatttgaataatgtcgactgattggattgtccttttcgacctcacaatcagccttaacattgcacttcacgttaatatttttcttattaattaatacacgtttacgttg

SEQ ID NO: 95359 - DNA, 431 bp, Heterodera glycines
tacaaggaagagatgcttatatttcaagatatggtcatcgacgtgccttacaccgagttgaaccactcggccttttgggtggaattcatcgttcgtcaccaggaagttccccacgcccgctcgggtgcggacgacctgaatattttccagtacttcctcgttgatgtgatccttttcctagtcggcctctcactgctcgtcctttaccttttcattcttttgctcaaattattcttccgtctgatcatctttttgatcaaatggcctttttccgccggttggggcgctaacaaagagaaaaaagggacaaaacacgcaatggctaagaagagagactgatcgacataagcaaattcacttaaaaccgagctgctgactgatttaactggccgtttttgctgagccaatttttaaataaatttttagtttcc

SEQ ID NO: 95360 - DNA, 420 bp, Heterodera glycines
taagattttattttccatttgtgatgcgttatctgttgagaattaggaattataattttctcacaaagatcggcaaaagcagtgttgtccaatcgcaagaatcccctccatcgcttcttacggattcaaagccctttaaaaaagtgctcaattctgccgtccaatattacgaggaatgtattggcctggtagaagtccacaaagcccgcgacgaagtcaaccgatgcgaaaacaatttgtttttggcacaacaggcgagaagagaaaaacagggcgaaataaagtcattgcaaaaccgattgaaagacattcacagcgaattggacagaactcagcgaggcgaagacaggtatctccatctgctcacagaagaacacgcggcaatcaaaagtgagagggaattgctttcgtcctttgaac

SEQ ID NO: 95361 - DNA, 507 bp, Heterodera glycines
acaaatttcgtggtgccatggcgtttcaacggatttaatgcaaatcgacgaacaacaacagcagcaaatggctgctgccaatgagtgctgcttcatatatccgttcccggcttctgggctgtcctcccgccaactgatgcgtgtcctctccgcttggctgatgccgtctttctccgccgacgaggagggcccgtcgatgaacgtgccctcctgcttttccgatattgactcctcgtttgaatgcgcttcattttctgtacccatggtcttctcccacgacgaatggtttgtccaatgtgtgcccgccctgtgcgaacagcttgacaaacttttgctcctgtcccaacaccagcgggaagaggaaggaaactcatgcctccaacaacgacggaatacggacgacgacggggagtgtcatgtgcgacgggtgctgcgccatttgctcgcgttgaccacccgaattccgatgcggacacggcccaggactgaaatgggacttttcattgc

SEQ ID NO: 95362 - DNA, 1044 bp, Heterodera glycines
caattaagctggtgcttcttttaatgtctgaaaacatgggtgctatttttgagaacattgctttgcatgactttgtcgtgaaagaagtgataaacagtttcccggacaaaaagagcatttttcttttacttgcgaaatccgatgagaaggctttgctcatctgcaacaaacaagcttttgaagaggaagtggcaaatgtttccgattggttggtcaaatcgaaattgcgttacattgattcaaatgatcgttttggaaactttgaaatggcattgccttctgaatccaatcaaatcaaagtcacgttcatttatccggctaccgaatgggacattgagaaatattcgcgtcagacgccgttcttcatttatgagacgccggaagactacaaaaatatcactttgaattatctttcggagattgactacgttaaacaactcaaatgggtttacaattttttggagaagaaaagtgagtcggagcgaattgtttttgaggatgaagacaaacagaatggttttgttcttgcgcccgatttgaaatggaacgggactaatgtggatgatctttatttgttggcaattgcacatcgccatggcttgcgttcagtgagggacttgactccagacgatttgcctcttcttgagaacattcgtgaccaatcagccaaattaatcaagacgaaatacggattggatcagaatcaactgaagatgtacttccactaccagccgactttctaccatctccacgtgcacattgtgactctgaagtacgatgccccgggttggggaggcacttcgattctgctgcaaagcgtcattgacaacatcaaaaattatcccaacttctacaaaaatgctactttgcccttcatcggaaaggaaaagcattcccttaccaagaaattctttgaggctgggcgtgtttgaattttgaataccgattttgtattttgttgttacttttgataatttgacgatgaaaatctcactgaatgactgtttttattgttgttttactacggattaaacttgaaaatta

SEQ ID NO: 95363 - DNA, 326 bp, Heterodera glycines
ttcattcttgattatgtctatgctcgatgggagcggggatagttgttttggggcgggagctcttgtcggatttggtattcggtattttggcgcaggacccacagcagccacagcggacgaaactgatgaatttccggagaacgaagttatcgatgaggggccgaacaacaacgggcagccgccgaatcctcaccatccgctgccttttaacgaggagagtgattaagaaaaacattgtgacatttaattagcgtattataaaatttgatttatgttgttttttgaataaattattgagtttaaaaaattgaagaaaataacacaat

SEQ ID NO: 95364 - DNA, 476 bp, Heterodera glycines
ggttcgaccaccgccaacacccgcacgacaatttcttctgctgatgtttctaaggctggcaaagtgacagacaaaggcggcgattcagacgacgaagcggccgaagaatttgttccgacgggcacttttaagccgattgttccgttgccctcaaaagtcgatgtgaaaagcggcgaagaaaatgaggaggttcttttcagtgctcgttgtaaattgtttcgctacgacccaatggacaaaaagaacaaagaacggggaattggggagcttaaactgttgcacaacaaagagacgggccgttatcgctgcgtcattcgcagtgatgaccaactttgcaaattgttcgctaattttcccgtcttggccacaatgataagccgtatcactggtcagaagccgaacgttcgaactttgcagtgccgagacttcagcgaaagctccgagggaattgacgaagtgtttttgcttaaatttcg

SEQ ID NO: 95365 - DNA, 1688 bp, Heterodera glycines
aattgaatcaacaaaatgtctaccgaccgatatgatattgtgttgtacggtgcttcaggctttactggccaacatgttcttgaatcattcgtaaagaatggtcatttggaccaatttaatttcgccgtcgcgggaagaagtgagaaaaaactcaaacaaacactcgaagacatcgaattcatcactgggaaagttttgaccaaaattccaattatcatcgccgattcgtccgatgctcagcagctcgcagaaatggccaaacaagccaaagttattgtcaatgttgttggaccataccggttgtatggtgaagcggtggtaaaagctgcggttgaaaatggtgcaagtcacgtcgacatttccggcgaaccagcctggattgaagcgatgcaaatgaaatattcggagaaggcaaaagagcagggcgttttcattgtcagtgcctgcgggtgggactctgtaccgtgcgacttgggaatgaattatttgaagcagtacttcaaaggcactctttcgcatgccgaaacatttgctcatattcaaatcggggaagcgggctattccttcaacgccggcacttaccaaacattgattttgggcctttggcaggccaaaaatgatgatcttggaaagatacgacggtcgattatgcccgagaaaatggagaagactaagtggagacctccaaaaagaggaatgttttggtggaacgattcattggacgcttattgccttcctttcatgggtgcggacaaaagcattgtgcaacgatcgcaatatttcgataacattgccgacaaaacataccctgcttcgctcgagacttacattctcgtcaagagttggttttgggctgttgcgcttatgatgtggctgactatcttttatttcgcggtcaaattcgattttacgcgcggtattctgcagaaatacccggggatttgctcggggtatttgttcaaagagactgggccgactcgagttcaagcgcagcaggcttctttcacttattggttcttcgggtggggctgggaacagtcgtcgcctcaacctgacgaagccccgactaaacgaatggttgtccgttgcgatggccccgatgccggctacattggcaccgccggttgcattttgtcatgtgccctgactattctcaaagagcgctcggcaatgccttctgaaggaggagtgttcaccactgcagcggctttcaaaaacactaacatttatgaaacattgtcttccttcggagtcacttttcgcgtcgattcgtccgtgaaagtttagaaactgtgcgatgcacacaaacaccaatatttttaatattttctgctgttattttttatatttgttatcccatcaattggaataagtcttacaattagtctgctcatttgacacttttaattaacgatcattcaattgataatgttagtttctcattgacttaaaaaataaatttgtataaaaaatcacaaagaaaaaattaatcggacgaaatttttgaatccgtcaattgtttcctttagcccgccaactgcttttgtgaagttcaaattactgtcccctgtggggccaggccgaccaaacacattcgaattgtttgaattctttttgtcggaaactgcagacaagcagcacttgtaagcatcgttgcattcgtaattgtcgggacagcgaaagttcac

SEQ ID NO: 95366 - DNA, 578 bp, Heterodera glycines
atctcaccaaaatcagtcgtctgtgccacttcaacgggctgttgcgtctgtttacaatgctaattcaatttcaacttcgtccagttcaactaaacatgcagtggatttgataaacgaatatctgacaatgctttccgtctgtctctcccatgatgaattgaacaaattcgccattttaatgcgccgttggcgcgcacgtgaaatgccaattttggagttcgcccaaaagctgctcgagctgtatgggccggagaggcggcaccttcttgcacgaatgcgcactttgcttcgcggcgacccttctgacttggaagcactgactgattttcttcgtgccaacggagtggtggagaacgcagcggcaatggccgcgtcgccacttttgaccgcggaaataagtttgggagaggggacggacagtgccaaaagcacggccagttccttgccttcggcaccgcttcatttttcgtcttcgcatggttttccatccgccgattttcaccgacctaattcatcataacctttcctgaataatttacagctgtcaattaatagttaacaataaattttaacattcc

SEQ ID NO: 95367 - DNA, 485 bp, Heterodera glycines
tgatcaaaaatgcgttccatttgtttctgccatttttcggcattttccttttctcgtcaattcttcggtggatgccatcgctctttttcatcaccgatgacgcccttatttttgagcttttctcttctgctaatttattcccagtttgcttctcctacaaatgcatttattctgcaggaattgccattgtaccgtaacgttcgcaatcagcgacatgccactcccccgattggtccgtcaaaaccctccattgactatggaattcgtcgttcgactgtctctatgcctttggtgatcagaattgaggacggaatgccaaccatttttgtgcgtccctcgcgggcatttaatttccacagattgaatcgcttgcaagaattctggcaccgaaatgaagcactgagaagattgacccaaacggggaacagaccatgaaatgatcagcagagaaagaaaaagaaaagaaatcggatgatcagacaaat

SEQ ID NO: 95368 - DNA, 673 bp, Heterodera glycines
cctcgtgccgaattcggcacgaggagtttgaggacatgaacatgtaaatgtttgatttattcaaccaacaatattccacttctcttcctccaaatgtcctcactttgtcagtccgactttcccatgcgtcccattgattccctcaaattctcacttatgaactgcgcttttttctaccgtccgcctttgtcattgcgtgaaaccaccgaactccttgaacatgacggagacttccttgttcaggattccaatggaaccaaattgttgctttctgtgcgtgtttatggcgttgtgtccgaatttcgcataacaattgttcagaatcactctcgccaagtaatcttcgaatttgctggccaatgtttctcctctttggaacatttggtgctcacattttccaacggccgtggcggcaagcactttctgaagactgttgatggcgatgagtttctgctcgtccgtcccatttttagagcattgcacgccggtcgttttgggtacggcgagcgcatggaagtgagtgacagcgtacggaagggcaaatggctgccgagttttgtgcgaaccttgcgacccgaattcgctgctcgcccacagacggagactgacttggaacgactgatcgaattggaccatcgaaatttggtgcgcgtgtgtgactttttcaagcagt

SEQ ID NO: 95369 - DNA, 487 bp, Heterodera glycines
ccaagtttgagctgtcatcgttttcccttttccatcctttcaattcaattcgatgtcaatcgatgaaattgagcggacaattcctttgccttcgtcccatctcttctctcattcgcaattcgtccgggctgagattcactcttttgaagaagcttttgtccacaacaaacgcttcaaagagttcgaaggattactcaaaacgaatcacaaaacttacgaaagtgtcgaagcgaaattcgacctgcaaaaaatcgaaaaaatgagcactttgacgaatcgactgaacaaattggcggatcatttggggaaaattggccatttgcattttgaaaagggtgagcttaatgcaatggatttggaggagaagccaatgttcgaaattgttcggcttgcggaacaaaaacagcacgaaattgaagaaggacgaaggaatggcaaatcgaaagcggagaaagtgaccgaagcgatggcaaatgaatgattttca

SEQ ID NO: 95370 - DNA, 480 bp, Heterodera glycines
ttctttttcgctgacgcgacttttccccactttggtcttccaccgtcatggtaacattcaactgctgcaaattgcggcttaccatgagaaagtcattgaccattacgaaaacccaagaaatgtgggctctttggacaaaaatgatccgtctgttggtacagggattgtcggggcaccggcttgcggagatgtaatgaaacttcaaatcatggttgacggaaacggacaaataattgacgcaaaattcaagacgtttgggtgtgggtcagcaattgcgagttcttcgttggccactgaatggataaaggggcagaatttggaatatgcgcgcaaaataaagaaccaacaaatcgcaaaggagctttcactgcctccagttaagctgcactgctcgatgttggctcaagacgcaatccaagcagcgctaagcgattatcagaagaagcaagaagctcgcaatgagaaaacttgaacgttgtg

SEQ ID NO: 95371 - DNA, 231 bp, Heterodera glycines
cacgtgtcgctgatctgagcagcaagcagcagcagcagcagcgagtggacgaatttagtgctgggcaaaacagtggaatggcacaaaacgatggaaataatgccaacgaattaatggacaatttaaagctagcagccaatgtatttaaaaaagtgccgattatatttatccgtatttattttttgactgttatgccattgtatatatatgtatgatcataaagtttaaagc

SEQ ID NO: 95372 - DNA, 517 bp, Heterodera glycines
ctcattgctggtaaaagtgccaatgcctcgtcttctctcttccttcgcctttttcgttttgtcaattatttgttcgattgtcttcttcgaacccatccatggccaggacgtgtgtcgacatcagggcaaagagtaccgaaatggggacgaatggattgtttccaactctttcattatgaattgcatcgtccattacaaccgatgggaaacaaagatcatcgcctgtctgtcaatgttaggcgagagaatccccgtaaacggacagatcagtgatcagcacggagtgtggaaatgcgagcagaagccgaacggaagcacacgattggtgcagcagaagcagtgaagggaggaaaagtgatcagtgatgggagagacgaagcaaagcattgattggcagaggaaaagccatcacagcaaatcaaagactgttccacacactttttaataccctgttaattactcactaattaatgtccattttgaccctggaaaaattagtaaatgcattggttgcttc

SEQ ID NO: 95373 - DNA, 480 bp, Heterodera glycines
aatttattctcttacaacatttaaatccgcagaaaatgctctcattgatagtcatcgtttgcttctttgggattgtgccgaatttgtcaaaaccgatcaaactcagaaaccattctccaatgaatgttttgtttatggcctggcccgaggcgcgttatccactggaattgccttttcaccgcgtggattgctttagtgagatggagaggcgacacatcgtgccacaagtcatcacttaccggctggaaaatatcaaaaaactccgtaacgggatatgtttggtacgaatccctacccggagccgagtgactgtcacacagatgaacacaaacaatgttaaaagttatgtgaaattcatcgctggttccacgcagctaagcatgccactgcatactgatcatattcattccggccaacacgaaaaatttgggccatggcatatgccgtgccgttacgcctacattgtgttccgctcccgaa

SEQ ID NO: 95374 - DNA, 737 bp, Heterodera glycines
gtttgagccaatttattcacaaaatacatttttttgttgccgaaatgagcacggaacgctattccttctctctcaccaccttcagtccctcggggaagttgatgcaaattgagtatgcgttgaatgccgtcaagggcagtgcgccatctgttggcacccgagcaaaagattgcgttgtgttcgccaccgaaaacaaacactccgtcctcacacagcccgtcagcaaaatctccaagttgtccgaccatattgcatgcgtgtacagtgggatgggcccggatgcacaacttctcgtgaagaaagcgcggaaaattgcgatggattaccaagtgctgtacggctatgaaattcccgtgcctcaactcgtttcccgggtggctgcggtcatgcaggaatacacacagtcgggtggtgttcgtccgtttggcgtttcattgctcattggcggatgggacagtgaaaagggggcgcttctttttcaagccgatccggcgggttcctattttgggtggaaaagcacggcgatcggcaaaaacgaccaattggccaagaaattgttggagaagcggtacaatgaagacattgagaaggtggacgcgatacacatggctctgcttgcaatgcgcgagacttacgacgttgccatgactgaggacaatgttgagttggccgtgtgcacaaaggactgctttgaacggatgaaccaagaagcgctccgtgagcagatccaacccctc

SEQ ID NO: 95375 - DNA, 786 bp, Heterodera glycines
cgtagtctttctcaaactttcccctcccctcccctccgactctcgccgatttcttcatttgatggacgtgttcaatcggttgctccctcggccgggcaatggcaatgttcagttcaaaaaactcagacatacgtcaaattccgccagcattttcgcatctgacgaagcgacgggtgacaaacagcacaacgacgaaacaacgaacaacggaatgatgccggcgacgaattcgccacgggttgaactcggattgatgctgagcaacatcagtgctgaaatgcgacacgggcaaaacagcgcaactgaaggaaacggaaaagcgaatgcggacggggaagcagaataaaagctttgtgcgaagaaaaggccaatggcaaacggaccgtcgtcagaagtgaccgctttaagcaaagggaaaagcaacggaacggccaaaggcggcggaaaacgctttctctctgcgcttttgccgggaaagagaaagggacgacttggcctttcagtttcggagcctcgactaaattttgacatcgaaccgtccaaaaatgactttgaacccacggaaatcgaagggggagaaaatgcgaaaggaggacaaattgcggaccatcaacagaattttggggagaggaaccgattatgcgatggcatttcggacggaagtcgcaaaagtcggccgaattttgcaggggcacttcaaaaggtccgtgaaaaattgaacgttcgtccgtcgtccaattcccaccgctcctccgccttttctcctccgatgaatcgttccaatac

SEQ ID NO: 95376 - DNA, 784 bp, Heterodera glycines
aactgttgcatatttttttcccaaaaatcttatttcaaactgttaattaatcatataataattaggcaatttgtaattgaatgcaaagtgttctcaaacgatttctgtcaactgaagcgccaacaacaaaagaacgtttaccatccaaatacgcgtggttttttaacattgtcttcagcgaaatcattatatttggcggcacttatttgtctctattggagttgcgcaaaaacaaacaggcacgacttaaactccacaaatattggccgagtgcattgaaacgtttctattgggctgaagaccaattgtccggcggtcagctcaccggcgaaaagcttaaagtcgctgatttgaagcgttggaatatcgaaggcaaagtcaaagtccagcagaaggaagacgccatttacacgtgcgagtgaacgacgcaaaaacaaatggttcgccagtcctccttttattacatgatggcgggcaacatgatcgttattgcgattttcgcggacagggccttgacgcgacggtactttggcaagaagatggagccgatggcactgccctcgtggaatgcttttgtgaaaacggagttgaaagaaggcagggaactgacgatgccaattagcgacgacgaaaaattaattaattaacggacgattggttttgttcctgcacattttacaacttattatttcttttttgctggtttgttctgcacatttattcaagctgttctattgaatttaggctttcaacaaaaatttatggaaaaataaaatgaaatatt

SEQ ID NO: 95377 - DNA, 533 bp, Heterodera glycines
gtattcgtaatctttctaatagaaattatttcacaaaataaataaatatgggagcatttttggataaaccaaagacagaaaaaacgaatgatgcaggtgttggacgagactacaaatatgttgttgcctcaatgcaaggctggcgcattgacatggaagatgctcaccatgttcaaattaccataagaaaggaatctccgttcgaagaatggtcattttttgctgttttcgatggacacgctggcaacaaagtcgcctttcactccgcacagaatctgctccaaacactgctaaacacagcagaatttcaagcagtgaaggaagaacttaagaccaatggccctaaaatcacggaaaaggccaagtcgcttatccaagacggaattcgcatgggcttcttggagttggactcctcacttggcgagttgcagggaggcggagagagggagagaaacggcacaacggcaatatgtgccattctgaccccggattacatcttctttgctaatttgggcgattcgcgtggattgtta

SEQ ID NO: 95378 - DNA, 638 bp, Heterodera glycines
atttgtatgaattaatcccaatgatttgctcccgtcttttttcgtctcccatttcttcgtcggtttgccgacgatcccttcggcgaattggctactgtgccgacccgaccatcggcctctcctcggaacaaatcgaaatccaacggatggccaaggattttgccaagaaagagctgtatccggagatggacaaatgggacaagctggggcaacttccgatggacgcgcttcgtaaagccggcgagttgggcttcggtgccatttactgcgacgacgcgtacggcggcgcgggactgagtcggtccgacgctgcgttggtcttcgagcagttggctgccgggtgttgcagcaccgccgcttacatggcggtgcacaacatggtgccgtggatgatcgaccgttttgccaacgaggagctgaagcaacggtacatccccgaattagccagcttcaccaagttggcctcctattgtttgactgagccgggcagcggctccgactcggccgcactgcgcaccaacgcacggagggaaggcgaccattacattgtaaatggctccaaggcgttcatcagcggcagcggcgtgtccagcgtttatttggtgatgatgcgtcacaaagacgcgccgccgggtccc

SEQ ID NO: 95379 - DNA, 682 bp, Heterodera glycines
ataaggttcttttttaacagaaataaataaattttcgtcttattcaatggctcagtcacagaatggtggtgtcaaaaaccgtcggatttcacttggttcgcctaaggacctgaaggaagtgcacttttttgaggaagatgaagtccccgatgtgccgttaaatggtgcaagagtcaaagtttgctatgccggagtttgtctaactgacaaagaaatcagtaacacgaaacaagcacgtataactcacggcgttaaggacaccagtctttttccaggctacgaagtttccggagtgatcgatgagtttgggcccaatgcaactccggttgagtacaatttgaaagtcggcgacaaagtcattgtatggcccactgaagagatgtgccaaaatggctatgctgactttgtggcagtgccaaatttgtcgcttcttgtcaagattcccgacactttgtcaatgcatgtcgcgtcgattcttccggccggcgcaacttgggcactctctgcgattgtccatgcccgtcctgtcgttgaggccatcgccagcacaaaaggatgttgcaacattttaattgttggcgctggtggacttggactttggattctgacattggccaaacattttcttaccgcgggtcaggagaaccgaatcaaactgattgatgctcactctaaggagaat

SEQ ID NO: 95380 - DNA, 825 bp, Heterodera glycines
gagctgctgatatatttattctgaagaatgcctgtcgtaaaaccacaaacggacagcgaatttacaaaatttcttttaaacgttgggactgctccgtgtattgttgatttttttgctacttggtgccaaccatgcagtgcgatcgctccggtttttgacgaattatccaacaattatcttaatttgaaatttgttaaagtggatgtcgacaaatgcaaagaaacaaagaacacatacggcgtcagtgcaatgccaacattcattgttctccttaatggtcagcgcgtggaccttttgcgtggtgccgacaaaactgcacttcagaatttggcccacaaatggtccaaaaattgtccaactcaaatggtctcaccgattcctggccaatgcgaattgtcaccgcttttcaacaaaatccaatgcgaatgtttgaacgaggacgattccaacaatttgaacaatttgctgaacggagttggtcccctgatcagtgattgtgacgagcaactgctgatcagcgtgtcgttcatccaaccggtcaaagtgcactccgtccttttcaacggccccaaagagaaggcgccgaaaactgtgaaaatttttgcgaacatcaccaacactcttgggttcgaccaggcacagtccaccgagccaattcagtgcatcgacttgtccgaagaaaaactcgtcgcgctcaaatacgtcaagttccagaatgtgttcaatctgcagtttttcgtggaggacaatgttggagggggcgacaaaaccgttgtcgatgagtttcgaatttacggcacgccaattgcgaagactacgaacatg

SEQ ID NO: 95381 - DNA, 244 bp, Heterodera glycines
gttaatgtaacgacgaattcaaatcaaatttctgtttacgctgcttcgaaatttcgcgttgacataaatgtctcaactcgtgacgagtcgcatttgaataacaaatacgaaattctcatggaaataaatacaacagatggaggaaagcagacaattttgcttgattcaaaagcattggtatttttacatgatcaattggatgcgctgactcggacttttcccaaatgttatgtttgtgttgatg

SEQ ID NO: 95382 - DNA, 454 bp, Heterodera glycines
aaattttctatttcaaaaagaaaagacaataattccaatgaaagatgaaaacgctcattttactccacagcaaatttcaaagctgttaaatctacacatcaaaagtcacaaatgcctagatgttaagtgccaaactgaacgacaacagttgcttagcaccatagagaagctggcaagaaatttttacgacatttacaaaatgtttgaaaaacagaaacgtgagatgagcagaattagcaatttatacaaggatttctgtatacaatttggtctgccggtgaaaattgacttggtgaaacaacaggaaatcagtcagatcgacaaagtcgctaatatgatttaccaacattttataaaaataagagaggtcaacaagaaaagtaaagtgcatccaaatttcgatgagaacttgcaatcctctggattgacttccatcaatggacaatgcaaaaag

SEQ ID NO: 95383 - DNA, 1048 bp, Heterodera glycines
  unsure (1)..(1048): unsure at all n locations
caactcgccgtccatctgcttgttcagtacagcacaatgttggacatcaccgccagggcttttcagcgtcctttcgccattgcttttctgatgccttctcaacccactgcaaaaaatgtcgaagcgttccaacaagcggcggctgaactgcttatgccaatcatcgcctgcaacaaacgttacgtccattcgattttgcgtcaagncgatgctaatgctttcggaacgggaccagcagaatgtgcagtcatactattccacttcagggaacgcacagcaaattgtgatcgtgtcgaacaaactcaagtccgtggttcaaaagacaaatgcgtggtttgagcgtgtttcagaccaattgtgtgaaagtgacgggtcggcggacgaatgcttttgcgaatgcgctggccccgaagagtttcgccagttcgttgttttgcttgcgcaaaaacactcgtcctgtgcgcttctgaatctcatggaattggcgccttgcaaagacgtcaaattaaaacactcaatccaagaggcgtaccttcgtttgacagacacagaagtagccaaaggtctgctgttctgtggacagacggctgtggtgcggagcacttttggggcaaattctgaacttccaaggcatgaaactgaggaccccaacagaacagaggaagaatgtattcctcttgtcgtggccagagaaagcactctcaaaacactttcatatcgtctattacggtgtgtctatcctttgctgactggtgaacgaatagtaattttggcgtcaaaacagcgcgtttcaaccggggttgaccttctcaacaagttgaactcaatgcgaatttgtcgaaggccattatggcgtaaaatggaatttcgattctgacatcgacactgaatcaaataccatgtccgacaacaacacacactgtcaattgtttggtatttctcgtgaggcgaacgcgacttcgcagtggattaatggcgagaagtgcgaacattgtactgtcgttgacttgggcaaccaaaaaatgcgggcccatgaatactcgggccg

SEQ ID NO: 95384 - DNA, 721 bp, Heterodera glycines
cttcatttcaatatttttattttttattttggaatttcctctatcaaattgcccaataatctgtggcttttcctatggcttctcagcccataaaggcggttttgttcgatttgggcggagttgtggtggaatacagtgaccgaaatgcgtatttaaaccgactcaaaatcatccaatcaaatgccaaatttgtcgacctatttgaacagttcgagtgtggccttctgaccatttacgaaattgagcccgaatttcttaaaacagtaatgggaaataaaagcggagatgacctaattaaggcggctaatccgactaatttgatgaaaacgaaaaatcctttcgttgaaaatgccattcgctcacttcgttcctcgggcaaatatttggttggccttttgaccaacaatggattttgggtgcgcgacagatcggagtcgaagttgatcattgacacttccgacttcgattttgtcatcgaatcgtgcaaaatcggcgcgagaaagccaaatgcggatttctacgagatggctctgcttaaaatgggactgtccgcggcagagtgcgttttcatcgacgacctcgaagaaaattgcaaaggtgccgaagcggtcggaatacgaagcatttggctaaaggacgacgactacaaaacggccatcgaacaattggaagaaattatcggcgagaaattactttaaattgccattcttttgtggcaaca

SEQ ID NO: 95385 - DNA, 654 bp, Heterodera glycines
gtttgagatgcttttgtctcctccactgctcttcgtgctcagtctgtgttcattgtgcgcctttggccataaaacgccgaatgcgtcggatggcccggcaatgccggaactgccgaaagcgctgcaaaagctgagcgacgcggagaggaactgtttgttcaccatttacacaatgtccaaactgttcgagaacaaaaaggtgcagaaaacgctggccaaacagttaaagtcatgcgacagcaaagacacttctgagccggacatttggaagagtcgggagaagagcaacggatggtgtgaggtgaacttggaaaggatcgacagcgaatatggccccgtaattatgcacgcccatggctcaatcgcctctatcaacggcgcccgtctatttgtgaagtcgacctcggggggcatttggatagcgatttatcagccggaatgcctaaaagagaaggatgagtcgaaaaaatcggaggaaggtgttgtgagcaacactttggaccgagtccgacgttgggttttgttaaaatgagaagaaaaggaagtgaaagccgacggaccaacaattataaattaacagacaactgctaatgatcaatgattgattttaagtgtaaatttgtttcaattggttttttaaataaaaattatttt

SEQ ID NO: 95386 - DNA, 480 bp, Heterodera glycines
ctttctcagaaatgacatcaaaaattgaatctactatcgccagcagttttcgaaaatttcttttttggtttcgttatgatggttcaaaattcccagccatggcaaagggttctgactctcgcaacgggccaagtgtcatgcaggtggtcgaatcgtgtcttcaaaaattatttgctacagagaattcggaccaaatcaaaacgttcgctataagcagaacggatgcgaaagtgcacgccattcgatcgccgattctcatcggattgcccgtcgcttgcgattggttcagtcagtcagaattggccaggacagaattccttctatgttttaatgaccaaattcgcaataatggatttacgaatgcgatcgaattgcttcacgttgaccccgtcgcaatgggatttcacccgtgttttcatgtttcctataggcgttatatctatcgtcttcgcgtcatttcgacagagcaaagccttaatt

SEQ ID NO: 95387 - DNA, 169 bp, Heterodera glycines
  unsure (1)..(169): unsure at all n locations
gggaagctccaccgncggnnntggcggccgcttctacgaactagtggatcccccgggctgcaggaatccggcacgaggcaaggccctaatctgcatttcgtgtccaacatagacggcactcacttggcccaggtgctcaaaaaggtggagcctaaaactgtgctcttca

SEQ ID NO: 95388 - DNA, 493 bp, Heterodera glycines
tcttaaatatggccgaatttgcccaccgtgccggtgctccgttggagtgcctttgcatggctttgaaggtccaaaagcgtcaggaaggaacggacgccgaaggcaatcggcgatggaaaattggcataagtatcggcggtggcattgaccaaaaccatcgacagtccgtctacagtgattccggaatttatgtgacaagcgtggaagcaaattcacccgcggaagaagctggactgaaagtgcatgacaaaattctgcaagtgaacggcgtcgattacacgatgatcactcacgaaagagcagtcaaatatttgaagaaggagtccgtgttggatttgctggtgaccagggccacacccaaacacagcacggaaatgcaaatgtgaacagattgtccgactgctgatctagcacaacatttcatccaaataaacacacattccaatctttgatccatgtattggtccaatcgaaaaaataaaactttttcttg

SEQ ID NO: 95389 - DNA, 284 bp, Heterodera glycines
  unsure (1)..(284): unsure at all n locations
cccacttgtccggcacagtttggcaccgaaagggaattacgtgcccatctcaaggcaaatttggtcatctgcggtttttgcggcaagcactactgctccgagacgcactttcagtcccatcggtgccctctgttttaaaagtgccatttgatgtaaaacacaatgaattggagatgatccttctgttttattttacgggattgtttcacttttcatttcttatttccaaacaatttttcttaatttgtaaattctttattatttatattaattttcacctttan

SEQ ID NO: 95390 - DNA, 475 bp, Heterodera glycines
acggtggactgatggacagcgcatttgaatatgtgcgagacaacaacgggttggacacggaggagtcgtacccgtacgaggccgtaacgggcaaatgccaattcaaaaatgagaccgtgggcggcactgtcgttagcttcaaagacttgaaggaaggcgacgaagagcagctgaagattgccgtcgccacaattgggcccatttccgttgcgctcgatgccagcaatttgtccttccaattttacaaaaccggcgtttattacgagcggtggtgcagcaaccgatacttggaccacggcgttctcctcgtcggctacggtaccgacgaaacgcacggtgactattggctggtgaagaacagttggggcccgcattggggagagaacggttacattcgaattgcgcgcaacaaacaaaaccattgtggcattgcgacgatggcatcataccccgtggtctgagaaagtgtgggaat

SEQ ID NO: 95391 - DNA, 640 bp, Heterodera glycines
ttcaatttttattattttattccaaaatgttttctcagctttttctttttctcatttttctcgccttttctgctgaaagcgccccgcggggagaaaagaaaaaagacacaccaaaagatcggtattcgctttgcagaaaaggcggagtgccaattgcaaaacttaacgatcagatcaacggcaaagatttcgacaaactcttcgcaccgctgttcccacatccacttctcatcagtaatttactgtcattggaaggcttaaaatgcccggataaaattgcgcctttcctgaaaaagtgcgatgccaaaaaagatggcgaaataaatctgcgcgagttcaaatgctttgttaaatcactgctcgcctcatatttggtggacgaggaccggaacaaatgcatcacggaggaggagctggagagtttttacaaagaatgtggattaaaagaaatggaagaggaaatgatgggagacggatcagtgcgaaaagagtgatcggagagaggacattgggaaaagagcgatcaattgataatgtgatcaatcgataatgcctagcaataatatggaatttatcggtataagatatatgattagaatggtcacgtagaaataaataaacgacggtgattagtaaaaaa

SEQ ID NO: 95392 - DNA, 865 bp, Heterodera glycines
agcaaatcgcaaggcaacttttcatacataatttgcatatagaattagccatgatcttcaggttaggcaattttcgacattttcccgtcaatttttgcaagttgtgtattgctcgtttcaccgtggccttttctcgccgtattttccgtgaccatttttcgctgtttttgcgcagcaaacgaagtttgctctttggcgcttctttggtcggcgtttcgttcggttcaaatgtgactttggaagacgaatacaaaaggataaaaactgagtgcaaagaatgcgaccctttttcgcctcccccaactgacgaaggttggacactcttttggtgcaacaaaagtttggcggtgtaccggcggagatttgtggccaatgggggaaattgcgtgtttgaataccgatgcattggcacttacgaagacatttcacccaacgattttgtaactgtgcaggaggacatttcctgtcgactcaaatgggataaaaatgtgaacagccttggacgagttggattttgattacaacacggggacacaagtgattcggtgggagagcaaatatcccttccccctttggccacgcctttacattttcgctcgtcgccaattcgttgatcggccaaggaaacaaatttatatcttaagcagagcacttagcagcgacaatttcccggacccttcgcaaacgaccgtccgagtggaatgctatgaatccattttgatagtgcgcgcacacgacagtttagacaaaaaaggtttggactttgtgctctcttattacgacgacacgcggtcttccatcccacagaaaatctaccaatacggcattaatgttattggcccaagctttatcgaagatgtgcaca

SEQ ID NO: 95393 - DNA, 1024 bp, Heterodera glycines
gacaaatttgtcaagcgttgggagcgttctcccgtcggcacttccttggccattcctcacattcctatggcggtgccttccatttcgcccctcgggcgtccccatcctccgccccctccccgctctccaagtcggccatcgtccaaacattcctttgcaggcgaccacggttcattcttacaaacttctccgatcaaccgaattgtggacgaggagggccaagagtgggaggtggaggaagtgcagctggacgtgtccaagacgggactcggattctcaattagcgggggttgcgaccgcgagcctgacttgatgtataacgaccgatacattcgcgtgactgacatttcgaaagggggcgccgtggagacggaccgacgcattcgcatcggtgacgtgattctgttcgtcaacgattgggagacggccaacagagagcacgacttcgcggtgcaagcactgaagaacgcgggcacttttgttcgactgttagtcaaacgcctcaaatatccgccgctgcaaaaatcgctgagtcaaagccatttgagtgagcccatcgccagcggcaccttccaacggtcgttgagcgggggcgcggccgacagccgaacattgcctctgcagccccccgtccgttcccaatcattgcaccatttgccgatgaatgccgtcgcaacttcgccaaatgttgtcactgcgatgggcactttgccaaggcgggcgaatgtacagcagcaatttgcaacgccactaaatgacccgggcagacagccgagatgggttgtcatccgaaaaggcgaaatgggcttcggttttaacattgtgggcggcgaagatggcgagcccgtgtacatcactcgcgttgcacccggtggagcggcggaccagaccggcaacattcggatgggagacgtattgctgcgtgtcaacgatgttgacctgtcaatggctacccatggagaagcagcggtcgccctgaaggcgattccgcagggggcccaagtgaaactgctattgcaattca

SEQ ID NO: 95394 - DNA, 447 bp, Heterodera glycines
cagaacatacgtttttgcaaggtgctggtcagccggactgctcacacacttcggatgagtattgtcagctcccttattacaccgctatccacgaactattccctccagagcgttctcggtgggtgccgctgcccacccaaccgcccatcgccagccctctgtcagtgcgactcgtccagcggcaacatctacctggaaaccaactgaacctaaccatcgccatccaaggtggcactgacaagttgtcattgcatatcactccgctaaatggcttccaattgcgacattggtcattgacgccttttgatcctgccacttttgggatacgcaaaacgtactttgtgtttatgacttatggatttgaatcgcccggagaacgtctcgtttggattctgcttgagaataatgaacgcagtgttagcgcgacggacgaagtgccgagtttgg

SEQ ID NO: 95395 - DNA, 632 bp, Heterodera glycines
tacagaattgacagattgcttatgagatgagtgggaagggtgcgcttgtccatcccaaagccccggcactcattccttcgatagaaactgtcaattctgttttcctacagtaatctcgccgaaggtgcaagtgtctgaatattgtgacttttgcctgggtacgaatttgcaaaatgcggagggcgaggcggagccgctcatttcgtgccatgattgtggtcgttctggacatccgacctgtctcaaattcactaaaaatatgctcgtctccacaaaacgttacggttggcagtgcatcgaatgcaaaagttgtgcaatttgcggaacatccgaaaatgatgaccaacttttattctgtgacgactgcgaccgtggcttccatttgtactgcttgaagcccccgctgaaagaagcacccgagacggattggagttgccatctgtgcgtgaaggaattcggcgccgaagcgtccattgcgaaggcgacaaaaagcacggaagacggcacatcatcaccagccaaatgaccaaaacataatggaaacggggagaattgacaccgtaagacatttcgaattttcaattttgttgcccatccaacaaactaaccataatttgtttgtaatttcggat

SEQ ID NO: 95396 - DNA, 578 bp, Heterodera glycines
actcctccaactgcgcggccttagacgaatttctctccatcatcggccaccgagttcagttgcgtcattttgccggttatcgtggcggactggacaccgttcatggacagtcgggcaccgaggttcggtggggcagagtggggcgggcatacggtaccgtttgcattggcgacgcgcaacaattgcagcgcaagcggcacattggcaacgacatcgtggccattgttttccaagagcagaacacacccttctgtccggacatgatcgcgagcaactttctccacgcctatttggtggttcatcccattgagccgggcactgaccgcacgcgttaccgcgtgtcgatgacagcgcgagacgacgtgccgttctttggcccgacgcttccgcgctcttccataatttggaagtgccaactgcgcgactttttgctcaccaaactgatcaatgcggaaaacgcggcttataaggcggaaaaatttgccaaattggcggaacgcactcgggcatcgctgctggatggactgtactcaaatttgaaagagcgggcccaattttacggcatggcatttttggat

SEQ ID NO: 95397 - DNA, 312 bp, Heterodera glycines
ccttcattgctgatttggttgttggactcgccactggacaaatcaagactggcgcgccgtgccgttctgagcgtttggccaaatacaatcgtattatgcgcattgaggaggaattgggcactgacgctgtctacgccgggaaaagtttccgtaacccgcaaaactaagagcgtgtggaaacgaagaaaaataggactgttcgttgactattcgctggatgtttagtttcctgacattgattatttgttttcgaaaagtcacttgaatgctatgagtatattatttaattaaactgaataaaagttatttctc

SEQ ID NO: 95398 - DNA, 377 bp, Heterodera glycines
gctgtgaatgatgtcgtcaaatgaagaagaagaatccggcggttcaaatgatgaccaattttcctctccgatcagtccggtcagccccattcaaccgatgagcaccgattggagtaacgcaattgatgcgcaggaaatgggcgccggaggtgttggaggagggatcagcagcggaagcctgcacgaactttcgcatgggtgtgaccgttggccgttctttgttcgcaaatgtccggcctcctctccgactgtcacaaattttcaattgctgatgagcccgaaaaatcattttccattttaaatttaaatgactatttttttttgttaatttatttatttttatatacaatgtctaataaaaaatcttcgcaaaaaag

SEQ ID NO: 95399 - DNA, 386 bp, Heterodera glycines
tggctgagcgtggacgagctgaaacggatgattgttgcggaggcggaacagagagcatttgcgcccattccggagtgctttttcgagctgtccaacctgttgatgctcaacgtgcgggaggatgtcgagcagtatgagcagcacaatactgtgccgaaatggttgaaacacttctcgggaaaatgtcggacaaggacgcgttccatttgcgcaaggagatgaatgatgttttgacgaaatacgcggccgccgccatcgacgacaaatgagaagagagggattgattgattgtctgccagtgatttattacgcttgcgcatattcatttgatcacaaattgtcactgcttttccgtttctgaccatttgttgagttagttattaccc

SEQ ID NO: 95400 - DNA, 274 bp, Heterodera glycines
agtactgcgccgaaatggttgaaacatttctcggaaaaatgtcggacaaggacgcgttccatttgcgcaaggagatgaatgatgttttgacgaaatacgaggccgccgccatcgacgacaaatgagaagagagggattgattgattgtctgccaatgatttattacgcttgcgcatattcatttgatcacaaattgtcactgcttttacgtttttgatcatctgttggattgtctattatcccaagttttcttggttccgtaaattgtgtttac

SEQ ID NO: 95401 - DNA, 539 bp, Heterodera glycines
ccaagtttgaggtaaatatcggtttatttaatccaacccattaaataacccccacgtaagaattgaaagaaatggcgcccaaacaaaggatgagtgtggccaaccaacacttcagcaaaaatgtggtggcccgcggtcaggtggccaagtcattgaagcccaaggaaaatcagtacccggccgcgccatggctgatcggcattttcgtgttcgttgtttgtggctcagcagtgtttgagatcatccgatacgtgaagttgggcttctgatcacagtgtgattatatgtgtgtgtttggcattttgactgacggacggacgagtgtttcttttttttcttggtgttgtcattggcgcattgtttggcgggaaatttggactggatacacacacatttaaatgaacaaatgatgatgatgaccgataattggttgacttccctttaacttctactctttcgttctctctgtccattcatttccatccatttgtttcacaatttcctaacaaatcgccaacagaaatttaattatttcttta

SEQ ID NO: 95402 - DNA, 460 bp, Heterodera glycines
aagtgctgttacgccaccaacgacgacgacaacggcggcagagagtggcggcgaaggagacggacgcactgagacgacaagcggacagcggaagcgacacagcgcaaaccaaacggactcggcgaacggcgccgctggggggcaagggtcgaataacgccgttgttttgtcctcttctgagtcggctgcaaaggaagcaaaggtcagaaagatgtcgacaacatcgcagaacaagggccacaaatcgaacaccatggcggaggacagcggcggtggcacgggcacgtcggctgcctcttcgggcaacggggcggagcagaacgacaacagccgagcgaccagacggccagcggaactgcagcatttgattgactacttcccggaccagcagagcacggacggaaatcggatgacgcgttcgaaggcgagagcgatgcaggacaaaagcagcaacagtgct

SEQ ID NO: 95403 - DNA, 477 bp, Heterodera glycines
aaacaactcatcggacagaacaatttgcaaataaatttctgatgtcaaaacatcaaaaaagtgctgttacgccaccaacgacgacgacaacggcggcagagagtggcggcgaaagagacggacgcactgagacgacaagcggacagcggaaacgacacagcgcaaaccaaacggactcggcgaacggcgccgctgggggacaagggtcgaataatgccgttgttttgtcctcttctgagtcggctgcaaaggaagcaaaggtcagaaagatgtcgacaacatcgcagaacaagggccacaaatcgaacaccatggcggaggacagcggcggtggcacgggcacgtcggctgcctcttcgggcaatggggcggagcagaacgacaacagccgagcgaccagacggccagcggaactgcagcatttgattgactacttcccggaccagcagagcacggacggaaatcggatgacgcgtt

SEQ ID NO: 95404 - DNA, 500 bp, Heterodera glycines
ttcgcaatgagtgccgctgcgacccaacgtcttcaagcgaagcggcaaactttggacgaggcttatgctcccccagccaattttttggagatcgaagtggtcaatcccatcactcacggggtcgggaagaaccgatacacggactacgaagttcgactgaggaccaacttgccggtgttcaaacacaaagagtcgagcgtccgtcgacgttactcggacttcgaatggctgaggaatgagttggagcgagacagcaaaataattgtgccgcctcttcccggaaaagccttcaagcgccaattgcctttccgttcggacgacggcattttcgaggagggcttcatcgaagaacgccgcaagggactggaacagtttctgaacaaagttgccggacatccgttggctcaaaatgaaaaatcgcttcatatctttttgcaaatgaacgagcttgacaaaaattacgtcccgggacgcattcgtacggcctgaccaactgacaa

SEQ ID NO: 95405 - DNA, 726 bp, Heterodera glycines
gtccatttaagactagacgagcaaatgcttaaaatgcgttccgtcgtgccacatttcccaccgttgcctgctcttcgtgactttatctacatgtaccggatggacgcggacaaaacgctgagccaaaattacttgatggatatgaacttgactcggaagatggttaggagagccggagacttaacgaatgcgtttgttgtggaggtcggaccgggtccaggtggaattacccgagcaattcttgagcagccgtgcaaacgattggacgtggtcgaaattgacaaacaatttttgatgcctttgcagcatttgagcaatcattccatggagcggatgaatgtccatcgggcggacgtgctcaaatttgactttgaacaagtgtggacggatgcgggggcggccaaatgttcatgggttgaggagcatccgaattttcacatcattggtaatttgccctttcacatttcaacgccgttggtcataaagatgatgagacaaatgtctattcgccgtggaccgttcgtgtttggccgggttccgctcacctttaccttccagtccgaagttgccaggcgtgtagtcggcgaaccgtgcaccgactttcgctctcgcatcggagtgacgtgccaaaatttgaccgagccgcgcattctcttcaatgtacctggcaaatgttttactcctccgcctgaccatgacgtgtgcgttgtgcagtttctgcctcga

SEQ ID NO: 95406 - DNA, 273 bp, Heterodera glycines
gacaatcaaaatccgggtgtccaatccgaactattcgacgtcgacagaacgccgtttcggcgcttggattggcggctccattgtctcttcactgggcaccttccaacaattgtggatctcaaagggcgaatacgaggagaccggaaagtccattgtggaacgcaaatgcccatgacggtcaaccgacactaaataatttgcttcctttcccggccgatttaattttttcatttttatttattttggttggttaaaataaatggctagcttatc

SEQ ID NO: 95407 - DNA, 861 bp, Heterodera glycines
tgccaataatcggctaaatttgcgaaatgagacagaacaaaattttccgcttaatctctgccgtcccttcgcttctcctccccccaaatggactttgtggcgcttcgattgtcgcgactttccgaatcattgcacagtgaaaacatgtgcattttgtgccgaagtgaacaaattacggccgaccgccaaaaacattgtcaacgaaacgcacgcccgctgggattcgatgaagcgcgagaaaagcttcgacgacgcgccgactctgctcagaatggccaccgatacatttctgcccagcaaattgacgaaaagtgtttttttcaatcataaattgggcgtcgcaattttccgcgacgaaattccgccaaaattcgaaagtgtcgaaaatctctccggcggcattttccaattgtattttcacggcacttcgggtcgtcaaagtgcggtgaccgtgcaaaaactcgacgctctgttcatccaaactgtccgctcgctgttcggaatgccctctccaattgcgtgccatgtccacggattgttctaccgatgcgaaattaacccgggcaatcgccgtgatccgatatcctatggcaacttgttggacttgccattcatggccaaatttgaggtgccattatgtgcgaggaactttctgatcagacagaattggcaaaaatcctttaaactttgataatcagagtgatcatttaagatttggattgatgacgtcgtgaacagacgactgatagagcagtcgttcatttatcaccccaattttcaatgaccaatttttaaaattattttttaaaatttattattttttatttatcccaaatcgattcgataaatttttgatcacaa

SEQ ID NO: 95408 - DNA, 635 bp, Heterodera glycines
tgctcatttgaattgaggagcgggggaacaaactccaatattacccctttttagcgcttatgtcttatggaggtcggaattgaacggatggaaagcgatgagaatttggaaaatttaccaaaagtggattggacgataacaccagaaccaattgtcatccgtggagttggacacctaaccctgtttggccttaactcgcattttccaacggaatttccgagcgctctgataggaaaattggcaccggaagagtttgacgacacattgcgacgtgtgaattacgttcttcagaggaatgttagcagaaacttgcgctggttgatctgcggattgcttttttgctgctgcagcttcggtatttcgttatggccggtggtctgtctgaacagaaggactatttccgctctcgagaaaacgctggaccatgaaaatcaacaattgtacgacaaactcggcttgcattggaagttggccaggctgcccgttgagccgtccaatcgcctgacagaatatgtccttctgcttgaaacgctgccacgaattcccctttccatgccggattagcacgcgaaacttttattacccactttgggaatgataaagaagtttagatttcactgcgatgtctctttctg

SEQ ID NO: 95409 - DNA, 546 bp, Heterodera glycines
gtgccgttcatttcgggcattcttccgcttatccctttcatcagctcatccgccgcttcatttggcgtcacctccaaacaatcgccgctgctcaatttgggaggggcagtgaataacgccaaagaattgccggtgttggcaggtgctatggttatgctcagtttgtttcagttggccgctgcctttagtcttctcctttatggctgtcgaacattcgggcgcacaatgcgacacgtcgagaacattcagcgagggattaacgccctccaatcacaacaaaaccccgggggcgaaattggggagcaagaaaaagacgccggaggggaaatgaggcgaaagctgtgaagaaaccgatgaatttctccataaattaataagacttacaattagtctaaaaaatcgcaatttttcgcatcattttgttcattttcccattttttaacttattttcctttccttgccactcacgcaaattgacagcgaaggactgtaaaagtcatttgaatttagttggcataatgaaatgaagtgaatagcagtgaaaaa

SEQ ID NO: 95410 - DNA, 668 bp, Heterodera glycines
aaattttgcctataattaattctctttttgacgaattgagtttgcaatgtctatggatgaactgaagaaacgcgccaaagccattggtacatttgaggaactaagaaaaatcatagatatccgtggtgtgaatcggtacaacccaaacaatgcgccggttttggaacgggcggtggatttgatgatcaaagagacgaaatacgacaaggacattctgatgacactgttgaagctgtaccagttgaacccatttctttacaacgaaaagtacgtgtgccttgtgctattgaaaacgatgaccaattttccacgcaacgattttgctttggcaaaatatttggtggacgctgccaaagtgaacgctccggagttgcgacgcgtctgtcagattggctctcttcttgagtcttgcaatttcgcgctcttttggcgtctcgtcgacggacggtacaaaccccgcgacagtctcgacgaaccattcaaaaaacctgacgaaattcgccaattggtcgagtccgtcacaagtttcaaagaggcgacacggaattatgcatgtcaagtgatcaatgtgacattccaacgcattcacaagcaacagttggtcaatctgttgggtggtattgatgatgcccaattgactgcctatacaaatttgccatcaaacaaat

SEQ ID NO: 95411 - DNA, 625 bp, Heterodera glycines
ctttccgccatttcccttaattttcccgcggctcttccaaatgaaagccggcgccgaatgataaaagccgaagtgtcgctctgttatttgtactcatcgacaaatgccgccgacttcttggccaaatgcctttgtaagcaccgcaaacgaaagaaatgaacggcgaattgtgccaacccaaagcagcagcaccagcagcagaaacagaggcaggcacagaagggttgcatcgtcaccagcagcaccgatcatttcgtccggcgcttctccatcgtcttcggcccctctctttggccatcgtcgtcctcccccgtcgccttggccatcgtccccatcgtcgtccccccgatttccccccttttctcgggtctctgctcataatcgtctcctccccctcccgcttctccttctgctaattcttccgatggccttctcctcccttctcattcattctgcaaatgccctccaccatcggcacgaacacccgcaaaaatgttcaattgagggcgaaatttgcacaacaattaatgctcatgtgtgccgaaatgggacctgtgtgtccgcttgcactcttcgcggcatgaaagagtgccattgcgacgtggaggaggacaacttttgcttt

SEQ ID NO: 95412 - DNA, 172 bp, Heterodera glycines
gtgttggacaaagtgtgccgcacctcagcggtgaagcaggtgttacgccgccaatttgccaatgccaatgttcaaattgtgaagcggggccgagggacagttgcgctgaagaaactttaaaacaaattcgagcagcatacaacttctaacatggacatggctttaatcccac

SEQ ID NO: 95413 - DNA, 480 bp, Heterodera glycines
ccgcagcggacgactgcagaaaagcgcttgacatggacagaaagaatgtgaaggcgaattactacctggggaaggtgtacgtacaccagggacagtttgatgaggctatcaaagtgctgtcgcgggctcatgaaggcgttctcaatcttaagcaaacatatggcgacgaaataacccaattgttacggttagcgcgcagagaaaagttccgtcaagaagaagacaaacgcataactcaggagattgaacttcaaagttacttaaaccaattaattgacgacgacatcgccaaaaaagtgaaccaattggaggacaaaaaggaaaatgacgttgaagaaaaggcggaagaactgaagacacagggggacaccttcaaaaaacagctgaacaatctctttgctcaggttgacgatcgtagacggaagcgcgacctcccggactatttgtgtggcaaaatcagtttcgagctgctcaaagacc

SEQ ID NO: 95414 - DNA, 476 bp, Heterodera glycines
gagatctcggcaatttattttttaaatctgtatgtcttcagtaccgcaattatctgcttccgaacacaaagaacgaggaaatcgttattaccaagcaggaaaatatgaggaggccctttctcactacacccgcgctattataaagaacccgaatgatccgacttactttacaaatagagcactttgcaatttaaatcttaaaaaatgggactccgcagcggacgactgcagaaaagcgcttgacatggacagaaagaatgtgaaggcgaattactacctggggaaggtgtacgtacaccagggacagtttgatgaggctatcaaagtgctgtcgcgggctcatgaaggcgttctcaatcttaagcaaacatatggcgacgaaataacccaattgttacggttccgtcaagaagaagacaaacgcataactcaggagattgaacttcaaagttacttaaaccaattaattgacgacg

SEQ ID NO: 95415 - DNA, 458 bp, Heterodera glycines
atttccaatggatttgctgctgttcccattccctgggtcaatgatgtcgacaattttgaacttgcaaaattcgattattcgcctctccctaaatttgctgaaaatctgccaaatcgggtgttttgcaattgtaagggcaccggcggatgctcggctcagaaaggctgcgcatgtgtcgaaatgagtaccatcgaactctcagaaccaggtcgtgtgcacaatgcccatttgctcagtgagaatgcatttgagtcgcgcttcttcgagtgttcctcactctgttcgtgtgccggcacttgtgccaatcgattggcgccgcaaaacgacgcgcagcggaatcatttgcaaattttcaagacgctcaaggccgggtttggatgccgtgcactgaagccgattcggaaaggcagtttcatttgtttcctcggcggcgaaatctttcccttcgattatccgtc

SEQ ID NO: 95416 - DNA, 596 bp, Heterodera glycines
actttccgttgccctttttgacccccccccctagggctttttctgcttcccttttctccctcaaatcacttcccccaatgatttgccccaacttcgttcttttgtcccttttatccgtctctctgttcagttccctttcattagctgataatcagaccataacagtgcatgggcaaacgatttgtcatcgtcgaagtgtgaagggactgcacgttgaactgagagagcacgacacatttgatcccgatgattcgttgggctcgacaacgacaggcttggatggctcgtttaaggtgcgcggattggaaaatgaaatcggctccatccgtccctatttgagaatcacccacaaatgcgacgtgaaggacgaattgaaatgccgtcgtgtaacggagatcgacatccccaaggagaaggtgaacaacgacgtgtacgagatgcattttgtgaatttaaatgtgcatggccatagggacacagagaattgcgatgagtgaccaaaagggaagaaggaaaagcgaaatttgaacagatcaattgtaaatcaaattcaaaatgaactgatcaagggaaatacacatcatttaaaaatgaga

SEQ ID NO: 95417 - DNA, 551 bp, Heterodera glycines
  unsure (1)..(551): unsure at all n locations
aaagctggagctccccgcggtggcggccgctctacaactagtggatcccccgggctgcaggaatttggcacgaggaaaaaatgacacttcatttgttgcttgtccttcccgttttggcgatggctttcgcttttggcaactgccaaagtcaaactataattagcggttccggctgtgtgtaccataacggatgggtgactgaaagtggacgctcgcggccgttgaccaccaacgaacgcagtcaacttgacaattaccagcgccaatcgcaaagtgccgccgctgctttttccgccgcatttcgtccgccctttccttttggagggccaatcaacccgcagttgaatttgccgcagatgccatgtttctgttccgctgcctcatgcgcgggcggtgtgtcatgggttgacaattaatcagtgggccgatggacagagggaattaattattcactaatgaaacgaatttgtctgattcacagtcgggggattacaataaagcacataaatattgcggataaaatgctttctatttnaaacaaaaaaaaaaaa

SEQ ID NO: 95418 - DNA, 769 bp, Heterodera glycines
aggaaatgcactctaaataattcagtgaacctgtaaactttttaaaaatttctttatccttttttgcccaaaaatgactgccgcccgtcttctaaaaatggttccatccgaaagtgccttgttggtctgtgacatgcaggagaagttcagggagcacatcaaattctttccgcagattctgcaggtcacttgccgcctcattgaagctgctaaactgctcgacatgaagattttggccactgagcaaaacccgaatggacttggccacactgtgccagaaattgtcctcaaaaagcatgacattcccgtctttgagaagaccaagttttccatgtgcgtccccgacctccaacgcgaactcggcctctccccggccgttcggtcgctgcttctctgtggcattgaggcgcatgtttgcgtttaccagtccgccattgatttccaacagcaagggttcaacgtccacgtggtggtcgacgcaagttcaagccgttcaatggtggacaggatttatgcctacaaacagttggagaaagtgggcatcaatctgattaccagcgaatgtgccattctcggcttggttggcgacagtgcgcacccaaaattccgtgaagtccaaaaactgatcagagagagtgcgcccgacacgggactgatcagcaacacttcgcatgtctgatcagcagatgatagatctttccaaggactgtgatgagacacaaataaattttaatatgaaattcgtatttattttctttttattaataga

SEQ ID NO: 95419 - DNA, 673 bp, Heterodera glycines
gtccagttaagttcaccaatgcttccgctgacaccagcaaaaagattcgtctccaaaaagcattgtgtcgattcaattcgatggctctctctccaaaggacgacttttgcgaagacaattccgcccggtccgcttctgttttcccatgtttatttgccggaacggacgccggacggacagccgcagcgcaaaccgtccgaacacccggactttatgaaatacgatttcatggcggatcccgaatttgaaaaaccaccgccgccggtcgaactttttcttcttgaggatataaaagaccttggcgaaaagtttgacattgtcaaagtgtccgccgaagtcgcgcgttgggatttgctgctgaagcgaagggcggtgtacgcgtcgccgttcaatttgaaatattacgcggagaagagaaagaagtatttggccgaaatggaaagtcgtgtgcgcattccgctcgatttgctcaaaatgtcggcacttctcatgagccaaattttgcctgtgaccgtttccgcggacgttgagtggacgctgagcagtgagatgctgatcaactccacccagagcttgggtttgtacataaccgagccgggcatcatccatttggacaatgtgtcgacactcaatgggccccgacccgaacattgagggccgtctggttccgttt

SEQ ID NO: 95420 - DNA, 445 bp, Heterodera glycines
caggagttattgcgacgtcgcaattcaccggtggacccgagggatcgattcggctcaattgcggcgaaaaaggtgcacatgccgcagacggaacgcatttattacggctttcagccggacgtttggaacgaaggcgcccaaattgaacggctgctgcatgagcgacagaatgcgtttatggcggacgatgaacgcgtggaggacgaattcgctgagggacgcgttccacagattgtagagccagcgcaagggacatgtccgggactgaagaagcacgcgcgaatccaacgaaaacggagggagtggcgcacactgatgaaagcggagagaaagcgcaaggcggtggcgactgacccgggctgcgtttaagcgaggagatgcttcaccttcgccgatttcattttctcaaatttttaattttgtgtaaaataaatatcttgttttt

SEQ ID NO: 95421 - DNA, 1198 bp, Heterodera glycines
atcacagccaatttttcttcgaccccaattgtcccgaaacgtgttctccattttatttggatgcgctcttccgcaaaggccatttggtcattcgaatgttggagaaaaggttacccaaggagcagttcgttaaggttttgcaacgaattctttccctgggggttcagtacagtcagaatttgtatcggcctgtcgaatggacgcacatgctaattaacacggcgatgtttttgcgggttatgactgatgttactgggaaggaattgccttcctttgtcgaacaatggatcgattttggtggatttgttaattttcaggtttcccacattttcaaccgcaaaagaaatatcattgaattggagctgcgtcagacagttccgcttcgagaaggatgtcggaattacaccgggcctctcgcgatcgttgttcaggagcttggagggctttttgctcacactatccaaatagacgccgccgtttctcgccacgacatccaatgccattcgaaggggcgtaaactaaagaagaaacggataatgctcgggaccggagaagaggtcgacgtcgacctaaactcgatggacttcgattcgccagtgctttggattagagtcgatcccaatttattactttatcgtcaaatgtcaatcaaccaaccgttttatcaatgggaacttatgcttctccatgaaagggatgttctagctcaacaacaagccattgaaacactttgccgtttttccgaacacaaaacaaagatacttttggaagagacagtccgaaacgacaaattcttctaccgaattcgacgagaggctgcccactgtcttgtccaaatttacaacagtctccccgaaagccgtcttggcgagtctcccccactcatcgattactttcgccagaattttgggagtaaaacttcgcctgacattccattaccaaataattacgcggccacttcctccaaccttcagaacaatttgcttggacaagctttgcccgctgctattggcttaattcgaggccaagacggaagagagtgtccggaatacgtgttggaattcatcatcaacctgattaggctcaatgacaacagcactaaccgttattctgacgattactacagaggagcactgatccacgcacttggcaaaactttgacaatgtctgaacggactgttgaacaacccgattgttt

SEQ ID NO: 95422 - DNA, 508 bp, Heterodera glycines
ctttattctaaaactatttacctatacgtatattcctttgttttaaaaatcaaaactttaatctattcgtcagatgactgctttcaaagagttcgtcaatgggttaataaagactaagccggttgtgatcttctcgaaggagcattgtcctttttgtgtaaaggcgaaggatgccattaattcgttcaaactgaagccgggcgcacttgaaattgtcgagttaaaccagcgcaatgactgtgaccaaatccaagactttctcaaggagctcaccggtgcccgctcggttcctcgcgtgttcatcggtggaactttctttgggggcggagatgacacagtcgtagggcttaaaaatgggatgcttgagaagcaattgaaggcggcagatgctttgcaatgaaattacaatagaatagagaaatttgaaaagtctaattgttttagtcaagtcaaatgttatctttttgctttcttttaaattattaaatggctcaattcttcaaaaaaa

SEQ ID NO: 95423 - DNA, 579 bp, Heterodera glycines
gtttgaggaattaaaaaaaaacaacaaaaattgttgagccatggaaagtgcggacgaaaagctgccgccggtgacaagcggcggcactgccgccgccgccaccgctgcgttagcaatgcaaaaaattgtccaacaacacgcagcaaccatcgcgaaccaagtgcagcaacagcagcagcaacaaacagtttcttcttccgctgtcgtcgccccttccgtgggcatcgcttcattaccccaataccatgtgagcgcgccgcaccagaacatgccgggcagcaagtaccagcaactgttgctgttcatcgatgaattggggcgtgtcatccgccccacgtacaacgcgaatcgcaacgcgcaggaacgcctgaagcgtgacattgtgcaggcgcggctgttggtgcgcgagtgcatggccgagttggagcagcagcgcaagcagcagcagacgtgacaggacggagatagagagaaagacgacagacaaattaccgattgattttttaatgtattgattgaccagttttgtaccaaaaatcttctcttttttctggattgatgcacaacgatgggaattgt

SEQ ID NO: 95424 - DNA, 821 bp, Heterodera glycines
gttcaataaagtcaaaaccttcaaaatgagttcaaggattaacgtcgtcagtgtgcagttgttggagaacccggccactccgagtgaccacatcaaactcgaaattgttttcgaaatattcgaaaacattaaggaagacgtcgaatgggaattggttttcgtgggcactgatggccgagaagaacacgaccaagtgctcgactcagttctcatcggaccgattcaggagggacgacacaaatttttgtttgaggcgccacctccacaaattcacaaccttcgacccgaagattttatggatgtcactcttttgctgctcaagtgcaaatatcgtgaacagcttttcatgaaaatcggttggttcgtcacgcacacttacactgacccggaactcgtcgaaaaccctccttctcagcccgtcatcgaaaagctcaagcgaacgattgtcggcgaggatgtgcgcgtgacgagttacccgatcaaatgggacgaggaggcggaacagccgatggatgacgatgaagagccaaacgccgggaatgaggtttcctacggagtggcggccattgaattaacatcgaacggcaacagtcaacaaatgaatatgtcacaacaggaacagacgccgatggcggctgttaactaagcggatgaaagttgcgagcgttaaaaggacagaacggactcgatgttttatgggtacaaaaaacggatttgatcttcaaatttgcatttatcactttaacccaatgttttgttcgacaagctcatcataaatgtatgcggcaaagccgcccaacttgataaaaaccaagctatcc

SEQ ID NO: 95425 - DNA, 481 bp, Heterodera glycines
ccttaaaatttctactgaagattttaatggaagctgaggcggatttcgattccggattgctcagtacggaagtgagtcatcgacggcgatccgcttcagtgtctgaggattattcggtgcaaaaaacgaacgacgacgccacggaatgcaaattcgttgctgcgcagttgggttactactccgatagatttatcccggctttcatccacgcgtgcaattcggagaagccccaccacagagatccggagatcactcgtggctattgggcccggacaaacgcaatcacttcgatggtcgttcaatttgttcagcttgccggtccgtcaactcaaattttgaatttgggcgcgggatttgacacactttattggcgactcaaagatgctgggcttagtttttataagtttgtggaactcgacttcagcagcgtaacagccaaaaagatttgtcagatcaaacgcaacaaaaatgtgaatttaac

SEQ ID NO: 95426 - DNA, 538 bp, Heterodera glycines
tatttcgtttaattaactcaccatcaaatcatcatgaaactggtcttgttcggcgttattcttctcggcaccctgctgtgccagtgccattctgactcggtggctgttgaacagtcaaaagtggatgccgtcgatgttggagacgcgtcgcacatgatgttgacgcgggcaaagcgtgccagcggcggcagatggaccacgcagcagatcatcgagtgcattttcgcaattttcatcccgcccgtggctgtgctgatccatggcggccacgaatgggtgctccatctgatcatcaacatcgttctctggattctcggctggattcccggcaccatccacgccttctggtactgtttcttccgctagatcgatgaaggatgtgatgatcaacaccgatcgagacccccatcattgttgaagaaccggcccaagaaatgagaatcctgccgccttatttttccgatcattttatgctttttatacatcaaccacaaaatacaacaacaaatcgccaacatattttccatatttggataac

SEQ ID NO: 95427 - DNA, 262 bp, Heterodera glycines
tggcgccgagacttcggcacgcccaccaccgcctgcagaagaattgtgcgcggatgacgtcaaagtggcatttattgaggcgaatttcatgccggactgtgaacgcgcgtgccggtactatgaagactttgcggacgtcgcttttgaaactatgtttttcggaaagaccgacgaggaaagagtcaccaaattgtctttttaggctttttcatctgttttgactttttcgaatttactcgacaaacaatctcaacacaagcag

SEQ ID NO: 95428 - DNA, 471 bp, Heterodera glycines
gcaaaaagcaacaacaacacccttgttacgtaatgctcatcaagctcgtcaaggcgacggtgggcgtcccgtcgccggtggcactgcgcgcggtgtcggcacgcggcgtgggcagcggcacgcattggattggcaacgattttgaggactttgacaagcactacaagaccggactgcgtgacgccgtgccgattgccgccttctggaagaagttctccgctttcgtcatgatgccactgttggtattcgcgggctattgcggatggaaggaccatcagaatgtgcaccattctccacgccctgagtacgtcgcatacgaatatttggccacgcgtcgaaagcctttcccctggggcgacggcaaccattctttattgcacaacccggccactaattgggtgcctggcgttggctacgaagccccgtggcccggcgatgcgcacaaaaaggagggggacagcggcggcgagg

SEQ ID NO: 95429 - DNA, 476 bp, Heterodera glycines
gcacaatggctctctgcgtggcgatttatgataagcatgatgccctcctctatttacgcctcaaagatcgaatgtccgcttctcccttggaagtccaacgtttcctgcacagttcgtgtgacattgttgcggacaaaatgaactcccctggtaacaaggccacccaacaagaaaattttctcggtgcacttcttttgagtgatcgctttcggtcatttgcttatctgacaaacaccggtacgaagttccttttggtcatcgatgcggaggagggcactctcaaagatcacgaaattcggctctttttcaaaaacattcacacaaaatattgcagcgccatttcaaatccgttttattcgtttggaagtactttgcaatccagtaaaattgatgccgtcgttaacgaactgcttacatccttttgactgttcagaaaagcagtaattgatcacagaaaagagaactattgcaaataa

SEQ ID NO: 95430 - DNA, 601 bp, Heterodera glycines
aaagctggactccccgcggtggcggccgctcttccatagtggatcccccgggctgcaggaattcggcacgaggcatgaaaaagcaacccagcgcattgcttccacaacgtcaacaattccgccaactcaacccgccactgacccacaccatgacctcgcttgccaacttacacaatgccaccgacgatgaccatttcggccgcctactcgaatccagtgtccagtccaatgtggtcgtgctcaacttccacgccgactgggccccgcaatgcaagcaaatgaacgaagtgtttggcgagctggcaaagttgcacccggccgtcgacttcatttcgattgaagccgaagagcttgtcgacacctctgaactctttgacattgctgccgtcccctcgtttgtcgtgctcaaggccggcaaacccgtcgaccgtgtcaacggcgccaacgccatcgaactgaccaacattgttgaaaagcacgccaaggcggccaaatcgcgctcggcgggcgccaacgccgacttttccgacacggcctcgacggccgctggcggcgccggcgccgatgcatccatggccgccgccccactggcgccggcggc

SEQ ID NO: 95431 - DNA, 500 bp, Heterodera glycines
cactgttgtggatgttgcagaagaaactgttgcacaatcaatggaccaattagaagaaggcattgaagtggggacggtcgtcaacgaagaaatggcacagaatgtgccggaagagcccatggcatcagtgcaattggcgaagcggtcgaagccgttcaatcagaggattgtcgagaacatcggatggcgaaaggaatttgggcgggttccaccgaaggaaagggactctttgggactgatcgaatgcattgatggcgcaacggtcggatgcaaccaacggcttctcgcttctctgaagagttcaaacccttcattgtttttgagaactgataagtttcgctcgagaaatgcgtgtggcaataaaaaaagcgaagtgagtctacaaattgatgaatttgacgaattctacaaacgatggatttcaaattatgagcaagagggagcggggaagagccacggagaggagaacagtgaacacgatgggaaggaggaaagtgaaa

SEQ ID NO: 95432 - DNA, 438 bp, Heterodera glycines
atcaaatgttttgtcagtggagaattaaagttaaaagcaacaacttcttgaattcgttttctttttactgccaaaagcagtgtctcttttcctctcaagaaaagtgcaacaacaaaaacaaatatttgcccgacgaggatggaatcgtccgttctgaatttcaatcagtgccgattcagtccgaaccttttaccgaaacacttctgaatcgaattcgacaattttccgctgaacaaccaaaacgagccatttttgtcgatgccgaaaacccttccaacattacaacgtttggccaatttctgtccaagactcactccgccgctcactttctcaattccattggcttctcctccggcgatgtcgcctgtgtcattcttccaaactgttggcatttttttgccatttttttggccgcttccatgcataaggcgtgcattt

SEQ ID NO: 95433 - DNA, 724 bp, Heterodera glycines
tacatatttgttgactaaaagcatgtttctttaaatataaaaagtcccatcatgtcgaattccggcgaattaactttttccgacaaggatgatgtcaaaggtaaaactgaagacgacaaatcccgtggcactaaaaggaagaagcgaaaggactcgcctagcagcagttcgtcgacatcttccagctcatcttcctcctcttcgttttcatcttcttcagagtctgacgacacttcgctttccgaaagtgaaggccctcccgcaccgagcaaagtcaagaaaagtaaacttacgcacgtcatcaacccacgtaaaatttttattcacgaatatttgatgagcaaattgcacgtttccgatgtgaagagacttccagcggaaataagtcaaaagtatcaaatggtgcaaaaagagctcattgggaaattcgcatcgggagactatgccaagaaaccaataagtttccgaatcgacgaaattacgcttgcgggggcggcagcacagaaggctttcaatcgtggtccaacagtcgctgagtactttttgaagaaaaatggtattacacttaaacatccgcaattgccttgtttggtgcaaagcggcggtggaaaccataaaagcttttatcccatggaactgttgttctttgcccaataatttgaagatgtccatttctttttcattttttatttgtttatttttctataagtaaaaatttcgattg

SEQ ID NO: 95434 - DNA, 671 bp, Heterodera glycines
aaatggtgaatattttggccgatttggtcgccttgggcgacgttgaaaagcgcgctttggactttttgccaagggcagcgcgcggctattacgaaagcggagccgacgatgagcagacgcttcgggaaaaccgcgaggcattcagaaattttctgatccgtccctttgccctgagagatgtgtcccaattggacccttccgtcaccgttcgcctttccccctcaacggccaacccgaagtgtcgtccgttcgctcgcacttttgcctgcccaattggcatcgcgccatcggcattccaccgaatggcgcacgacgagggcgaaatagcgacagtcaaggctgctggcgagacgggcactctgatgatttgcagcactttgtccaccgttccgttggagaaagtggcagaagcggcgcccgaggggagcactttgtggtttcagctgtacatttacaaagaccggacattgactgagaaaatcgtccgaagggccgaaaaggccggctttgccgctttggtgctcaccgtcgacgcgccactgttcggacggcgaagggcggacgagcgcaacgccttccaattgccgggccatttgaatattgccaacttcgcctctcacatggaacagtcgaccctttccggcgccgaagtcggctcctccggcctttcc

SEQ ID NO: 95435 - DNA, 240 bp, Heterodera glycines
ggaaagaagcggagaaagacaagcagaaggcggaggaaggcaccgagctgagcaaaaaggccaaaaagataagggcgaaaaggaagggggaggcggggaaagacagccgaactgactgataatgcccgtgccatgccgttgttgttttggtgctaaacaatacgtgtcttttgatattgtttcgttgttgatttatctttattatttttgactttttggatcttataaaatttatatttt

SEQ ID NO: 95436 - DNA, 621 bp, Heterodera glycines
aagtttgagtcaaaccaaaattaaatttattcatgttcttcgtgaaccttgctgcaatcttaattttcctgcaattttatttggatttgaccgaagcgggcatcgaatgccaaccaaacggagtctgtagagacgtttctggctcaactcctgcgagtaccgtatgctcaaaaaaatgctacagttgcacttacaaaaactgttgcaacaaagtgtacacgagccagtacgccaaatgctcaattaaggggtggcgtaaaaaaggatacattggcaatgtgccagtcgaaattggtgcaacgaagaaacgagacgtttactgttctaaaagcaatccatgcgcaaaagagggctacaaatgcgtggcctataaaaagggagatgacagaggcttctgctggagagaaaaagttgagaaagggcctccgtcaagctttgctttggcaattgcgatcgcaggcctcgtcattctgctgtgatggactgatcagaaacagagttgaagggatcaaggaattacgaacagcgattttttgggattaactaatcaattatataattagtcatgccgtttacatttaaagatggcagtttttatattaaaaaagcatctgcgtggta

SEQ ID NO: 95437 - DNA, 824 bp, Heterodera glycines
cgcggatgttcgtgccgaaaagtctgtggccatccatccaaaaaggacttgccgaactcgcctctcaaaccaaaatgggcgatgtccgcgacccttccattttcatgtcggctgtcatcgatgcgaaggcgttcaaacgaatcaacgactacatcgcttacgcaaagggagccggagtcaaaaaggacggcactcggctggtatttggcggaaaatgcgacgactctcgtggatggttcatcgagccgacttgtgtggaggtggacaacatttcatcccttcttctcaagcaggaaatatttggaccttttatcgctgtttacgtgtacaatgatgtggatgctggtcagctcgttcgttccctgaaggaccaaactccgttcggactgactggcgcagttttcagccaggacaaggactttctttatgaagcaaaagacattctccgtgatgcagtcggcaatttgtatttgaatgacaaatgtaccggttccgttgttggtcagcagccttttggtggagcgcgtcaatccggcactaatgacaaggccggaggcccccattacgtcctccgatggacttctgcccaagtgatcaaaaagagttttgggccgcttaccgaatggcgctacccgcacatggattagatgggagacctttattgtcttttgaaaccaacgtggttttcatgtagcgagatttccctccattcaatccaataatttcctttgaatttctcccataattctctccctatcgccccatctttttttgatgttttgtttttccctattctattgaattgtcgcataataaatggaata

SEQ ID NO: 95438 - DNA, 521 bp, Heterodera glycines
gtcctaatttgtgcattttaatttattttatttcaccgctatttctttcctaactctccgccaatgatttttcttcttttttgttttatggtgttgtttgccttttgcggccactcaaatggccaaatgactgctgccaaccaaacttggcttgcctcccaacaggcattggcaagaaacacgggcagatgcggctcgttttttgtccgttttggcgacttttgctacttgcgctgccgacaacgcttcggcgatgacggagccaacggcgactgtcccttgggtggaggaccgtgccttatggtgaacagaaacgtgaacatttgtttgcgagttgctttcagcctcagacagcagtgaaagaggcaaagaaagaacgaaaaacattggggaggaagtgatcggcagagcaaatgataagaaaaatggaaatgattgtgattttgtgaattgaattgatcaaaaatgaaaagccaagacttttgtgagtagtcccaacttgaaaatacacgtaaataatt

SEQ ID NO: 95439 - DNA, 476 bp, Heterodera glycines
caagtttgagcgaaatggacaacacaaataataaattcattttgttgaagaatggggcaaaattattctatgcttctgaagaatgcgtacgtcaggaagcgaaaaactttgtgggtggaattgtcggtttgaatgggccttcggatttggaggagggcatttatgagggtggcctcaaaatttgggagtgtacggtcgacttgtgcaattttctactcagcaattatcagacaatgagcggaattgacattttggagttgggctgtggcgccgctttgccttcgattttggcgctgtcaatgggcgccgattcgatttgtgttcaggatttcaatacttttgtcgtcgaatgtttcaccaaaaggaatttcaaattgaatggccataaaattgacggtggaaaatgcgcttttataaacggacgatggggcggagaaattttggggaaaattgggcagaaaaagttcggtctgata

SEQ ID NO: 95440 - DNA, 509 bp, Heterodera glycines
ggatccccgggctgcaggattcggcacgagactggtgcccttcccgcgtttgcacttcttcatggtcggtttcgcgcccctcacgtcccgcggctcgcaacaataccgtgccctcacggtccccgagctcacgcagcaaatgtttgacgccaagaacatgatggccgcctcggacccgcgtcacggtcggtacctcacggtcgctgccatgttccgtggccgcatgtccatgaaggaggttgacgagcagatgctcaatgtccaaaacaagaactcgtcctactttgtcgagtggatccccaacaacgtcaagaccgccgtgtgcgatattccgcccaagggtcttaagatgtcggtcaccttcttgggcaactcgaccgccatccaggagctgttcaagcgcatctcggaccagttcacggccatgttccgtcgcaaggctttcttgcactggtacacgggcgagggtatggacgagatggagttcaccgaggccgagtccaacatga

SEQ ID NO: 95441 - DNA, 599 bp, Heterodera glycines
tgagaatcaaaatgcatctgacccaaaaattgcaaaaatagccaaaccacttcagcctcgaaagtatccatttgtcgaacttgttcctttgatgggtaaaaatcatcttgacactgtctcagagagagttcgcggaatccatccatgtgttgaagaaagacataatttgtttgcatgtttgaaaaaatgggactacgacgacatgaaatgcacaaaattctccgattcattattcagttgtatggaatcaaacaaaaaaattgtcgctgcacacaatgagcaaagaattaagggagagcagcccttgcacatcgtcgatgaaggtagcagtgtgaaagcggaggcgtccaacatactccaagcagacattgaccggcttttccgcaaatggaaacagcccgaacttggcacgatccaaaccaaagttatgaagcgccgcggacacatgccgtactacgtggactacttccaccggaagaacatgaagggatggcgcgcctaagaaaaagactcaattgttttgtaaaaccttagttggatttcagctgaagcttttcaaatggcataaaattgataccccagaactgaccacatggact

SEQ ID NO: 95442 - DNA, 710 bp, Heterodera glycines
gtttgaggcattttggctgatcaccgctttttccttacattattatgcgctgcttcttcccccgtgtcgtccgaagtgttttcccctcgcccctttccttcgtccgttcctctctctccactttttatcccatcgatgaccaattgttcggtttggacgaggaacaacgacagcttcgtcaattggtctttcgactcgctcaaaaggaattggccccttttgctgatgaaattgaccgtcaaaatgaattcacaaaacttcgcgatttttggcgattgcttggtcaacaaggccttttgggggtcacagtgccagcggagtatggcgggtcggatcgcacttatttggaccattgcattgtgatggaggaattgtctcgtgcaagcggatcaatcgctctcagttatggggcccattccaatctttgcgtcaatcaaatccgtcggcatggcacacccgtgcaaaaagccaaatacttgcccaagctgtgctccggcgaagccattggcgcattggcaatgagcgaaacgaatgcgggttctgatgttgtttcgatgaaattgagtgcacgaaaaactggcgacaggcgttccttcgtgttgaacggctccaaattttggataaccaatggacccgacgcggacattttggtggtttatgccaaaacaagccctgccaagcatcaacacggaattacggcatttatagtg

SEQ ID NO: 95443 - DNA, 832 bp, Heterodera glycines
gtttgagggagagaatttccgttccatttaataatttaataaacccaaaatgtcttcatcaactgctgaactgaatccggaagatggtggtcatccgccacagaacaccgccgtggccatcgagcagtcgcaacaggccatccatccgccggcacaaagcggaagcggcaaaattgccgcgtgggcatcgccgaacgcggacgacacggagccgtacggaatttgcgcaaagattctgatcgttctgtcctacatcatcacaatcatcacttttccgatctccgtgttcatgtgtattaaaattgtccaacaatatgaacgagcggtgattttccgtcttggccaactgaagaagggtggagccaaggggcctggccttttcttcatcatcccttgcatcgacgagtatcgtaaaatcgacctgcgcgtggtgtccttccaagtgccgccccaggaaattttgtccaaagactcagtcactgtcgaagtggacgcggtggtctatttccgcgtgttcaatgccaccatttccattgtgaacattgagaattcgaccggctccaccaaattgttggcacagacaacgctgcgcaatgttttgggcaccaaaacgctgagcgaaatgctcagcgaacgcgaacacattagccaccaaatgcaggaagtgcttgacgaggccaccgagcattggggcgtcaaagtcgaacgtgtggaggtgaaggacgtgcgcttgccgcgcgaaatgcaacgcgcaatggccgcggaagcggaggcgacacgcgaagccaaagccaaggtgatcgctgcccagggtgagcagcaggcgtcgcgc

SEQ ID NO: 95444 - DNA, 399 bp, Heterodera glycines
tgaaaatgaatgtggacaatgcaaacattgtctggataaaaatgattgttttctcaacatgatcactgcttgggctcagaatggcgaaatcgaatggccacgggtgttgggagagaacccaaatttgtggggaaaggaacaaaaagtgttggccgatgcgaaggcaaccgaagacaaacagttccaagacccgaaatttgaacaaaattttaaggcaatgaatgccattggtatggctcatcgcggtgcctaccattacttcagaggagagccgggaagtgccggtgccttggagcaagtgcggcattttctaaacacaagcataagggcgggattcaatgtgcacaaagactttgctgtggtcaatgttgaaatatataagaatgaaggtgcagacaa

SEQ ID NO: 95445 - DNA, 704 bp, Heterodera glycines
tggatatttcttcgtcccaattaaaaatcttttcggtatttctgctctttatcgacttcgtatttcccaacaaccatgaaaattttgtcactttggcacaatttagagccggtggtgaaaaattcagttttgcggaacggcgttttttgctctacgatgtgaaccccggcgagggcttcaatttgcgaagggatgtctatttgagagtggccaacacagtacggcagctcagagagaaaggcttcgactttgttcttgtgctgccgccttggggaaactgttggcattggcgcacaaagccgcggcagacgaaaatccgttggtctgaactgttcgacttggacagtctgtcggactttgtgccggtcatagagttcgacgagttcctcgaagctcagggcacttccgtcagcactgttttgtatttgcagcattacgcggagggatgggccgaaggcggcgaatacactctcaaatacgacattcgcccgtgcattgaggcggacaaatattacgctaaaaggggcgacaaatggaacggccatttcttcgattacgctgaccatttccatgcgaaggatttgcaatgtctgtccatccagggacagtcgagcacactcgcagaagcaatcgcacaattattccccgagggtcgttctttgatggtcgaccgtgccgaaacgattctgcacgaccaattcggc

SEQ ID NO: 95446 - DNA, 630 bp, Heterodera glycines
cgcccttaaaataaaatattaaaagatccgaaaaaatgccaaacattttcaaaatccttctgattgtgcttttggccgtcgtctcattccgtctctcggcttctactggtgacaaaaaaactgctaatgatgggagtggaaacaactcatcagctgggattggtacgaagatcaaaagaattgtcaccgctggactgctcttcacttccctggcgacgggtggggcggaagcgattgggcgaagcaatgctcagggaggaaatgccgccggattggtgccatcgcatgtgaccaatcgctcaatggctccaccacctcctcctgtgcaatttgaaatgggggcaaatcgattagaaaaaatgagggcacacctacgcgaacttgctgagaaaatgccggtcaatgaatcgaagcgtctgtcaccgagtggacccgacccacatcatcattagggccatggatggatctaacggaggaagaaagaatggatgcttagttttcagattttattctatcctcttttatttattagtttttcaaaacaaatttcttccacaactttttaaactatttgttgttttgaatctttttagataaatctaaacccctaaataaattataattttataa

SEQ ID NO: 95447 - DNA, 151 bp, Heterodera glycines
tgattaacgtagcctcgctagaatttaatctaaaaaacttttgtaaaaaagcatttaacaacgtcgcaagcattgtagttttaataggttctaccactatccctttttgaaccttgaaactacgttaatgtccataaaaaaaaaaatccac

SEQ ID NO: 95448 - DNA, 170 bp, Heterodera glycines
gagaataatgtgatggatataacgcaattgagccaaattggaacggaattttggacgttttgaatttgcattacccaaaaagtggcgtttttaagtgatgccttttatacattaaaatatatttgttttacatatttatgaattaaacccttcgagaataaagcgcaaac

SEQ ID NO: 95449 - DNA, 503 bp, Heterodera glycines
tattaattaattaactaattaattatccgtaatgcattttccgccgaccattcataacgcccaaattcgccacggtccgctgaagccgccgaatatgagccgaagcccaacacagccggacacaagccttggcaaggtgtacttggagtgtgtggccagcttttcggagccgacaaaggccaaatggctattcggagagagcgaactgagcaaaacggacggacggtttgagttcagccaggaacagcaggacacgaacagggacaagttcatctgcgagatcaaaaatttggacaaatcgctgaccggagtctacaagttggtgttgatcagtgcggaaggccgtgagaacatcgccacgttcaatctgcccctggtgggcatcgaaaaatgcaattggactaatgtggccgcttctctgacaatggacccaatggtcgtgcgagaagtgccactccaacctctggtcccgatcagataaagcgcaagaatggcggaactcg

SEQ ID NO: 95450 - DNA, 617 bp, Heterodera glycines
agaatatgcaacaaaagtgcactttttcgttgattactcaagacaaaacggaagttgttgtcccttctgactttgtggatcagtccgatatgttgtcggattacgcaaaaatgcaacgtcagaacaacggagacgcggaggaattgcaagcgaaatttgaaatgaccaacgaaatgccattgatcagcaaattccacttggaaatgatcttcgaattcctcggcacttatcgagaggagaaacaaaaggaaaacgaaggggcggcggacgaaaagcaaacgacgaaaagcggcgaaagagtggccgaagcgacggcggaagaaagtgccgagttgtcgaccatgccgaagtgggcgttcgatttgttcgacaaactgccgaaaaatgaccttttcctggcaatgaatgccgccaattacttcggcatcgcccctttcgtttcgcttagtgccgcgttcgtttgcttccaaattttgcagaaaaaggggaagagggaagtcgcggaatatttgaacatggacgagaacgacaataacaacaacggcaaatgattgaacattcgcaatgtttcagtgctctctctctattcacgattttttcaataaaacaaaataatt

SEQ ID NO: 95451 - DNA, 735 bp, Heterodera glycines
gttgccccaggtgttacaattaattttttaattaatttgacaatgacctatgaggaggattacatgtcaagtgctttcttggcaaaagtggaagatgttaagccaggtgtcggcaccggaagagaggggcgtcgaattttgcgaattaatgccaaccgagaagaggcgattgaaagacagcgggtggagaagccaaagtcaaaagccgaacttgaaagggacagactaatggagggactaaacaatccgatccgagcggagtcaaaaggctttcaattgttggccaaaatgggctacaaagagggcatgcgtatgggaaggagcgcagcggacgaacagcagatggacagtcggacgaaggagcccattctgatccaactcaggattgatcggtcgggcgtagggatggacgagcaccgaaaggagaagcagagggatttgtgtgaagcgcacatggagcgaatgaagcgacaggcggacaatgaggaagaattggccatcgatttccgaagacgcaaaagggcagcaatggaaatgaagcaactgatctcggagatccaaaaactgagaaagacgtgccaagagatggacatgcgaatgggcaaaacaattccagacgaattttggttttggccgatttattcgaacaataatgaattggtcgacatggtggaagtggtcgacaaatcaaaccaatcgatggatgaaaacaaacggacaaaacgagagccttca

SEQ ID NO: 95452 - DNA, 801 bp, Heterodera glycines
tgaagattcaatggctatgatacctttcaatttgtttctgctcagcgcccttttcttcacagcgaatgcatatgacttaatattcaagaatatttccgtgccagacgaattgaaggacaaatttgaatgcacttttgaagtgaaaaaagggaatggggagaacgaatgcggattgggagagttggaaacggacggacgacgaaacggcgaattgaaatgggcggaggacaaactgtgcatcaaagtgaaatgtgaagagaaaggaaacgataccaaatttgcattccgtctccagcagtgtgagctggtggacttaaaaaagtccgacaaaccgatgaaaaggcccatccatctgatcgactcgaacggatgtttggcctcaaatgccaaaggacaatggccaaaactcaatcctccactgaactattctttcgaagagagaacggtggaaatgcgcggatggacttttggcaacgaaacggacattggccaattccccgacgaagcgacactttcttgtgcggtcgaaatctgtgcggatccgtgtgaacagagctgtttggacaaaatttctcttgacaagtgcagcctcaatgattttatcggtgacaaaaatgccacggatatttgccacgaaggaaatgccgccgctgttcagggcacaatcagtttttgtttgatgacgcttctgatgttcctctgttcttccactgttttgatgtttcagtgataccaaaaaataattttattttgtttttataattctaattcgttaaagaatcaaataaatttttatttgtc

SEQ ID NO: 95453 - DNA, 1100 bp, Heterodera glycines
ctcgactctctattgaaacgcgcgccacggcaccgtcgaagcaaaaagcaccgacggagcagaggacatcaccacgccgaacaccagcatcaacggggggatgtgttcggaggggaagccgaccaaaatggacaatttgcttcatctggaccccacgcgaagtcatttctgacgcgactcgattctgcgcattcgccgggctctccaaattcgcggaattctttcatgcaaatgatggtgttggaccgaagcagacagccttcggccgatgtcattgagactgtgtgccttcagaacggtgtgtgcacttgtgccgaaacgacctgcactttgcgctgctcttcgtgtgcgcgactcactttccgagagatttgcctgaatatttattcacctcatggtcaaatgcaaaagtttgcacttacctttcggcttaatccaaactctgtgcctcaaactgtgaaaatctctcagtcctcagctgagtacaccgttttggagaatgtgagagtcgtcgaatggcaaagttcgtcgttggatcgaccagaattgttgactgttgggtcagaaagtgcaatttcgcctgtttgaatctgctgaaagagaccaacggaaagtcgccccgttttatgctaatcggaaatccgcaaggactttttgacgagggcgaactcagcgcagatttggaagaacgaggcgaaggcacagtttctgaaaacagtggcagagcagcggacagaatggtccggacgcattatgtgatgtatgacaacgaccgactgctgagaagcaccgattgtcacgagcttttcgggagggtggcagacgaatcatgcgaaaatgagaaggaaacggacggaaaaggaagaacggaccaccgatttgaagaattttcttaaaattataaatattttcaaaaatttccatgccttcggcgccactcactgagagatggacgaactttgacattggtagcatggactttcgaataatcacatatttttaacttttcctctttatctcaattcaatgatcttgtttttctaaattgtttttttccgttcactttcgcatttttaacacataaataaatgtcaaaattt

SEQ ID NO: 95454 - DNA, 564 bp, Heterodera glycines
ggaaatttttgctcaccaaatgcaataaattcaaagccccacacacaatcaccaccagaatcatcataatcaccataatcccaacaaccaccggttcatccatccgacataccgtatcgtccgcgccgaatgacgtcaccgacgacattcaacggggcacgggtttttgccaaactgtccggcaacagcaaccaacaacagcaggccattgagcacaaaatggcggaacttcgagcagcatacgcaatacaaccagcacagacgccgacggtggcaaaaagtggtgccaattccacccaaaataaatcgtcggcaccaccacctcgtcgacctggacgaacctcattgccaactccgtcactaggcgacatgcttgaactaccacaattgagctctcgcagttgtgtaccgtcgagaagagcaagcacagtgactgcctgtttttcaccagccccatccctaatggatttggcatcgtctgccggacttttgtcgctgtcgccaagcgatttggtcttcgagtcgtccgtgctcggcattgcctattatgactttgtgttgtcg

SEQ ID NO: 95455 - DNA, 461 bp, Heterodera glycines
  unsure (1)..(461): unsure at all n locations
attgaattcgttcgacctgtcaattcgatttattatgaaagtgtcgccccttttgaattgcgccgtttgactcccacgaaaaaatgcgatggcattgcattttttgtgcatctttccacctcaaattcaacccctaaatctggtcgatgagtttcattttcctttggctttttctgaatttgttcctccccaatggcgttgaagccatgccctattattacaattctcccaatttgcagcagcaaaagccctttttggccggcacgcgtttcaacatgggcatcgacccatggagcggcagccccgaaaggggaaacatcggattcggaaacaatttggctgcctttttttacgtttgccacacatgcagcagaggaagaagataaaaggagcgatcggtagaaaaacggcgttaatttttaaaaatttcatttgtttacaataaataaaagttgaaaaan

SEQ ID NO: 95456 - DNA, 498 bp, Heterodera glycines
cgcttttgcacatttctctatagcacacattcaagaaataaattgataaattaaaaccctaatcgaccgtttttctatctgcaaaaaatgctgcaattcgaagaggcaatggcccaattcaacgcaatgtttccaaatttgaattcgtccgtcgttgagtcagtgctgcgcaattgtgacggcgatgtgagcagaaccatcgatgaattattgcgacgaagtggccaagaagaaggaaataattcggagacggatgaacggcgaaagagtgtgtccactccgccgagggaccaatgtgccaatgacgagaaaatcgctttgctggtccaaaaccgcgagtttctgaggtatctccgtcgcgacccaaacttccaacgtgaaatgctcggccgttccaattcatctgattatcgacatcggcaccattcttcaactcatcgaaggcgcaatttgcccgttctattaacgtcgtctcgcacttcccaatcgcctaattca

SEQ ID NO: 95457 - DNA, 505 bp, Heterodera glycines
atgacactttgtttttaaaaaaaccttcaatggagtgggcggaatgacaccggtgccaatgctgagaaagcatccaacgttcacggcattgaggaaaattctgaaaaaacgaaaaaaaaatttaaaaaatttattttgctgttgttattggtgttttaccttgtacttgttgaagctgttccaaaattggatttcctggagcagttccaatgacgggttgttcgcaataatgcctgacaaaaatgagtgagggttatggacagaaaaaacacatattctaatgggatggaatttcattaaaatcaaccaaaaatttcaaaaaacagaaattcatcatttaaattacgaaaaaccgcttttttcttgtcaccaaatgcattttaattgtccaccgattaatacaacaacaacaatcaaagcaccactgttcacccacctccatcaatgtatttgttgtccacactggcaaaataggtaggtgctgaaaatttttcgcgaatttatt

SEQ ID NO: 95458 - DNA, 679 bp, Heterodera glycines
caagtttgagcaaaatgcgattggcttcgttattttctgttctgctgtttttattgttcatccatcgaacaattccctcaccttcgccaaaatttgatgaagccataaaagacaatggcattttcgcattcgattcgtccgttgaggacagtgccgaggaagtccctccttcgcctgcttttgccgattctttgcggtcgcctcactcctccgaggccgaggaggacggtccatctgctgaagaggaagaacagtttgtggacaatgtggccggatggcggccacgtccatctttcctgccgccttttgctgttcaaaatcgatgcctaaaagccaaattcttcgattcgaaatcggacgaatgccgcccttgttccatttgtgggcccgacctttatgagcgggaaaagtgccgtacggacagtgacaccgtctgcgagtggtgcctgaccaatttgcgagtgattgtccgcaacagcgactttcgcgtcaaatgtgaacagctcattgccctccgtgaccaattccgcgcggcattggttcaacattccgttgttgagggaaaagcgaagccaacgatttattcggtttcgatgttcgaaaatgcctccaaactgtggaagatcgagttgtttgtggagatggctttttacatcactctgattgccctcgtgttggc

SEQ ID NO: 95459 - DNA, 598 bp, Heterodera glycines
attgctgccgtcctaaatctcctattatctccaatgttcggtcgcttcgtttcatcccttttctcctccacggtttcttccgtttttcgccccgaacgattcctgcaaaaattttccccaaatttctgctgtcattcgaactttctccgacaattttcgtttacagcccaaaatcattatgatgacattttaatgcgggacattcgcagaggttctcctccaaagcatgcgcgaaaaccacacgacagaaagccaatcaaaggaaccgcttttaggaaaggcattgttataaaagttgtcgtgaaacacccaaaaaagcctaattctggcaatcgacaatgcgtgttggtgcgtttatccaccggaaggcaatgcatcgcttacattcctggggagggacacaatttacaggagcacagccaaatttacgtgcgcggtggtcgcagaagggatttgatcggagtcagagcaaatgtcatgaggggaaagctcgactgtgcggcggtcaaaaagaaataaatccgaaaacgatcaatgcttttataattcggtaaaatattttgatagagtggtcaaaggacattaaacattggtaaaa

SEQ ID NO: 95460 - DNA, 475 bp, Heterodera glycines
catataatttcgagccctactgatggcactatttagtcatttttaattttattatttgtgaatggcctgctactaatacaccatggatattcgatctgaccagcaccggtatcctttttgcattgtttggacgccaatccccctcatcagttggttatttccctttattggacacattggtattgcaactagcaaaggtataattcgtgattttgccggcagcaattatgtctctgaggacaatatggcatttggatggccgacgctttatcatcaactaaatcctgaaaaagttaatggaggttcagaggcatgggataattctgtggcagaagctagcgatgaatacaaacgtcgtttacacaatttgttccttgacaattgtcactcgcacgtttcacttgcattaaatacaatgcgatatgacgggaaaagcaattggaataattttcgggtcgcagcggacattaattta

SEQ ID NO: 95461 - DNA, 475 bp, Heterodera glycines
gtccaattaagctgcccattgctcctctcctctctttcctccttcgccacttgcacagcgactcggcaattcccgtcgcgggcggaagcaattaggccaacccatcgccgctttcattagcatcgcaccgcttaagtcagtcagtcacaaaccgacaaaagaaacggcaaaattctctcgcacattattcagaaaagtcgaggctctgccaaacctccgaacagcgaaaaattcaatcggaaagtgagtctcgaggaaagggagtcgagaggggacgagcaaaaggtacggcacggcaaaacaccacggcacacgccggtcgatgagcgacgaactaaacattgacggcgcctttgcgatgaacatgggcatgcccgcgggcgcgacggaagtgcccgagggggtcgtgcagctgaatgtcggcgggacttgttttctgaccacaattgacacgctgaaaagggacagcggagca

SEQ ID NO: 95462 - DNA, 464 bp, Heterodera glycines
ccaaatttcacactgaaaatgtcttcttcgtccaccatttttgttgttctgctggtaattgccatctgctgctgttcattaacaattgccatgccagcagcggtcaatgaaattgatagtgttccacttcggcaaaagcgtggctatggctatggtggctacggctatggtggctatggctacggcggtggaatgggcggcggcggatttggcggtggaatgggcggcggaatgggcatgggcggcggaatgggcatgggcagcggaatgggcatgggcatgggcagcggaatgggcatgggatttggacgctgatccgtgaaattaattgtaccaataatcggattgtcaataaaaagataatggaataaaaataataataaaaaaaaaaaaaaaaaaaaaaaaaaaaaaaaaaaaaaaaaaaaaaaaaaaaaaaaaaaaaaaaaaaaaaaaaaaaaaaaaaa

SEQ ID NO: 95463 - DNA, 138 bp, Heterodera glycines
cactttcggctcgcttggcagagggcgtcagggcatttgatgagagcgacggaagagagaaagacgaaatttataaccattttttgaatttgttttgttgtgtcttctctatttttctttttgcttaaaacacacacg

SEQ ID NO: 95464 - DNA, 210 bp, Heterodera glycines
gttgacattactaagccaaggagacgaagattctcaatctcttaaaagaaaacgtttgatctaagtgcttttgtgtgttgtgtataactcttttagactagtgtgcttattgttcccttcttgatgcgtgatttttttttttgggtgtgtgtgtttattgtttaatgagcttggttaataaaatgaaaatcgaaaccagattgatttact

SEQ ID NO: 95465 - DNA, 369 bp, Heterodera glycines
  unsure (1)..(369): unsure at all n locations
tttttcgcctttagaccgcttcaaaggctttccaccgctgcgtggacatcgacccgtcccatttcgaggctttgaataacctcggcgcttcctattttcttatgggggagaggcagcgtgccgaaaaaatatttttagaagctcaaaagttaaatcgtcaaaattcgcacgttttggaaaatttacacataattgaagcagaagcaaaagcgaagaaagaagcggaaaaactggccaaaaatcaagaagtaatagcgaagaaaggaggcgatagctccaatttgggctaggacgacaatgaaaaagatgatcatcatttgttgagacgcattgattgtattgttgaaaaaataagtccaaggatgccan

SEQ ID NO: 95466 - DNA, 881 bp, Heterodera glycines
gcaacatgggcttcgaggattgtaaggctcgcttctactcgctgaaaacggtgtcgctgccgatgcaaggtgacaatgccaagctgatccaagtttgcggcgagctgacgctggtcaaggcggctgtgcaaaaacagcagcctgttcttccacgacgctttgtccaaaccatcatttaggcccaccaaacgcccaccgttttgtacgtgaagagcgatgtgtttcagtggttggataccgcctttctggttaccgttagtgaaaaatacaacgcggccaacaacgccggtgctactgtgccaagtccgccgactactgtcgctgaacagcaacagcccctcgaaaatggtggtggccaggttgctcctcctccaatggttaatggtggaagtggcaaactccatcaaatcgttgttgagtcggaacctaaaaaggcgtccgttgtcgtggatcactcacctcaaaaggaaccggaaaaagccggatgcgccatctgatgctgctccaaccgttgttgactcattgccctctccgacgtctacaccgaataagaaggatgaagttatggcgatttccgccgttgctcctccctcctccattgtcgatgttccgaaaacggatgataccgccccgccgccgtctttgtctcagccggtggccgcaactgccgccgctgcaccaccaccaacatcggaacaacagccgaaccctgcggttgtcaccactgccgcggccaacaacaccaacaatagtttggctcaaaggccaaagtctgtcgtggccggctcgtacgcggccattgccgctgccgcacgagggaatgggccgaacaatgttgataacatcgtgaccgtgcacgttcctgctgcaacgaatggtcc

SEQ ID NO: 95467 - DNA, 359 bp, Heterodera glycines
gagagatgtttgaccgcgtctttcttcgctttaatccctttaattgctcaggcgttcattgggaaagcttctccagtcgctgtgttgcaggtgcgattcaactgtccatggcatcggagtggttacacgccaaattttttcggttttaaagtgaaaagaaaactgaaaatgcgaactgttgaacggttgagtcagacggaaggaagtcggcacattttgatgagacgcgtcctctcagagaaacattttgtcgcatggaattggccatcaaagaaaccgcggaatgatcgactgaattaccctctctgatcgttgacattttgttgatagaataaacgctttggattgttaacaaaaaa

SEQ ID NO: 95468 - DNA, 541 bp, Heterodera glycines
ttgaggcattaatattacttttgttgcaatgctgccatccaatcttttcttcttgctgatgaccatgctcagcagttccctcctccatcagacattggcaaataaattttcagcagagaccgacgcagtaaatccgacgcgattaatccagagacggcatttgattcgaagccgcgcaactcacaaagaaaaaatgcactcgaacgtaaatgaaggctatttacagtgggaaaaggataaattccacgaagcactgggagaaaagattttgccgaagagttcccgatctctgatggaccccaagtttttgggatcggtggaaccgcggcttttgaaaacatcggcggatgggacgcggacaaaaagcgattcggaagaggaaaagtggcggaattggctgcgcaggcatttcccagctgcgagaacaatttctgatcagtgatcactgatcacttttcattttatcaaatgcaaatgatcgctcatctcacctttttgaattggatcggattttcaatcttcaataaactttatttattaa

SEQ ID NO: 95469 - DNA, 556 bp, Heterodera glycines
aaagctggagctccccgcggtggcggccgctcttcactagtggatcccccgggctgcaggatattcggcacgagggaaagaatttgatcactcagaagaagtggttacaaaaataactttggagacaattcttttcaactttggtaatctgtcggtgcatacgacccgagcaaataatttggatacgaaacattctgctggacgggacactgaaaaaatgctgcaaagtgactgccatctgccgaaagtgccgttgcgttacttcccctacaaagtgccgcgcaggtttttgctcgccaaacaacgccaaaagctgcgcaacagtcaaagcgattccgccggttcgacattttcttatgagaattctctgctgaatgcgcgtctcgacgggtgtgaatttgacggacgatcgctaacatcggacaccaaagaattcgctgacgtacagcagagcaaacaaacagcggagaagcgtcctcgctgtccgtcctcctccgccacttcggccttttccgcgtatcgtaccgccccaccaccgcctcgtccgtgttggctt

SEQ ID NO: 95470 - DNA, 264 bp, Heterodera glycines
gcgggatattgtgcactgaaaaaggtagcaagtagagtcctcccactagacttcacaaccaatctctgttttagcttgccgacaatgtgaaagggcgtgccaaactcggcgttttggtgccgtaattctttctttctttcttaatccctttcaattattgtcatcattctcattcccaggcttttgctgaggctttgctggttattccgaaaactttggcggtcaatgccggattcgacgcccaggaggtgagggaaaagcatg

SEQ ID NO: 95471 - DNA, 557 bp, Heterodera glycines
tctcaaacgaggatttcgactatctctccgccctcagtggcctttacacggcatcggtcgaacgtcgaaaatgcaatttgcttgtgctcgtgcagggcaatttggacaatttggaagggaaaatggtcattttaactatccacgacgtgggcaaaaaccacctgagttttgtcgacttcgtcaacagtctttcgatggcacccctccgcggccgttcccttttcctccatatttgtgtgcctggccaagagcccgatgttccgattttcgccggaagcagtttcccgtcgatggatcagctcggccatgccatggtgcaagtgctgcgccatttcaaaatctctcattgttttgcaatgggcgaaggcgccggcgcggacatttgttgtcgattcgctttggattttccgtcgatggtccgggggttggtgttgatccattgcacttcgacaacccacggaattgtcgaaaacatcaaagagattttcgccgggttgcgtctcgaagacggcgaaatgactcattcggcgtggaattatttgctgactcaccgtttt

SEQ ID NO: 95472 - DNA, 915 bp, Heterodera glycines
atttgttcgaacaaatgcttgaggtcagagcagtcggaacaaatatcggaaaagagcaggatgggccgtcatacgaaatgcttttccgtttaacaacgacaaatagaagcaaatctgctccttttctggccaaaataccgacaaaaactttgaaaagggaagtcgcaaacgaagcaaaaacgaataattcaacaaatgatgacgagaggaaggaggaggagcaattcgcatctctgaaaaaccgttgccatacaatcgcatcgacaagcgcaccttttgcttcgacaaaagtgcaacagaacggcgtggacagcaatcattctccgtctgcaaaacagtcttcgtcctcttctcccgttgcatccacaaaaacttttcgacggcggactgcctttgaaacttcggaagcaatgcgtgaaattttcggtgcatattctcctttctcatcacagaaaaaagagaattccggagaatttaatcggaaaaaaatggcattggaaaatggaaggacgatgaacggaactcagcaaaacaataaaacagcgattcgaccgtcggagtttgaggatgacacggagagcagagactttgaaaatttgtccatgtcagtgtcggaggcatcgtcagaagtgggaagtgtgtccatccaagacggagcaatgctaaaccaaaatgaacggccaatgcttgaaaatggaatcacgaaaaggaacgtcagactgaaaagtgatttaagaatttcgcccgcaagttccggaagttgggagagggcaattcgtcccgtagtgaacaaacatcacaatgccaatgctgcgtccgttggacggcgacctgcggcgaatacccaacgatcttcggtgtgttggtattgtggtgtgaaaggacatgccgcagcccattgtcaaaaaaagcgca

SEQ ID NO: 95473 - DNA, 878 bp, Heterodera glycines
gtttgaggcgcagcactttccaagctccactaaatttgtttttttgtgaataacagtcagcaaaaacaaagcaaaaatggacgccatcaagaagaagatgcaggcgatgaagatcgagaaggacaatgccatcgaccgggcggacgccgcggaggaaaagtgccgtcaaacgcaggaacggttggagcgtgttgaggaggaattgcgggacacgcagaagaaaatgatggcgacggagaacgaattggacaaggcgcaggaggacctgacggctgccaacaatttgttggaggagaaggagaagaaagtgcaggaggctgaagccgaagtggcgtcactgaaccgtcgcatggttctgttggaagagggagttgggacaagcttgaggagcgcccttaaacttgccaccgaaaaaatggaagaagcgacggccaattgcgacgaatcggaacgtgtgcgtaaagtgatggaaaaccgttctctgcaagacgaggagcgtgccaatgccatcgaagaacagctgcaaggaggcccaatcgctggcggaagaagcggaccgaaaatacgacgaggtcgctcgtaaattggcaatggttgaagccgacttggaacgtgccgaggagcgcgcagaggccggggagaacaaaattgtggagttggaggaggaattgcgcgttgtgggcaacaacttgaagtcgttggagctcagcgaagaaaaggcgttgcaacgcgaggaagcgtacgaagagcaagtgcgtcagatggaagtgcgtctgaaggaggctgagactcgcgcggaattcgctgaacgttcgggacaaaagctgcaaaagggagtggacagactggaggacgaattggtccacgagaaggagcgg

SEQ ID NO: 95474 - DNA, 511 bp, Heterodera glycines
tgtctgtctgtttagtgctctctccaaattggcttctatttccatattgattaacaaccctccatattgcctcgggcgtagtaagcctactccctcaaggaatagtgtttgatgtcgagaggaaaagaaaaagagtgatggcgccgatgggtgtgcttttccctcccgctgtggctttatgtgagtgactaaaagatcagttgaaccccaacaagcagcttcttcttcttcctctcctcgttctgctttgctgtctcttccctcatcaattgggccggcggttaaagcaatggtagccaataaatgaagcatttttgccatcgggggacattcaacgaaaagaagaagcggaggaatggacaaattgtcgtcccaaaatgtatttagagagcaaatgagcatcacattacaaacaattccatctaatatgtatccaaatttaaatcgactatttaagggatctctctatttttcccgaactccgaattcctaaatacctgcaaaaaactac

SEQ ID NO: 95475 - DNA, 577 bp, Heterodera glycines
gcgacaaaaggagcgaagattggactttgggttgatttgacaaattccgacaatttttacaacgaggaagaggttttaaacaatggaagcaaatttctaaaaatgaaaatggtggggcacaaacaaacgccgacgcctgagcaaacgacggcattcattgaagcgattgaccgttttatcacgaataacccggacgatgtgattgtggtgcattgcactcatggtttcaatcggaccggctttctcatctcggcctatctgtacgaaaagtgcgacatgagtatcgaaatggcagtcagagaatttgcggagtgtcgtccgaatggcatttacaagcagtactacttggacgaccttcgcaagagatacggcgatgaggacgaagacgagatgacagtttgaatatccaatagatcggcaaaacactgtgatttccttttagttccccggaaggcctttgtgggagaacggaccgatcagtgacgacgaattcaccaacaacggagcatttgtcatggaggcgacttccaacaattctgacgttggcattgcttcgaatgggccttcgtcttcctcg

SEQ ID NO: 95476 - DNA, 428 bp, Heterodera glycines
aagaaatatagcaatgggaaaatatgacccggaggaaggttatgattcgaatctcaccgacttgaaactgttcgaagcgggcgaaccttttgaaatgcaaattaaattgttgaaaaggccttcggaggacaacctgcccatgacagaaattctttcttcaatttctttgagtctgacaatgacagtgattgtgagcacgccgaaaggaaccagccaaaccaactacacattggacagtgaaagctaccgagacatgaattacataacagtgcgtggtgacttggaactgttcgcggaaccttcattgctgaacgatataacacatcccattcttcccgtgcttattttgcatcggtatcgcctttactggtaccggtagttcattttttcgctaccgtaaccctaaaaaccaatgacgagaacacggg

SEQ ID NO: 95477 - DNA, 881 bp, Heterodera glycines
gttgtgcaaaatttttttgtaataaaaactatgaaaattttttatccggggttttagaggttgctgatcacgaatttgacatctaactcgaggtcatggactccaagaaccccagggaattctttttaattgggaaatcgacaataaggaattcccggaaacttttccgttctcgaaaatcgcatttgtcttcaattaattccttgcagaaagtgccactaccagaaaacaggacactgcacaattggagagcgccgacttagcatttgccaatttaatgcaggcggaagagcgcgttcacgagcgggagcaggaacaacggttgaggaacagccaaagtgttcaaatggaggtcgacaagttccaatcgtcgcaaagtttgaccgggaaaaggacgcacaaattcacactttgggtcgacaaatacgcgccgagcacctttctggatttgttgaccaaagattgctgttatggctccgtctttgggatgaatgtgtttttgagaaaagaggaggcaaaaaatgggaggggaaccaccgacgcatttcccagcggaacaatgccaatgcgacgtctctgtgggacaatttggaggagagagatcgaacactcttcgaaatggaacggccaaaaggcactgacagccgaatgccaaaacaaaaaattttggcactttttgggccctccggagttggcaaaacgtcgttggcccgcgtggcggcggagcaggccggctaccggcctgtgatcataccgatcagtgaacttcaaaacatggcggagctgaagtcgcgtcttgaaaatgccaccgattgtacgtccattgacgcgctcttccacaatttgtccgtctctgccgcttcggcaggcgaagcaccgcc

SEQ ID NO: 95478 - DNA, 622 bp, Heterodera glycines
atcagttccatcatttccccattttcctttgatcaaattggccaagtcttccccaatcgcctttgaacgaccccattaatccgggatttttcactttaccaattcttcttttattttggtctcttctatttctgttcaacaccatccctcatttctggtcaacccatctctttcatttctggtcaaccccctttccccatttccctctcatctctcaaaatatttccttttaattaccgatcagttccattttccccatttattttggtcaacttgccccaatcatttcgatcagtgccattcccccatttattgatcaaatggcacaaatttagtttgggtcaatgccattcatcatttttctcaaattgcgcgcaattcttctgatcagcgtatcccttcctctttgatcagtgccattctctcccccattttcttttgatcaattgtccctcattgattaatttcatttattttgatcagttccaccccattttatttgaccaattagtcccaattaatttgatcaggcccctccctctaattttcaattgattaaattgtgcaaatttcttttaatcagcgccacctcctccgtttttgtggtcgaattgcgcttttc

SEQ ID NO: 95479 - DNA, 1180 bp, Heterodera glycines
ccaattcattcgttttcccttcttttttcttttcctccatttctgtcaatttgattttgatttctcttggaaattctctgaaaatgccttcctccgattttccgatgccgtacacttcacggctcagtgagccttgcttggcaccaggccaatctttggtcttccaagggtccgttgattcggatgctcgtcattttgaactgtctctgatcagtggggtgcctaactcaggccaagagcgcatcgcccttcagatttgcttccacttcgaagtcggcatcaccattttgaactcgatgttggaaaacggcgaatggggcgaggaggagtttcattcgaatcccttcttccatgggaaaccatttgatgtgcgaattcgagtccacgagaaaagattcgacttttttgtcaaccaagtgccgtgggctgtgttcgaacaccgcacggatttccgaaaaatcgaccacatccaagcgtcgggcgacgtttcgctgtccgccgtccattggggcggccgatacttcgaaatgccgtacgaaatgactttccacgaccacgcgctcgaaagtgggcagcgactgttcgtttatggcattccccgccggcgatttcgccgtttcactgatcagcgacagtttggaggagctgttcagaatgagtgcactgcttcgacaagcaaattgtggtccgaaatgcccaaacggacaaagaatggggcgccgaagaaagtgaaggaggccctttcccgttcagaaagggcgaggggttcgacttggtcattctgaacgagccattggcactccaaatttccatcaatggcactcccttctgttcatttttccaccgcaccatcgatgcccacaaagactacaaaaaggtacgcattagcggtgaggtggaattgaccgggcatggaaagtgagtctgtgctgggaaagtgttggaggagtgtccaattgctgcaaatatccggagggaagggcccagcggacgaacgcggccggggagaacgtgcagcagccgattggactgagccgttgaaaaagcgcgcggggaaaggctaatgaatggacggctaatgtcgttcggtccagcggaaacgccgtttgatcttccgctaatcattcgaaattacattaatttgatcagtgatcactcatttattcccatcaattttgtg

SEQ ID NO: 95480 - DNA, 800 bp, Heterodera glycines
gcaaacggagcggcagcccaagcgcaagcagtagctgtagaacaaccagcggcgacagcaaccgcacaaccgtcacaagcagtaacagcaacaacaacaacaacaacagcagccgaagtgcaacaaacggagcaacccacggccgcaatacaacaccaacagcagcagcacaaatcggtgggccaaatgctgctgaaactgttgccctgcaactgttcgtccatcggaagtggcgggtcagtcgggtggggcgggggaagaagtacagtctattcgagagtctcgactcctccacttgagaaaggtctccccttgtttggtgttgttgtccaattaaaaggaattaaaattagggttggtcgccgtgccggccccatggatggagaagagtcgggaatcggaaaggaaattccccgaccaaaattttgtcgggaatggctggagaaatttaaaaacggtgcaccccaaaacgtcgtcggccgaaacgtcgtcggaagactttttgaaccataactttgttcactgtcaatcaaattaagaattgttggtgttgttcgatagctctatgtgtttattattaatttgcaaaatctcaaaaattttggttaagtttcaaaaaagttatggccagaaggaactcaaaaacccagtaattcgaactttttttgctctgattttttttgtgcataaataaaaatttttgaaaatttgcaggctaatagcatttttcgaatgctttcgaataataacaagaatgtttaatttggttgagaaagaaaaaagttatggtcgaaaaattc

SEQ ID NO: 95481 - DNA, 562 bp, Heterodera glycines
ggcatttattgtctcaattagttaatgaataatgaaaatgatgtggcggttgacgaccgaccacagaccgccacttttgttcattttgcttaaattgggcagcaaatcatttgtgaattgtggaaattttttttttttggagggggatgacataatgacaataattggacaattaaattaatgagaagtgtgtgctttgtttctacaacaaattgctgacaaatgagcgtgcaaaaagtgcaaaaataaatatttaaattgaaaataatgcaaattcagccaaatttatagtagggaaaaacagcatttcctgaatgatattatgtacaatgagtgcggagctgtgggggacatgttttgtaaatttcggaaatttttcatttttttatcataaaaaaatttggggttaagcgggagaccggcggggctgatcaaatcgggattctttagtcagcgtcttaaaacttgcagaatcggggtaaaattttgcgcaaacaaacaatggtacacactgaatctaacttttagggatttattaatttttaatccggctgaaaacgct

SEQ ID NO: 95482 - DNA, 878 bp, Heterodera glycines
agtccaattggtccattctgaattccctcctccgtccgttgccctaagccatcaatttgaccattgggacgccctcaggggacggaagggaattgacaaattcgaacatttttctgccgcttcctccacaaaatccaatcgttttttggtttgcactgcttttggcgcttttttggcaacgaatttcgaaaattgcgccgttttggagagaatttgcgattcgcgcctcgggaaaaatccgaaggaagtgaaacgattcgaattgccatttcgaataggaaaaatcagtgccggaagggatcacctaatcattttggactctttgaacggagagatttggagtttcgggacggggacgaggggcgaattgggcacggggcgagtggaggcggacaattgggcggaggggccgagacggattccgagtttttccgaggcggacattcgctgcgtggacatcgaaagcggcgcatggcattctttggcactgaccgcggaaggcgatgtgtacggatggggatggaatggacacggccaaattgggcatctgtccacagaattttccatccaaccgacgccctttccttttgatttgggcgatggaagggccaccatgatacgttgcgctggcaataattcatttttgttgcttagcgatggaagtgaaatggaatttggagaaatttgcaccgaaaagccaatggacgaacaaatggcggaaaaaatgccagaaaatgggtccaaaaatggcaccgaaaaagacgaaaagaagggacaaagccaagaaaaggacggaaaggagaagagacaaagtccatcggcaaaaaggcaaaggcaccaacggacactgaaagtggcggtggtcggctgcagtcatg

SEQ ID NO: 95483 - DNA, 1196 bp, Heterodera glycines
gtttgagcaagaacattatggtaaacaagtttttaccgctgatcattttcgtttttctgctgattgacaccgccatatgtcgccatcaccatcggcactcccatcaccaccatcaacaaaatgagcagccggagatgatcagcgttccgcttcgccgcatggacaccgtccgcgcccgtctggcgctcaccggatcgcttgaacagttccgcaagcatcgcacggagtcgttgcgccgtaccgtggagcgaatgaacaacaactacaacaacaatgaagagtacagcagcgcggaatcggaccaggaacagatggaaatggcacaaaacggggccagagttggcacggaaattgacgaactgttgcgcaactacatggacgcccaatattacggtgacatttccatcggttcaccggcgcaaaatttcaccgtcatcttcgacaccggttcatcaaacctatgggtgccgtccaaaaaatgtcccatttatgacatcgcttgcagccttcaccacaaatatgatggcgccaaatcaacctcctatcagcccgatgggcgaaaggtggcaatacagtacggcactggctcaatgaaaggatttgtttccaaagacattgtttgtatggcaaacatttgtgtacaaaaacaggaattcactgaagcgaccagtgggcctggcctcaccttcgtggctgcgaaatttgatggcattcttggcatgggattttcggaaatttctgtccaaaaattgccgaccgtgttcgacaacatggtcacgcaacagaaagtgccggagccggtgttcgcattttggcttaaccgtgacccgacctctgaatttggtggtgagatcaccattggcggcactgatcagcgacgatttgtggccccaatcacttacacaccggtcacacacaaagcctactggcaattcaagatggattcgatcagtggaggtaatggcaaacttgcgtgccaaaatgggtgccaagccattgcggacaccggcacctccctgcttgctgggcccaaaaatgacattgaaaagattcagaaacacattggagcaattccgctcttccatggcgagtatatgatatcatgtgaacgtattcccacactgcccgatgtgacgatcaacatcggtgggcaggcgtacacgttgaaaggccaagactatgtgctgaaaatgaca

SEQ ID NO: 95484 - DNA, 804 bp, Heterodera glycines
ccaagtttgagaatcaaaatgagacttagcttatcacgttttgcctccaccgtggcaatgttcgccggagggcccatcgagcggccgttggcctattacagccagtttcggcccgcttcgctgaccatgcatcaatacttggactttggccgcaagggcagtgcgtttacctcctaccacttcctgaagacggaactgctggtccgcatggcgaacattatgcaggagttcgacctgctgcccgccaaactgatgcagacgcccagcgcacgccatgtgggctcgtggtacaaacaaagcttctctgaactgctccatttcgagggcctcgagcccagcgacatggtgttggacaagttcaacaaccaattgcgcacaattttgcatcgtcacaacaccgtcgtggagacaatggctgaggcactgctcgaactgaaggaaagccacggcgtggacattgcatgcgaacgcaacattcagtacttcttggatcgtttctacttgaatcggatttccatacgaatgttgcaaaaccaacacttggcaattttcgccgccgcctgcgacaccaatggcactaacaatcagtcgcgcaagacagtcgtggtggacccggccggccatgttggacacattgacccgcagtgcaatgtgcgcgacattctgctggacgcctacgaaaacgcgaggtttctctccgagcaacacttttgcgtgtcgccaatgctcgacttgcgctgcttcaacacccgaattcccgaccagcaaattagcgtcccgctggttccgctccatttgtactac

SEQ ID NO: 95485 - DNA, 1964 bp, Heterodera glycines
attgagcagcccatttcgcgtcacttgcgccgattggtcacttcgatcacccttttcttcaccatcattttgcttgtcgtctatgttccagttcgggtgatcaaatggctttgtccttcgacccttccctacgttttctcggggtctgctgacactccactggttgaatattcattcgaattggttcttttgcaggttataatgcccagcattttggagtattccaaagcattttctctgctcaaacgaactgttcgcatttggtgtcgtgtcgttggcggatggctttctttggacagttatttgcttcctgcggacaaagagaagcgaaacggcggtcagcagcacagggaacagcaaaggcagcgggcgagggaacggttgttgaggggcgaccaggaggaacagatcggactcattgaagcattggaagcgatcgaagacaattcgacggatgacgaggaaaggcaggagagtgaggaggagggggaattggtggagaatggaaatgagggggacaatgttgtggatgacagtgaagaggacaacaccgaatccaatgggcaacggaaaaccgaagatggacacgaggaggagggggaagtacgtgttgagaaagagatggcagagaacggactaaaagcgaaaagcgcggtggaaaactgtgaagacaccgcggaagaccaaaagagggaagtgaacaacggaagacccactggggagagaccggaggaactttttttttatggcatggagcaggacaaccagctgaatggacgaccagctgtggtgggccgacaggaacaacaaattcagcaacgtcttcagagggcacagcttcatcgggagcagcgcaatttgggcgctcaacatcaggcactcctccgcttccgagactcctccgtacccgaagaatatgtccagccgaacctcttcccccttcgcatttcgcttcttctttttttcgtcgccctccccaccattgcaatttctttgctcttttttcttataccgggtaaatggaatttaataatcccatgtaacactaacattccgtttttgtttagtcacaattggtcgctttttgctttccacgttggctttgacaaatcagcccatccacgacttgtacaccatcgccgttgggctttacgcctgttggatttgtgtccgtttgggccttctttctcgggaatgggctcgcagagggtggacttacgtgaaaaaggttggcacgggtcttttgccttttgaatgtccgtttggttccttttcagctgttcaatgccacggtgtttctgctggttcgtgtctttgccgccgcttttcctttgttggccgtcattccctttatgctcggcctttacttccaaatgctcgtcatttctcctcttcgcgtggccattttccaatcgccgcttttcttcccctggaaagaatgggccatgggtgttgtccacttcaaaattgtttgtgcttccgttttgatgggccccgactggtggctgaagacggcttttgaacaggtccaacaacgcacatgtgctgggttgtcactgtttgtttttattatttacgccgatggcatttggaacatccgtttgcgagacctttacacgaacctggtgttcccaattgtgaatacactcacttttctgatcgcgtttccttacgttctcagcaattttctcctcttttttgtcggtaagcgatttaaatttttttcttttcccaaattttaatatcaaaatattttatcactattttattctgtgttttcagatgcttcacgcgaggaacaaatcattgtgatacgatttgcttatccgtttctgctcggctccatttgtttctgtgctttaatcacatggcaatggcaaaagctcaaacttttggcccagaaaattcgtaacgacaaggtgctttgttttgctactctaataatgaatattgggtagggtttt

SEQ ID NO: 95486 - DNA, 540 bp, Heterodera glycines
aaagctggagctccccgcggtggcggccgctctcacaactagtggatcccccgggctgcatgctctcgtgggaccccgcggcgttcagcggactccgtcagattgtcgtcccgcgggcggacgtttggctgcccaaacttttcatttacaattccatggataccaaagaaatgctggcggataattacttcgacgtccgcctcacgcaccagggcaaactgaagataaacattccgcattacgtcacttgcatttgccgattggatattgcgcttttccccttcgacacccaattctgtgccattgcccaggcttcgccactgctcggagtcgaagagatggacgtcaacgtgacaatgccgcccaaagattcttacttttcgggaaatgccgaatgggaactgttcaatgtcagcgtaagggacaccaaattttgggaggatggcgagcggagggtcgaagtgcattatgtgatgcacatgcggaggaggcccgtctattacttgacggtcatcgtcgcccccacttttctcatctctt

SEQ ID NO: 95487 - DNA, 475 bp, Heterodera glycines
agccattcaaattacaagtgaccaaatgattgcgtcgaattcggctggcgcgccgtaccgcggcgatccgatggcatccgctgcactcggtttttcaaattttgtgaatggtgccctcatccgacaccctttcgttgtgctgcggcgccagtgccaagtgcatgaccacgcgacacgcaaacatttgacgcccattagtcttttgccggttgtggtcaacttggccgggaaagatggtactttttcgctttggaaaggtgccattggcagcggcgttctttgggtggtttcgcatgcgtcggaatttttgattgcccagctttttaacctaccaaaatcatttgtaccccaaggcagctccgaacgcttttggcgccatgtttttctcaaaaccgcctcttttctcgcctgcactcctttcattggctcctctttcatcgaaactgtccgcagtggtggaaggttatcggatgaa

SEQ ID NO: 95488 - DNA, 192 bp, Heterodera glycines
ctaaaattgcagagagatcaattaacagacaggaaatccaatacaaaccatccattatgagtggaattgtgcgggattggatcttcctaggcacagtgtagcccgaacgttcgatgttcttagccagcagctcttcaaagccagcttccttccagttgctgacgcacaaaatcaacagtgtgctgttaccag

SEQ ID NO: 95489 - DNA, 421 bp, Heterodera glycines
aatgagggattgaagccatgataatcccagcatttttagcttttggggcctacgcgttaaaaaacatgtttttaagtccctatttgcttttttgggctgccccaggtttgtccggttgttggcgctagagctcctcgagagtcaaaattccgagactcgagaccgaggtttctagagcatccctaattggcggattggcggcaatctttttggggacggtccaattttaatggaatccaaaaatcccatggaaatatgtcaaggcaaaatcaccaaagagcagctccgttttgggtacgaagcattgggccgcattgagcgccacgtgcaaaaagggactttcggcagagactttgtggaggcaatgaatgagtgaggaaaagcaaagaaaatgggggggggggaaaccccacgaaaatcc

SEQ ID NO: 95490 - DNA, 507 bp, Heterodera glycines
gaatgttttctcacaaaagcgccgctatgtccggaaatgagcatggagcagcaggacggcctttggccactctcttccacggaccgatgccaaagccgagcgaattgcaatgccatcggagaaaacggcggactcgtaacattgagcggagaagagacagacgaatcgcagtgtacgacgccaaccgaaacactttcaccaattgtacgacgtaaaacgacggattcaaaagaaggcaccaaaatcagagaggaaaagagagcggtggaaggaacacatggaaatgtaaaagtgacggacggaattatgttggaaaaaaggggcacacaaagggcgacggagcggcaaaacaacgacgaaagggagacggacaacagagcaccgctggacagtccccgtagtcagaaccaacactgtacggatgtgctcatcccaacttcaaatcccattttcgctccgtgcgcccggcctttctttcacaacaaaatgccaatcttacgtccaaac

SEQ ID NO: 95491 - DNA, 374 bp, Heterodera glycines
ttttcaaagcattattgacagtttgtacacagaagggacttctcgaggcgaatcgtgaatcgcccatcagtcagcctacgctcaattttttgatcgaaaataaaaaggacccaatgtcaatggtcaacatttactgctcggttttgggtgatcccaattttgagttttttggctttcatcttgttagtcaggccaagcaaatttctttttatcactgaattgagaggtcggcccgtttatggcttttgcgcagcgtcaaaaaaggaggccaaaaaggcctgtgcattacgacttctcgacattttgatgacataagaacgactcgaatgtgttaatgtgtccggacggaaagtgaggaaaatgccgccaaaacc

SEQ ID NO: 95492 - DNA, 462 bp, Heterodera glycines
cctaattacaaccgcaaccaatattttaaaagcattatcgacagtttgtcacagaagggacttctcgaagcgaatcgtcaaccgcccatcagtcactcgacactcagttttttgatggaaaggaaaaaggacccaatgtcaatggtcaacatttactgctcggcttcgggtgagcccaattttgagttttttgtctttcaacttgcagtcaggccaagcaaatttgttttcatctttgaattgagaagtcggcccgtttatggcttttgcgcagcgtcaaaaaaggaggccaaaaaggcttgcgcattgcgacttctcgacattttgatgacagaagaacgactcgaatgtgtcaatttgtccggacggaaagtgaggaaaatgccgccaaagccaattccgacaaaagcagcgaatgtcgaacaaagtcaacagcaggaaaacatgcacttgtcattctct

SEQ ID NO: 95493 - DNA, 476 bp, Heterodera glycines
caaagacgacggcgccaatgacaccgacgacgacggcactgacgacgagcgcgggcagtcctttcgcctttggctcgtccgcctcgaccaccgcttcccccggcgccaccacaaccaccgcctcggccactctcccgcttctctttggcactcagcagaaaacgacggcacccgccgctgtgccttcctccgtccccgccttctctttcggcaccgccaaattcccttcttttggctcctccgccgccggtggcactctcttcggttcgaccaccgccaacaccctcacgacaagctcacaaccacacgttaacggtggatctcgtaagcgatcggctgcacaatcagtcgatgacatttcgccgtatggaaagagaactgcgtccagttcattgacggagacaagttcaatcgccaacgcccctctgtttgggggagcactaacgatgacgacgaaaccaaacacagcaattgat

SEQ ID NO: 95494 - DNA, 2515 bp, Heterodera glycines
gtgctttgcgttggttaattggcgtgggtgagtgtggtggttgggccgtttttgcgatattgtggctggaaaaaagaagcgatttcgctgtggggagcgcggccgtctgggtttaagtgcttgcttgcgcttgtgctcggcattgaacggtgatggctgctgctggggtgccacctttgtcgtggcctcagtttctccagcgattggcagctgtcgaaatgaataaaacatgcagctcgtctgtgtgttaaagaaatttggcgagttaattgacttgtgtaaatgttgcctaaggcacaaatgctgtggggaactcagcactggggatgctgaacctaaagttggtggtggtgttggtatacgagtgagtggcgtattgccatggttgacaagccctatgagttcgtggatcggaactccttgcctggggaccagtgtgcttgcattcgaaaaaacacgagacataagcgcccgaaggcctttggcctgaggaagtgtcctaaccgggaaatccggagtgctcgtgtgagtgcctgtgcactgccctcggagctgtgtccagcggcgagatggttcttcccaagtccgggaagctcggatgcctggccagcgctgtgtcattaccacttgctcggtcgccttcgccgcccatgcgcacgcttgcgctgaacggagttgtttctgctgaaactatccgtctttacaagacggctgtaatagcggcgcttggcaacgctcgctagcagctatctggttgatcctgcctgaactgatgtgttcatttcaaagattaagccatgcatgtgtaagtttaacctgccagacagggaaactgcgtacggctcattacaccagctataatttacttgaccttgacttcttacttggataactgtggtaattctagagctaatacatgcaccaaagctccaatctccccagagcggagcgcatttgttcgccacaaaaccaagcgccctccgggcgtccagtgttgactcagaacaactaagctgatcgcacggtcttgtaccggcgacgtgtctttcaagtgtctgccttatcaactttcgatggtagtgtatctgactaccatggtgatgacgggtaacggaggataagggttcgactccggagaaggggcctgagaaatggccactacgtctaaggatggcagcaggcgcgcaaattacccactctcaacgcgaggaggtagtgacgagaaataacgagaccgatctcttatgaggccggtcatcggaatgggtacaatttaaaccctttaacgagtatctatgagagggcaagtctggtgccagcagccgcggtaattccagctctcaaaatgcatagaattattgctgcggttaaaaagctcgtagttggatctgtgctagccgtccggtgcacactttgtgtgttactggtttggttggcttttctgccggtctttccccggcgttggcctttaccggtcggcgtcggtgggctggcgagtttactttgaacaaatcagagtgcttcaaacaggcgtttcgcttgaatgttcgtgcatggaataatagaagaggatttcggtccgattttattggttttgctgaccgagataatggttaacagagacaaacggggccattcgtattgctacgtgagaggtgaaattcttggaccgtagcaagacggactacagcgaaagcatttggcaagaatgtcttcattaatcaagaacgaaagtcagaggttcgaaggcgatcagataccgccctagttctgaccgtaaacgatgccaactagcgatccgccggcggatttattcgccctggtggggagcttcccggaaacgaaagtcttccggttccgggggaagtatggttgcaaagctgaaacttaaaggaattgacggaagggcaccaccaggagtggagcctgcggcttaatttgactcaacacggggaaactcacccggcccggacaccgtaaggattgacagattgatagctttttcatgattcggtggatggtggtgcatggccgttcttagttcgctggagcgatttgtctggtttattccgataacgagcgagactctagcctactaaatagttggctcattgcttctgtgggcacaacttcttagagggattttcggtgttcagccgcacgaaattgagcaataacaggtctgtgatgcccttagatgtccggggctgcacgcgcgctacactggcaaaatcagcgtgcttgtccttccccgaaaggggttggtaaaccggtgaaaatttgccgtgattgggatcggacattgcaattattgtccgtgaacgaggaattccttgtaggggcgagtcatcaactcgctctgaatacgtccctgccctttgtacacaccgcccgtcgctgcccgggactgagccatttcgagaaattcggggacggttagtgttccggcttcggtcggtatgcagactggaaccgatttaatcgcagtggcttgaaccgggcaaaagtcgtaaca

SEQ ID NO: 95495 - DNA, 166 bp, Heterodera glycines
tttcaactactcgaccaaatttttgaaattttattggcttccggcattaccggactcagaaattttactaaaccaaatttaccaaaatgtaaaactgatcccctccctgccctccaaaaattattttttgaataatgagctaaaaaatttagtgacaccgaaaggc

SEQ ID NO: 95496 - DNA, 462 bp, Heterodera glycines
aataatttttattagaggatgtggacatttttaggaaaatggaagaataataatacaaagaactaaaaattttgcattttatacctttcaatgtttatttaacccataaaataaatttggctcattcgaaatcattataaatagcatttatacttgcttaattttttcattttgttgtcttcatctcattaatattgcatttttcctctataaattgcactcttcctttcgttaatttttccaaaattgtagcttccaaattctcaaaatggtgcttcttacggaaaaaatcgccaaaattttaaactgccgtgtcagcgagctccgtgatcggcttaatcatccttccgattgtgaaacggtggtgaaagcgctgacaggacaccgtgttaaaacaacatacaaagacagaaatggatacaccaaaagctttgcttttgggggaattacagcacaaggagc

SEQ ID NO: 95497 - DNA, 847 bp, Heterodera glycines
atcagaaacgaggaggaaatgccattgaaaagcattaatgccctccaaaacggttaatgtctttgagtggcgtcccgaaacaattaaatttgccaaatgtctgccagaattcagcacgaggctttttttgaacattttggcattgtgttggacaacgccgagggcgtttacttttccggacaggaaattgccggaaaggtggtcattgagtgccgggaaccgcgccgaatcagcgaacttttgctggaagtgaagggacgggcgcggacgcattggacaaagtcacgcaaaatgtgcagcgaaaacgaaacgtacttttgcgagcagttcaacacggaatacacgcgaaagttgccaaaaacggaggccgaaaacgacgcggggggagaaacaccacgggaaggggggaggacagtggcggaacggagaagggaaagcatcaaaatgatgggccgtcttctccacgtcggcacccacgagattcccttctcctacgcactgccgaagagtttgccgagttcgttcgagggcgagttcggcttcgtccgctacacgtgccgtgccatctgcgaaagtccgtgggacttcgacacggtgtgctttttgcccttcactgtcattggcatcgaagatttgaaccacgaggccgaggttccgtcagcgccgaatttcgactcgccaagggtggccttacgccgggcgaaaatgtgccgatgaacgcgaaagttcgaaaccaaagcggacgaacgctgcgcgggttggagctcagactgagcaaagacgtggtgtacaaatcgaaaacatttgcgggtgccgaacagcggcggaccaccaaaaatgtggtgga

SEQ ID NO: 95498 - DNA, 2209 bp, Heterodera glycines
  unsure (1)..(2209): unsure at all n locations
gttcaaccaaacacttcaaagcttcattcgcgagttgtcttcctgtttatcgtattcttcgagtccgtaatcgcttccgggatagggcgtttatggacgtgtcatttgacgcgactaccctcaaaaccaatccaaaattacaccggaagagcctttagaacatctattgcccttcacacttccttcgtttgtcgtccttcgcttggcactgctgaaaagtcactgcaccgaaccgcggccccgaacccgagcctcacaacacttggacgtgaacgcggagcctccttgggaccctgatccgaacgcaattacctgacattcgttcccgtacattggtgaaattgtcctccattattgttagtgtcccatccattgtctcgtccctttgtttctgccgacttcgtctttgaagcggcgttcttattcaacacgccaaaattcgtctcttttccaaccccaaaggccttttcctactccgtctttcgtcctcttccttcgtcactgtgcgtcctcatcagttgaaggtcgaccaggagcgtctctcccactttcggttccggaagttggccgccttcgtccgtcgtctgaagcgaccgccctaatttgtttgtcctttcattcattggcattggcaactcggcattatttgaattccaccaactacaacgatcagcgctcttttcttcggcagaacatgacaaacttcggcttccccccttcgcccacttttcacaccgttcgattgcgcgagggtggcaccatcacagtgtttcgagacgtcgccaacgacgagtttcgccggcgtcgtccctcggaatttgctgcacaaattgcggaaagcaaaagtgcaaaggatgactgtcgtccttttttcgtcatgaacattgactgcgccgttgcactgcttgaactttgggcccagtttctcccacgcgtgcagcccttttatgcgctcaattgcaacgcggacccaatgctgcttcgcttgatggcctctcatcagtctgttgggttcagctgctcatccggcgcagaaatgctcaatgctctccattatgtgtcggctgaccgtgtgtttggcgcctttccctgttggactcggtcggcactgcgccaggcggaaacgtgtggcgtgtacacgctgtgtttcgacagtgagcgcgacttggaccgcatcttggccaaccactcaaacgccagattgcttttgcgtatctgcgtggacccctgcgcgactgatgcgaatgcgttgttcggagccccgcttgacgaggcagtcgaactgttgaagctgtgcgttcagttgggcctcaattgcattggaatttccctctcaactggcccttccactgatgataattgcaatttgtcatcatcgtctcttttccatttctcttccgtctatgcgtttgccattgaatgcagtgcgcgtctgtttcgcattgccattgacttgggcctacggatggacgtgctgaacattggcgatgcttttgcttgtccttggtcatcancatcgactgaaacggacgagtcactggcgcatttcgcggagttttgtaccgaatttaaccggtccttcgatgtccatttcccgtctgatggcattggccatgggcttcgcattatggcaacccctggccaattctttgcgcgttccccattttcatgggtcaccaatgtgattggaaagcgaagcactgacgcaagtgcagtgaccaacaacgattttgatgctggcaaaaccgcttttcattaccagactaatgagagttattacggcacatttggctgtcgaatgatggtcaacaccgaaccgcgttgtgcaccgctttttaatgacttcgacatggacacggaacagaaccaatgcttttattatggaacagtgtttggtcagtcgggctttgacgacggctcggacacggacattgtccaatcggtttgccactttcgccagttgaacattggcgattggcttatttggtccaacatgggagcgtattcatttggcaattgcgggtcactggatgacgaaatcaacgacgacgatgacagtgatggaaacgaatttgacacactcaaaacgccaccgattttttatttcgcttcgcaagggaattgggagtccgtctgtcacaagtttgatttcgcctttcttgatgagcatcaacagcagcgtcgtgctggtccgttgtttgcgtcttcc

SEQ ID NO: 95499 - DNA, 558 bp, Heterodera glycines
atgtaaaaattaacagaaattcacgggttcattcgatagttgcgagaaattccccggagaaactccaaaataatgtgaaatttattttttgaactcgcatctccaaaattttgtcatcccatcagaactcattttagcgaaggtccttagaagaccttcgtaagacaattttactttttgttttttggttgcaattgggttagccatttctgaaaaatgtccaaatcagaatgcacatcaaattggttaactattaaaaaataataggatttggaataagtaaaattgtaaaaaatgagcgaatgttaattaaacctagcttatgccaagtggcgagggatccctcaggcttagtttttagaatcttaatttttaaaaaagcacatttttcgatttttgggttgggcccaaacgaccccggggcccaaaaacgggggcccaaattaccccggggcccaaaaacgggggcccaaacgcggggggccaaaaacgagggcccatacgctctggtcccaaacaaaacaccactttcggcgcgaattcaaaaaggcaaaaagg

SEQ ID NO: 95500 - DNA, 920 bp, Heterodera glycines
gcagactctcgttttgccgttcttcttttttacggctaagataggcgctgcccaatgactgaaatcgattggcttaattgcgccaatttgaagaaggcgatccaattcggcattcacagcttccatggcgccatgtggaattgggcgagctcggcaaaatacacgctttgcatcagaccgcaaaatgagatgcgcctttgcctttgagcagtgtcccagtccttcttcaaagacttcagggaaatctttttggagtaccgctttaagcgttgacacattattgatcgatttgtttggcggcttcactgccgaaaaattttcaatcattgtcgcctgatcagccgatttgctggacggaaataaaatttggcggggaatgatctccaaagcttcgatccacggcaatcccaataaattgtgtccgacttctccgctcacataagcgatcagaatttgcggtggtttgtcggcaaattggacagtgcattggaatttgccaagtaaggcgaatggctggtcattgcaatttttggcatcgatgtcggatggagtcagttccggttctcccaactctcgccatgtttgcaatgaaataattgtggcctgagcgccggtgtcgccattcatggaagtttgccttccattaatcaaaatgcacaatttccaccatcgcccttgagtcgtgccgacatgcaggcaatttgcgtcgactttgacactgtgaaatgaccggtggctgttcggtggtgccattttcttctttgaccggcaaattgttgaaatgtgcccttttttgttgcacttaaagcaagtggcgtccttgaatgagcaatcggagcgccagtggtcaattttgccacatgatccacacggaagtgttggacgaccacgtgttggctttccacttgaattggcatttt

SEQ ID NO: 95501 - DNA, 310 bp, Heterodera glycines
cgtgcaaaaggacctgaaaagggacgcgaaactgaattatccgctcgaaatttcgtctgtgatcattgaaattgaatatttactccacaatttggaacgatggacggcagcctttaaatgtcgaaaagactttcaccacacttctcgactccccgcaaatcgttcgcgagccgaagggcgtcgttttgctcattggtccatggaattaccccctcaacactttgctaatgcctttggtcgacgttttagccgctgggaatactgccattttgaaaccgtccgaagtcgcggtcgaacaccgccgccgccg

SEQ ID NO: 95502 - DNA, 849 bp, Heterodera glycines
agtggaattgggagcagtggcggcagccaaacgaacgacgcaaaagcgaaagtcggcacgaaaagcgacaaaaagcaaagggaaggagggacggcagaggacggcacaatgccaaaacagacgcaaaacgacccaatggcgggcgccggcgccgatctgctcagagacggcagcgaccttttctcgccctccggcacgttcaacagcagtttaaacgaaagcacttcgcccattggtggctccaccagcagcaaaatgagcagcagcttcaaccagagctcctcctataatcgcactttcgaacgcaaagtgatcgaagagagtacgccgacaatgaccacgcggatgttcacctcatcaccactgaacacaatcaagaccactcttggctccggcttcccctccgacttgggcggactcggcacgggcaccggcaccaccttcgtccagccccacaactaccaattcggcaccgccacctcgggctcgttccactcgtctgacgacagtctgtcggtcagcatggactgtgccatgtttgcacccgaagaactgaaggtgtctgttgtgggcaaccaaattgttgtggagggaaagcacggcgaaaagcaggactcacttgggtcgattgagcgccaatttgtgcgcaaatttgccatgccgcgcaacgccaccgccgactcagtgaacagcaatttgaccagcgacggaatgctgacggtgaccgccagcgcaccgaaagcaaaggataattcgccgattcgcacaattccggtgaaaattgtcacaacctccgcgggcggacaaacgccacaggaatgggggaggccaatttcaacaaaatggcag

SEQ ID NO: 95503 - DNA, 908 bp, Heterodera glycines
caagtttgaggaaaatacttttaactgatttccaccattaaaatgcactttgttctcattgccttctgcattgtttggcaactggttgtcgccaataacgtggagcagccggccaaccgtgccaagcggttcacctccttcggctcattgtccaccattgggggccgcgttggatgtgttgtgtcgaagaataagctgttcgtcaacggacacttcaccaaggacctgagcgaggatgagcaggaggaattgaagcagtaccaggagcagctggatcagttcaagtccgaagtcaagacctacttggaggagcgccagaaacagttccgcaaccaggtggcgcgccagggcggcgccgaggccaaggagggcggaactcagctgaagaagccggagccgccaaagaagcccagcttctgctcggacaaagccaccacacagtacgtgttcgacggctgcagcgttcaaggcgacaacgtgtacattggggatacttttgtgcgcaagctgagcccggacgagcagaaggaattggcccagtttgaccagaaattcaccgcctaccagaaggcagtgacggccggcttccgcaagcaagttgaggagatgtttggccaacattttgggcgccctgttcggcgccttcgatatgagccaatcgggtgctgaggacaaacaacaggcggtgccctcctccggcgctgagctagcgccggctggcgcagagaacggcacggcgccggaggcgccaaaaacgccgagcttctgcactttgttggtttgagatggcgagagagagaaaaagaaagaaaagcgaaagggcagacagagaaaccaaaggacaaagaaatcaataaaatcgatcaaacaatcgatgaattaatcgataatcaaccctattttaccgt

SEQ ID NO: 95504 - DNA, 209 bp, Heterodera glycines
attaaatcagagggggaaaaaaattcgtaggggtcggaacggtgcactataaatgttgctgctgaaatgcatttcgccgaaacataacgtcaccaggaaaaacaaattttaatcgaactttttgtaatttttttgtaaaaatttcaagaaattccaagaaaaacctaagattgcattaaaaataaaattcagaattcggctattaagtt

SEQ ID NO: 95505 - DNA, 550 bp, Heterodera glycines
aagctggagctccccgcggtggcggccgctcttcaactagtggatcccccgggctgcaggtccccctgaagtttgaaaatgttagaacggcttccgtctcagttagtgtcacgaagcgcgagctttgtccaaactcggatgacggcaaacaccgtcaattttttcatgcgtcgaaccggcgacactttgtggaagacggtgacgaacgtgtccatgggagggatgaagcgggggagggcgcggacgcggcagcccatccgaccgttgccccaattttaccgagtcggcatgctcaagtcgagtccgatgcgcatccgttaccctgggttaaatgcgcccattgtcccgcaaagtgttgccgaattggcctcgagaccgttttttgttgaggaacagtcggagcaggaaagggaggaggtgctgcactttgtgaggacccaagtggccaagaagagcagtcagaagcgccatttgtgcaaggagcgcctcactccgctggagcggggcttcagcggcggcactttcatgggccaacgcatgggaccgcccc

SEQ ID NO: 95506 - DNA, 601 bp, Heterodera glycines
ttttccgatggataagcaaacttttggtggagattcttctgccaattcggcagcggaagacaaaatgagcggttgctgttcagaacacattgtggaaattgagtggaaacatttcgactatctctccgccctcagtggcctttacacggcatcggtcgaacgtcgaaaatgcaatttgcttgtgctcgtgcagggcaatttggacaatttggaagggaaaatggtcattttaactatccacgacgtgggcaaaaaccacctgagttttgtcgacttcgtcaacagtctttcgatggcacccctccgcggccgttcccttttcctccatatttgtgtgcctggccaagagcccgaggcgccgattttcgccggaagcagtttcccgtcgatggatcagctcggccatgccatggtgcaagtgctgcgccatttcaaaatctctcattgttttgcaatgggcgaaggcgccggcgcggacatttgttgtcgattcgctgtaacaaagctttttagtcaaattggtggtccatcatctcgagtagtgcaaattttatgaaattgtttcgctacattcattgacttttgcatatcccgagaaagg

SEQ ID NO: 95507 - DNA, 542 bp, Heterodera glycines
gagtttcataatattttcttcctccgtcctcccttttcgcctccttttaaatggctcgtcagcaattgaatattcgccgccgttccgttgtctcttacgttggcatcagtgagcatggccaatgcggctactgcaaattcacaaaacgcgcccatgacaaggccaagttcgcagcttcaaccagtgaatgcaatgcctccgtcgatgcgtcgacggtggcgagcagtacaaataatgatgggcaacaacaagcgaatccgcccaatgcacatgatgaaaatgccaacgatgatacaaatggagggggcgactcggccgtgttcggcctctgggcccaccggctcactgtccaccattaccaatggttggccaatcgcggctggcgacgttcgggtcgctttctgtacaagccgttgatgggccgcacgtgctgtccccagtacaccatcaggttggacgtgcacaaatttcgcctctctcgcacccaaaagcgcgtgctgcgcacaatgcgcgactttttgcgcacggaccaaaggccgaaa

SEQ ID NO: 95508 - DNA, 890 bp, Heterodera glycines
ctacaactagtggatcccccgggctgcagtaatctcggcacgaggcagaagttgattttgaagatgaaggcgattacgagcaattaaatgccaatcagaatagaaaacagaaaaaggccggaggatggcaatctatgggtctcgaccattccgtcttcaagggcatccttcgcaagggttatcgacagccaacgcccattcagcgcaaagccatccctttgatgtgcgacgggcgtgacctcgtggcgatgtcgcgcaccggctcaggcaaaacggctgcgtttgttgtgccattgctgcaacgactgaaacaacgcgatgcacgcggcattcgtgcgcttctcttttcgcccacgcgcgaattggctctgcaaacattcaaaattgtcaaggagctcggccgtttcaccggtctttactgtgcctgtcttatcggtggcgacagtatggacgaacagttcaatgcccttcaccaacacccggacattctcatcgccacgcccggccgtctgctccatttggtggtggaaatgaatttgaaacttcaaactgttcagtttgtcgtgttcgatgaagctgatcgtctcttcgagttgggttttgcggaccaattaaaggaaattctgaagcgaatccccgattcccgccagacccttcttttctccgccactcttccgaagatgctcgtcgattttgcaaaggccggcctttccgatcccgaattggttcgtctcgatgtcgagtcaaaactcagtgacaaattgtccatggctttcgctttgtgtcgtcaagttgaaaagttgcccgtcttattaaatttgtgtcgggtgttatgcaaacagaagaagaaaaccattattttctgtgcgacgatgaaacacgtggaacac

SEQ ID NO: 95509 - DNA, 545 bp, Heterodera glycines
cacattctcaatcaacacaaatgcttaactaataaaaaataaatcttctttttggtccattgccatagccaacgcttcatctcccaaattccatcggcggtgccattctccgtccgtctcccccccccccctccggtgctgcttttcctctgctcttccgctgatctcactccctccccaccgtttggtcctcaattatttctcattagtgccattttatgcttattccttcttctctccgcttcatcatccgctgtcattcttcagctgctgctgagtgttttttgccttcgttttcgtcccttttacaattgtataattctttcaattgagcaactttggcattatttcctcctccttgtttgttagcatttgaattagccgaggttcactcggttctcagccagcagaatggccaactccagtggccatgaccattcggcgggcggtggctcactcggctaaagcctcgttcgcgcatcgctttggtcattttcggcgctgtgatgatccacctcagcatcggcacttaccacaccttcggt

SEQ ID NO: 95510 - DNA, 476 bp, Heterodera glycines
gcgcggcgcttggcacttttcactcggagagattttcgtcgttggaaagagagaagcaaagagaaaagaatttcggagaaagcgatggaccaaaagcgaaacgaatgaccgaattttcaacggaggaggaaaagccggagaagaagcgggacggagaagacaccagtgaaaagtacaagggaagcagtgaccaacagcagcagcagcagcagtcgatggggtccaacggcacattaaaccgaagtttgtcgtcgcccgaactgctccaacttccccggttcggcttccatttgctcgtaactccgtccaccgcgtcgccctccccgctgcctaccaatgaacttcttcagccattgctaatcaccagcaccgcactgtccaattcgctgctttttcctcccaaatcgtccttttccgcattgtcctcctcgtcgtcgctgcaaagtttgaaagaacagcaccaagaagaacacgaa

SEQ ID NO: 95511 - DNA, 475 bp, Heterodera glycines
atttcaatggcatcgaagtcgccccaaaatacgctgccctcctccccaaatcacatctgccatcaaaataagcagctcaataacaatttgaaaagggtggggaatggcgcggcgtttggcacttttcactcggagagattttcgtcgttggaaagagagaagcaaagagaaaagaattccggagaaagcgatggaccaaaagcgaaacgaatgaccgaattttcaacggaggaggaaaagccggagaagaagcgggacggagaagacaccagtgaaaagtacaagggaagcagtgaccaacagcagcagcagcagcagcagtcgatggggtccaacggcacattaaaccgaagtttgtcgtcgcccgaactgctccaacttccccggttcggcttccatttgctcgtaactccgtccaccgcgtcgccctccccgctgcctaccaatgaacttcttcagccattgctaatcacca

SEQ ID NO: 95512 - DNA, 458 bp, Heterodera glycines
tgctaaaaaaataaaatagtgaagctttaaaaattaataaaaaattttaaattcagaattactggagttagcatcatagcagtgcttttccttgtctttttgatgccctcgcaaaatctggttcgcttctgatcagtttataaaaataaaagttaagcctaaaatttttcgcatatttaaaaagcaattaaaaatttttagattttttattcatctccctttttgatagtgaaagcatctgagtgcctaaaataacttataaataaaatttggtgcgtttcagagcagtttctgaaaaaatatttatgaattaattttgctaaaaaaataaaatagtgaagctttaaaaattaataaaaaattttaaattcagaattactggagttagcatcatagcagtgcttttccttgtctttttgatgccctcgcaaaatctggttcgcttctgatcagtttat

SEQ ID NO: 95513 - DNA, 482 bp, Heterodera glycines
atgtccaatttccatttgtcctcaaaagtgttaaattacatcgacacacgtccaaaggaaaacgaagtcaaaggggcaataaaattggacgtcaatttacggatttttattaaaaacgaacgttctgttgaaaaggaaaaaagccgaaaggaaatggcaacgaatatttacgcaactttggacaaaaaagaacctttggccgcatttattgcgcggattggcgacactttggcactgaccgaagagccggaaaattacgctttaatgttcgaagagaaacgacgatttgtgacggaatataacaaacccagcgtggcacagggctttttcctcttgctgaccgcttctccgtccaatttcgctaaacactttctggcccaacttggccaaggttcgtgctccgcttggccccatttgcctttgttcgtttctctctgtgccgaccccgcctttgccgaagcatttaccgctcttaacggtgt

SEQ ID NO: 95514 - DNA, 369 bp, Heterodera glycines
gaattgcatggtacgagaaataattagcataaatttatacaaacaataccctatatcaacaaaacatattgaatcaatcaataagacctgaacgaaaaattgctaaaaaacatgtattaccataaatccaaaaatgctactttatccaactgagccaccaattttaagtgaaaacactgccaaaatttcgattttcgaggccctttaactcctggaaattttttcgacacctaaaacaaaattcacaatggaagtctgtctatccaatggtatataacctatatgcattttccgagttaccgatcgcgaggttcccttgtaaatactaatttgataggattcatgacaaggtgtctgaaaacgaaaacc

SEQ ID NO: 95515 - DNA, 462 bp, Heterodera glycines
attgcgaaagcggattttatggatgaacgattttcgagggttattacggctaataaggcgtacaacctcttccaggcggccattctcaacggactgttgacgcatcacttggatttcatccatggcaaatgtgtggatttgcgcaagattgggcttttgttggaccattttgaccgattagtcctccgttcggaatgtcttttggcccaaaatgcgaacatttcgttgctccgttgtctggtcaagtgctctttctattgtcgtttcgctgatttcttactctgttcttccatttaccaacaatccttcaacgaattccgactgcttgcgatggcaatgttttgctacggtttggcattgaaatgggcatgccataaatcggtcaaaggaagtgatggagcggatagcgcgctcctttcactctgtgccgctgagttgacgacactgctcagaacgaatttg

SEQ ID NO: 95516 - DNA, 961 bp, Heterodera glycines
ttgagttcctattttggtacatttactgatcaaaaggcaatgtctgaggaaaaatttgaagatgttgatggctctattattggacagaagcgacaaaatactgaaaacggcggcccggcctcgaagaaggcgaatgtgattgagtccgacaacctccaaatcaaagttttgatcccttcggcggcggtcggcgcactgatcggaaaaggcggcgaaacgatgcgaaatttaaagaacgactcgggctgccgtgtgcaaatgtcaaagaacttggaagtgtaccatgggacatcggagcgcatttgtttggtcaaggggaaacttgctgcgacaatgattgtaatgggcgcaattttggaaaaaatccaggaaaaaattgacgccaaccacgcttctgaccatttcgacctgaagggattggaccggaccaaagagatgaaatttgttgtgccaaacacttccgccggaatggtcataggaaagaacggcacgagcatcaaagagattcgggacacaacaacggcaaacatccaaatctaccccaaggcgggctctgaggaggccaaaatttcggccgagagagtgattacggttggccacgaatcgaacgaagttttactgagcgcagtgcaacgcgttctggaaaaagtggtggctgatccgatgcatgcgcagccagtcccagcggagagtcagttggcttcgggctttgaattcggcggatcgcggctcagtgccgggagcaatcagtttgggggaatttcaaacatgggcaacaattcggaagcaatgcatgggaaatcatttggagggccttccttcaaattcaatcccctccaggggacgggaaacaacgagctgttggcttttctcgacaatttgcagtccactttgcgctcttccggattcaacgaccaatcggtgtcagaggtgatgcaggcgatgcaagtgctggccaaat

SEQ ID NO: 95517 - DNA, 523 bp, Heterodera glycines
attatttttaaaaccatttgtcaatgtttggtcttcacttttgggactcaatacggctttggtcatttaaatccaacttttcatttatatcacttcagatcacctgaaggagtggtcaggtcttattggtgtatttgacttttttgatcagaattgaaagattataactagggataagaatttaagtattacttttaagtaatttttcaacggtaggggtcagtttcggttttatgaaaccaatgaatttaaaatagtctttttttgtgtaatttgtggcgctgatcacaaatatgacctttgtttttcaaaattcagaaccccaaacccgaacgaaaattcgaaattcataaattacaatgaagacatatttttaggggttttcgaggtggctgaaaatggatatggcagccgttttgccctagaaaatacccgaactcgaacaaaaaaatcgattttttctcaacaaacactcggatgtaatgacaactcgtaagaaatgtaactcgtataattgcttgag

SEQ ID NO: 95518 - DNA, 476 bp, Heterodera glycines
gcacattccaaagttgcaacaagaaactgcggaacaatgtgatgtttatgcatcacatttgggcccatgtggcccaacaaaagcacaccgactcggaagaacagtttatcaacatgcaggccgagcaacataacgccaacagcatcatcactaacggcacgaacaacggcaccgacacggccaccggcgacgagcatctcagcgatgtcagccgacttcacatgtgcccagagtgtctgttggaacagcccacaccgcaccgggcgcacctccattaccaccgcgtccataaacgcggcaaacgacatctgttggacaaaaaacccgggttgttgcacgtgtgcaacatctgtgagcaggtgttcgacgccaaggccatcgcttcgcactgtgccgtccaccatttgccggacaaaggcgctcagttggcactgccctacgggtgccggttcagcgccggcgtcaaatgccaattc

SEQ ID NO: 95519 - DNA, 1235 bp, Heterodera glycines
ttccatcacataaatcaccatgcgctgcttattcgccctggtgccgctttcctgtgccgttttgcttccatttttcgccgatgcggtgccaccccccgccgctgtgcgatctgcgcgaccggccgcgcgacaagcggtggcagcgcaacggcaaccgcccgcggggatggaaaggcagtgcaaatgtgcggagattaagccgtgcaaagaccgctatcagaagacgatggagccatgcttggacacgtgccaatctcatatcacttcgctcggtggcaacttccgccaggtgaaggcgtgcttcaccccaaaagagagtctgctcaattcggcgatgcgatgcaccgaaagacagcacgacaacgcctgctcccattcttcagctgctcaatttgtgccaaagcgatacggccaaacattggaaaacgaagcgatggtggaaatcgatcggatgatcggccgaatggggctggacaagagcgggtccatgaagaagctggtcagtgtgagcaagaaactgttcggttgtctgaagcaatgcatggctaaaagggcgggaaactgcgaaaagcagctgaagtgtggccttctgttgccctcggacagtgccatggtacaaaagaccaaaagctgtgccctgaacaacgggtttaacaccgcaaccgcacaacagacgtgccattgtgtggccaatgccggtgtaaagtaagcaaagaatttttatttaattaaatttaaattaatttatattttcaaaatttagggacttgaagtcggtctgtaacaaagtcgtcatttcataaatggacaaatggacgaatatattcgataaaattcatattttgatcaaagaatttaactctggaattttgataagcgaaattaaattattttgcaaatgaggaaattgaaaattaacgataaaacttttgcattacattagagaaataaaattcacgataaatcaaattaaataataaatttcaaaaatttaaattttgaatggcatttcaaataacacaaaggcatcgtttgcattgccacttttgactggcaattaaattgtaggcaatataaatttaaaatgtttgttcaaacaatttgcttagatttatgcccctgatatacttaatttcttaattctctctttctctctcttatcctctgatcattgttcccccgtcaatgtcagcccggggggcggtccttcttttcactaatcgagactctttata

SEQ ID NO: 95520 - DNA, 341 bp, Heterodera glycines
gtttcttggtcgttactacacggtgtttgatgtgggccaaagtcgtgttggttttgcgcaggccaaagacggaaatgaaattccaattgagcctcaagtgcgcgattgcgtaaggggaggcgcactttgctttgatcattccaacggagttgacgattctgatcagcagatggttgagggcgattttgtaatgacggactgaagaaaattgattttatttatgcaattttcagttttatacaatttttaatccatgacgaagcctatgagtaaactatttttcctagtctgataattgtaatcaccatgtaattatcaatcgatgtgataaataaatcatt

SEQ ID NO: 95521 - DNA, 215 bp, Heterodera glycines
gtttattgaacaacaaatcgcaaaatgcgatctgaacattcgctttataagctcaacttggggcggtgtgccaacaatttcttcctccacaaaatttcctccctcggcgactgttctttgcttcacacttcgcctgtcagggaaaatggccacacaaaactgacggtcaatgggttccattgcccgccaaaggaaacgaaaaattgggaggaaaa

SEQ ID NO: 95522 - DNA, 476 bp, Heterodera glycines
gtcctctcaacgtgtttcgtcatttatccttgttcccccaaaatgcggcttcgtcttcggctttccccgtggtcctttcgcggtgccgtccccggagtcgtttgggtcggtgccgacgaggttttctccgtgtccgatgaccacagtctctgccgctggaccgtctccaaaacggaggccaattttctgtctaatgcgttgaaagactccattttccccacttctctcagtgccgcgtttcccttcgccgccgggcgttctccattttccggaggactgtcaattcgctcgggcaaaaagcaacagcgtacttccgccattcactcgtctcagtcagcagggaatgagctcattctgatgactgcctctgatggcaaaatccatctgatcactccggcggggaaaattgaacgaacaatcgaagcccaccaaggggcggccattttggcccggtggagcacttccgagcccggagg

SEQ ID NO: 95523 - DNA, 641 bp, Heterodera glycines
  unsure (1)..(641): unsure at all n locations
gtgaagcaacaggaacgcatatcttttcccttctcagttgactcaaagcgttttttacttttgcccaccgattttgtggatgaaaaaagcaaatttttcaaccgtcagtttctcaccatttatcgggcacggattaattgtcttaaagacttaattaaaaaaaatgcgcgaaatattcttgcttctacctccaataattctgttcaaatcgatgatttatcaaatttttctgccggcaatgatattttngtnnncggtgttgttttcaagaaaatgaaattccgtcaaagcattctttacgagttttcggatgattcgaatgttcccattaaaatggggagaaaagcgggcgacaacctttgcgatgacgaggacatactccaattggaggacgaccagcagactgttaaattgcttggaaacattgacaaacattgttttgtcactggcgatgtcattggagtgatcggctgtcaggaggatgtatcagacaattttgaagtgcgaaggattatttacccggaaatgagccctcaattggaatggcctttggttgagcatgattgttatattgtttttatgtccggcatttcattagttggcaattttgacaacgatgttcaaacgttttcggcactgat

SEQ ID NO: 95524 - DNA, 901 bp, Heterodera glycines
caagtttgagccttttttaaaaactagcaatgaaattaaaaagaatgacttttgattttgaaaagagaggtgacaacgccgacgatgaggacagctctgccgatgaatgttcttcaagcactggtagcggtacaccaaacagcgaatattcggtggatgagataatcgggcacagaattgaaaatgggacggacaaatggagggtccgatggaaagggtgggcgccgaagtacgacacgtgggagccgcgtgagaatttctccaattctatgcatcttctggacaaatttgatgccaaacgacttgccggacaatgcaacgagaatgaggctgttgcaacccatccaatgtccaataataataatcagtcggattatgtccaaaagttgcgtccccatcgttcgctgtgccttcctccgacttccgccgctgtgccatcggccggcagaaaaggaccaaagaagaaaggaagtgccaaacgaacgacggcggcaaaaactcccgtttcaattccacttttggaggccaaggcgatgctgcacacgtcgagagtccgagtttttattcttgtatgcccaaggacatgtcggagcgtgcgaaggagtgcaaagaaattcggaaattccttttgaattgcgtcaaacggacgaatgcatcggcgaccgccgccgcgcctcgcgtgctgtacatcagcggcgtcccgggcactggcaaaaccgcagcagtgctgaaggtgcaaaaagaattgtgttcggaaaagaagacacccaagttcgactttttgaacatcaacgcgttggaactgtccgacccgcggcaattgttcaccaaagtttatggacaagtacaaaacaattgcacagggacgaggaagaaaatatcggcaagaaatgcacagcaa

SEQ ID NO: 95525 - DNA, 354 bp, Heterodera glycines
cccccccctaaatttgtcctcctcctgtgtgaactgtgaatgaatgaatgagtgatttattattaattattgtacatatatatggcgtagttttgtgttgtctaaaaccgtcggcgccgccgggccgccccgccgccgtctgctcgaaataatgcgcaagggactttttggtcacaaaatttatcaattgggggggctgtgtggtggtggtggtggcggcggtgtctcgacaaatttttttccccatttgctaaatttactccctcccgatcattatatatttatttttaattattacccgttaattagatgggaggaggagggtttgtaaatttgtcttcgatgtattttttc

SEQ ID NO: 95526 - DNA, 837 bp, Heterodera glycines
ggaccatctaaagtcgcattttctactaccaccaccccgacctcggcaatttccactacggtccgcagcatccgatgaaaccggcacggttggcggccactcacagtttggtgctcaactacgaactgcacaagcatttgacgtgtgtccatccgcccaaggccacccaacatgacttggcccgcttccatgcgcccgaatatgtgcagtttttgaagcggatttcgccgctgaacgcggatcagtacgagggactgttcaatcgctttaacattggcgaagattgtcccgtcttcgatggcattttcgacttttgttccctttacaccggcggaacgctcgagggcgccattcggcttaaccacggccaagcggaaattgcgattaattggagcggagggttacaccacgcgaaaaaggccgaagcatcggggcttttgttacgtcaacgacattgtgatcggcatcatcgaactcttgaagtgccatccgagagtcctttacattgacattgacattcaccacggcgacggcgtccaagaggcgttcaacctcaccgaccgggtgatgaccgtctctttccaccgctatggcagctatttcttccctggcactggcgacatgtacgacgttggcatgggccatggccgctatttttcagtgaacgttccgctgagggaagggatggacgacgaaagttaccacagcgtttttaagcccgtcattcaggccgtcgtggacaatttcaatccttcggtgattgttctccaatgtggcgccgattcgttgggctccgatcggctcggctgttttaacctcagctttgacggccacggg

SEQ ID NO: 95527 - DNA, 641 bp, Heterodera glycines
gtccaataaagcttattatgtttcgaaattgtctcctggatttaactcctctccgttgtgcatttattgcaaataaactggctcattattcttccaaaacaccaacattttcgaattgcattccttcaccaattttatcgggaaatcaattgtttcgaattattcgtgacaaaattcgcacctcaggcccaattacggttgctgaatacatgcaaatttgtgccacttctcaacttggttattatgctggtcaaaatgaaatttttggagagcgtggtgactttgtaacttcgccggagctgactcagatattcggagaattaattgggagttgggttgttcatgagttggaaatgacctcttggaaggaccggtggcaattggtcgaactcgggccgggctcgggcgaattgatggccgatgtgcttaatgtgctgcgccaatttgatgtattacaaaatgttgaagtttatttggttgaaagttccgagcgtttagtggagcgccaacgagaaactttgaagaagaaatttggcgaagatttacttagaaccattcgatggtacgattcattggatgatgtgccacaagggttctccgtgtttctggccaatgaattcctcgacgctttgcccgttcat

SEQ ID NO: 95528 - DNA, 466 bp, Heterodera glycines
agtagtgctttatattgccattcttcaaattaaacttttgctaaaattccatggacgaatcggcgaaaaagacgctaaaacaaattccactgctgaaaacaaatgcagggccacgagacggacccctttggcttgaacggttgaaggaggagtacaacagtttgatcgcgttcattgagcacaacaagcagggcgatgccgactggtttcgacttgagtcgagcgcggatggcactcgatggttcggcaaatgttggacctaccacaacaaaatcaaatacgaattcgatgtggagttcgacgtgccgattacatacccaaaaactgctccagaaattgcccttcccgaattggacggaaaaacggcgaaaatgtacaggggaggcaaaatttgtttaagtgatcacttcaagccattgtgggcgagaaatgtgccgaagtttggcattgcccatgccttctcact

SEQ ID NO: 95529 - DNA, 552 bp, Heterodera glycines
gagatgatgtttttccaattgtcatcctcagcaccaacatcatcttccgtcgatgggccacagcagttttttcaacatcaccaccaccaccaccaatttgtcccatcgatctcaccactgttcgacacctccggcaccggcatgttgggcacgttggcggcacccaccactgcctcaatcttcatgccgtccttgttcggcggctgcggcggggccgccgccggtgatggcaccatcaccgccgctggctcgctgatgcaaagtttgttgagcgcggcagtctgcagcggcgcattcccgttggtcggcacgactgttgcagcctcaccgctgactgctaccacctctcaacatcgcaaattgttcataggcgggctcagccatgagacgacggatgaacagttacgtgattactactccaaatggggcaaagtcattgactgcattgtgatcaggtagctgaaaaatgattggactggtctaatgagacacagctatcgaatatttcggattttttttaatttgataaaaaaatgtgttgggtaccctttc

SEQ ID NO: 95530 - DNA, 487 bp, Heterodera glycines
caatggtaaagcttcagcgaattccagcggaatttggcattgagtgcaatgtttacggaaaatgcgaatttttcaatgccggcggttcggtgaaggaccgaattgcgctgaggatgttggaaatagcggagcaaagcggcagactgcgtgccgggatgacagtgattgagcccacctcgggcaacacgggcattggccttgctttggcatgtgccgtcaaaggatatcactgtgttattgtgatgccggagagaatgagccgagagaaggagctgacgctgaaggcactcggggcaaagattgtgcgcaccaaagacaaagcgcggtacgacagcgaacaatcgcacatcggcatggcgttcaaattgagaaaggaaacgcccaattcggtggtgttggaccagtacaaaaacatcgccaaccctttgacacacttcgaaggcaccgcggcagagattctggacgcgttggatggcaaagtggacat

SEQ ID NO: 95531 - DNA, 592 bp, Heterodera glycines
gtaatgaaggcgagcgaaacaatgacaaattggtcggaacagtttcaagagtacgacccgttcatcactcaacctcaccccaccaatccatgggtctcggatgatccttcattgtgggcgctaaatgcagacaacgtggaagtgccgacagaacgaagggttaagcgatggggcctaagcgtcatggaactcgtgcgcgaccctatcggacggcaggttctcgaatcctttttggattccgagttctcgtcagagaacctccgcttctggtgttgcatccaggacctcaaattctctcccaattgtcaagttaaaacaaaaggccaacacattttggacgagtttcttgctcccggtgcgccctgtcaggttaacgtcgactctagaacgcttgaagaaacattacgatgcttggaggagtcggaccaagcattgcgaaaccagaggttcgctttctcagtttcggaggaacacgtgttcacactgatgagcaaagactcgtacccacgttttctccgatccggcatttacaaggctgttttggacgctgcccaaggcaaagggtggcagaaaacggatcattgacctgatc

SEQ ID NO: 95532 - DNA, 476 bp, Heterodera glycines
gtggcggtcgatttggcggcgataattgtcgagaaaaatgtcaactcttttctgtcggttgtggacattcccaagccgtctctttacgtttatttcgcttttcttttcgcgttggccacaattttgtgggcaaatttattgtgcaaatcggacagcaacaacattttcaaagtgcatcgtctcatgttggtgctcgtcttcctcaaatcgctcactttgcttttccacggcgtcaacttttactttgtctctgtttatggccacgaacgtgagctttgggccatcatttactacgtcacgcatttgcttaaaggtgcgcttctcttcggcacaattattctgattggctccggttacactttttttcaaacaatttttgagtgacagagacaggcgactgttcattttcgtgttgcccctgcaaattttggccaacatcgcaatgataattctggaagaatcggagttcagcgacc

SEQ ID NO: 95533 - DNA, 494 bp, Heterodera glycines
gaggtaatttaattttctgtgctttcatttttatttgttgtcaatctgatcagtttcttttttctcacaaacaatttgtgttgtgtcatcgaacaaatgtcgactgtcagcaacggcaaagctgaatcgtccatgcgccgatacatctacatcttaccctaccttcccactggcattgcttcttattatttttacaaagcggcacagttggcgcgaaaatgggccactgtccacaagttcgggccgttcaaagtgtcggcagcgcatggatttgcccttctcattcccatgccgcacttggtgatattggcctttcaaattgcgtacacgcgaatgacacgtcgtaccgatgagaagatcaaaatgaaacaaaatgtttccaaatagttgcctattttcatttcctctgcgctgtttccattttgtccttgatttttgtggggcaatttaaattcgttttgtttttcggcaattaaatgcgcgcttcttccaaa

SEQ ID NO: 95534 - DNA, 480 bp, Heterodera glycines
catctgtccactcattacgaattggaccaaaaccttttcaaaaacaaaacattgcgcgagttttgtgccgcgattcacagtttctacggaaaatgctccaccaacattctcgatcacttcaaaaagcgattcaacattttgcaatttgcgaggcatttgccccatttctttgtcggcctcaattcagcatggatttacgaattcgttgtgctgctcgaaactaccggattaaatggccatattttggacaacgatttcgaaatggacgacaacgatcgattcattgtgaacacgcaactgcaacttttgttgcaggaggcgttccgcgtcagttggcttcagaacagcccattccatgacaaaatttgcgtctcactgatgcgtctttctcccacgagtgacgaccgactggcggaacacgagaaaagacttgaacaccgacttaagaacccaccgaagctggagctgaacatcgtcgtc

SEQ ID NO: 95535 - DNA, 1226 bp, Heterodera glycines
ccggcacttccgatgaagaaatggttcgacaccaactatcatttcattgttcccgaactgagcactgatcagtccttttctgttggcctcaacaaaccgttgaatgactttttgttggccaaaaatgcgctgaatttggtgacaaagcccgtcctggtgggcccggtcactttcttacatttgagccgagtcggagaacggaaggaattggcgacggaggagcagcaaaaagtgcacaatttgaagctgctcccgtcgctgttgcctcattatgtgaaggtcgtccaatcgctggtcgacgccggcgccaaatggattcaaattgacgagccaatctttgcactgacttttgcggagaatgaggcgcccgcgtattacgacgcattccgacagaccgcgcgggcactgcagcaagtgacggcgaagaaggcgcacttgctgttcgccacgtacttcagctccatcgcgaagaatgtgcaaattgtcaaagaccttcccgagggcactggcattcacattgacttagtccgtgcccccgagcagttggacccagtgttgtccgcgttgccagccaattgctttgtctctctgggtcttgtcgatgggcgaaatgtttggctgagtccgctgcgtcagtgtcatgccaatgcgttgcgcgttgtgcaaaaattggcaccgggacgcgtgttggtcagcagctcatgcagtctgttgcacgtgccatattcgaccaaatttgcgcaatcgttgaccaaaaagccggtgaagggaatgctgacggggccaatgaccattttgaagtggagctttgtgcgcaacgaccaaccgcagaaggacacccttttccaggttgcgttggcattgcgcgacgatgtggccgagttggagaaggagggcatcaattgcatccaaatggacgagccggcattccgcgagggattgccgttggacctggcacagcacaacgaataccttaagatcaccgtacaggcattcaaaatttccactggttgtgttgcggactccactcagatttattcccacatgtgctactccgactttggcgacattttcacgcacattgccgagttggacgcggacgtcctttgcattgagtgctctcgctcggatttgagtctgctctcctgctttgaccgctttggctatccgttgatggtcggccccgggatttacgacattcactccccgcgggtgccgtccgtcga

SEQ ID NO: 95536 - DNA, 420 bp, Heterodera glycines
cattggccactaatggaggaccaacaaggccaattgagatcacgaagggcacaaacacaacagacagaaacaacggtggaaggaccaactgacaacagaaatgggaggactgggggagaagaaacgacggcgaggactcatcgaaatgggggaccgaatgaggcgagttttcatggatatgtgaccagttttagaatttatgtccagaatttcaaaattcgcttttttgagtattattaaaaattaaaggagaattgaggaccgaaagaatgtaggcattgaccaagtaagaaaataaagttatgggccaaagaaactgaacattggatgcctaaaattagctgtccaaaactccaactttagggatataaatttttatcgtttttaatgaaaattaggaattttaaaggaaattgtgaa

SEQ ID NO: 95537 - DNA, 595 bp, Heterodera glycines
caacacagcaaactgaaacagaaccaaaaattacactcgtcctccctgctgccccccgtcccacacctcaacaaaacccacctctcctcctccatcagcgcctggtccaacgcatgcgctccgcttcacgtcgcataaagattcgcacatggagtccaaggtgcagcggatggtggcagcccatcgtggtacgcgtgattcggctcagtcggccccagcaaagtgaacagcgctcggctcgtctctatttggcgtggcggtggaggaggacgaataattaagtggatggaatgaatgaacggaatgaacgtggataagcaaaatgcaattcatcttcatcaatcatcccttctctgtgtacaacgaaaacgacgacaattgagcaatgtcggaccatccaaatgttgcgctggccgacctcagctgcgtggcaaacgacgtttggctggacactctgttttggattgaccgcgtggaggtgggcacgaagtttgcactgatcgacgcacgtttcggcaagctggtggccacgcatttcaacctgcgcaagtggaggctgggcgagctgggcgttcatcgtgcaccaagcggatgg

SEQ ID NO: 95538 - DNA, 602 bp, Heterodera glycines
gcttatttatgtttttacctgtattaatggatgtccatgacgacgaagttgaaattattgggactaagccaaatgagaggcaaataggaccgggctcatcgacaagaacaacagcaggaaaaattttactcccaacaacaaatgtctgaggaaagtgaagaagcattgttttgcatttctaagcatgacgttaaagaaataagccaagtggtcaaagcaatggcattccgagaccattgcacattatatgtaagcaatgagggcattcgcttggcagttgacgaccaacacaatcagcaaggcagtgcctacttcagatccgagcacttccaagacttcaactttcgtacccaaacatgcagcattaaaataccgatgaggcctcttatggaagcactgaatatgttttccggtacgatgacaatggtgcaaatttcgtggaatggcgaaggctttccattgctcgtcattttggaagacgaaggcaggagttgttgtccacaccgaaattcgaactttgatagcgcccgagattctcgaattcgatttcgacaatgaaaatgtgacggccaaggcaattctgaactctctaccaattcggg

SEQ ID NO: 95539 - DNA, 277 bp, Heterodera glycines
  unsure (1)..(277): unsure at all n locations
taaatggctgaaactttttctcttttatctccgactcatctgctgaatgaaacaagcctgaaccttagatgcccatattgcccaaagaaattcctaaagaatactgaagccatttctcacatggatccgtgtctgaagagncggccttacccttgtacgaactgttctaggcggtttaaatctgcgcaaaatttgagccaacatgagaggattcacacaaatgttcgaccttataattgccaggaaccaaaataactcactacaaaaacgtgtgctg

SEQ ID NO: 95540 - DNA, 497 bp, Heterodera glycines
atttgtgtacacgcatctaacgattatgagcggcggtcgaccaattaccacacttgcagaggctagggctgactttggcagagctaagggccagtttaaacgtgctgtcatggcacttccaaaccactcactggacggtaccttcagctctttgagcgcctatttcggcttggactcgagcgtcggtgttcagattgttcgtgacttggggctgaccgatccagcagccatttttgaaaaacgggtggaccatctatgtgagatggtgtcagaacactgggacgtccaaatgtttgggcaagcgactcgttacttacgtctccgctctttgaactacaatgatctcgcaggttgtttccgtcgtcccagcacttcgtgaaatctcgcattcgcatcacgaaaaagaagtgaccgttgattttgatgttttcatgcgtcaatttcgtattgttgatgatggtgctctgttgtcgttgaccataaagtcttgttcagat

SEQ ID NO: 95541 - DNA, 393 bp, Heterodera glycines
gaggaaaagacgataattgagaggaaggacggcgagggtttgcgactgttgagatgccttttggacgaccctaatatttcaagcgtcgacctttcgacactttctgtgccgaaggccgtttccctttctgcaattggcaaaagcattgagacggccaatgcttacaaacaaaagttgctcaaggcggacaaagaccaggaagtcacgcgggtgaacgacttgcaagcggactacttcagtttggagcataatccgtacttgacagcagccgaaagagaggcaattggcaatcggaaggaggaattgagacagctcagtttgagtgtcaaaaggaatattctcgtcgatttggacatttctaccggagcaatgcatcagcaaaagcaaaaaacc

SEQ ID NO: 95542 - DNA, 401 bp, Heterodera glycines
gctgcggtgattgaacagcaattgggacagtttagcacggacaaggaaaccacccataaagagctgtctgttggagtgaattatgtgcaaacacaaggagaacagcacttggcaaaagcgcaggaggcgttcgaccgttacggggaaaagagtcagcaattgtcggatatcgctggcgaatccaagtagttgtctgataggcaggagcagcgtcgccgggagatcctttcgttggctgagcaaattcggaaggagtcgcggcaatcgctcagcgacgccaacgaagcaatttttggagcttcaagcaccagtctgcaaatttctgctttgttgaccgaggtccacgagttggaacagcgactgaaagccgtccaacaaatggcgacggaacagtccctcga

SEQ ID NO: 95543 - DNA, 748 bp, Heterodera glycines
ctgaccttataaaaactcaaattcgagacttggacatttcgtgggctcgacattttattttacgtcattacacagcttttttcgcatttggtgaacttaacttcatccgattactaaaaagcccgtctccgaaggcgacttgtgacttttgttttttcgccgaatttctctccgcgaccattttctcgatgtcagagtttacttcgtccgacggatcagggaaaagcgttagcagtaaggtcagtgagtcggaaagctacgacgcgaccacgcttggtaaattgatgaaccttgacgccaaagtggtcgaatggctcgagaaagagccatatacggacgaggatccgctcttggttcttgacttccttggtccgtttaacaatcttcatggcgactacaaccaaaacaaggcctttttggtgcagaagttggttgccgctggaggggctagaatcgccgcgaacgtggacaacgttatcaaatttgcgacctgggatatgttttacgaagcacgtcgcattttgcaggcggacctggaagtgcgtcactttttctaccatccaaatccggcaatggctcttcaactgaacattaaccaatttccgatcgtctctacaaccgtggttacgttttggtcagatgagtcgcttaaattgaagacgcagccgtatcagttcttcgagatttaaaggatgatccattgttcattcatcattttttgttgcaaataaagacttattacatactt

SEQ ID NO: 95544 - DNA, 709 bp, Heterodera glycines
gagattttacgttattacacagcttttttcgcatttggtgaacttaacttcatccgattactaaaaagcccgtctccgaaggcgacttgtgacttttgttttttcgccgaatttctctccgcgaccattttctcgatgtcagagtttacttcgtccgacggatcagggaaaagcgttagcagtaaggtcagtgagtcggaaagctacgacgcgaccacgcttggtaaattgatgaacctcgacgccaaagtggtcgaatggctcgagaaagagccatatacggacgacgatccgctcttggttcttgacttccttggtccgtttaacaatcttcatggcgactacaaccaaaacaaggcctttttggtgcagaagttggttgccgctggaggggctagaatcgccgcgaacgtggacaacgttatcaaatttgcgacttgggacatgtttttcgaagcgcgtcgcattttgcaggctgacatggaagtgcgtcactttttctacaatccaaatccggcaattgctcttcaaaacaacattaaccaatttccgatcgtctctacaaccgtggttacgttttggtcagatgactcgcagaaattgaagacgcagccgtgtcagttcttcgagttttaaaggatgatccattgttcattcagcattttttgttgcaaataaagacttattgcctttaaaaaacaaaataaag

SEQ ID NO: 95545 - DNA, 950 bp, Heterodera glycines
tattgaagccggaacaagtaactgtgcagaatttgctgattgaaaatggacaactcattgaaactgtggcggaatatcagcggatgggcaaaatcgttgaagcgactaaataccaagagcgactgcacagaaatctcatttatttggcaaaactggctgattcgacatgttcttctcaccttttactggaaatcggtggagcgatacccccaacgaatgagtcgccaccgccagccgaacctctgttaaccgttaccaattccgctaatcctccgaacattgttgctacaatagctaacgcgggtttgcctcaccagcagcaatgccaacccgcggtgtctgtggccattgtcagccaaacatcgccgcccagtgggcatgcccaacagcgcggaatttcgactacgccacctgcccatggtgtgcagtaccaattcccctccctgcctcagccctctcctcatacacaaacaacccaacaacaacagccaacgactgccaatctccactactctcaaagtcaccaacaacaagcagtccctttccaacggaatttgaatgtgttatcgcatccgatgcttttccaacaccaacagaacgtccaactgtcccaacagcagcaacagatgggcacacaacaacactccgtcgtttatgctggtgggcatgcgatgccaacccaacatcaccaacaatactctgctgcttacccattgttgcaacagcagcagcagtcgcaacagttccctccttccactggcgctgcctttgcccccatggtaattccgctgcaaaacgacccaattgcagtgggaattagacaacaacatcagcaggtttaccaacacacgcccagtcattcggctctacaacacggaacgtcacatgccgggggttacttggctcaacaaaaatagtcggcggacgtttggttgaccaattctctttgt

SEQ ID NO: 95546 - DNA, 470 bp, Heterodera glycines
attaagtttactttctgctttcctcttacaaatgaatatttgtgcatcaaagtgttgtttggcatcaccaattgcccatcgttctcattcggttgcgtttccgccatttgtccgtcgctttgcatcccatggacatgacgacaacaagccgcaccccattgatgacccggacattccgcgtcagcccgacatgtaccgccctggttccgattcgtttgcttatgaaaatccatggccaatgctgaacaagggccgtcttgattggcttttcaacgacggttggcgtcgaccactcgcggctgaccaaggcgctcacatgcgtcgccaatggatctatttcaaatgcatccctcgcgacgagcacaaagactggaagaagtggcacggcacaatgcccatcttcggcaccggatgttttgtcatgttgacctttgtgtggcaatactgcaattccgactggcccagcgcga

SEQ ID NO: 95547 - DNA, 640 bp, Heterodera glycines
tgttgtcctttgtggaacggactgtccaatcgttactcgacaaaaagatgattgttcgacaagaaattgacatgttcgaagccacacaaatcggctcggccactttcaacgcgaattttaacccccaaatggcacttgacatgtgcaacgacctcggcgccaatttgggcaaaggcatcgtgctaatttcgcacttccatttgctttacaattgtgtgccgttggacgtcgccgttcaagtggactggaatttgttctacaacgaagtcatatttggggctgagcagcgaggagcggcagctaattcattcgatgggtttgtttaatcctcaaatggattcattttgcgcctttattgttggtttgctgactttttcatttttgctggtttattaggtctttctgaggctgttcttatccgtcacattcactcgcaccaccaacaaaaggacccgagcaaagggatgcgaatttacgttgtaattgttttgggtgttataattccgccattttttccacaaatctgttctttcaggtgtttatgcttcgtcaaatttggaatcagaagcccttgtgggaggtggcgcgttatttcggcgtcccccggggttggcttcagtccgttttgcagtccgccgtc

SEQ ID NO: 95548 - DNA, 517 bp, Heterodera glycines
caagtttgagccaaagcatttcattgactttctgtttaaaaaaatgtcgcttcttgttttctctcgtctccgtactcttcctcgtcttgcgccgcttctgacgaacagtccttgtgcactcagcaccagtgccgttcgcaaagacattgacagtgccgcgaaatacgtcggagccggggctgcaactgtcggagtggccggttccggtgccggcattggcaacgtgttcggctcgttggtcatcggttatgcgcgcaatccgtccttgaagcagcagttgttccagtacgcgattctcggctttgcactgtctgaagccatgggactgttctgcctcaccatgggcttcttgatccttttcgctttctgaacattacgaagacgagcacagaggaatggataggaaatctttttttgttttttctcgcttccaataatagtatgtttttctatttttgtgttgtcagataaagttggactgattagaaaaaaaaaaaaaaaaaaaaaaaaaaaaaaa

SEQ ID NO: 95549 - DNA, 479 bp, Heterodera glycines
cgatccgaaacacgcttctccttctcccgctggggctgcttcccacgctcatccgcccaatggcggcgccgcccacgcggccgaagtgagtcgaaatttttagagaaattagtacaaattaatttgaaaaattaaaaggcaatttaagcagctcattagcttgttgatttttgtgctttttcagccaaaacatgctgcggctcccgctatcaaaataactgatgaggccaacaatgtttactcggtgtgtgtggagagagacgttctgccggcgccggaaaatgcgtcaaaggacaaattgaaggcaatcgctgcgaaatgcgacgaatgcggggcggcaaaatgcaaagcgaaatgcgggggcaaagaagtgaacgacgcatgccgaacatgcattatgcaaaactgtccaccggcaaaataaaaaatagcagaaatgaggagggaaagaaaggcaaaaacggcacggaaggaggaca

SEQ ID NO: 95550 - DNA, 603 bp, Heterodera glycines
ctaatctggacatgtaaatcaacgacctttttccgctctttttttgttgcgcgcttttcaaaaaattttgggggacagatggtgtgggggcatgccgacaggcgccacagtggaaatttttaagtattttgttaagaaattattattaatttcattccaactttctgatcattgacgactctcttactacaatacttaattcagatgcaaagattcgtcttatatttaggtgaagctgaagcctccgccatggacacttcaatggttcaaatatgacgtcaaaggaatagaggacacttggacattggccactccatggttcaagaggaaattcattgcgtcaaaggatttgttggagctgagaaagtacgacgtcatccgccattatagggaggctggtcaagaattggagcatgatctgaaagtacagaaacggatgcttgagttcattgaagaataccgcagaaaacggggggagcccaagaggaaattgctgaaatctgccggaggaaaattaagggaaatttctttattcgtcacttcggaagatgttaaaagcaaatgattagtgttaaggataaaactctttgatttttcacttta

SEQ ID NO: 95551 - DNA, 785 bp, Heterodera glycines
gtccaattaagcaagacaaataccttcaatcattttcattgtgtaaaatggccagtaattcaaatgcccaactgttggatgcatgcgaaaaaggggcggaattaaaaaacatcaaatccctaattgagcgcggggcgaatgtgaactttgccgataaagacggtctttcccctttgatgggggcatgcgtcttcggtaacgttgagattgcgcactgtcttgtcgagttgggcgcgacaattgagcaaaaagatgacgagggattgaccgcccttgggcatgctgtcattgcagggcagctcgagtccgtcaaaatgttgaccggaaaaaacgcgaactgtttggtgtttgccaaagacaatcgctcgccgttggtcatcgcctgtcaggaaggccgcatggaaatcctgagccattttcggtccgttggtgtgaatttgaatcactgtgacgagcacggaattactccgcttatggtcgcaactcaaaaaaagagggtggacgttgtctgtttcttgttgcaaaacggagccgacaaaagtcagactgatgccaaagggagaaccgcgctcgcatttgccgatgacctgcgcgattcgaaagaacgtaaccagcttttgaagttgttgagtgaccgctgaagtgagaggaaagggacggtgatcagaaaattctttgtcagtgattagaaaatgttttgccgttgttgattttgaccgtttaatgtgttcatttctaaattcgttggtgcttctttttactcatccataaagcgcctttacaac

SEQ ID NO: 95552 - DNA, 705 bp, Heterodera glycines
gtcaaacgcaacacgaacgcggcaccaacgcggaaaacattgaaattttgaaggaccgacggcgaacggcttccaatgccaagcgaagtgaacgccgccgcgttggttctgtttgcgatgaaactgttctttgggcttgacggggaagaagacaagcagcagtcgcgcgatggcacaaatgaagcgactcaatgcgccgacgatgacagtccgtcgccggtgttcagcttcgaccattggctgctgcaacttcagctgcgcatgcactgctggcagggcacaacggttcagaaggtgttggacaagacgttttccgcctgccaattggagcgttccaacatcgaaattccctatcgtcgtccaaccgccggcttttgccttggcggttcgcgactgttccatcgctgtcggaggcaaccgtttgctggttgtgtgccgaatgcgctccacaaccgtgttcagcctcgtctctttgagcattcctttcctcgacttcaccatttgccggttacgtcttcggttttgctgccaatttccaacgaagagctttacgccccccttcagttccaaagtgtgctgaatcggccccttttggacattgtcaaccgcagccattggaacgaagccgaacaaacactcgtcgaacagctcgaccgaccgaacacaaaaatatttttccggaatttttataattccaatttgagc

SEQ ID NO: 95553 - DNA, 639 bp, Heterodera glycines
cttgaccgacgcgggccaactcgtggcactgacgggtgccagtggggtggacagaaccacgctgttcaacactttgctgaacaggaacttgaagagtctgagcgtggagggtcaattgctgatcaacgcgcactctttgggccaattcatcaattacgccagcggggtgtttggttcgtcatttgtagtcagcaacattctccgtgttctgtctggattcccgattgtttttcgtattcagatggctgatcgcaggcgttatacacccactgagcgcatgcgggacatgcaacaaaacattaatgagctcattcgcatcaaccgagtgaatgctgagacaattcagagccaagctgagacgattcgaattctcatggggttgcctggagtccgccaaatgtatgatgaacatcaagccaatgccaaccaaaacgcgaatcaaaacgcgaaccaaaacgcgcccatccaaaacatccagtatgcgcaacctcttcaaattgcccaagccggcaattttcaaaacctcaatcagctcccaaatttgcaacaaaatcaacagcaatatggtcagtatccgtttgttcctactcctcttgggtatccgccggcgcctcagggaaatccgtaatttgttcgtcg

SEQ ID NO: 95554 - DNA, 359 bp, Heterodera glycines
  unsure (1)..(359): unsure at all n locations
caaacccaattgatgctgggcggggggccggcagcggcgcagggactgccgccaacgcaaacgaaagcaattcgacgacgaaaacggggcattaaaacgtccggactgatcgccggggcactgatcggcacgggggcagccgttggagcgaacgcatacaaaaaatacaaagcgaataagggctaagggagcggaggacagacaaagagagagaaagggacaaatggaagcgacggagaattaattggaagtgatcaattaacactaatatgcatcattaaaagaccaattagcacacaattgacatttattatgaaccacatttaaaatcattttaaagagaaccatcacagtaccnn

SEQ ID NO: 95555 - DNA, 688 bp, Heterodera glycines
aaagattcagtggatgtcggctcagtgatcatcaccaagctggacggtcatgccaagggcggaggcgcactttcagctgtcgccgccactcgttctccaatcatttttatcggcacgggtgaacacattgacgactttgagcagttcagagtgaaaccattcctgcaaaaattgcttggcatgggcgacatcgaaggccttgttgaaaaggtcactgaaatggggctggaggacaacgaggagctgatcaagcggcttaaacagggtcaatttacgctccgtgacatgtatgaacagttccaaaacattctcaagatgggcccgtttggtcaaattatgagtatgatccccggatttggcaccgattttctgtcaaagggcaacgaacaggagtccatgtccagactgaagaagttgatgaccatcatggactcaatggctgacaacgagttggaccacccaaaagccaacgatttgttcaacaaagagccaacacggctcgtccgagtggccaagggcagcggcacggcgccgcaggatgtcaaggagttgctttcacaatacaaaaaatttgcggacatggtcaaaaagatgggcagcatcaagggcttgttcaagggaaatgaagtgaacccgaggaacatcaaccagaaccaaatggcccgcctcaaccagcaaatggccaaaa

SEQ ID NO: 95556 - DNA, 839 bp, Heterodera glycines
gtttgagataaataccgtaaacagtgactaattactgtaattatggccgccacaattgcgtcccatgcgccccaaatgaaacaacaaaatgtgcaggttgctgaagaagaaacattcggaaagacaaacggcggaatgccaaacggagcacagaagcagcagaatggccaagcgaaggagaagcaaaaagtgggccaaacggcgccggtggcacgtccgctgacagtgaaagattgggactacgacgagaggggccaatgcggaccaaagcattggctgcgcattgccaaatgcgaacatttgggcgatcaccaatcgcccattgacttccaactgtccaaaatgcgcgtccatccgctgaacattcacccgctgtgtttggtcaattttaaaaagcctttggctggccagctgatcaacacgggctgtggaatccaattccaacccgacccacagattgaaccgcccgaaatttacggtggcttattggaccaaaactatcgcttcgtccaataccatttccactgggcacagaatgacaatgaagggtctgagcacacaatcggtgggctgcgttacccagccgaacttcacttggtccactatggtgtcaagaatccgtccaaattggccgttttgggcattttcctgaaattggacaacgaatcggagaacggcgaaaagaagaaatttgtgttctccgccgaagaaatggaagcgctgaagaaagtgatcgaatttgagcagaatgccgccattgacactgaacattcgctgtcctcaaaattgccgcccaattgttgccaggaaatggcttcttccgcggaacattttgtgtc

SEQ ID NO: 95557 - DNA, 535 bp, Heterodera glycines
ttaaaaaatataattcggaatgggattttcgacaaagccaataattattgacggaaaagatcatttgcttggacgtttggccgctgtcacttcgaaacagcttttgcttggccagaaaattgttattgtgcgatgcgaatccatcaacatttctggcaacttccaccgttccaagctcaaattcctcgcatttttgcgcaaacgctgcaatgtgaagccatctcgcggacccttccactaccgtgcaccatctcggattttctggcgcacggttcgtggaatgcttccgcataaaaccgcacgaggtatggaagcactgaaaaaagtgaaatgttttgacggatgcccgcagccgtatgacacaaagaagaaattcgtaacttccaatttctcttcgccacatcggcttgaaaacgcggacccaattattgccacagtcggccgcctccctcccgaaagttggtgggcaatatcaaggccgttttaaaaaaatttggaaacaaaaccaaaagggccaaggcccctcttttccctg

SEQ ID NO: 95558 - DNA, 475 bp, Heterodera glycines
gttaaacatgggttagtggaggtgggataacaacacttaagcgggggagtcgccatcgaaatgggaaaatgattttggtttgaatggtaacgaatttcgagaaacacttttgatgaagactctcacgctttaaaataattaatcgtatttaacggtaatttttatttcattgacaatttaaatccccgggttcctttgataattgaaggaaaatggcatcgaccgatcgcaccagcggagcggcaagtcgggaagtctcgagccggagcagttccgaaaactgttcattggcggtctgtcactaaatacaaccgacgagtcactgcatgctttctattcccaattcggaatgctcgtcgattgcattgtgatgcgtgacgcacaaacaaagcggtcgcgcggctttggttttgtttcgtttcaaacagccgacgaggttgatgcggcgatgtccgcgcgtccacacacaatcgac

SEQ ID NO: 95559 - DNA, 578 bp, Heterodera glycines
gttggtccaacttctttatcatcttttaacacatttcgtcagcccgttccaccaccaccgccgccgcaaaatcgtctttccttaaatgtcgattttgctgaccgcacatctgcctcttcgcctactccgttgccgcctacgtctccaattccgaagattcaaccccaaatgttgcagcaacaaagcagcaacaactttcaccatcatcaccaccacaatcttcatcatcaacaacaattgtcgtcatcgtccacattttccacctcaccgagcgccaaagtgccaatgccaccgcctcctttaccgccgccgccaccattcatccgacgcccggttgtaatgccaaccgaaaatctatcgccctcaaataatgcgcctttgacaaatggtagaggtgtcacgtcccctaaaaagtcttcttcttctgcgttgcgcttgagtttcttcaacggctctccgctgaacttcttcaacaacagcaaagtggtggctgaaaaatcggtgcctgcgcctccaatttcgccaccgccaaaggcaatgccatcggcggcagagacaaatggtctgtcgaatggcac

SEQ ID NO: 95560 - DNA, 481 bp, Heterodera glycines
gtccaattaagaagctttagcgcagtcggtcgcttcgtcaaaacacacaaattcaaaaatggcgcgcaaaagccgccaagaacagcagcgaagaagccaatctcgggaacagcaagagaacattccgccatgttgtgcgcagatgcgtcacgagaacgagctgttgaggcgcgcgttgcgcaaggaacgcgagcgccgtatgttcactaccaacgcgtacagacagctgttggagcagttcaaccatttggtggacttccggcgcgtggttgtggccaacggagggggcgaacggtcggaacaactgcaacagtgccagtcatcaccgtcgagcgtcaatggtgcgtctgtcccgttgtcatcagaagcagaaacggcattggccatggcaccgacagctacggcagcggccgtgacaccgtcaataacggcaccggtggtgaacaatcaacacaaacaaattataacggaacagccggcg

SEQ ID NO: 95561 - DNA, 550 bp, Heterodera glycines
aaagctggagctccccgcggtggcggccgcccccgaactagtggatcccccgggctgcatgtattcggcacgaggatttgctaaaaaaatttagttacctaaaatgcctgtgcgacaaattctctcgggtacccgcagaattgcgaccaaaagtttgtcgtttggaattggttcggcgaggttggccgattacggtgtctttaaggccctcctcgagcccttagtggtttccaagtttgaagagctatcgcgcattagagtcgaaaaaattacgatcttttttgggatcctcgttttcgtctcattggctgacgttgctatgaccctgcggaccaacgaacatgttggcgacgttgagcgccgtcttgaaagccgtcttgaagaccgttttgctgaccttcgagcgcttcttgagcgccgccttgacagcattgaccgccatctcggaacttctgacaaagcgacggatgccaagttgcccggccagtgatcccagtggaactctgacgaaggatctcgggtgttacctttaccgggtattgaattgacc

SEQ ID NO: 95562 - DNA, 526 bp, Heterodera glycines
gttaaattcgtcagctacaaaaaatttcgcaaaataaaatgaattcatcaatgacagtatctcttctgctaatgttaatcattggcactgctcttttggcattgacaaatgccatgccaaacgcagatgcttcattgacgcgcgaaaagcgtggcagttacggtagtggcagttatggtggtagcagttacggtggtggacccagcggtggtggtgacgcatttggaagcggaggggccgcaggtttcggaagcggaattggcaacggtttcggaagcggaggcggcagcggttttggaagcggaggcggaaacggtttcggaactgggggtggcagctacggtggtggcagttacggtggtggtagttacggtaaaaggcgatgatggaaaaacattggtccatttgtgacgaggaaattgcaatgtgatcatcctttcttcccgatcactgcttttccaaatttatttgttgtattatttatacaaaattttaatgaaaatgaattgctgctaattgaaaaaaa

SEQ ID NO: 95563 - DNA, 480 bp, Heterodera glycines
cagtgaggaaggcggtcgcattgtgaatgtgagcagcagtgtccatctccatgccgattcggtcgatccggaggtggtggagtcgcctcgtcgatttgggataatcgcgacatacgctcgctcgaagctagccaatgttatgcatgttgttgccctcaccaaacgcatccgtaccaatgacagcggttcaaaagtcagcgcaaacgcgtgccatcctggcagtgtcaacaccgaactcattcggaacaattttttcagaaaatacattaaaaaggcatttgctccaattatatggttcgttctggtaagtatttccgcataaattcatttctcttaaattttttattgtacgaattgccattgacccggggtgccaagcggaaatcctgggccttccctgatttaaaagaataaatttacagaaaactgatcgggacggagcacagacaccgttgtttttagcgctaagtagacaaatta

SEQ ID NO: 95564 - DNA, 462 bp, Heterodera glycines
aacttcacaatcatggtatcattcgaaagccctagatgtttagaagatatttataagctatttctcagtgattaatcagctctcaaaaaagttgtcagttgaaaaccgcaaaaaaggcagaattttcaaagttttttatttctatctttttttatagttcgaaattttctgtaatttttagtaggctaatagagcctgtgaagagctttcgaatgatatcaagattgtttgattcggtcaataacttcaagagttatattgactcaaagttggcgggacggagttggcccgttccgcgttccgccgtgttagtgtttcaaattttccaaagatttctatttttttaattttgtcattttctttcccctagactcccatcacttttccgtattcccaaattttccatttttttaaatttccccctttggctcccttcactttgccatttttttccataatttt

SEQ ID NO: 95565 - DNA, 335 bp, Heterodera glycines
atagattcttaacatttctagttctttatacttcaattaatctttattttttaaaaaatgattatttcataattttataaaagaatacaaattattaatcaacatttttagcgacttaaattaattttcagatgtttttaaataaatctgggtgattaaaaaaattgcttattttttatttactgactgattgtccactgacggattgtccacttaccgacggattgtccactgacggattgaccactgacggattgccactgacggattgtccgggagcctaaataaggttttaataaaattattattttaattgataatttatttttccacca

SEQ ID NO: 95566 - DNA, 631 bp, Heterodera glycines
actcactctctgctgcggaggtgcgcctcacacgtcacaagcgccgccatcatctggtgtatgctggggtggacgatgcggtgggggaggatgccgaggtacaggagcatcggcggcgatgccaacagcaattggtttggcggcgatggtgcaatactacgaacagatcaacagtgttccgctcgacagcggttgaatgcctcggcgatggcaaaaattagcttgcgaaagcaatgctcctcttttttgtgctgctacacacaatgctccactgatgctccacaaaaatgtcatgatgataatgatgcccagaaagcttttgatgctgttcatctccgttccctcaactgcttcttctcctctttctgtcctccatttcggcactttcttccccccaaagtgctcctccgtctctgtctgctgttcctttttgctgtcggcggctgtccaattgtgcctggcggcgtctcggcaacggcacgttcacggcggacactcgttccgctcggcatggacaaacagatgttcccgcctcagatctttgacgaaaatgcgcccatttgcactgcggaaagggaaccgtgcggcttttacagtttttcgctggacggaaaagcgcccctcaaatgga

SEQ ID NO: 95567 - DNA, 225 bp, Heterodera glycines
aacgtaggcatcaagaataaatatgtgttgatggacgtacgcatttctggagcattgaatatcgtgagtatgtggatgcgtacgcacgcatctaccgtataacattaatctaccatagtcatgtagacaacgtacgcatcaagaataaatatgtgttgatggacgtacgcatttctggagcgttgaatatcgtgagtatgtggatacgtacgcacgcatctaccg

SEQ ID NO: 95568 - DNA, 314 bp, Heterodera glycines
ctcacatctgggagccctgcatattgtagtaagactggtcccccctttttgaaaaaaaacaaaaattttaatgccattaaaacatgttctaggaagttttagggccaaaaaatggaataaaattccaaaaaacaattttaggagttaactgatgcgctgagcagaatcaatattttcaaatgttgaaattttgagttttccggatgttctaattcgggttcgggattcgaaatttgccaaaagggaggccggattcgtactcagcgcctcaaacaccattagcaacatgttattagaattttcagaaaagattt

SEQ ID NO: 95569 - DNA, 656 bp, Heterodera glycines
gttaccaatctgtaatggacccctaccttcaagaattaataaacaaatggttatgctgggacaagaatgaaacgactcgaacagaaattgaacgactcgtaaaagagaataatgtgcacgaattgcgacttcggatggttgggaaattgtcttttgggacggcaggagttcgaacgcacatggaggcgggctttgccagactgaacgaattgaccatcatccaactgtcccatggaatggcacggtatttgacaagtgaaatgggcgaagatggcaaaaagaaaggcgttgtgattggcttcgatggccgacatcagagcaaacgttttgccgaattggctgccaatgttttcgtgctgaacggactgtccgcctttctcttttccgccgtcgtccccacccctgtcgtttcgtttgccgtcgtttctttgggttgtgctgcgggcatcatgatcaccgcttctcacaatccgaaggaggacaacggcttcaaggcttattgggccaacggtgctcaaattctgagcccacacgacacggaaatttgtcgaattgtcgcggaggagtcaaagcccgaagaagcctattgggacacggtccaactcggcacaagtgcctttctccactcggccgactcggttttggagaaatatttt

SEQ ID NO: 95570 - DNA, 631 bp, Heterodera glycines
gtccatttgatttcatcgccgtcatccaccacaattcccctcccactcaatcgacggcactcaaatggcgaggacggcactttcgggttcggcgacgaggcagaggagcatcaccgacaattccaacagcaattgttttgccgtcgatgctgcaatactaggaacagaacaacagtgttccgctcgacagcggatgaatgcctcggcgatggcaaaaattagcttgcaaaagcaatgctttccgccggagtgctgctacacacaatgctccactgatgctccacaaaaatgtcatgatgataatgatgcccagaaagcttttgatgctgttcatctccgttccctcaactgcttcttctcctctttctgtcctccatttcggcactttcttccccccaaagtgctcctccgtctctgtctgctgttcctttttgctgtcggcggctgtccaattgtgcctggcggcgtctcggcaacggcacgttcacggcggacactcgttccgctcggcatggacaaacagatgttcccgcctcagatctttgacgaaaatgcgcccatttgcactgcggaaagggaaccgtgcggcttttacagtttttcgctggacggaaaagcgcccctcaaatgg

SEQ ID NO: 95571 - DNA, 499 bp, Heterodera glycines
agcacattcatacaaatataatacatacttatatttaattatttctgtttttctaaattggcttaatcaacaaatgtcgtctcccagtgccggaaaacgaagaatggacacggatgtgctgaaattgattgaatcgaaccatgaggtggtcatcaccggtggactgaatgaattcctggtaaaattttatggcccaaaaggaactgcttacgaaggcggagtttggcgagtaagggtcgatttgccggagaaatatcccttcaagtcaccttccattggcttcatgaacagaatttatcatccgaacattgatgaagcatccggcacagtttgtctggacgtgatcaaccaaagttggacagcactttatgatctttccaacattttcgagtcgttccttccccaactgttgacctatccgaacccagcggatccgctgaacggcgaagctgcttccctgtacatgcacaagccggacgaattcaaggcaaaatgcatg

SEQ ID NO: 95572 - DNA, 638 bp, Heterodera glycines
gtttgaggtccgttcatttttctgttcccaaaatgtcggctcttccgtcgccactgttggcttttgccacttcgattcgcttttgtacgtcgacgcgacaaaatctaaaaatcaaccaaaacacgaaggtggtcgtccaaggctttaccggcaaacagggcactttccacggccagcaaatgattgagtacggcacgaatgttgtggccggtgtgtcgccctcaaaagcgggcactgagcacttgggatagccgatatttgcaacagtcaaagatgcccggaaaaaaactggtgccgacgcttcagtgatttatgtgccggcgccctttgccgcggctgccatcgacgaagcgatcgacgccgaaatccctttggttgtgtgcatcaccgagggaatcccccaattggacatggtccgtgtcaagaaccgtcttctgaagcagaatcggactcagctgctcggccccaattgtccgggaatcattgcgcctggcgaatgcaaaattggcataatgccgggtcacatccacgaaaaaggcgttattggcatcgtttcgcgatcgggcacactcacttatgaggccgttcaacagaccactgagacgggccttggccaaactttgtgcgtgggcattggt

SEQ ID NO: 95573 - DNA, 530 bp, Heterodera glycines
agacagcaggacggatgacgacttttctgtgcttgcgcagttggtccatccggttgccgaaagggaagtgggttaacattcccacgccaggctagggaaatgacggttcgcaagagctgttttgcgcggtaacgcaaatgaactcgcagacgtcgtgtggagtccgagccagagttctcttttctggtttagggtgtgcgcttttgcacaaacaaatagtttaactaataaatgtccgctccgccgccgtacaacccgaacatgcaacagtacccgcagcagccacagccaaactacggtcagccgggctacggtggtggcggcggtggatacggttacccatcgcaaccgtacccacaacagccgaactcatatggtggtggtggctatcctcagcaacaacaaccgcagccacaagtcgtctatgtcgagcgcgaccgtccgcaacagcaagggagcaacaactgttgtctgtgggcattgttggcatgctgctgcggttgctgtttggcggagtgttgtgactgatc

SEQ ID NO: 95574 - DNA, 656 bp, Heterodera glycines
gctcacttccctcctaatttgtgcttccctttgtccaaatgaccctcattagcaaatgttcgcttctcctccttttcgtcgcgcccttttcccatgcgtttttctccggctttgaggtttctcccaacgcggcacgtctccgtcggcagtgcggttgcggcgggtgccctcctccgcccagcggcggtggctctgtccaactcggcatcagctgcgactcgccgcgccctccaccgccccctccgtgctgcggttgtcagtcgtcttgcggctgcggtggcggcggtggcggcggatgtggcggcggttgcggcggcggtgccattaaactgacaattggctgcgactccccacgccctccgcctccccctccgtgctgcggttgcgggtgcggctgcggcggcggatgtggtggtggcggttatggtgcaaatggcggcggcggctgcggcggttccattaagctgacaattggctgcgaaggcccaaaagccccgccaccgccccctccgtgctgcggttacgggtgcggctgcggttgcggcgggtgccctcctccccccagcggcggtggctctgtccaactcggcatcagctgcgactcccctccgccccctccgtcctgcggctgtcagccctcgggcggctgcggttgc

SEQ ID NO: 95575 - DNA, 1028 bp, Heterodera glycines
tgccctaccgggaccgggacctgagcttttcaaaacccgggaccgggaaccgggaccgcactgttggcggtgtgcttgacactgccaatgctgaagagttacgtgtcgaacgtgggcatgaaaatggactcagagctcagctcatgccagcacaatgccaaagacatttggtccgaagtcagtcagctgaaggggctgcctctgctggttttttgtaaccgtacggcgcgtagcgcatacggtagctgccaagagtgttgctccggtggtgcccaaggccagcccggccaacctggacagcctggacgacccggaaacccgggggcacccggctcaccaggacagcccggacaaaccccgcagacgccttgcgagcaagtgcacccgcctccatgcaccccgtgccctggcggtcagcccggtaacaatggcccacctggacccccgggagcgccaggagcacccggccagcccggcaccggaggaggacagccgcaacccggagagcccggcccacctggacccaatggccagcccggacaacccggacagcccggagcgcctggacagcccggacaacccgcaagcccaccgccaacggagcccgctcctgcaggcccacctggagaggctggtgcacctggacagcccggtcagcctggagcccctggacagcccggcgcggccggacagcccggcccgaagggacctcccggaggcccaggacagccaggcaatggcggagccccaggccagcccggccaacccggacagcctggaaaccccggagagcgcggaatctgtcccaaatactgtgccgtggacggcggagtgttcttcgaggacggcacacgaagacgttaagaaaagcgattctgatcagtggaagaagaaaaagcagaaaaacagcagcgattgccctcccctcccccggtgcccttctccgtccccatttcccactgcctttcttttccttcctttttttattttgtttagcttttccaattctcccaaattcccccccccct

SEQ ID NO: 95576 - DNA, 1045 bp, Heterodera glycines
atcagttgattattggtctgctcccttccccccgcctcccttcaattgcgccgtgtaatccatctgtttgttagagtaccgtcccctttttgcattacagaagccccctgtaccgtatcccctcgcttttcccactgaacgttcagttaattgcccagcattggatggccttggccaaaaagcattcttattgactgagtgctaatgcgaattgccaattcccctgagcccaaatcgcccgccaatttcgacgcccgcgccgtcaacgcccgacgcgactcgcttatctttctcaacgattggacttctctgtcggtgatttgtttcggcgtttgtgagttggaaattcgctgttcgtacgccgagaaaagccagtgaaaggcgcccgagcagagcccacggaacccccggcacagattgaaaacagaagtctcttctcctccgctgcttctcctctcccgccgatgtccgcttttcctcccgcgtgcaatccctcccacgcgcgtgccatcggcgaacgcgtgctcgccaaaatgggaaatatgccgcaaacggacgaaggcacaaaaaggcacgcccaaacgacgacaaattttgagacgccgacggaggccaaagaaacgtcttcgtcttttgcgcttttccgtccctccgattgtcccccgtcggccgattgtccgtcgcttaagccatcggtcggccaattgtccgtttcatggccaccggccggcgtctccgctcgcaatgctttggccgatgcgtttcgcggccttttgcccgcctctgtagccgctgccgtcgctccggtgagaacaccgacagccaattgaccaatactttgaggccaaccaagtgaaaatggtctattttcatccaacaaagagagtaacgaccaatcgatgattacagtaatcaaccacattacagtgaagggttcattacagtacagcattatacagtatacgcattaattcccttccctcgtgacaaacatttgtaatttggtactttatttaggaccaataaatcacaatcacttgtcaaa

SEQ ID NO: 95577 - DNA, 475 bp, Heterodera glycines
attggaagctgagaagaccgactgctgtctgtcaattgaggggacatgacgaacatgtgatcacgtgtctgaagctgcgaggcgacctcattgtcactgggtctgacgactgcactttgcgcgtttggtctgctgcgacgggaacgtgtgtccacgtccttaacggacacattggcggtgtttgggcacttcagctctcacaggatggcaaaattgctgtcagtggttccatcaaagtttgggacattgttgcgggtcaatgcattcgaactcttttcgggcacgtggctgcggttcgttgtgttaaatttgacggttcagtgattgtgtcgggtgcgtatgacaacaatatccacgtgtggaatgctgcggacggttcgttaatgcacgttttggaagggcacacgaacagagtctattcgatacattttgtgagtgagaggaaattgctcatttcgggaagtctcgacacaac

SEQ ID NO: 95578 - DNA, 1040 bp, Heterodera glycines
tagataactcatttgttaattattgctttttcacattggaaaaccttctttctgctctgtaccaaaatgccgggcatcaaaaggctcttcgacggcattctccgtttccgcaaaactcttcgtcccagcatggtcaaagaattcgagaaggtccgcgaccaccccgacccgagtgcgatgctgttcacctgcatggactcaaggttacaaccgtccaaatttatgggtgctcagatcggcgaattgtttgtcgtccgcaattccgccaatatggtgccggtggcaaaaagttttggcgattccggcggagaagtgtccgtcaccactgaaccagcagcactcgaattggcgattaggcgtggaaatgtccgacgagtggtcatttgtggacattccgattgcaaggcgatcaacacactttacgacctttaccatgggcgtccgtttgacgccgagtcgccgatggaccattggctgcgacggaacggacaccaaagtgtgcagaaattgacccaactgctgatggcggggcccggaacagagttggaattcgcatcggagaacggactgatggcattctgcgctcacattgaccgaacggaccaactgagcgcggtggacaaactgtcgcaaattaacacacttcagcagctgaccaacattgcgtcccacgagtttctgcgggaatacatcgtgaccaaaaaggtcggccttgatgcgatgtggttcgacattttcaatggcgaaatttacattttttcgcgaatgcaaaaactgtttttgcccatcgatgagaaaacgtcggccgatttattgcgggaggcgatcgggcaaattgaggaggaaaatgaaaacggaggcgaaaagcggagagagtgcagaaaggaacggcacggacgaacatgaggaaaagagagagaaattcattctttgctcataaaaccattattaattaattaatcgtagggtctgtgccgtggccaaacaccgagggccaaattacaaaaaggctgttataaataaatatagatcgaaaatgc

SEQ ID NO: 95579 - DNA, 1450 bp, Heterodera glycines
gggcactgcagcaagtgacggcgaagaaggcgcacttgctgttcgccacgtacttcagctccatcgcgaagaatgtgcaaattgtcaaagaccttcccgagggcactggcattcacattgacttagtccgtgcccccgagcagttggacccagtgttgtccgcgttgccagccaattgctttgtctctctgggtcttgtcgatgggcgaaatgtttggctgagtccgctgcgtcagtcatgccaatgcgttgcgcgttgtgcaaaaattggcaccgggacgcgtgttggtcagcagctcatgcagtctgttgcacgtgccatattcgaccaaaacggaaaagcgcagcgcagaaatgccaaaaacggtggccactggaatggcctcgtcgaagataatccattggctatcatttggcattgaaaagtgcgaacaattggtgaccgtcgccaaaatgataaacggcggagactgcgccaaagaattggcagagaacgacgcccttctcaaagaccattccgtatccccgttgatacacaacggaacagtgaaggaaagggtcaccgccattgaggcttctggcgttgagtcatacttccgtaagtcgccctatgagcagcgcattgtgcagcagaaggcgtgcctgcagctgccgcccctgcccaccaccaccatcggctcgttcccgcaaagtgcgacggtgcgcgcgatgcgtgccaaattcaaagcgcacaaaatggcggacgcggattattgggcatttatcaacgcggagacggagcggtgcattcggatgcaggaggacattggtttggatgtgcttgtccacggcgaattcgagcgcaatgacatggtcgaatatttcgctgaacatttgcacggcttttgcgtcacttccaacggatgggttcagtcctatgggtcgcgctgtgttaagccccccgtcctttacggcgacgtgcaaagggcgggtccaatgaccgtggcaatgaccaaatttgcgcaatcgttgaccaaaaagccggtgaagggaatgctgacggggccaatgaccattttgaagtggagctttgtgcgcaacgaccaaccgcagaaggacacccttttccaggttgcgttggcattgcgcgacgatgtggccgagttggagaaggagggcatcaattgcatccaaatggacgagccggcattccgcgagggattgccgttggacccggcacagcacaacgaataccttaagatcaccgtacaggcattcaaaatttccactggttgtgttgcggactccactcagatttattcccacatgtgctactccgactttggcgacattttcacgcacatcgccgagttggacgcggacgtcctttgcattgagtgctctcgctcggatttgagtctgctctcctgctttgaccgctttggctatccgttgatggtcggccccggca

SEQ ID NO: 95580 - DNA, 828 bp, Heterodera glycines
gacaaacttctcgtctgctacttggaggatgttaagaacgcgctctacgtgcactcactcgatgacgggcgtgagctttacaaactgccgttgccgatcgggtcggtgggcggtgtttttgcggaaaagtcaaagtccaaaatattcgtcggcttcgagtcgttcctcgtcccgttcatccttttccatggcgatttctcaaaatgtccgtcccgcgagtcgcctctccaactgactgagacccgtcgcgtgaatgtgcccgggttggactgtgatgcattcgactcgaagcaggttttctacccacgcgatgacggcacaaaaattccgatgttcattgtccaccgaaaaggcgtgaaattggatggcagtaacccggcaattctcaacggctatggcggcttcaacattgctcagactccatatttctccgttactcgcctgatgctcgctaaacattttggcattgtatcagtaattgcaaatattcggggtggaagcgaatatggggaaaaatggcacgaggcggggatgctcggccgtaagcagaacgttttcgacgacttcattgccgcggccgaatttctcatcagcgaaaaatacacgaacaacacgaagttggccatccatggcgggtccaacgggggattactgacggcagtctgctctcaacaacggccggacctcttcggggccgtcgtcacccgtgttggcgtccttgacatgttccgtttcaacaagttcaccgtcggcgctgcttggactaccgaatatggcgaccccgacaaaccggacgacttctccttcattcgcatgtactcgcccctt

SEQ ID NO: 95581 - DNA, 805 bp, Heterodera glycines
ttgagatttaaaataatacctaatggcttcagcagtgagagctttggaaggtaaaattgcagttgtgactggtgcttctcgtggtattggacgagggattgcgcttcaacttggtcaagctggtgctacggtttatgtcactggacgagctcctgccgcttcgtactctctgattgagaagggacttccatctttggaacaaacagcgaaggaaatcaaaagtcgtggaggagaagctcatcctgtgtattgtgaccacgcgaactctgacgacgttcgccgtttgtttaagcgcgttgaagaagaacagaacggccgactgcacattttggtgaacaatgcctattccggagtgcctagtctgattgaaaatgccgggaaaaagttttgggaatgcgaaccggagttttgggatgacatcaacgaggttgggctgcgcaacgtgtacttctgttcaacgcttgccgctcgtctgatggttccgcatgaggatggccttattgtgcacatcagttcggctgggggacttcaataccttttctcggttccttacggagttggcaaagcggcggttgaccgaatggcatccgacatgggactcgaactcaaatctcgcggagtggcagtgatctcactttggcctggttttgttcaaacggaaattacgacgatgggagaaaaggcggaacaatttgcttctgccgctcgcatgtcaatggatgcattcaatgcggcattgaaaggtgccgaaacccccgaatttgtgggcaaagccatcgttggtttggcgactgaccgccagcga

SEQ ID NO: 95582 - DNA, 476 bp, Heterodera glycines
gtttttgactcaaattacttgtcgcgcaaaatcacaagcacactcgatgcctgcattttggtgtcacaaatgtcgcagccgatgcatagcattggagcgctatgaggacggagtgcgttgtgggcgttgccacgagggattcattgaggaaatcgacgatattcaggaagaccattctcagcgttccgcgtccgattcaccgcagcaaacgccgccgccgcttgttttgcaggggcacgagaacccattcggcgcatttcccggctcaccgtttgctcggctcttccaactcatccacaacaatatttttcctaccaccaccgccgcggctgggaacgacggtcgtccaacggtgctcatccatcgccggtccgcaagcgaagggccgtccacggcgacccatcagccgcagcatcgccaggccgctgccacgccgccaccagtgccgatggatcagcagccgcacacgcaacgca

SEQ ID NO: 95583 - DNA, 690 bp, Heterodera glycines
gaaagaaggaacgcatttctctctgttcttttgccgtcccttctccgatttttccctcctccccatttattcatttctcctcccaatttcttcctcaaaatgccctcctccgttggcccctcttcctcttccgatttgctcatccgtcttttcctcctcctcgactcggccgttcactttgccctcggcgctttcctcttcttctgtccgtccacctgtgcccatttccttttgaaacgcccttcttccgatggcgtccattggcaccttttgcgctgcgtcggtggccaattgatggcctccgccactctctcgtggcgttgcgcctccccccgccgtctccccgagctgcgttcgtcctgtctgatgctccgtctcctcggcagcgttctcttcgtgttcctcttcctccacatccgtgctgttcatcccgatttgatgccatttcttgtgttgcgacaactcatctggttctgcttttccatgattgctttgtgtgttgcgctattaattgtttcgggatggccaatcggtgataagctttttgctgcgaaccgttggggcaatgtgctgtaccaaattgatacaatcgcttccattagcatcggaatggcgtgggtaatggccccgcaatggctgttgcacagacaagtgcgcgtgcccatggaccaatcgcacgaattctgtggc

SEQ ID NO: 95584 - DNA, 353 bp, Heterodera glycines
gcctttatgcggaaaacagtaaaattgccgattctttgttggctgctcacattgacaggagcaatcagaagggaacgatcaacttttgctgcattgcctccaaatgggaccatttgcgtgcgctcggcaccctccgcacgcggcccatttaccgtcggcacacgcgcgtggtgccgtccaacatcaaatatgagaagctgttcgccatgaatgttggcatcaacattttctgaacattgcgcaaaaaaagagggtgatcggaacagcagagatttgattgaacaatgaaaaaatcaaatgaacaaagtaaagtgatcagaaaagtttttattttaaattataaatgggtaaaa

SEQ ID NO: 95585 - DNA, 631 bp, Heterodera glycines
tgccgaaaaaataaactgaattaaattggatttatttttgaagctcttagtttgccatgaaaaagcttcttctctgtgtgtttctgctgcttcagtttctgctcgccaccgatgcgatttcagtgcaaagcgaagttggccaaccattttttgaccaacagagcgaatttggcacagtgccattgagcgaaatggaaaaacgtcgccgtaggcgcttttccaaactaaaagccgccgccttgggagcagctgccggattgggagccgccgtcattgccaaacacgcgggatgaagcggaacgacggaagggagtaaaagaaaggagccgaagatcaaaaaaataaattttattttgtaaattagatggatttgtaaatttgtttaaaattgcttaaatgagaatcttgagaattaacttcctcatttttggggtgctctcgtctcgcgtagtcaattaattctcgaactcaatcttgacttggtttgctttttgcctatgactccctctcgccgttttccgtaacccttcgttagcaaatgatccaatcttttgcggaattgtcgtcctcgtgtttcttgctcatctaattgctttgtttaattgctctaattaattaattgactatgaaa

SEQ ID NO: 95586 - DNA, 487 bp, Heterodera glycines
cactttggtgtttatcctttcccttctcattccttctgacattgtaaaataacaacaaaacaatcgcacggttcatttgtgactgccatattattgggcaagaaaatgaaacgaactttgaggaaaatttggatttgtaacgacgttttgatggacattctgccgttttttgaccatgctcaacttggtctcaaattggcactgatttcgcctcattttgatgcactggtggacacgcattttgatggcaaaagcgatttgacaatttggagaagaataacaatttggggcttcggcgaaccgaaaataattgtcgagcgcaaatcggaagaatttccattgccagaccgtccgctgcccagcaaaattcactttaaggaccttcacattcgcaacatttgctctcctgtctgtgaatttctccgttccaatcggcacatttttgacaaaggcatcaatttgcgtttggatatggatctgcctgcct

SEQ ID NO: 95587 - DNA, 901 bp, Heterodera glycines
tacacattgaaacgcactcaaacggaggcgcgagtgttttgcgctgcgattggcgtcgcttgaaacacgacctgagctctcaagaactcaacgaatttgctgaggaatttattgatttgggcctttctgaactcagcaaagtgccgttgttcgtcatgtgtgttgttgaacatggcattgaatatttggaagatcttctcgaataccttggcacaaaacattcaaatatgcccgtaaagatgggttctttgcacaataaacagttggtggaaactattcaaattggacattactacgagaaagtgatctcatcctataagcagggaacatatcgttgtggtccgttgaaggaaattactttggtcggcaaaaagcaagaagaatgtggcgcctatttcgagcacttaattgaacgattagaggaatgcccatttctgaggattttgctgccatggagtgaacggactatctgttctgataaaaggccatccgaatccgatgatggaccaatttattggtgtcgtcctggtgagcaactgatccgaacggacgaatcgaaattcgacgaaataaagtcaaaacagcacaggaggggaagtgctggcactaaacaaactaaaagtgccggaattccgttgaaggcgttggagcggagggaaattctctttgaagatcgcactccttgccatgccgaccatgtgacagacgaaaacaaagcacacacaactgcagcagttggccttctgcaggcagtcagaagccccacggaaaaaggcaaaatcggcgaccgattagtgaaagatgtgatttgcttccatgctgcagacttcaaaagggtgacagatattttgaagttggatttgtatgagccgccaatgtcccagtgcacccaatgggttga

SEQ ID NO: 95588 - DNA, 414 bp, Heterodera glycines
ctaaaatgcaagagactcacattgttctcgggattgcctcggtgtgctctctgttggctatcatcgccacagtcgtcactctgccatctctgtactcggagatgagccaaatgaacagcaaagtgcgcgacggagttgaggccttccgcgtcaacaccgactcggcctggactgacttgatggacgtgcaagtggtcgtgacgccgccgtcgaagccccgtgataaccccttcaaagcataagcgacaagcgcagggagaagagaaccgaaagacaaaggaccgacgcgaaagcgaagctgaagatgatcataattgggtggaagttgttgtcggaatttgtgttcaccagcgcatttcccacacgaataaagggcattcactccaaaatcaacgattaacataacattaaaaa

SEQ ID NO: 95589 - DNA, 463 bp, Heterodera glycines
ctttttttctttgccaaccatcgcttctctcacttctctaaatgtctcatcacactcaaatccaacaatacttttgccctccttcggcccctgctgtgacctattacaattacggcaacatcaccaacattgacctctcgccgcaacaagccgttccacagggctttcaacagcaagttcagctaactgcgccggcttatacggtggctcagtattggcacaacgtcccttcacaaaatggcggttatcaaatgccacaaaacaatggacaccacgcggctgcctattcgtcgggggatcacccgaaaatgggaaagcacaaaggcattgggaaacgttttcatccgcagaagcatcagcagcgcgcgtcggctccccacggaattcgacgcaacggaaagtactccgcgggtgccaccaccaaacagcagcaggcaaatgccgacgacactgaccatcagcc

SEQ ID NO: 95590 - DNA, 516 bp, Heterodera glycines
gtttgaggcctaatcttaaaaacctgctcattggtaaaaaatgaaatccttctttaatttcccatttgtcttttgtgttcttttgctcattggctgcgttgacaaatgcgtcggaggagtcgcggcattgccgccaaaatatttgggcattgaaaaccatgacaaatgcttaaccgacgagccaataggctcttcgcgccggctttgtttgccagcgcagaaaaaaatcgaatgccaagatgaaacgttgaaagcgcttaatgatttggaagaaggccaacatccgccgacttgcgcatgaatccgaagacagaagcgaaagaagcaaatgatgaaagggattgaagaatgacagggaaaagcctggctgaacaaaattttgtctacaaaaatgaaataaaaagttattgaaaataaaaaaatttattgatttgattgaaagaaaaaaggctgtattctattgaaattttcggcgcccaattattctgattcggcataaaaaatttccatttaaaa

SEQ ID NO: 95591 - DNA, 331 bp, Heterodera glycines
ctaggataaatcgcaccaaaactgcttgggaagacgcagttcgttctcgctctaatgaaaatgacaaacgtcagttgctcgagtcaattagggaccgtcttcaaaatgttttcgaagaaaccctgaaacacaaggctgttattgagaaattagaggagcgcgacaaacggatgggcaatatgttggaaagcgtagacaatattgaaaatctcaggaagtgaaccgacatagaatgtatgtagtattcccccacttcttatcccgatatcaccattattgcctcgttcactcctgatctctctacagtcaataaagcataaaacttatccgt

SEQ ID NO: 95592 - DNA, 480 bp, Heterodera glycines
ggagctccccgcggtggcggccgctctccaactagtggatcccccgggctgcagtaatccggcacgagggcgacattctgatcaagcgcggctatgctttcgttgagttggacgatcctcgtgatgctgatgacgcggtgtatgaccttaacggtcgctcaatgatgggaatgagagttgtggtcgaaatcgccaaaagtcgtccatggcgcagtggcgattcttggagttcacgccgtcgctcgcgttctcgttcgcgctctcgtggcaaacgctcgcgttcgcgaagtcgctctcgtgatcgcaaacgccgcagtcgtagtcgctcgctccgccgtcgctcacgttcgccaaaacggtctcgctcgcgctctgttgcgtcgcgctctgcaagcccgccggaaccaaaaaaagcgcgccacacgccctcacgtagtcgttcgcccgacaacaaacgtcttcgttcggcctctccccgtc

SEQ ID NO: 95593 - DNA, 480 bp, Heterodera glycines
gccacgtggtttgaatgctgcgcgctctctgagcaaccgccgtcgtgatcagcgttgggctgacaagcagtacaagaagcgtgctctcggcactgccttcaagtcgtcgccctttgccggtgcctcgcacgccaagggcatcgtccttgagaagattggtgttgaggccaagcagcccaactctgccattcgcaagtgtgtccgtgtccagctcatcaagaacggcaagaagatcaccgctttcgtgcccaacgatggttgcttgaactacatcgatgagaacgatgaggttcttgttgccggtttcggccgtaagggtcgcgccgtcggtgatattcccggtgtccgcttcaaggtcgtcaaggtctctggtgtgtcgctccttgccttgtacaaggagaagaaggagaagcctcgttcgtaagaagttttgcttgccacgctcgccgctctcaactgcttgcttttgcgcgtgtgctt

SEQ ID NO: 95594 - DNA, 271 bp, Heterodera glycines
gcaaaagagtcggcttcaaagagccgcacacggggcttgtgaaaaatgatttcttcgggtattggtacttacaatattgccttgtgaccggtctttacatgttggagccgtgggagaggaaaatgttcaatgtttttgtcacgggtttcattgccgttttatgcagtgccttttatgccttgtggaatgcgttgattaattaatttaattttttaaaagcgtaaatttatttatactgccaattttatttatttaataaagagtcaaaagc

SEQ ID NO: 95595 - DNA, 1190 bp, Heterodera glycines
caattaagaaaaatggttatttctcaaattgctaaaacactatggtcacacattaaagaagagcatttttgcagttattgctacggcttacggggcgaacgctttaagggcacgtttaagagatgaccgaattcgatacagttttgcagaacgagcccgtaaatatggtctggtaagttttgggcccgcccagcgacttcgccgtgtcactgttttggtcaatcgcgagtcgggcggacgacgggcggccgacctttttttgcgcaatgcacttcccctgctcaatttggccgggctgcaagtgaatgttgtggaggtctcttccgcttctgaattggaatcgctgtgccgcgtgttggacaattctgaggccgactgcatatttttggttggcggtgatggcactttgagtagggcactcgtcggattgagccaaaacagtgcgccattgccaattggtttattccctggtggtcgaaaaaacattgcattttggagaatttttcaatcaaaaaaccagaacagagattcgatggatttgaatgaccaagactcaaaatcagtgcgaatgttttgcgaaagtgcaatggcactgattgagggtgaaaatcgactcgtttatccagtcaaatgctcaatagctgaagaaatgaatgactcgccttccgaccatcaaacggtcaacactcccaacactttttggctgctttccgacctttgtgcgggatggttcgaacattgtgaacaaaaggcacccaaactttggtggtgggggcctctgcgctacaaatttgtgtatttttgggaatttttaaagcgaaaaccaatccctttggaccttcgaatttcttacgaagagttttgccccggttgtaatcgttgcgtgacgcccgtaaaacagaaaaacttgacaactttgtggtcatttttctctcatcttctgtggtcatctcctcccgacagcacaaaaatcaaagtaaattcggactttgcgttggttgaaaatccaaactgtggccagagacgggaggccaatgtcagtggtgccaatgttcgtctgaacgtcgaacagaccgaaaatggcagcaaactcaaactgcgagttggcggcgcgggggacgcattcggacgatgggcggcaatgcgtttcggatggaattccgtgggagtcgcaaacggagagagtaaac

SEQ ID NO: 95596 - DNA, 635 bp, Heterodera glycines
gttctttcccgtgttttgagctgttcaaagtaatgctcgaccaaactccgtccacttcgtcgacggcagtcacttacgccaatctgagcatcgatgaccgagacactctgatgaaaaatctgcagaaattgttcaaaacgcatcaccaagaacaaaatgtgacaaatgatcaacagcccgggagcagtacatccaaagggaccgactcgaggacaatgaaaaccgccgcgaggggacaaaccgagtttccgtttttcactccacgagacagcagatattccacgctgaagtcgacggttgtggatggaaaggccttaggctgttttatcattggcggagaatgtcgcttgagcttcccacaaatgcgggcgttgtgtcttggtgaaattccaacccaaaaaattgacgaatcaatgaaattgttggccattgtaaacgcattggccaccgaagaccaactcactgtgctgaagagggccgggttgggccaaccatcactgtcaaagtgcgaattgatcaccaaaaccaatgcagaaagactcatttccctgttgaattccactggcacttctccaattgacgaggttcagcggtcgcaattgcattcgtttagggtagttcacgactgttttggc

SEQ ID NO: 95597 - DNA, 460 bp, Heterodera glycines
aaagctggagctccccgcggtggcggccgctctccaactagtggatcccccgggctgcaggaattcggcacgagggtttgagggcacaatgcaccgcttctcttccacctgttgatgaggcaacacacttcattctcccggcttccggccgccgacagcatttcccaacaaaaccaacaccaacaacagcaggacatcaacaacaacaatgccgtagtcgatgataatgatgttgaagccgaagatgaagcggcagcagcggaaatgccgggggcgccggcggcgacggcacagcagcgctgggaggactcaaccggcggcggcgacgatggcatggaggaacagcgacgggacggaaatggcggggacgaagaggaggtcgccggcgatgaacaacaacagttacaacaacgacgacaacagatgttcaagcggaagttgttgttggcgcaggacaacg

SEQ ID NO: 95598 - DNA, 506 bp, Heterodera glycines
ctctgccatgcaccaccgctcactctaagcacaagcacaagcacaagcacaagcgccccaaccaaccatgtcctcaaccctcccgacctcgtcatccaccggcaccaccacctcggccgcgccgcttcccgcggccctgctagccgacctgacctcggccatcccgcactcgccgccgccacccgtgacccccgcgaccttactcgcgacccgcatctcccagcccttttacgcatccgtcagcacgacccgccggtcgggcaccactgccgcgcacgcgctggccctgtcgcacgtctcggaaacggcccagtttgtcgtcggatacacgtcgcgcaatgcgcccattctcaacgacctcaagggatctaacgcggccgaggtgctgctgtcctcgccgccgcccggcacgtcgctggcacgcggccaagtcccgaaagtcatccgcatcgaagctaaatgctacctggcgtgctcgccgcagttgctcatgcggtttccgccac

SEQ ID NO: 95599 - DNA, 680 bp, Heterodera glycines
aattaagagctattacaactgcacaattcgactatttgtttaaaaacgccattttaaacgccaaattttcgcggaaaagtgacggcactcattcacttttactcattcttcccacattcacttcacttcactcatccatttgacctgtgacctttgcgctgtgtgatggacgttgacggtgctgcgcaggatgagatggttacggatggtcccggttacattgccaactgtccgaccggcagcatggcccagcagagcagcaacaacggcggcgggagcagtacaagcagcagcagcggcggtgggaacggtgccggagggaacagtgcggtcggctcctcccaccagcagtaccggtccatgtcgccgctgagcggcctgggcatggcggccgcttcttcagcttctggcaccagcagcacgtcctcctcctcctcgtcgtcctcctcctcagtgattccgctggacattggcctgggcatgttgccgattgcggagaattggtgcaacacgcaggtcaaggtggtcaagtttaactacatgtggacgattaacaacttttctttttgtcgcgaggaaatgggcgaagttttgaagagttcgacgttcagtgccggcccgaaacaaaactgaaaaggtgcctgggcatcaaaccgaaagggctcgaacaagaatccaag

SEQ ID NO: 95600 - DNA, 291 bp, Heterodera glycines
gtttgagtaactcacattccttgcgcgactgaatggctctgactgtgtatttgcccagcaaaaaggtggagaagcaaagggacagcgcgagagatccgtactgaagaagagaaagggaaaaacggacgagcagagaaagaagggacgaaagtgcggagaacagagaaccaattttgcccatttgggtgaagaagaaagtgtaaatcgtagtaacaaagcgaagaatggaaggaatgaattaatctgctgatttggaaaagttgggtgaaattggtaataaaaaacagaagc

SEQ ID NO: 95601 - DNA, 475 bp, Heterodera glycines
caaccgaccaatttcgcctttcaaaaatcggaattgctcagaatgaaggagcaagcagaacaaagcggcgatgtcgcgagggtgcgcgacttgcagcagcaagtcaacgaattggaagagaaggccaagaaaattgaacaccaaagaacgaagaacttaagtgccatcagtgccatcaaccagcggaatagggaccatatgaaacaaacattccttggtgccggaatggtgcgggaagagcaggagaaggacgacgacccattcacacggaagtcggcgcggatgaaagtggtctcgggatccgtgaagtccaaaaccgccggcgaaggaagtggcgccaatgccgagttatccgttatggacacgatggtttcttcgttgggttcgttgtcgtcttcgtcggagtcctctccaaacaaaaaagtgcaacttccctcaactcacgatttattcaacgcacatggaatcgacataa

SEQ ID NO: 95602 - DNA, 503 bp, Heterodera glycines
gccgaattcagccctaaaagcatccttttatattaaatcagcaaataaattaggaaaatggtgtcagtgaatggacgaaaggtgaaaattgtgaagaagcggacgaaccgtttcactcgtcacgagtcggaccggtacctccgcgtcaaacccaactggcgtaaaccgaagggcattgacaaccgtgttcgacgccgcttcaagggccaacgacggatgccgaagattggctacggtaatgctcgacagacccggcacatgttgcccaacggattgaggaaggtgttggtgcacaatgtcaaggacctggacgtgttgttgatgcagaacaaacgctattgcggtgagattggccacgcggtgtccagcaaaaagcgcaagcaaattgtggagcgtgcccaacagttgcgcattgtgctcaccaacggaaatgcccgactgcgcaccgaagaaaatgaatagacggcgacgaacagacggaacaagaagaactgtcgaaattt

SEQ ID NO: 95603 - DNA, 415 bp, Heterodera glycines
ggcactgattcgaccaataacggacattacactgacaatttgaacattgcggcgcctggcgttgttactcagcatgtgtgcaaggcgtccaacctcaaccagttccagctgagtcagatcaattcgctgcacccggacactggcgttgtcggcgtttatctgtcgaccgaagggaccaaagttctcccatttgtcaaagccgctgcccagggcttacgcgaaatggcatccaaaccgatcagtgacgagcttctccaggcttgcaaattgttggccaagggaaccgcactgacacccgacgaattcattgcccttctgaagacagtgactgcggacgatgtgaaaaaggctgcttccccaactttgcgccaaagcccatacttggcaggcgaggttcaccaggccgggcccaccg

SEQ ID NO: 95604 - DNA, 397 bp, Heterodera glycines
ggaagttaaacataaatttgtgcttttttgctgtttggataattactacaaaatttgttgatgttatcattttggtaattttcaatgatttttgccccttttctcttcgttttgttcctttttggctccaatgaattaaacttattattggtggacagcagcagaaacattggaccaccagaagcaggcgaaagttgcgggtgcgcagataaacagcccgggactcttctgttggtgtgcattatcaaatgccgggacgaattggtgaaaaatgtcgaaaaaaagaacaatggatgattaaagtgaagacggataaataaagtatttaattagccaagttattaattatgcatttcaattaatttaatacgcaatttaataaataaaaattcatttt

SEQ ID NO: 95605 - DNA, 479 bp, Heterodera glycines
agaaaaggaaacatagtaaaaagattaattcttgttggagacctgacatttcactatgtttcccagaccatccacgtctttcccaaagatattgaacaggaccaaattgtgccaagcttctgtggtcggctcgaaccggacaatgtcgtccagcgacaaactgcagcagcaaaaggtgctcaccgtggacacgatcaaccccaacgttatcaccatggaatacgcagtccgtggcccaattgttatccgtgcggttgaattggagaagcagttggcgaaagagtcgttgccgttccccagcgtgatcagagcgaacattggcgacgcacatgccatgggacagacgccgatcactttcattcgccaagtgattgccggcattacggagcccgcactgatcaagcaacagcccaacctgttcccggaggacgtgcagcgcaaggtggcctcactgttgcgcgcctgcggtggcggcagtg

SEQ ID NO: 95606 - DNA, 513 bp, Heterodera glycines
ttgagcaattttacttccatttggttagcaaaactaattataagacgcaaacaaaaaatgccagtgaaaatcgaaacactcaaagcgggagatgaagcgacttacccagcggttggtcgaaaggtcgtttgtcattacgtactgactttggaaaatggccagaaaattgacagctctcgcgaccgcggaaaaccattcgaattcactattgggaagggcgaagtgatcaaaggatgggacgaaggcgtggccaaaatgtcagtcggtcagcgggcgaagctgaccatcagcccggacatgggctacggagccaaaggaatccccggaacgatcccagggaattcgacgctcatcttcgacgtggaattgatagccgtaaaataatggagagaaatgacagtgatgaggggaaggaccgactcaattgagccgcgcatttgcattaaatgtttaggatttcattccgtttttctttgtgttcactaagtaaatgggctttcgagtgttaaaaaa

SEQ ID NO: 95607 - DNA, 655 bp, Heterodera glycines
gtttttcagatgatgtttttccaattgtcatcctcagcaccaacatcatcttccgtcgatgggccacagcagttttttcaacaccaccaccaccaccaccaatttgtcccatcgatctcaccactgttcgacacctccggcgccggcatgttgggcacgttggcggcacccaccactgcctcaatcttcatgccgtccttgttcggcggctgcggcggggccgccgccggtgatggcaccatcaccgccgctggctcgctgatgcaaagtttgttgagcgcggcagtctgcagcggcgcattcccgttggtcggcacgactgttgcagcctcaccgctgactgctaccacctctcaacatcgcaaattgttcataggcgggctcagccatgagacgacggatgaacagttacgtgattactactccaaatggggcaaagtcattgactgcattgtgatcagggaccctgtgacgaggcaatccagaggctttggctttgtaacatatgcaacaattgagatggccgactccgcgatggcagaccgtccccacacaatagctggcaaggtggttgatccaaagcgtgcaattccgcgcgagcaaatgctgcacgcgaccagctgtccacccgcctttctcgacgttgagcccccct

SEQ ID NO: 95608 - DNA, 1265 bp, Heterodera glycines
attatttgaaataaaccaaaatggctgtccctcaggaagtaattgacaaaattgaggctggctacaaaaagcttcaggcggcggctgattgcaaatcgttgttgaagaagtacctcaccaaggacgtcgtcgatgcatgcaaggacaagcgtaccaagctcggagcgactttcttggacgtcatccagtcgggggttgccaacttggacagtggtgtcggcgtgtatgcgccagatgccgaggcttacacactcttcaaaccattgttcgacccgatcatcaacgactatcatggtggctttggaccgagcagcaagcaaccggcaacggaccttggtgaggggaagactcaactgctgactgacttggacccggaagggaaattcatcaattcgactcgcgttcgctgcggccgctctcttcaggggtatccattcaacccatgcttgaccaaggagaattacgtcgagatggaatcaaaggtcaaagcggtcttcgagcagctgaagagcgatgccgagttgggaggcacctactatccgctccagggcatgaccaaggacgtccaaaatcagctgattggccgaccacttcttgtttaaagagggcgaccgttttctgcaggaggccaatgcttgccgttattggcccaccggacgctggaattttccataacgccaagaaaacctttttggtgtgggtcaacgaggaagatcacctccgtatcatttcgatgcaaaatggcggcaatgttggacaagtgctggagcgtctcataaagggagtcaaggccatcgaatcgaaagttccgttttcgcgtgacgaccgtcttggctggctgactttctgtcctaccaacttgggaacgactgttcgcgcgagtgtgcatatccgacttccgaagatcagcgcaaaacccgacttcaagtccatctgccgacggccctgaaattgcaaatcccgcgggattcacggcgaacattccgagagcgctgggcggcgtttacgacatcagccaacaaggcccgtcttgggtctcacggagttcgaagcggtgaagcagatgtacgacggagtgaaacacctgatcgaattggagaagaaagcataatgggaggaccgatctatgatgatgactttatattgcgtaatgtggagatttgctagttgttctgaatctcttaggctttaactatttaattattgtcccaaaatcgtgcttcatccgtatgattatttccgtgcataaatttgttcgtgttcaa

SEQ ID NO: 95609 - DNA, 623 bp, Heterodera glycines
gtttgaggcaaggtcgaaaatattgttttattatggcaaatgaattaatttctcccacacctccggacattgagaacatttttaaaagactacgagcgaatccatccaacaaagtctgttttgactgtggtgctcgaaacccaacgtggtcttcagtcacatacggtgttttcatttgcatcgattgctcttctgtccaccgtaacctcggagtccatttgtccttcgtccgttccaccaatttggacacaaattggtcatggattcagcttcgtgccatgcaaatcggaggaaatgcaaatgcggtggctttcttcaagcagcacggatgcgagtcgaatgatgcgcaagtgaaatatcacagcaaagctgctgcgatgtataaaggtcgcatcatcgacttggcaacgaaggcgcagcaacaagcgggtagcaatatatttttcgatgctttgaaggaacaacaatcgccacaatcaaaaggtccgaatgaatccgaattttttggatcacatgaaactgaagagcataccaaagaaatgaaagaggcgtcgctttccgaaattccacacgcgcccatccaaaaaacgaagaaaataacgcttggccaaaagaaaggcggc

SEQ ID NO: 95610 - DNA, 621 bp, Heterodera glycines
caattaagatgggtctccttttcatggctcgtattaattattttcgtgctttttcttcaactgtttcaagatctttcaagcaggtaaagcataccgtccaggacaatgttacaaccattgaattagtcgatgttcctattgcgtcaactcatagagaattgaaggaatctgctgctactcaatctaaaactccggatgactgttcttgtgttttatgcaaaattccaacaagcatttcctacaaagatgtgcttattctggaacaattcatgcgattggacggcactgttttcccaagacaattaactggtctttgccatgaccagcaacaacgacttgagcggtgtgtgatgcaagcgcattggtcgggacttttcccggatcggactataccggaatttgaccgtgctgggtacaagcgattcaaccgacattgggacgacgatttggcaatgtttcggctgaagtacaaattgcaccctggcagttggttttacatcaaacggtacaatccacgaattcgagagtaccgcccattcaaagccgacgaaattcctgacattgagagagagtgatttattgtgaattctctttatttcatttgataaacgtaaacggatt

SEQ ID NO: 95611 - DNA, 816 bp, Heterodera glycines
gtaattctacgtgtgtggttttttatgaatttaacctcactcatttgcttctttgactttttgccctgaaaaaatgagtcaaatttaaaagttgttttcggtcaatcatgatgagatacctatatatgaaattatgctcaaaagcaacattctttgtgttgaagtttttaaagttaaattttgttgccgaatggacattggcaactgttgcatttgcctgggtgggttcggcgttgcacagatgggcgtgctgccgtgcctgcacactttccaccactcatgcattcagcgcgcactgggccaaaatgcgcagtgtccgctttgccgtcggcacgccatcgacacgcaaattgtgagaccgaaatacgaaggaagctgccgcgaggcgggcgatttgccaagaaaggccatgcgtgccgcgttagctttttacgaccgcaccgttcgccaccgcttcgccgatggttcgtcgggaggcgaagcacagcgcgaggaattgaaactttgtctcaattcattggtcagcactttggagagcgctgacgcggagagagaggcgaaatgggaacggctgaagcaatttttgagggtgtgcggaacggccgcaatttttgccgttttggcatttctgttcactttgtattggccgttgatctcttctctggcggttggcgttgtgcgcaccgtttggactctgatcagttctctgcgcgatctgttggtcgcccattggcccgatttgctcttcggcggtttgctcctcagcactttcgtcgacatggaatcctccgactcgcagcaacagcaggcggaaac

SEQ ID NO: 95612 - DNA, 356 bp, Heterodera glycines
  unsure (1)..(356): unsure at all n locations
cgttcatctgctgttgatgctcgtgagcgctgttgtgttcatcatcttcagccaatgctgcggttgctgtaagaaaaagagaacgattcaaagtatgagacattggccagtttggatgcaaacatctttgtgaagtccggatcaccacaaccagcgccaaatgaattccagtcaaaggtggccggctccaaattctcaccgaatcctaatccacaacaggcaaaggctgggggatcgcaattcgctccgagtaagagcaacaaccgcaacaactcggtccgggcaaagagcaatgtttttgtgttccatccaaatgcatttctgtccccattttcagtaaaagattcaaagtatcn

SEQ ID NO: 95613 - DNA, 660 bp, Heterodera glycines
gttttaatttgacaaatttaatattttaactaagccaccaaaaatgcgtttgtcatttctccgtgccagcgagaaacattttggcaatttgtcgaaggtctgttttattatttggtctatatgtctatttgcatggagaattcttataagtcataaccatgactgtattatcaaagcaattcaagctcatttcatgtagactcgaaatgcattcaacattttgattaagtccaaaaagttcactgtcatttagactattaaaaattaatccacgggatgcaattttctattgttttaggcttacggttggtattacgttcgcattgctccggttgaacagaaagtatggaagggctttttctttgatgcgtttgttaagccggtcaaagagcagttgccccactggtggatgttcttcttccccgtagtcacttactttttggtcaccgactgggccaagaaagagtaccgtcgtctgggacggatcaaagaattcactgacgaagaatgaatgtcgaattggccattcggactgttatttgtaggaaagaccaccgagtcgacagaatataaatcgaaatgttttggtactgtcaaattgtgtgttatgtccaaataaatttattagtgttgaaattccaacagtttttggaaagcacc

SEQ ID NO: 95614 - DNA, 478 bp, Heterodera glycines
gccttctttcacgcggaagttgagaagcggcggcaatgcgttcgcgaaaggccgacgccgcgcaagacggccagctcatgggttcagacgcagtcgctgctgaagcggtcgctgattgacaattggcgaaaccccggcctcacccgagccaaactcttccagaagctcatcatgggcgtgttcatcggactgttgtacatgaacacacagttgaacggtgtcggcgttggcaatttgaacggggccatgttttatatcatcgctgaactgacctactccacgctgttcggtgtgctcacctttttccccgccgactttccgctgctcgcccgggagtaccacgacggattgtactgctcgggcgcctattttgtcgctcggtccgcctcctatttgccgctgttcaccatcgacggcattctgatggtgaccattgcctattggctgatcggactggtgcccaccgtgggccgctttc

SEQ ID NO: 95615 - DNA, 632 bp, Heterodera glycines
gtttgagctctcatccgacacaatcatccttcttttgccaataattccaccactttcctaatggtttccacgtccccatccccaccaattgccatggcccaacatgcgccactttctcatcgccaacatcgcgccccgttggccaaagtgttggcctcggaaaaaagtctctatctatcgatgaacgcgataaaaacaccaaaaaaggcgaaaatgcagaaagttgccccaattcgagcccaaatcggcgaccattccgaatggattccgttgcgcgcctcgaaacattcgcgccaaacggtgaatccgatccgtcgcttcaccgattcgctgtccgttgaaccaaatccgaacaaaactccaatccaactgaaccttggcgaccccactctgaccggttgcttgccgccctcggagtccgtcgtggccgctcttcgggaggcgatcgattcgcatcgcttcgacggctatggcccggcgattggaacgcaaagtgccagagaagcaatcgcagagcatttttcttgctccgaggcgccgatttcggccaatgacgttgtgttggccagcggatgctcgcatgcgcttgaaatggcattgtggcgatcgccgacccgggccacaatattttg

SEQ ID NO: 95616 - DNA, 528 bp, Heterodera glycines
gaactagtggatcccccgggctgcaggaattcggcacgaggaataagctgactaataatgtcgctgcttttttcgcttttcagttctctcgtgtcggatttgttgaagggtctgatgaaattattacttttcttcgagcagtgggcagggcagtgccaatatggtgccgagaaaacagtgaccttcgtgggcgtgtcactccgctcatttgtatgtccatcgaacaaccgttgggtgagcattttagaaagaagagagctgaaaacccgacgaaataatcttctcattttttcaattgtattgctgctttggacatttcagtctttttgctacgattcctttcaaatatcaaaattgtcacccaaaattctcaaacataaactgttttcaaactgatgataaccaatcaaagacaaaaagaaatgtccctcgagggggggcccggtacccaattcgccctatagtgagtcgtattacaattcactggccgtcgttttacaacgtcgtgactgggaaaaccctggcgtt

SEQ ID NO: 95617 - DNA, 616 bp, Heterodera glycines
attcggtagaaaacccccaaatagggaccggagaagacagtgctaacgcacttggtaatggtcagaatcgcaggatgagagacaaatgcataccgttgacctgtctcaacggttcatcgactcacttccctcttctttttttctgggtgaacatgcaacttacaaagaccatgccgccatttcactgcttaatttggctcacaaccattttgtcactgtccccccgttggtggcacagttcatcaatctgatcagcctcgatataagcaacaatcacttggcattgttgccaaaagagatctcttcgttgaaaaaccttcgcgaactttcacttagaaacaatttgctagagaatttgcctaaagaatttcaacgactgcaatgtctacgggaattgaacatttccggcaatttgttggagcatttcccgcgagaactgctccaaatcaaatctctccgtgtgctttatttgggtgccaatcgtctacagtcttttccgtcggacatatgccgtttgtccaaccttcaagtgctttacctgggtggaaatgcgttagtcgatgtgccggatacaatcgggcagctgtcagagttaacttcgcttggtttggcggac

SEQ ID NO: 95618 - DNA, 295 bp, Heterodera glycines
  unsure (1)..(295): unsure at all n locations
ccaagtttgagtttgctaaataaaatggttaacgtgaagaagggcaccgtcattcgttgtgacccggcaatgcgacagttcctgaagcatttggacgagacacgggctctgggcaggccgttcatcgtcaaggaccttgacgagttttgtttgttcgtggagcgtgacattgtgccaatgttggagcagagaatggatgcccttatggatgctttaacacccgacactcaaacataaaacccacaattttttgtttctcatttcctcaaatatttattgaaaaatttaattcgcn

SEQ ID NO: 95619 - DNA, 373 bp, Heterodera glycines
caagtttgagagtgatgcaaaattctatctacatcaaccccgatatcgaaaacaactacaaccgggctgtgccaccggctccgaacaacgcggttgctgtgccaccggctccgaacaacgcggttgctgtgccaccgcctccgaacaacccggttgctgtgccaccgcctccgaacgatccgaatcgaggcggctttgacgacacggtgtcgttgcttgggactcacccggtgccgcgtcattagaaaggagatgcgccggtgattcgtgtaatttcatcgtgtggatgaattgatgggcccacgtttgattattggatcatcataaatgattgtaaatcttgtgtttaaaaaaaataaatcgaagtaggccg

SEQ ID NO: 95620 - DNA, 613 bp, Heterodera glycines
cctcgtgccgaattcggcacgaggtctaaaaacaaaaagctggctaaaattgatgaaatcgtcctgagccttgttctcccatttcaattttgtgatactttgacgcgtttctgtcaagggatgaccatctataacctctatttcttcaaccggcacggcgtttgtttggcctacaaagaatggtgccgtgaaaaaaagtcgggcatttcaccggacgaagagcttaaactcgtaaatggcatgttgctttcgttgcgttctttctcgcataaattggcaactcgggcggaccaagtgccaatgatttcctgcttccgaacttcgtcctacaaaatgaattacatggagacggccactggacttaaaatgatattgaacactgaccctgacgccgtttcaattcccgaacttctacagtccatcttttgcgtgtttgttgagactgttctcaaaaacccattcgtggacacatccaaaagaatcgactcagaactgttcaacaaaagggtcgacgaattggtgcgggctcatttttgtttcacataaaatacatattcgatttagcacaaattgcttttatttccattgacttttttctgcataaaatttcgac

SEQ ID NO: 95621 - DNA, 634 bp, Heterodera glycines
cctcgtgccgaattcggcacgaggattccgcttgccaatccgatgaacaaatggcgcttggacctttgtgggtccgccgggtcgcggacgttgatgctgagaagtgcagcagctgaccagagtctgaacccgcctggttataatcccggactgagcactacacaacaaaatgaatcggcgaacagagccgagcaacagcagcagcatttgttgagcaaaagggcgtgggatttggccctgcagccggtgaaatccttgccgatgaatatgctgccctttaggtttatgatgtacatggcgggcaacacaatctccattttcccaattatgatggtcgtaatgatggcgtggagaccgatgaaaactttgatgtcagtcaatgctgcttttaaaccgctggagcaagagcatgtcggctcactttggatccacaaaattgtttttgccttggggaatttatgcgcaattgcattggccgtgtacaaatgtcacacgatgggtcttctcccaaaccatgcttccgactggctcgattttgttcctcccctcgaaagagctcaatatgcactgtttaatgacatctaataaaaccctttgattgtttttaaatcgatttttctccataaatatttta

SEQ ID NO: 95622 - DNA, 474 bp, Heterodera glycines
ctgagattcactcttttgaagaagcttttgtccacaacaaacgcttcaaagagttcgaaggattactcaaaacgaatcacaaagttagaaaaagaaaaggaaaaaagaaaggaaaaagttacagacttacgaaagtgtcgaagcgaaattcgacctgcaaaaaatcgaaaaaatgagcactttgacgaatcgactgaacaaattggcggatcatttgggggaaattggccatttgcattttgaaaagggtgatcttaatgcaatggatttggaggagaagccaatgttcgaaattgttcggcttgcggaacaaaaacagcacgaaattgaagaaggacgaaggaatggcaaatcgaaagcggagaaagtgaccgaagcgatggcaaatgaatgattttcagtcatttgtttgagttcatttttaatacctttgaatgggtttctgttcgaatgtctgtctggtcaaaatattat

SEQ ID NO: 95623 - DNA, 984 bp, Heterodera glycines
gtccaattaagttaacaacagatttttgctttttgacacacaaatcaattggaaaaagggaaaagcgtgctaattgaaccaccaaaatgaatcgacgttggatttgtggtgatgtgtggatggacattctgccatcttttgaccgtcctgaacttggtctcaaaatggcattgctttccgaccgtttcgatgttttggtggacacgcatttcgatggaaaaaacgaattgacaatttggagaacaatcaatattagcaaggacaaaggaccaaaagcgaaactgtctgtggagatcggtgccaaatttgtggcatttccattgccgaaccattcgctgccaaacaaaatctgctttaaggaccttcggattgactacattgaccattctgtgttcgcatttctccgttccaacaagccaatttgggacagaatgggcaccaaattggaagtgtttgtgcatgcaattgatacggatgtccaaccgatttgggatgtttttgtccgtgaaatttggcccatttttgcgacaaacattcggcatttgagctttgccggtgccgatgctttggacaatttgcgtcgccgcatttcaccgacacttctcactgatcttgttcaattgtattcaatcacttcctatggactgtgccccgatggaatttctgacgatgggccaaatgcaactgccggccaagcgttgtccaaatggttgcacacgccgagcaaaaatggaaaagcgaatgaattgtattgctgtgcttatttttgtgaaataacatggatcaacactttcaaggagacatttctccgtgccaccacttctgtcgcttacaatgttcggcttgaacttctagtggctaacgaaatgaatactgttgaacaatttgagttggtgaacgaaatgacccaagaaaagttgacactgacgaaggacgaagagatttgtctgttgaaacggtgtccaattgttggggagacggcgg

SEQ ID NO: 95624 - DNA, 726 bp, Heterodera glycines
taagaatcgggcagcaactttttaaatttgcacaaaataattttcacattaaatgacgtcagaaaaagaaatgctgtgggacaaggcgtgtcttctcacgcggttggtcgcctcgtcggtgcgactgtccgaagcggcgggcggaattattaaggacataatgaaaagtggcgacctgaaaattgtgaacaaagaccaaacaggacaaatgaaggatttgcaaaccgaggccgatcgttcagctcaaatttgcattgaacggtcactgcgtggcgaaattcggcgaaaatcttacgattattggcgaggaagacattgcgcccccatcgacgccctttcaaacgcttcaacctttgccatcttcacatcattttcacattatcttcaatgagaatgccaccacggcggtgccgtcttcggaagtgctgagcaacgacgaaagagtgcccaacgaattgcgcagcatcgaaatgaaagacgtcgtcgtttaggtcgatccgttggacggcacttccgaatttacaaagtcaaaagaaaacccggcgctcctccgccaagtcactgtgctcattggcatcactcacaaaggccgaccggtggccggcattgttcatcagccgtattatgagggacaacaaacggctgacggattggcaccgaacggtcgcaccatttggtcgattgtcggagttggtacttttggccatcagaaaacggcacaacaaa

SEQ ID NO: 95625 - DNA, 447 bp, Heterodera glycines
atctcttactcctgtattattcgatcttcatctactcattttgtacctcgtgctgcagtgtaagtggcctatgcccttctgtgatttaatacagacaaaaaaacgctcacgttcatgttagcgcataaatttgaccaaaaatgagcaacccaattaaaattgtgcgaattgttgagattattgaagcagacgaagctgctgggcaacctaagcaagtggtggctgagtatgtggacggtacgggcagacgagttaccatgaaagcaagcggagaggtccgaattggccaacttgttgctttctttgaaggtcctgacagaaaccgcattcagcgatgcttcacgaacaacaacaacaacaactgatttgaaggatttgataaaaataaatttgaaaaacgtatgtcatcctttttgaaagcgcaataaaaaaagcacatttctaaaa

SEQ ID NO: 95626 - DNA, 463 bp, Heterodera glycines
gacctaaaactccccatccttttttgcactgtttttgtgacatttcctgcttaaatgcttttcaaacgttttgttgtccccgttgcgacgcgttctgtgcgcgcggtgcatttgcccggcactcccggcatttacaacaccaaacccgtggaaatccccaattgggagccggcaacaccgaccggcccaatccgtgacggatggccgaaccaccttgcgcctttcatgcaaatcaaaagttggcgttggttcatcggcgcttttctttatttggcgagcggattcggcattccgttctttgctgccgagttccaactcaagaagcaaaaccaatgagctgagggagaggaagacgatggttagatgaagtgatgttattgcaaaaagatcagttacagacagccgtatttcaaatgtatgtttaatgttaggaaaaacgaataaaaacaaggcatgttcaaaa

SEQ ID NO: 95627 - DNA, 563 bp, Heterodera glycines
tgagattattttcgttcgaattttatcattaaatatccataataatatatctcttctcccaatcaacaaaatgtgccgtccttcgttcccttcaatgtttgcttttctgctgctcgttgctgctgccattgctctgatcattttgccttccgcttcttgtgcccctctcgacaatgcccaaggcgtcgttcccgacgctgcccccggcatcggttccgccagtgccgttggcatcgctccgcgacatcggaggcaatggctgtcggccgcccgcggtgccggcggagactccggcagtttttggagtctgttcggcaaaagatgaaaagccgtgaaggttccgtgccaatcgagacaaaaaactggtctttcaatgcccagaaacaacgagattaatacaaaatcattctctttttgtatattttacgggataactaaatttagaattccaaaaaatatctaaaaatctctgcttttcagtttaattggaattttaaatttattacaattttttcaacatttttgtcatattgacaaatattcagaataaattttacaaaatg

SEQ ID NO: 95628 - DNA, 476 bp, Heterodera glycines
ggctggtgcactctgtgcctaagtttcctgccagcactggggccgattacctttacccacagagcgggaagagaaacggtcaatcgatgctttgcatcactctatcgagcacagcgcttaaggaaatcggtcagcaattgttcgttgctcagcccaatgtctacgacttccaattgcccgactctttcgcccgccttttccccgacttggccaaggcggtcaatcggacgacatttccctacaaaaaaagggttcccttctctgtcaccgacgtccattctctcaagggacagtcattcaccacctttcacaaacacaaacaattcggaaaggatttatacagtgaattggtcgcccctcggctgaagtcgtccatctacgtcgaaacttggctggtcggcagaggcgacctcccctccgattgctcctcttcatttaaggtgcacaatgtactttccgtgaaggcctcaaaattc

SEQ ID NO: 95629 - DNA, 474 bp, Heterodera glycines
gtttgagaaaaaaatttttgtgatgcgaaagggctaatgagattctcgcccagaatttttccctcatttttgcagcaattaatcaacagaaattttctagccttgcactgtccccttccggcaacttcggcggccaaattctcaaccgacggaaagtcggacgtattttgcgcttcgcttttgcacaacgaactttgcgaaaagctcgataagcgtaaggaagagtggaggaagcaaaggccgggaacgaaggaatatacggcgaccaaagaacagcttaaccaattgcaggaagaaatcatcaaaatcgaaaactccaaatacgaatttttgcatactgaaagggacaaaatgagcattgctaaccttgttttggcgccaactcaagtcacactggaggtgatcagcaacgggaccacccacctgcgcccgtcggtggtgctccgtacgccgttgaatgcctacttgttcaac

SEQ ID NO: 95630 - DNA, 690 bp, Heterodera glycines
caattattgaagtgccactgaatccgacaaatcccagccaaccgaacatggaatttgtttacgaggctattgccactttattcaccactcatttcaaaaatttgacagagccgcaaattcgagtcacagtcaaagggttcttcagctttaaccgcacagttacaaagatgcgtgaacacatccgagacttcctcgtccagatcagggaagaagccggcgacgacactgcggaccttttcttggaagagaaagaggctgagatccagcgcattcaatcgttaaaacaagcgattcccggggttagaaatccgaacgaattgttggaggaggacatggtctgacaatgcgtccgtcgggtgggctcggccctgccttccccgtttttgttttttccatttgtccatcctgacattaaacgatcgttcgtattttttctctgtgcccatttgaattcctttcgtctgtttttgctctccttttcatgttttgtgtccgttctgctgagctttcccctgcttcttctaatggagtttgtttctttgcttctgattgtctctactcgtctgttttggtgagagatttgattgtttctgagtgtgttcctccatccgttttgctttatgaattcgaccattgtcgaccctccattattcttagtctgtcatctcttttttaaatattttttgtctg

SEQ ID NO: 95631 - DNA, 475 bp, Heterodera glycines
gtcgcaatttgtcccttcttttgccttacttttcgtcttcatccgtccaattcgaaatgtccaaacatttccttttcctggcccttctgttttttgtcggacaaataagcgctaaatccatccacagcaaaagcgaagaaaaggaagacccattctttggggaagaaacggacggaacggaggaaccgcaagagacggacgagccgaagccgtacggctgggagaacatctacgaaaaatgcatggaccaatttgacgaccacaaaaagtgctgcgaagtgtcgggcggaggcgacgaatgtttgctggaggacacaacgacggaagcgggcgaaacgacgacggaggaaccggaatattcggacgaaacgttcaaaaagtgtatggcgaagctgaaccaaagcaaggacaattgctgcttcatattcgaggacaaaaagttgaaggaatgtgaacattggcaaccgcagacaac

SEQ ID NO: 95632 - DNA, 674 bp, Heterodera glycines
gtaatttacaaataaatttcgcaaatatttgaagtcaagtcccgttttctgtttttttcccgtcgatctcgaggcattattttgtgccaatgcttccgtcgccgtcattttccattcaattggtgtctcgtcttttttcccagttttttaatcgacccttatgttcgtccgcacatttattgtcaaaggacccttcaaattctcgcaattccggtcgcgatcacaactttttcgaaggcctctattttgagggagagataccacgagatcggatcaaacagaagtacactttgtccagcggaccgggcggttcgaacgtaaacagtcaccccacaaaggcggaaattcgtttcactgtcgacgaggccgattggattccgcggagagtgcgcgaacggctggtggaacgatacccacgctacatgaacaacaggggcgagttcgcattcacttcgcagaagacgcgctaccagattcaaaacatgaatgactgttttgatcggctccataacatgctgctgaactgctccgaggagttggtcaaggaagagcaccgaacgcatgtttcaccacaacacatcagcataatggaagaacggaaaaaacgctccgaagaatttcggttagcatcaaagaattctcattcgcggaaaaaacaaaaccgacgttcgggc

SEQ ID NO: 95633 - DNA, 266 bp, Heterodera glycines
ccgcttcctccgatggacaacaattggtcggtggtgttgatgaggaacagcaacgagcgcgaccagcactcgtccttgaactcgacgaccaccgtggcattgatgtgctgtacagtgttcagaatgatccgaatttgggccccctgccgactcagacaaagggcgaattctgacggatgggcggccgacggtcggtccaggaaaacgtggcgaagcgcctccagaattttgctggaaattgacaaattataatttgtttctttcat

SEQ ID NO: 95634 - DNA, 682 bp, Heterodera glycines
cctcgtgccgaattcggcacgaggaattttgtaagtgaagaagagttgcaaaagcagcgtgaagctggcgaagaaaagcctgagagttcagagccggtggacaaacgaacactttacgaacggttgaaagagcaaaaggacatcaagcaattggaatacgatgaaacgcacgcattgaagaaccaattccgtggcattgacgaggccgagtcggactttcttacacaagtggagcgggccaaggaggagcaggaggcacgcaagcgcaaggaggaacaggaactggtgcgattgagtcgacaactgacgcaacaacacgcgaccggtgccacggctgagcagcaacaacacgcactgttggagaagccacaaaaagcgagcaccgccgcttcgtcagggatcagcagacaggcggcacttatcacatcgctcgtccgccgcaaaagaccgctttcaactgattctgaaccaaaatcggcgcgtggcgaagtgccatcgccgccctcgtcgtctgacagtgacaagcgcaagaccaatgaaccgtcgaaggcttcaggcggtccgccaccaaaacaacggcacgaatcgcattgccaaatcattggagtgcttcccggcttaccgaactactccgattcgagtgacgaggccgagagtagcaacaacagcgagagtttggagt

SEQ ID NO: 95635 - DNA, 368 bp, Heterodera glycines
ccaagtttgaggcattaattccattgcttcaaatgtggtacgagagattgcccatgattatcgcggccgttagtatccccgcattttgtaccagcgactattacccactgcattggtatgggacgaatggctgcaaacatcatcgagttctgaaaggacatgagcagtcggctctccttatccgtgacagagagttgaccggctacgaatacaatttgatgggcatcgactcaattccggaggaggattaactgaccaacgagtgggattttagaacattagacgatgacgaattcctcgattatccattatgctgtctaattgtggatataatgtttaaatgaaacaatgttatgtgcaattcaaaa

SEQ ID NO: 95636 - DNA, 1007 bp, Heterodera glycines
agccttaaaatgctcactcatcggaaataccgtctcttgcaatttgcatccgtttctggtcgggcactaacaataagtccggaattcaggcagctcagttctgtttcgtccatcccatcaaattcgcataaaacctcaaagtcagatggaaaggcgcccaaatcgagcactctttggcttaatttgccctccaatgcggaagaggatgtgcgaacacgtgttcggagctctttcttcggcacttacgtcgctttgttattcccagccgccacttttgctttgggttgttggcaatggaaaaggcacaaatggaagaccgaactcatcgaaaaactgaaaattgcaacaaaaactgcacctgtggaattccctgtggacaatttgtccgcgattgatgatatggagtttcgcaaggtgcacgtcagagggtattaccttttcgaccgccaatttgtcattcggtggcgctgtcggttggaccccgcaaataccggcacttcgaattcggaaaaatatggggcgtatgtgatcactccgatgagactggagggcacaaacgttacaattatggttaaccgaggatgggttccaaacgaaaacatcgaatccgaactgaagaagggcaagcaactgcgggagtccgagctgaaggatttgaacgcggtcgtcagaagtgctgagaagggctctcctttcgtcaaaaacgacccggaaaagggaatttgggccttcaaggatttggaagaaatggcaaggcaaagcgacgccgtcccaattattgtggatgccgatttcgaatcgactgaaaaagacggaccgatcggcggacagaccattgtcgtcctgcgaaaccagcactacagctacatggtccaatggttcggattgaccgttggtgtgcttggcatgtgggccttgcgtttcttgtgacgctgcgaacaggagggaccagatggcatttgtcatatcgtatttagggtctttgctgtccatctctgttgcctttc

SEQ ID NO: 95637 - DNA, 589 bp, Heterodera glycines
caagtttgagaataatttaaatggcaaactttccgcctaattctgacgaagagttcgaccgtggcaatttttcatcattgtcgggaatggtcggcatgaaccaacgacacttggactggttaatgaaaaacatatcccgcgaagacatggccgaactccaacaaaggacggggcaatgcgcccgaaagtgtgctgtgacgtatggaggtccgatcgtcgtcgttaccatcggtttcctcgagtttttgcgccgtaaacagaaccttccgatcacagcgccgcgctttttgatcggctaccccattatgtgtctcacttcggtggcccttggctcttccatcggcttcaaaaggtcgggttgcggtgcggaaatgcgactttttctcgacaagctctacgccaaatacgactcccaaatgaatgccgctagcgctcagatggcgccaggcgttggcggtggcacttcgccaacaaaaacctacgcccaattgcgcgaggccaaccgcgccggtcgtccaattgaattgggacagttgaagcaacagcaaacgcgacaacagcagaagaaaatggacggcagcaaagcgac

SEQ ID NO: 95638 - DNA, 476 bp, Heterodera glycines
  unsure (1)..(476): unsure at all n locations
gttaagaatgtcacccaaacaattcaaactgacccattcgctgttttcgttccaacgcatttcgcaagcggacggagtcaaacggaaacaaatgaaagccgacgaaagcatttgcccaccacaaaggaaaaaaccaagcacttctctgaaagaagcggacggaagcgacggcgccgttgagaatgtccaaacgaaggaaaatatgcggccaattttggaagcggagagacaccaacagaacgacgatggcacaggggaaatccgttcgcctccgtcgtcttctcccactccgtggcatccttcgcatgcgctcgctgaaccgacgtggcagaaactgttgaggaaggaattccaaatgaaatacatgacgaacatttgttgctttttggaggaacaagccaaacagggtgtctccgtttttccgcctcgtcatctcatcttcaacgcgttcaatctgacaccctttaacancaatc

SEQ ID NO: 95639 - DNA, 608 bp, Heterodera glycines
gggctgcaggtatcaaagacacgaggcatcattctgccacaattggtcatcagtgccgagcgtggtgagcgtgagtgtcacattgtggtgttgctggacgaggacgtggtcgactgggacgaggagtacccgccacagatgggcgaagacgtgacccaagtggtgtacagtacgccgctctacaaattcttcaaatatgccgaaaaccgcgatgtggccaagcgcgtgatgaaggaccgcgagctgaagaagatccggcttggcatcgaaggctacccgacgcacaaggagaaaatcaagcggcgcttcaaccgttccgaagttgtttacaactatgtgcagcgtccattcctccactgctcctgggagaaggaggaggcgcgttcccgccatgtggactttgcctgcccaattgtgaagagcaagtccaacccgagtttggcttccgccgcctccgaccctttgccgcagcctgcgccgttgcaaaacaacatcaacaatgggtgggcggcggagaatggtgccggcgaacattcggccaatttccagcaacggccgacgaatgacaacgacgggagcagcggaaatgagaatgaggccgttcacca

SEQ ID NO: 95640 - DNA, 403 bp, Heterodera glycines
ggaactcaactcgctctcttcgaccgttccaacatttcctttgcggtgtcctttttggccgggggtttggccattggctatttgctcggctggcgaaccgcggcttcaaaattggcccgatgcaacacgcgagtgcagttgagcaaggacaaagtggtggacactgtcgaattggaggacattggcgagaaaaaggcatattgtcgctgttggcaatccaaaaaatttcctttgtgtgacgggtcccacaatgagcacaacaaaaagacgggggacaatgttggcccattgattgtaccgaaggcgaagtccgcttcatgagcagcggaggacagaacaaaaaatattaaacaaagcattggattttattgtttggttggaaattcgctcaattgttaagaaa

SEQ ID NO: 95641 - DNA, 475 bp, Heterodera glycines
aaaaagtggaaatacaatttattttattatttgtaatggaagaacaagggcctttcttaattgattggaggacattgttcggaaaggcaccatttgagcttcggaaacaatgcattcgaggacatttgcgaaattcacatctgagatccattgtttggaggcttctcttaggagttttgcccatggaggacaggacacaatgggtcgaagtcattggtcaagaacgtcgaaattataccgaattgagacatcggattgagtcaaacccaagaattaataattcgccagaaggaaagaattttgatggtaacaatccactttcgctcaatgcagaaagtccgtggtgcagacattttgagaatcaatcaacgaggaaaaacatcgagaaagacgttgacagaacgtgtctgaaaagttcgaaacaatgccttcgtcagcttcacattaccgtccaatccgcggaggaggcaaaagc

SEQ ID NO: 95642 - DNA, 569 bp, Heterodera glycines
ttaagatataaaaaagtccccctaattggtaatgtcttccgaaaatcctccgtcaccgatgcaacgccaacagtcatcggtgcagcttcaacagtcatcagtgtcggatatgggcgacccggacgattgcttctcaatgttcctggttttcatgagctatgtgctgctgttcttcacctttccgtgcactatcttctcttgcattaagattgtccagcaatacgaacgagcggtcatttttcgactgggacgtattcgtcgtaaagcgcaaggacctggattgttcttcatccttccatgcgttgatgaatatcgctgcgtggacttgcgcaccgtgacttgtgatgtgccgcctcagcaagtgctttccaaagattcggtcactgtcaccgttgacgcggtcggcttccttagttggacgaacaaccgtcgtttttgcatctgataagcacatgaaaatacaaataagaggaaagaaactaataaactcaaaatttttttcttctgcaaatgttgtagtaactttggctctatttcagtttacacgaaacgacaataaaataatacga

SEQ ID NO: 95643 - DNA, 456 bp, Heterodera glycines
aacagttttcactcggatcggaccgctttggcatcttcctccatcgtttgtcgtaaacagtgtggactttgacggacctggtctttattttgagaaagatgtgttttctcccttcaaatagcactgtttttgggcgttccattggttttattcaccaattcggtcgtcgctttctcttcccacccattgcccaatgtgaacacgtggccggactcaaaatggacaaaatgcttcagctccaatgccgattttgttttttcactcgccgaaatggtcgttggatagtcgaatgcaccaaatttggaaggcacaggacaattttacgcgatttcaacgccgatctctattggtgatgtgagaggaaagactaaaaattattttcgaatgtggtcgaatttacaaataaaatttgttgtagaaacaaaccgaaagagaaacgatcgaattgtatgaaaa

SEQ ID NO: 95644 - DNA, 1015 bp, Heterodera glycines
acttcagcgggtactgctacaaggcgttcaccaacgcggacaaagaagtcaaatattcggaagcgcagaagatttgcaagtcggacggggccgaactcgtgtcgatgcactcggagttggagcgcgagtttgtgaatgttgtggcactgactgcggcgaagaaatacgaatacaacgccaaggtgccgggattggccttctactggaccagcatgcagttggagtgggacgagaagaagctaaagaacgccagctgggccgacatgacgccgatggactacttgagcccgatggagtggggcacgaagaagcgtccggtgtacgtggacaactcgaacggcggcgagtacaacaaagaaaacgaaaactgcgtgttcattggccaatggccacgcgagggcaagcagtacctgaagttggactcggcagtagacaagtacggtctggacgtgctgtggagagacgaggtgtgcgagaagccgggcgaggactgtccgcgcggcgccgtgtgtaagaagagggctacggtgggcgaatgctacggcacgggggcgtatctcctggacgcggccgaggaggaggagatgaagaagctgctcaaattcatcactgtcggatccggcacttttgtctatgctgaaaagaacacatacatggtcctcctgctgaaggacttgtacggcaaacagatgaaggaggaggacaggaagaaggtgtgcgcttactacaaggcggagtacgtcactgtaaaggccgagccgaacaaagtgcaagaatatgtggacaaagtgttgtccaagcagaagcagatgtacgcggatgcgagcgaccacatgctgtgtaagttcagcgggacactcggcggatgcggcgactattgcaaaacgggatattgagaagggacggacggaagggaaggaacactttctcattagcatttagtcgtcctttgttttagttaaaatggtgcgctttttctctctgatttattgcataaataaaaaattttaaaaat

SEQ ID NO: 95645 - DNA, 871 bp, Heterodera glycines
aagctggagctccccgcggtggcggccgctcttcaatagtggatcccccgggctgcaggaattcggcacgaggagaaattataataattacggagtcattgaaggcccattaaatggcttcataaaatgaacatttccaatggcagcgattggctttctgttcctcttctacctaatcggcctttcttttcctcagatttaaacagaagtggcgaatgttcgtcgtcgtccgctgctgccttttcccccccgccgttcggcgctccgttttgccaatgtcggccaatgcgaacggcagccaaagccaccacttccattgtcggccattaactctctttgcattgggcaacaacagcagcagaaaaaggcgacaaaaagccgaacattccgccgctggctcccctcagtcgctgacggactgttcttccgcaatgggcgtggaacttccgccgacgataaccgagcgactgagcactttgaagaaggatgtgatcgatgctttgctggacaaaaacgcggtgccccccgaactgatcacttcgctgatggccggcgtcggcggctcggctttcagcaaagcgctcgaattggtcccgtcgtacaaccaaaacttgcagaagatggccaagtattacttcacggcaaaaggcggcaaactcatccgaccaacagtttcgctgctgatgagtgccgcgtgcaatcaatgcgcgaaaaggccaacgacgccggcggacaccgccccgggcaggacaccaaccagcattgtcaatgagtcggaagaacagccaattgagatcagtatgaatcagtacaggatagcgatggtggccgaaatgattcacaacgccactttggtgcatgacgatgtgat

SEQ ID NO: 95646 - DNA, 411 bp, Heterodera glycines
attcagtctcgaaaaagaaatgaagccatcattcaacttcaagcttttcgcatccgtctttcttgtgctttgtgtggcctcgcttgtcctctgtgagcataagcgagcagccgcagcagaagcatgtaatcaccccaaaagcgctggaactggcaacttggcactcaaacgatggtggtgggacggtcgtcattgtaagcaattcacctacaaagggcagggcggaaacacaaacaatttcccatcaaagaagcattgtgatcaagtgtgcaagccatgaaatgtgccgtggaatgatggtatgaagcgtgaagagacatgcaaagaagaaaagcgaagaaaatttaatgaaatttttcattaatcaccaataaataaagatttgattgaataaataaaattgcatcgttc

SEQ ID NO: 95647 - DNA, 283 bp, Heterodera glycines
  unsure (1)..(283): unsure at all n locations
caagaaagggccaaagaacactcgcatttgatccaactcggcgccattttcctcggtttcctcgtaattaatgcgctgcaactttacgagcagctgaccaattcgggccatcatcaccatcaccactgaatgaatgaattgaatcgtccaattccaaggagcgaatttatcaaaagcgggcaatatatttattattttaattgtttttataataaatttaaaatgaatatatttgtacaaacttttttatttttttaagaaataaagaaaaatattgcnnann

SEQ ID NO: 95648 - DNA, 916 bp, Heterodera glycines
gatcactgtcatatagagatacagtgatattttcgtttgttatgagtccgattgaccctgacaaaatggcattgctaaagcgccttttccccgtcctcggcaaacaccttcgcaagggcgactgtggcaaaatcggagtgatcggcggttcgcccgactacaccggtgcgccttatttcgcttcgatcaccccaatgaaaatcggtgccgatttggcctttgtttacgcccattccgacgctgctccggtgatcaaaagttacagtccggaactgatcgtttaccccagcaccgatttcgccacgaatagacacagcattgagcggttggacgcgctggtgttcgggccggggcttggccgacagaaacacacacaaaatttgctggcggacgtcgtaaacttcgtcaggagcaaacaaaatctttgtttggtcattgacgcggacggtctgttcttcgtcaaagaatgttcgcaactgttcaaagggtgcacagacaaagtgatcattacgccaaaccacagagaatttgttcggctttatacccaaatgttccctaaccagcagaagggagaggacacggacgaattgaaaattcaatgcgaaatggcggaacaattggcaaagcatttggaagtgactgtgatgagaaagggtcggtggcacagaaacgcaaccgaaaaatatgaggagagattgacataatctccaacggttcctcccaaacgcgaattgtccaagcggaaacttcgatgcgccgttgcggtggccaaggcgacattctcagcggcgcgacggcacttttcgcattttgggcaaggaaagcctcagatgccgacatttattcctccgagcatttgctggacggggcggaggccgcttcgcttttggtgcgcaacgcatcgctacggaccttt

SEQ ID NO: 95649 - DNA, 686 bp, Heterodera glycines
agacagcgaatgtcagtcaaagttctctttccatttatccgacaatcacaaccagttgagttgggccgagtgtcacacaaaaataaatcggcgatttggacttctcctcatttaccaacaaattcacctattagcgaagccaacaattattcataccttccattgttattgctccaaaaagaagaccaaaaatggaagcacccgctgaaattgacgaaatatacaggccacatgaagccagaattcacgaagccttttttaatacgctttccaaaccaattcatagcaaaaacgaaagaaggaaccgagcagaaggaatcttcacaacatcggaaagtcaacaggacagggaaagaatacacgtcacatggcgccattttggtcaaaagaccaagttcttccttgaccgtaatgaacatgatttgtttgaggcgcttcaccggaaaattcgcagtgaattgccaaattttcggggcaatttggccttccgagatgacaatagtcgtgaagttattctcaaatgcgatcggcaaatcagagaagcggctgcccgaagggacaatcgcctgcacattttcaccactctctccgaaagcccttcccttttcttggccgcgtctgagattggcactttgagtgcgagtcgtccctcctcgagggcaccgcttggctctccgatatccgcg

SEQ ID NO: 95650 - DNA, 314 bp, Heterodera glycines
cacagtttgggccatttacgccgactggtctcacactagagagtggaaaaattcccttaaactaaaaaatgtcgatgacatggccaaagtatctgggtagctacatcacgctacagaatgcatttcggatgaccctcgcagccctcattcctgctgttgcaaaaatgtatgaagactctgaagtagcaaggctcaccaggtttcgggaccggtctgccatgtttggcagaccacctccacctcctggtgttgaagaaattccatcatggtaacacttatgttacatggctagtttgaataaacttctcagttgc

SEQ ID NO: 95651 - DNA, 419 bp, Heterodera glycines
aaaacttttggtgtaaaatcaacaacaacaaaaaatatgcgcggcacattcaacataaagaaatagtccggcggtgcagataagctattgacaagaataattctgtaagatggctggctatgtatggccttaccttttttgctttttgggtcttatttttcttacagatttaaggtgataagcgttaagtatcaaaatgtcgaaccgggcgctcctccagaagccaccaaagctatgacgattgaggcatcgatgttcgatatgggcttgggttgtgtggcatggtgggaaccgcagtgcgcaagtgaattgaaacaggaagcaaatgatccaagcgaagatgaatagtaacaaacgaattgaagattttgttattgttttatttgttctaacggattcttttttaaaaatttaccatg

SEQ ID NO: 95652 - DNA, 539 bp, Heterodera glycines
gaatgaggtgcggagcgtttgtcaatagcgagcatgcgaatattgagcaattagtggctgctggccgccgtaatcgatcgagtgtgagcaaagcgaaatacctatttaactgaactaaaccgcatcacaatgtctgaagtctacggttttctcgacaggttcacaaaaagaataacgcgacgcagaggcaccactcccgcagcttcgggatttggagcggacagttcgatggatggtggcggtgtttcgaaggtgtgcatcggcctgtgcgtctgcattctgatccttttgattgtgttcgctgctctccttttgactgctgcgctatcgcctaaaagtttcgaaggcgttgctgtgctggggggcctcgcgagtcttttcgcagaataaatcgaaatgcgatgttcttcggtctttctgttgttgtcccataaggcataagccttaactactagtacttcattttcgagttgtgccctctattgaataccgtacatttgcttgtttatttgtactattgtcgttaaataataaatgcg

SEQ ID NO: 95653 - DNA, 1867 bp, Heterodera glycines
acaaccaagagcccgtgaccaagcgaggcttctgccaatttgtgttggacccgatcttcaaagtgttcgacgctgtgatgaacatcaaaaaggacgaagtggcgaagttggtggagaagctgaacatcaaactgaccttggaggagaaggaacaggagggcaagcccttgctgaaaacgatgatgcgcaaatggttgccagccggtgacactatgcttcagatgattgtcatgcatttgccatcgccagtcactgcgcagagataccgcatggaaatgctgtacgaagggccgcatgacgacgaggcggcggttgcaatgaaaaactgcgaccccaacggaccactgatgatgtacatctcgaagatggtgccaacctctgacaaagggcgcttctacgctttcggtcgcgtgtttgctggcagagtcgccactgggatgaaagcgcgtatccaagggccgaattatgtggtcggcaagaaggaggacctctacgagaagaccatccaacgcacaattttgatgatgggccgttacattgaaccgattgaggacattccggccggaaacattgcgggactggtcggcgttgatcagtacctggtcaagggtgggaccatcaccacctacaaagacgcacacaacatgcgcgtgatgaaattctccgtgtcgcccgttgtccgtgtggcggtcgagccaaagaatgcgggcgatttgcccaaactggtcgaaggattgaagcgtttggccaagtcggacccgatggtccaatgcattttcgaggagtccggtgagcacatcattgccggcgcaggcgaactgcacttggagatctgcttgaaggacttggaggaggaccacgcttgcattccgctcaagaagtctgacccagttgtgtcctaccgtgagacggtcaccgaagaatccgaaattgtgtgcctctccaaatcgcccaacaaacacaaccgtttgttctgcaaagctaggccgttgcctgatggactgccggaagccattgaacgcggcgacgtcaatccgaccgacgacccgaaaaatcgtgccaaaatactcaccgagaaattcgaaatggacgcgaccgactcgcgtaaaatttggtgcttcggaccagagggcactggtgccaatttgctgattgacgtgacaaagggtgttcagtacttgaacgaaattaaggattcggtggtggccggtttccaatgggcaaccaaggagggtgtgctctgcgatgagaacatgcgcggcgtccgttttgacatccacgacgtcacgctgcacgccgatgccattcaccgtggcggtggccaaatcattccgacggcgcgtcgtgttttctacgcttcggtgttgaccggcaaaacctcgtctgcttgagcctgtctatctcgtggagatccaatgtcccgaagcggctgttggtggcatttacggaatgccgaaaccgccgccctggggtcctccttggaggaaaaataaaatgctgggaaccccgatgttcatcgtcaaggcacatttgcccgtcaacgaatcattcggattcactgctgatttgcgctccaacactggtggtcaagcgtttccgcagtgtgtgttcgaccattggcaagtccttcccggcgacccgtttgatggcacttctcgtcctggtcaagtggtcactgagacgtgaaaacgaaagggattgaaggagggcattccatcgcttgacaatttttatgacaaattgtaatacatggatttaaattatggcggtgtttttgtttgttggctgacacaatacacttgttgtccttttattatgaaatcattgtggtcgtatgtaattttatcttgttaaaaaatttaatgtt

SEQ ID NO: 95654 - DNA, 371 bp, Heterodera glycines
aagcagcgcaaatggcacagcacggaatgaaaaagaagacgactttacctgcgggggcaaaacaaaaatcaatgaagcgggcgcaaaagggggcaccgacaagaggacccaaaaagggctttaaatcaattgttccaccaaaaaaggcatcggctgtcaaacaagcgaaggtaaatacggaagtcagtcggatgatcaacgagaagaacgaagaaatggtcagagaaagggccgacagagacgtcggaaaaacgacgaagcaaacaaaaaacacttgactatttttgattttgtgatgttacgggaagatttatgacaattggtacacaattttttttttgttttagtgtattaattatgcatttaatatg

SEQ ID NO: 95655 - DNA, 331 bp, Heterodera glycines
gacgactcggcggaagagatgcgattggtcaaaagtcggatgaagggaataatggcacacattcgtgccaatgaacagttgttcacgcaaattgtacaatcgctacaattgaacactcaccagcgaactgtgctggagcaaattttggcctgaggggggaaagcggtgacaagcgacggaactgatcagagtgatcaatgaaggaatgataagacggacattaacatcggacgaaacggataccaattaaattcaccctttattatgcagatgttgttttgttatcactatcgttatattaattatcaccatacaaatgcgcttttctgtt

SEQ ID NO: 95656 - DNA, 635 bp, Heterodera glycines
attaagcgccattagtgatgatgtcaaacgcagcgacaccaaagttggctaaaaaagtgcttcgcaagaaaataggggaaattattgcgcagcaaatggcgggagaaaatggaggaaatatccgcgagagggaaactgcgacggtggcacaaaagctgttggtcaacgaatggttccgaaattcgacgcgactgtccatttacgtaagcaatgagcaggaaatttgcacggacgacattgtgcgaactgcgctcagagagggcaaagaagtgttcatccccagattcaaaaagggggccgaacgaatggaaatgctccgattggaatcggagaaggaattcgattcgttggagggcactctttggggaatacgccaacactccgccagtctcagtcccccctcatttgaagaaacatccgccaaagcacctctcgatttggtcgtaatgcccggcgtggcatttaccacaagcggaaaacgacttggccatgggcgtggattttacgaccgatttctgaatgaatacgcacaaaaatacggaacagtgccgagaacaattgcattggcattgaaagtgcaattggtggacgatttgccaatggaaagcaaagaccgaatggtggacgaagtgatc

SEQ ID NO: 95657 - DNA, 468 bp, Heterodera glycines
ccgccaaatacttcttctacgacccggacttcgccttcctctccctgggcacatattcggcacttcgtgaaattgcgttcacccaacagttggcccaacatcgtcccgacctccacttctattacatgggcttctacctgttcgactgtccgaaaatgcgttacaaaaatcggtttcggcccagcgaattgttgtgcgaccactgctttaattgggtccccgtgacggaatgcgaccgaattctcgaggcgaacggcggccgtttcagcactttccatccgtccgctgagcccactcgtgccgagttggacagtgcccaaatggaccaaattctgtgccttcacggcgaccccccgcggccgctgactttcgccagcctttgcaactcattggaaacggccgctgctcatccatcatcttccacagacagtcaacgacagaacggacggggcgaggggccggagatgg

SEQ ID NO: 95658 - DNA, 637 bp, Heterodera glycines
gtttgaggtgaatatcgcacaatacataatatgtttcgagttgccaaaacacccgcccattatcaacaatctgttcgctcattcgccaccctaaaggacatttccatccgtctcaagtcgatcaaaaacatccaaaaaatcaccaaatccatgaaaatggtgtcggcggcaaagtatgcgaaggccgaacgcgagttgaagggcgcgcggacatacggcgaaggggcgcaattcttcgtcagcaatatcaccgcgggggaccaaacggagccggtgaaagttgccgaaagtgttgtcgaatcggcgggccgaaaacggcttctcattctgatgagcagcgaccgtggactgtgcggatcggtgcacacttcggttgccaagaccgcaaaaaacattatggccaacaaaccggccgacgtcgactacaaaattgtgtgcattggggacaaggcgaagatgctgatgcagcgactctacgcccaaagaatttctgttcaccgtcaacgacattggccgctctccgccgaccttccaagacgcatcaattgcagcaaatgccattctctcctccggctacgaattcgatggcggtgaaattctgttcaaccgattcaaaacggtcgtttcgtttgagaca

SEQ ID NO: 95659 - DNA, 241 bp, Heterodera glycines
atttcacacaatccttgggttaggtgatgcgcaacagaggcacaggggaggaatgcgaacagtggggtttcgaatacatcgaagtgccggtcgcctgtgagtgttatctgagcaagagatcgatgtggcttgaagcggtgcctccatcaatcggagacgaacatttcttataaattgtttctcgaatatttaaatttacaattctaacaaatgttggtttacattagaatacacagaattc

SEQ ID NO: 95660 - DNA, 605 bp, Heterodera glycines
ctcaaaaattgttgaaaaactaataactaattcgaatgtcaaccatcccaatgccaccaccaccaacacaagacgaaaaggaccaacaaaagaaatcccaatggaaaccgctggagataggaacaacgaaaattccggacccagaagaattgcctttcggaattgtacagactgcattccgagcttcagatcggatgcgcacgacctcagaagattcggccgagtcttttgacgcctatggaccggattcgccaaatatgaccagttcggggagacgaatgagcatcacagaacgcttatttggacgtccagtgccccaagaacgaagaaactcattgggagaggaacaaatggggcaggaaaagccgaaaagcatcgcggagaacaaagacttcaaagaattaatgaagcgtcagcgaaaaattttgggcgatgatgagtggcaataaagaaaggcaaaagaaaagaagtcattagaggaaaacaaagtcggaatggatcaaagggtagaaaagggaatgacaatttatttatttgtttattttatttaacacttcttctgatttttcaataatgaaataaagacaaacccaccacaaaaaaaa

SEQ ID NO: 95661 - DNA, 636 bp, Heterodera glycines
cgaccgaataaaatgttaccttcaatgtcaaaaaagcaaagaaagccagaacagaataaccggcaactacgcataattgaagtccaattgttcactccaactgcccgacggtacccacactttgattacgaagaaatgtgcaaggaattgggactcgaaatttcgaagcaaaaggaaactgcggagagcaattcttttcacgaccaagacgcagaagaaattgtgcgaagattggaggcgaaatatggctctcaaaccgttgtgtcacttccgtctacttggaagaaaccaagaaagaaaaccaaaaaagccatcaaatttgcgcctgaagatgtgatggacaaagggttaggctacgatttggaggacgatttcattgacgacgaacaagcgtacgatgaatgggtgcctacgacaatggacacggccaagcgaggtcattacgtgaacaaaggaccgttggagttccgacaaatcgactttgaccagacgacctcggaggaagacgaagagaaggacggggaggaggagagcaatgggacgagacgagagacgagcattttggaagcagacgaagaggaagcgatgaatatggaatgatcaaatttctataatttacatcattaatttattctg

SEQ ID NO: 95662 - DNA, 661 bp, Heterodera glycines
ggcgctttctccgcctcacatttcagctattccacttcagtcactgctgcttcttctgccaactcgaaaactccaacaaattgttcaactatttctgacccgaagactcaaagaccacaaagttcgcctgccggcacaatggccgaggggtggcagaacaggctggagaaccttgagtttatcgatgacgacattatttccggcgaggagtgtccattgattaggccgaattcgtctgggaaagtgccgacggcaaatgttccgtccaattttttgtcgaacacgacaatgcctcacaaactgcagacaacttcaaccagaaaagactcaaattgttccgtcacttctctgcttcccaatgctgaaaaagaatccgacaaatctttcgctggcgttgctttgtcgtgcggtggtggcaaaaaagcacaccaattgaatgacattaaggcagttgtggaaaagctgtcccggttggctttcgaactgtccgccactcgtcaccactcctcaacaattcattcgactctttctcatgtccgactgaaaccgagtgcaaaatttgaactgctcgacattgacctggagaagtttcaaacactgcagaacagtcgctcttccgcgtcgccatcctccgctggcactccctctgaccaattgccgt

SEQ ID NO: 95663 - DNA, 1474 bp, Heterodera glycines
gtccaattaagccacctggtttttgtgctaattacatatattttgtcaattttaatgtcagccaccacccattcgttgagcaagcaagaaattgccaggttcagccggcaattgatgctgaaagggattggcccttcaggacaagaacgcattcgagaaacaaaggtgctaattattggcgccggaggattaggctgtcccgtttcaatgtatttagttgcggcaggcattggacgccttggaattgttgaccatgatgtcgtttccattgacaatttgcaccggcagacaatgcacgaccaaaaacgggtgggccagtccaaagccgattcattgaaagaatcattgtccagaattaacaatgaagcgaatgttgtggcttataacgtgttgctcaccagcaaaaatgttcttcaattgtttcgtgattatgatattgttgccgactgttcagacaatgttgccactcgatatttgatcaatgatgcttgtgtgttgagtggaaaaccgttggtatatggaagtgcgcttggttgggagggccaatttactgtctacaacaatggaacgaattgtccttgcttccgctgcatttttcctgatcccccaagtcctgaacatgtgatgagttgctcagaggcgggtgtgcttggccccgttgttggcgttattggaagtttgcaggccttagaaatcatcaaaattgctgtcagcggaaaatcatcatttgccggaaatttgtggatgtttgacgggtttgaaggcatatcaaaaagaatttctttgagagagaaaatgtcgaattgtgcgatttgcagtgaaaatccaaggattacagaattacaagattatcaaaagttctgcaggtcggatccctcaaataaggttcgctcattatgtttactttcggctgaacaaccagtgtcgccaacggaatatttaaatttgaggaacaaaataggcggttccttcattttgttagacgttcgacctcccactgaatttgaaatatgccatttgccggaagcagaaaattttccctgggaggaattgagaagagcaaaaatggaaatgataattgacaagataaacaacagcatggaacgcaaaagtccgacaattaacggtgcaggaaacaatgggaaaacaaaagtccttgttgtgtgccatcatggcaacgactcgcaattggctgcgtgtcatctgcacaaacagttgtcagaggccggcattggcgaccggttcatcgttcgtgacattgtgggcggaatggatggatgggcgttggaggtggacgccgacttcccgcgctattgatgcagctgatggtttagctgttgaatgtgagtggactcggattaatgccttctttaaattaagaaacaaatctgccacaattggaaagaattcagaatcccatgggaaccccatttttatgttatttgataacacatttttacattttttgcttacg

SEQ ID NO: 95664 - DNA, 637 bp, Heterodera glycines
ttcatgttaatgacttcgcgaattttaagactttggcagcccggagctccccgtcctagggtatttttgcctgatttctggataaaattggttgagcaaccgagcaagggttacaaccgtcttccaaaaaatgccgctgcgtttgaggtcgacctcaaaatgtcgcgaatggatgtccgcgaatatttggaaaaaatttacaaatatccggttcgggatgtgcggattcgtgtcactatgggggatatcacatgggaccaccccaaagaccgggacaagagaagagcactttggaaggaagaggaccgaaagattgctatcgtcttttttaaaaagggtttcattgctgaagtcccggatctgttccccggccgtggcaccgatgctgaaattgatcagatgaagaagttccaagagcaggacgcaaatactttcaacagtcgctttgtcaataggggaagggcagggataggagaaatgctacctatttaatgctggaatttttgttgataaaatgcgatgaatgtaaaaaaaaaaaaaaaaaaaaaaaaaaaaaaaaaaaaaaaaaaaaaaaaaaaaaaaaaaaaaaaaaaaaaaaaaaaaaaaaaaaaaaaaaaaaaaaaaaaaaaaaaaaaaa

SEQ ID NO: 95665 - DNA, 420 bp, Heterodera glycines
gtcccgagtacatcttcatcttccgagacggtctttcggaggggcaattcgcaatggcatgcaaggaagaattgcgtgcactgaaacagggctgtgttgaatacgactcccgctatcagccaaagtttgtgatgattgtcgggactaagcggcacttcaaaaagttcttcctcgaggaggagggacgcaagggccgtccgttcaaccagaatttaacaccaggctccataatccaagataaggtgactgcgcgcggacatcacggaattctttcttcagccccacgcaccgattcacggaacgggcaaacccgtagaatacaccatgttggaggatgagattggcatcagcatggacgaattgcaaggagtgattatggcgttgtcttactcgcatcagattgtcaatgttgaggtgagc

SEQ ID NO: 95666 - DNA, 410 bp, Heterodera glycines
  unsure (1)..(410): unsure at all n locations
gtcgttcgtacctgctccgccaccaattccgccaatacctccaccacccgtgccgttgaacgccatccaattgtctggagttaatggaatgccaaagaagaaaggccgtcgtccgatcccatctcgctcaaatgccacttatatttcgcaggcgtcccaagacatttaccaatcaaatcttttgagcggaggaggcatcagccaaatatcccaatcaagccaactttctcagccttattttggcgattaaaccaacttccgatggatggaaagagaaaggggtcgacggagcaaacgacggaaatgaaggattgctgttgattaatggaaatcacgcgataaagatttcatcctcattttatatgaattctctgagtcaagttaatttcgataaatccattgcagtttnc

SEQ ID NO: 95667 - DNA, 224 bp, Heterodera glycines
atgagaaaacagagttttcgatgtatttaacctcctcctcctcccccccctggcatggaattatttttaacacaaattttgcacatttagtttttttccttttgggtagggtacaccaggcatacactgtagttgggcattacggtaagagaatttgtattattttcgagggtgctatatgatgatactgtatttgttcattgtactataaatattttaagaat

SEQ ID NO: 95668 - DNA, 397 bp, Heterodera glycines
  unsure (1)..(397): unsure at all n locations
gcgtcttgagaagtgttggttttgttcatcaacaatttatccgggccacggaattcaattcgtacgtaacgacgcaacggttttcaagttttgtaggtcaaaatgcaacaaattattttaaaaagaagaaggnccccgcgcaaattgaaatggaacaaaggcatcgcgggcgaattcggggaaaaagaattggtcaacgatgtttactcaggccatgggaaatttgcaaaaaaccaacccccaaaatttgtaggaaccctttgggaaaatggcgttgggggcaataagggaaatttcagcgtttttccaccgccggtgccggaaaaccattaaaaacccccttgaaccgggaaaacaaaccgtggaaaaaggcatggtggagaagaccccacaaaaa

SEQ ID NO: 95669 - DNA, 432 bp, Heterodera glycines
  unsure (1)..(432): unsure at all n locations
aagaaatattcggggctgtgatgttgattttgccgttcaaaactgaacaagaagcgattgcacgagcaaatgccacacaattcggattggcgtcgggattatgcaccacgaatttagcacgagctcatcgcgttgctgctcaattgaaagttggcactgtttttgtcaacacttacaatgatgctgaggtgcacatcccattcggcggcttcaaaaattctggtcacggacgcgaaaactgtgttgaatgtttacacgaatattcacaagtgaaatcggtgtacgtgaacatcgacgaaggattgcaacacaatttgggatgaaggaagcggagagagaaaaatgcaatagaaagagctcaaatacaaatagaatatttttaaaattttttcacatgccttattttactaactaataaagagattanctnan

SEQ ID NO: 95670 - DNA, 488 bp, Heterodera glycines
gagttgcggttgaaagaccaggcatatttggtgggagcgttggacaaagtggagaaattggctgtccgggccaatgacaaaacgaagaagttggagcacgacactttgttgaaggtcaaagagttgctggagacaaagtttgtacggcaacacgaatggaatgagaaggaaattgaagtgctcaacaaacaccttttcctcaccgcaaagccaatcgtttatcttgtgaatttgagcgaacaagacttcatcaaaaagaagaacaaatggcttccgaaaatcaaagcgtggatcgatgagaatgacccgggcgctgtattaatccccttttcgggtgcctttgagttgaagtcggttgaactggaccccgaggcgagggcccaattcttcaaagatacgggtgcttgcagcgcacttgacaagatcattaagactggctacaagaccctttgcctcgagtatttcttcacagccggcaaagacgaagt

SEQ ID NO: 95671 - DNA, 426 bp, Heterodera glycines
ttgagttttaactaaaattttatcgaaaccgttaattcgcaacgacaaaatgccggcccaatcgccattctttctttggatgaatgagaacagggagagattctacgagccgggaatgactcaagcggacgtggcgaaggccgcaggcgaggaatggcgccgtttgcccgagtcagagaaggccaagtggggacagagatcggcggaggaacgaggacgtcaaggggggcaagatgtggaggaagaggagcagtaaaacggagaacaaagggagtgaggggggaaaacaaagagaaaacgaaaggaagaaaaccccctttgatcatttaatttgatggcactccaacacattctcatgggcatttcagcctttcttcttaaagaagaccgaaaaataaagcaataaagtcggaaaaaagtttaaaa

SEQ ID NO: 95672 - DNA, 407 bp, Heterodera glycines
ccaaacaaaaaacttaaaacttcgtttccataaaatcaaaaaatgaaaagccttactcaaattacctcaattattctcccaatgtgttttttgcttctgcttttatcaccaccaaacgcaatcggccaaaatttgtgccaatgggaaggcaaatgtgtggactatggttgcccaactgcttgcacttcagagtgtgtgtgtgcttcgcttgagaaatttgtaaatgcatcaaacttggcgccgggaaagcaaaccgattagcatcgaagccgaaaattcaacaagaaaaagcttggaggcgggtcagaatgattgatttgtttgcaattaattacttggaataattaattaataattccatttgatgatttgaattcgaaaatgataaaaaggggaacttcaaaaaa

SEQ ID NO: 95673 - DNA, 447 bp, Heterodera glycines
gtcttccgctctccaatcaacaaatgcctcccccggtgtcacaaaaaaatccgatcacagttcaactcaaattgaccaacagcacggacacatgcagcgattactcgttggaatttacgaacacttgctttaagctggtggaccaagtcaaattccatgtgaaagtgccgaaaacgtcaaaattggcaaatcattggggcatcgttccgcttgccactgacaatggcactgctgatcagcaacagttgttcacattgcccaacaatgtgcacctttacccgggcaaatcattcgcttctgccggcatttcagtgaacggtgctgaccgtccggaaattgttattttggatgtgcaatcggttctttgcacggaaaagcatgacgatgcagccacaaattgagcagaatgaaaactgattgggaccaaagggaaagtgccgaaaatgt

SEQ ID NO: 95674 - DNA, 841 bp, Heterodera glycines
ccaagtttgagcacttaattaattatgccttgccaattgcctaatgaaattgcgacggtcactgacgacgtgttttcgtatatgtgcaatttggcaatggaaaagtgttcgaaaaaggccgataaaaagaaggcctcgtgtggtggggcagcaatgcggaagagacttttgatcaaaaacttcgtggcacaaatgctcgcgcaggatcgccactcgcgagagctgtcttcaccaacttctgactgttcctcccacttgaatcagaccttcgacgagtcgttcgactttccgtcgtgtcaaagcggtgcgaatgcagtggaccaatttggagacgacatggaaatggacgccatcggagaggaagttccatccaatgcgacaaacgatgcctttctgtgcctggaccagccgtcgtcattgttgaccgacttggacgacgtttcgtgcgaccctcagcagcagtgccattcatcgtgcaatcggaagcggccctggtcgttggtgttctccgccgatgccaccgccactgctgactctatgccgatgccgtcgctgtgttcgatgggtgtcgtcgtcgaccagtacaaccaccaccacctgagcaacaccaacaacagtgttgtcgacatgttcacggctgcaacttctgctcagcaccaccacttcatcaactccaccgcaaacaacatcaacaacaacggcgttctccactcgtcggctcctccgctgttgtcgccgctgtgctgcggcatgctgcagatgagtccgttcgggtcggccactgctgctggcgaggccatgctgttcaatggtgctggtggcggtgccggtggtgttggca

SEQ ID NO: 95675 - DNA, 621 bp, Heterodera glycines
tgaataaactgcaaatttttgttggaaaattacgcttaccccccgctccggggccaacaaatgcgcatccttcggtgcgccacagtgagaaagccctcgtctgtccgtctgctatcttcaccgtcgatgagcagcaaatttattgggagaatgaccctttgcaacagaatggtgcactctgctcgtcggtcgtttggtccgtcggtctcttccaacggcaccgtttccgcaacggcacaattggggcactgtgtttggagtgtggccaagtgttgtgggagatggacacggacgcgcagttgacggaccacattgtgaacaaacaccccgaatacatgccgaattcgttggcagcgaacgtggcaccggcgacggctgactcccaaattgtgccaacgtacgtcgatgaacagggcgaactgtggcgatgtgtggacatcgcaacaaatggcgaattggccgaggaaatgttccaacgcaacggagcacaaccacttcagcagcagcaacagaatgaggaggtgggaaggaagggcaatttggacactaatttgctcattaattacaataattgcttttttactattattacgtttgtctccaaataaatttttttagctg

SEQ ID NO: 95676 - DNA, 759 bp, Heterodera glycines
tgagcgcgccactaagactggcttagcggctgaggcccaacaaaaaattcacagcaaatttgacttggaattatcgaaacaaatatttggatggatttctcaagtcactggagaatcttttactgtcagtggcgaagtggaagaatatttgacgaccctcaaagatgggactggtttatgccagctcgaaaatgatctgtcgcccaattcgataaagaaaataaacaccagtaattttccattcaaacagatggaaaacatttcattctttttgggttttgctgaaaaatatgtgaacaaaagtgaactgttccaaaccgttgatttattcgaagggcaagacccaaattctgtgctcatttgtctggctgcacttgctcgaaaatcggagaaatcatttggaaaggcggggcttggtcccaaagaagcggagggctcgaagaaggaatggacgtcggagcagctgcgtgccggtgacgctatcatcggcttgcaaatgggctcaaacaaaggcgccaatcaaagcgggatgattatgggaaacacgcgtcacatgtgaaaagaagggacagactgtgaaggaccggaattttgtgtaattacttcacttaaaagccttttgtttgtgatagtgctgaattgaccttaccacggatgacacccttaatacattccttcttgccttgacacttttgcaattccatttaaaatccaagatgcatatttctaaattatcatagaataaattagtatgttttg

SEQ ID NO: 95677 - DNA, 482 bp, Heterodera glycines
taccacagaaaaaaagcaaacaaagaaatggcagggaaaatttttgtggtcactggcgcaaacaagggcattggttacggcattgcgcgtgggttggcccaacaagtgaatggtgccaccatttacatgacggcacgaacgccttcactaggcgaaaaggcattggatgacttggagaaggaattgggcataaaacgcatttcaaaattggcatttcatcagttggacatcactgatgagaaaagttgtgccgattttgcggcatttttgaagaaaacccacggcggattggacgtgctcatcaacaatgccggctttgcatacaaacataatgcgacagagtcggccgcaatccaagccgatgttacgattggtgtcaattattatggtaccaaattgatcagtgatcagctgggcccactgatcagagacgggggaagaattgtgaatgtgtgcagtcaaatgggcgtaatgggcagtca

SEQ ID NO: 95678 - DNA, 609 bp, Heterodera glycines
ccaagtttgagtgaacaattacaacaatctttcatcgtcaaacataaacaacaaaattcaatcctttttaatattaaatggttgttctgcccattttcgccgccgtcgccggcgccgtcggcgaagataagaaaaggcaacggacgggggaggccgaggagcaattggacggagacggagtgataacatcggcggagcagccgacgacgacggcgaacagcgaatgttcatcaattgtcggcgaagcgaccgacggcggcgggaaaacgccgacggggggagagacagtgacaaacgagtaccagcagcagtgccatcggaacaacatcattaacagcggcggcagctgccctttggcactttcgtcgtccgagcgaatggtcagcgaactgatcgcagcggtcattgagcagagcagacaaaggcaacagctgcagaaacaccagcaacagttgctgatcagtacgaacaaagtagaggagaccaataacagcggaggaagcgaaaatgaggcggagggggaagaaagaggggacgaaatggcaccggaggaggcgcaggcggcggggacattctgtccacgctgttcaacgcggtcaaaggcggtga

SEQ ID NO: 95679 - DNA, 197 bp, Heterodera glycines
accttgattttcttaagcaagtcatagcctgtcatgccaggcatacagtaatctgttataacaagattcacctccacctcctataaagacacaaaaagccgaaaacaatctcagaatcccagaaaaagaaactgatctgtggccaaaaataaacactgaacacaacacaacaagttggttaaaatttttaaattact

SEQ ID NO: 95680 - DNA, 753 bp, Heterodera glycines
aaacatcgcttgaggacagagaggaaaagcgtaagaaactgctcaaagcacagcttaagtcggcgaaaatggtcgtgccaccggcgcctcaaattccgaaaaaaatcgccgaagagcacaaaaagaatggcacccaaccacaaaaggaagagtcgaagaaggacattgggaagaagaagcagccgcagatggcagagcgaagagagtcaagtggcgagagtggcaagaggggaagaggcagtgggatgagcagagagagcagcaagagagcccaagggaacagccgaaagaggggcagagagaggagcagagaaagcagcggcgacaaaggcagaaagacaatgcgacgttcgtcgcgaagtcgctcagtgaaacggcgcaggcgcgactcttcctcctcctcctactcgtccacttctcgctcccgttctcgctcccgctcctatcgccgcagtccaaagcgatcgcccgccagggatcgccgccgcgacagaacaaggcgttcaacttcgaattcctctcgctcgtcttcatcctcttccgcctcgtcctcttcacagtattcttcgtccgaacggtcacactctcagtcgcgttctttcaccagcgaccgggacgaggaggaggagcgcattcgcgatcgaatcatcgcacgaacgctttccacaagtgtgacggcggcacccgcaaaacagcctcaatcgaaggatgacggcgttgcaatggatgaagcgatggaatacgggccaaagc

SEQ ID NO: 95681 - DNA, 534 bp, Heterodera glycines
aactttttggatttaacccttccaaaactatccgttttcagcctgctatactcgcatcgccaaaacaaaactaaaaaaaatgttcccgagacttttcgccgttggtggtgccgttacggtaatggccgttttgctgtgcatgcatacggtggtggaaagcgcatacacctaccaaaaattggacgatttaatgccggaactgcgtcaatatttgggccgaacccatcttggcacactgaaggcgcgtcaatactatgacgatgacacggcatttcaacagcaaatccgtgagcgcaaatccaacaatctgcgcaacttgatgaggattggcaaacggagtgtgccaatgccatcacaatcattgccggctgactccggtgccaaacatgcggcagagctcggtgttggcgccgccctcggtcccatctactacatcccaaatgacttagtccaggcttttcgtcctcagtctgtgtggctccgtcgttgaatgagcggcagcacaaaaagctttgtgcaaaaaatccgttgatg

SEQ ID NO: 95682 - DNA, 636 bp, Heterodera glycines
gagaagtccaatcactcggcccaattaaattagccatccctttaattggccttaattaagagaatttcatatctctgaattaacctcggcaatgcattctctcgcctttatttccttcgctttttgcctttcactaacggacgcttttcgtactcaatcgtccggcgtccgggggacacttctctgtggaggtaaaagacgaacaaaaggccctctctctggcctaggttttagccttaggcttaggcctaagctttaggctaggcttaggcttgcccaaaaaaagacgagaagggcaattccccgccggtctccactgatcggcactctctcattaatttttgttttgtttttcttttgtctgaaggaaaagcactcgcggacacaaaagtgaccaattcctttgatttgtttattgttcggtaagaaagaaacaaaattggaatgaaggtgaaactttacgaccacgacaaagggccggacgcggacgatttgatggggacgacgacaacggacgagcagggacgattccaagtcagcggaaagaccaccgaactgaccaccatcgacgtccaactccgcatttaccacgactgcgatgatggcatgatgccttgccaacgcaaggtgaccttc

SEQ ID NO: 95683 - DNA, 1221 bp, Heterodera glycines
gtgcaaaatgagtttggaagacggcctttgctcggctatttggccagcctaagcgacgaattggtgcagcaattgttcgagtcgcgtccgtgcgtcgtcgccattttccgtcttttgcccgcctttgcccaacaatctgtgcttcagctgatgttccacaaatccagcgattggcgttcgtggactcggagtcgcttccatttggccatgtccagcgccgttcagctccttttccgactgcgcattttggaaggcaattcgaacggcgactttcaaattaatcttgatttccgcatgaattacgtctccagccttttggccaaccctttggaattgtccaacctcaaaatgcaccatttggacgaggaaaaagcgcgcaaagcgaccaaagacttaatgggcaaaagtgtggagcgatgggagagcattctgtgctatttggcactgccgagcgaagcggcggagaaaagcgtttcggagacgacgaaggaccttttccaattcatcggattggtgcgcggaagagccaaagagcccgaaatctcttcgattggcttccaatttttgcttttgggccgctccgaacaaatttgggcctatctgatccattacatgcgcttcatcgcttcaaagggcgaagaagtgtttcccgttttggactttctgctacggctcacgctttgcatcaatggcgacgatgcgcttgcccaaccgctgaggctcgacccgaattggcccgaaattgtgcaggcattcgttgtgactctgcgcgaattgggactgattttcatacgcaaacggaaggacggttggtttctgctcactcctctgatgactcagctttccgttgccgcctcagctgaacccttagaggaaaatgccggccaaaatggcgtcgctttgcgcaattctccacttacaaattcacacgcaacaaatgggacaaaaggcggacgaaatggcgacggttttttaattgtggagacaaattacagagtgtacgcgtacacaaattcgaccctccaattggccattctgtccacattcaccgaacttctttaccgtttccaagacattgccattggcgttctctcccgcgacgcggtcagacgcgcttttcagaccggaatcaccgcccgacaaattacccaatatttgtcgacaaatattcgacagccgccgtcagctcggaacaattcgcaattgtccgattcttctgtg

SEQ ID NO: 95684 - DNA, 592 bp, Heterodera glycines
gtttgagttcatattattgtatggttggtcgtgttcagcattcaacagcatttaaagttcgaaagtggttcagcgtcttcgtttggcccgtttttgttatcagttatatccttggcgacaaataccaatattggcaattgaaaaccgggagacgaaagaacctttttgacgaattcgcatttcttcaggaggcacaaattcgagagcaaaaggcactttataacagtccgtacgggccgagagcctgagcaaatacaccgttttttggatttatctgtcaatgggcaccttcacccttaaatatttcttcaaaaaggccgttcttgagcgcccgtggtactttttccccgcctttatcaccattagttggcttgaatattcctactataaacatggtcaatggaagattggaatgatgaagggacacagcaaaatgtggagagaacgccgtgaagaaatcttacgctgggacccaaatgccgacctgtggaaatattagagaggaggacgaattggacagacttttcgatcggacttttaggcgccactgatttgatttgttctttaaaaatgataaaaacaattgtttgaa

SEQ ID NO: 95685 - DNA, 465 bp, Heterodera glycines
gagggacaaactttattttaattctaaaaaagcaacaacaataataagtcgaagtcgcacgaacgattagacaaaaaggaactgtcgacccaaagaacgcaacaatttttccacaaagagcgaacagcacaaaccgtggtgggggtggtggaggcgggaaaatgctgagagggcgtgccgctgcggttggccacggcccccaacatcgtttgccccacgcgcattcgcacgcccatcttccgccacagcgacccaagcaaaaaggtcatcagcttcagcaacaacagcaagttcaaacaggtgcagcacaaattgtagcagcattgccaccttcggtgccccaaccgccgcagcaacagccccaagcgaccaatgccgtggcagcagcgagttctttggcggatttcccaaactgtgccaatgatgtcctttcaaagattggcgattttgtccgacaatggggtg

SEQ ID NO: 95686 - DNA, 564 bp, Heterodera glycines
ctaaattttgctgaaatgtcggccaaatacttgcgcagaatgcccccctctctttcgcttcttttggccctttcgatggccttttgcctaatcactttggtactgaaatgccccgatgaagaatgcaaaaacaatttgagggaaatcatttcatttccaatggacggcgacgaaacaaatggaacaaattcatcgtaagcaatggaaaaaacggcggaaaatgcacaagagtttttgctaaaaatgtccaatttcgacaaattcgcatgtaaaattggggacaaatattgaaaattaattgaatggattgatcatttgattattatttattttcttttctttcaatttttcgttttgttctgctgccctccggccataggccattcattcgttcattaagtcaattaattaattcaattgttttatatttgtttattttccttcgcttcgttttcattgtttttaattactttttttatttcctatcattcgctgaataatgtcataatttgaaagtgcatttcaattttggattcgttacataaattgactttttccccaaaa

SEQ ID NO: 95687 - DNA, 290 bp, Heterodera glycines
gtgtacactgacctgaaaatgggcgttgcgccgtcactgcacgacgcgttgttttggtacaatttgcaccgggacggaaacggagacctgcgcacgagacacgctgcttgtcctgtgttgaccggcgttaaatgggtgtcaaacaaatggatccacgaacggggccaggaattcatacggccatgcccgctgaagaaagaatataacgaaaaatatgtgggcgacgttagaccattttgagactcataaattttgtaaaaaattgaataaataaacatttttttatcgtt

SEQ ID NO: 95688 - DNA, 229 bp, Heterodera glycines
  unsure (1)..(229): unsure at all n locations
caccaagctatggagccccagaaccgccaagctatggagcacctccgccaccgccaccgcctccgccgccgcctccgccgccgccaccaccgccgcctccgccaccaccgccgcctccgccacatcaaccaaaatatcctccacagcaataagcgcaagatggatgcaatacggatgagatttatggagataaagctgatattgataattaaatgcgctcactttgttn

SEQ ID NO: 95689 - DNA, 630 bp, Heterodera glycines
caccttcggaacactccgcaaagtcccgcagcgacggcaccgccgacgtcgagtcaaagccaacacttccaacagcgaccacacgtcgcataccatcagccaccacagcagcactatccgttgcagcaggagacgaaccaaagccaacacatccgtccccagcctggcgtaaggccggcacatccgcagcaacacccaaccgagcagcagtacccatcaatggccgggccattgttccaatcgcaaccgtcgagtgtccaagcccttcaagagcatgagattggcaatgttggacagccgaggcttgcgcagcatggccacacgcacatttctcaccaacaacaagtgatgatgggacaacgccacgcgacccatcacccgtcgcagcagcaaacactgatcagccaacagcaaagccaacacccacagcagcagcatcccaccacggcgattcgaatagaacaatccggccaagtggtgcatatgcacgcggcccctccggcgccaccgcagcaccaaacccagcgaatttttgtacaacagcagcagcagcaacaaatggtgcctacattgccaccccaaagtgcgcatgacccgtccctgcacccgccccctcttccgcacccgcac

SEQ ID NO: 95690 - DNA, 639 bp, Heterodera glycines
attatggataggagattcactgtcttccttgtgatcgcattggttacttctatttatgaagtgcttagtaatggaaatttgaacgatggcgacgactcatttaaacaattcgatgaactcgaagaaaacccagcgcataaatattcaaaagaggcccagaaggggttcgaaatggaggaggaggaagtcacaatccgagaaccttcggggacgaaggaatcgttcaaattgcccatcaatatgccgccagtgaaattttctttttgtgtctcatgtggttatcgccaagcatatgaacagtttgcgcagattttacgcgaaaaatatcccggaattgacatccacggcgaaaactatcctcccggcattcttcgcacggtgggagcgcaggtcatcggaatggtcaaaattgcactgattgtgtgcgttgtgtccggaaggagtcctttccccaccttgggacttgaaaccccaactttcttccaatggatgctcagcaatcgtttgtctgccgcacttatgctttttttattttccaatgccatcgaagggatgctccaatccacaggagccttcgaaatttacattgaaagcgaacgaatttggtccaaattggaaagtggtcgcgttccgtcacct

SEQ ID NO: 95691 - DNA, 441 bp, Heterodera glycines
aatgacggaagcaacaaaaatttacaacagactcagtgcttttcaaaagtttcgcatcaatttgaactgccatttgcgtcgcgtccggtcgaattggttgtatcagctttcgacggcgctggtcttcgttaccgccttaaaccatgccagcatttacctcacttacgggcccgaccacccgcgatgcatgcaacaatggaaggaacggaaacagcgcggattgttaacggacgaattgctttggaaggagcggctgctgtacgcccgcaggcgtgagtttctcactgctgttgatggttacggcacagttgacaattggaaacacccgagggcgacgatgggagcgtcgactttgtccagcaaactgttttaggaagaaaagcaaacaatccaaccttcgtttaatgcaattattaaatcggattaactccaataaacttt

SEQ ID NO: 95692 - DNA, 639 bp, Heterodera glycines
ctcctctcctctctttcctccttcgccacttgcacagcgactcggcaattcccgtcgcgggcggaagcaattaggccaacccatcgccgctttcattagcatcgcaccgcttaagtcagtcagtcacaaaccgacaaaagaaacggcaaaattctctcgcacattattcagaaaagtcgaggctctgccaaacctccgaacagcgaaaaattcaatcggaaagtgagtctcgaggaaagggagtcgagaggggacgagcaaaaggtacggcacggcaaaacaccacggcacacgccggtcgatgagatcggatcgggatcggactatttcagcgacgaactaaacattgacggcgcctttgcgatgaacatgggcatgcccgcgggcgcgacggaagtgcccgagggggtcgtgcagctgaatgtcggcgggacttgttttctgaccacaattgacacgctgaaaagggacagcggagcactgctgtcccagttgttgacgttggaagggttggagaagaacagcaaagtggccaagcgaatgagcaacggcaccattttcatcgacagagacggcgaactgttcgcctatgtcctggattacctgcgcaccggcaaattgcttctgccggagaatttt

SEQ ID NO: 95693 - DNA, 573 bp, Heterodera glycines
tggagctccccgcggtggcggccgctctcaatagtggatcccccgggctgcagttatccggcacgagggcttattcttctaggcaacgaattgttaaatcaaacaaacggctgaaatgctaattgcttgtatccccaaacgaattcatctcaatttgaatgtggtcggtgctgcacttcgtcagcgtatgccgttttctgcggctgtgcttgaccctcacgatcagctgaaagattcagacaagccgatgtcggagcagatgaacccttcattctttaagatggtcgattactacttcgacaaaggcgctgctgtcattgagccgaaattggttgagaacttcaaagcttcgcatgggaaatcgaaagaagagagggtcagctctgtcaaagggattcttgcggcgattaaacccgttaacaaggttctttacgtgaccttcccgcttcgacgcgatgacggatcttatgagatgattgaagcatggagggctatgcactcagagcatcgtactccaacaaagggagggattcgcttttcaatggatgtgaatgaagatgaggtgaaagcgct

SEQ ID NO: 95694 - DNA, 319 bp, Heterodera glycines
  unsure (1)..(319): unsure at all n locations
aattgttagcctattaaaatgcgctttttccttctcctaatgcttattattgcctttttatgcgcttcgccagttgttgctgcaaagaaagcgagatcggtgcctctggtaaacgtgccggattggaacattgagtcggcaaatggcggcgacgggacgaccgatacttaatgtgagatgtgccaaaaacatttggtcaataagtcaatgtgatatctgatatgatttgatggatttattgattgatcactttgattaagcaaagttaccctgcttaatgtgttaacaacctccacgaataaataaaacattttaggcn

SEQ ID NO: 95695 - DNA, 550 bp, Heterodera glycines
aaattaataaaatttgaagaaatgaattttcaaattatgtgatcaaaataccgacctattaggccatagaattacaccaattatgtcaagaaaagtgcgagaatttatattttttgaaacgacctaataaaaggaatagtcatggtttacgtcttccacgggtccaatggttgctgctgttcgggctcattgaagagatgttgttgcggcatgtcgtgcacttctgacatcgcatccgatgggcgcggcaaaacagtgccagcagcaccgacagagactggtctacttggcatccgttgcggtggcggcgtttgtggcggtcggggctgaaaattttttttaaacaattattttttattgttatttcttttatacaatagcagtatttttcttaaagataagtggaggggaatcccaccacaacgcgctgaaaatgacggtccgtcgcgtcgccggtagcgcgacgatggccagaaacaccaccgctcctgtgttggctggcattgtcatcagctttgtcaaagcctccgttggaaacaccggacatcgg

SEQ ID NO: 95696 - DNA, 1250 bp, Heterodera glycines
ggcggcgacaaccgcttggatttcgattggttcgcctaatgacctcaacgaagagcacttccctgatgaatatgagccccccgatgtgccgaattatggcgcgaaagtcaaagtgtgctatgcccgagtctgacttgctgacaaggaaatcagtcgcgcaagacgactacgactaactcccagcgctcaggacaccagactctttccagactacgaagtgcccggagtgatccacgacctaggccccgaagcacctcccggagagtacgactcccaagtcgcccacttagtcattgaatgggcctctgattagatgtgccaacatggctatgctgactatggggcagtgccccatttgccacttcttgccgagattcccgacactttggcaatgcatgtcgcgacgagtcttcccgccagcgcttcttgggcactctcagctagtgtgcatgcccaacctgtcgttgaggacatcaccagcacttgaggatgctgctccattttcactgctgccgctggtggacttggactttggatcctgacgttggcctaagcttttcttaccgcgggactggataacacaatcaaactgattgttgctgcctctatcgatgagagactttgcctcactgaacatcatgtaccagactttctagtgcattgtgacgattcggagtctttcgaatatatcttcctgcgaaccttggctcgtcttaccaatggccttcacattgtgttcgatttcgtcacttcccctcgtacaggcgcccgttcactcaagtgcctttctgaaggtggtgtccttttcattggcggtatctccggtttggacgttcagctgccaatccaattagtggccaaaaaccgtttggccattatgggcgttacgcgtggttccattgagcaactgaagaacctggtcacattgctttcagagggacagctcaatgcccccaattatcgcgtttatccggtggaccaggcatcacaagtgttgaagcaattgagcatgtccgaggttgaaggccgagccattttggaggtgtttaatccggacacagaagttaagaaggccgaggaagagcagaaataaacggattgtgataaaccgagtggaggagcctttccctcacctgtgcgcttttatattatttgtgacctttcctttctagtgattcatattggagaaggcacagttctatttaatcccggcggacgaaatttgcacagatgtaattaaggataaattt

SEQ ID NO: 95697 - DNA, 242 bp, Heterodera glycines
gttacctaagggataacagcgcaaaatttttgagaagttctcatttacaaaataaattgcgacctcgatgttggattaagaacaacttataaagaaaaatttataagagttggtctgttcgcccaaataaatcttacatgatctgagttcagaccggcgtgagccaggtcagtttatatctttgattaaataattctgcactacagtacgaaaggatctagagaagtaaagtttttatatag

SEQ ID NO: 95698 - DNA, 453 bp, Heterodera glycines
ttttttaattatttaaaatggttgccaataattccgacaacgctaaccccaattcacatgaacagaaagtccaattttctgcaccgcgacgaaattcgatgaatgaactttcgatcaacgaagatattaacagaaaagaaggctcatcaacttcagcttcacatccctctgatttgtccaccaatttgacaattcatgttgatgaacagtcacaaatgcttatgattcatccaatgactgaaccatcggttgacggcaaaagtcaacaaaaaagtacggcttcagcaccagcggaatttcagcgtgccaaatgtttagctgaaagtgaagtgattaaggaaaagccgagcattcgaactcggctcattgtttttgtggtatgtggtgcgatcattgcgttctgtttgatcaaacttttcatatggaaatgattattttgttcaaaaaatgaag

SEQ ID NO: 95699 - DNA, 507 bp, Heterodera glycines
cctcgtgccgaattcggcacgagggtccaattaagggattattcatttttcctgcttatttgatggcaagaaagaatttatgccgcaaaacatttgctacttttaagcaagaagagaggtatcccattgtccaacgagcaattggagcccgatggggcagaaaaactattcaaacgccgaacatcgaagaagaagcactacaatcagtcgaattgcgaccatcaacatctgccgaagactttgtggaatcaccgccgttaacgccatcaattgcgacaacttcggaggttgacgttctgtctgcggaaactgtggaatttggcgggtcgttctcagcgactgctgcgcaaatggatatcttcgagtcgaccccgtcaacttttgtagttcaaatggacattgaagagacgactccatcaccatttactgtcaacgaccgctcacagcgaatcgaacaactcgagaatcaattgaacgatagggacgataaaaatctgtgggaggatg

SEQ ID NO: 95700 - DNA, 476 bp, Heterodera glycines
gtccatttaagttgttgttttttattattacttttcttcattttgataatggcatccgcaaagtgtgccagggaagactgtggcaaaacggtgtaccctttggaggaattgaaatgcctggacaaggtatggcacaagacctgctttaaatgcacagactgcggcatgattttgtccatgaaaagctacaaaggctacgacaaaaagccatactgccaagctcattaccccaaaacggttccgtcggccgtggccgcaacgccggagatggaacaagcgaagcgaaacacggcctatcagagtcaggtgaaataccacgaggcgtatgagaagcaaatgaaaggcacgaagatggaagtggccgatgacccggaaacgatgcgacacaaagccaacatggtaaaccaatccttggcccattaccacggcgaactgcagaagaaagagaagcaggactcacagagggacaccactgc

SEQ ID NO: 95701 - DNA, 434 bp, Heterodera glycines
aacactacaaataattttccgcttttaataatttcaaataattttccgctttttccaaatgttccatttgcgtttcgttgtgcttcttctgctggtaattgtcggccttttcattggccccaattttgtttctgctgattgggataaaaaggtggccggttgggacgacaagaaagtgaacaaaggctgggaggaagccgaagcaccgctcaacatccgtgcccgtcgcggcggatgggatgagcgcattttgggcggtcgtgaacaatgaatggatagaatgagtgaagaagaagaagaagaagaagaattcgggatggatgccaaaaaagtaaacattcattttcaattcaaactattgaacatacacaaaacaatgaatttctttcctggtcattttccaattaaataaattgaaatatttaccagaaaac

SEQ ID NO: 95702 - DNA, 193 bp, Heterodera glycines
ctctcatactgtgcattctttgctctatttggtgtaatttttggcccatttgctatttttgttgttgacaagcgtttttgtttttccataaaaatgcttttcctaattcccttaattgtctcttcctttctgtccctgcatttctttttgtcataaattatttttggctgcaataaatttcgctgacttcaac

SEQ ID NO: 95703 - DNA, 395 bp, Heterodera glycines
gaagtagccaccggaagacgtcgacaaagcggagtgttttctggcgaaatcaaccgactgaacgtgcaataacaacgttttggagaaagttgcagcgatattggttgccttttatcaggtgcatccaacccatggccggagatgcaatgctgtttatttgtcgtctatgaacatgccgaacagcagaaaaaactacatgtgcagaggcaattcgatggcttggtgaccattgcgcgccaacaagaagttgacgagcagacggcaggcactttttccgcggtcacttcgatcggtcggccaccgacgtttacatcgacttcgcggtacacaccggccgcttccgccccatccggctcgcgcacccaaatgtggtgatgcagggctttgatggtctc

SEQ ID NO: 95704 - DNA, 549 bp, Heterodera glycines
ggagctccccgcggtggcggccgctcttcaatagtggatcccccgggctgcaggattccggcacgagggcttgacattattttggttaccatcggatacaaatcattttcgttgtctgagcatatttcagaattttccgaatgcggcatttccgactttgaacccgaatttcccattgcaccaaaagtggaaattggcacaaatcatatattcaaaggaaaaacaattgtggatgacaaatcattgccgtggatggcaagaattttaagtggagtctcttgcactgcgacaatcatcgggccccgacatgtgttgacagcggcgcattgtgttgaaggccaagcacttgaaaacttcgttgtgtcatatggaagcgccgatgcttcaaatcaacaacataaatccggcgttgaagcaattaaatatcatccaaaaacacaacattatgaaattaaggataaatttcgaaagaatacaagagcatacttatttttgaatgacattgtcgtaattaaaattaaaaactcaatcaagttttcacaaaatgcc

SEQ ID NO: 95705 - DNA, 549 bp, Heterodera glycines
aaagctggagctccccgcggtggcggccgctctacaatagtggatcccccgggctgcaggaattcggcacgagggtttgagcgagtaatttcaagtccaaatggacgccgttaaagcgccaactttggcttcgattcaccacaaaaatcgtctccaatctccgctcaatgcccacggccatcctttgatcattgaaaatggcactgtcgcagaaacattagtggacaaagaagaagaggaattgacggaacaagtcggcacttttttgttcacttccgaatctgtgggcgaaggacacccggacaaaatgtgtgaccagatttctgatgccattttggatgcgcatttggcattggaccccgcagcaaaagtcgcctgcgaggttgtcacaaagacaggaatggttttggtctgtggggaaattacttcgagcgcaaccgtcgattaccaatcggtcgtccgcgaaacgatcaaaaagattggttacgatgactccagcaaaggatttgactataaaacgtgcaatgttttggttgcgttggaaaagca

SEQ ID NO: 95706 - DNA, 359 bp, Heterodera glycines
aaaacgaaaagccgaaaagaaaagaacagaaaatggacgaaggaacaacggaaaataataataacagaaagagcggtgcaaagaaaaggaagcagaaacagaagcaacaaagcgttgttgctgaagtgactgaaccgcacaacaaacaatcggagacagaagaggcggaaaaggaaaagtcgaaaaacggcgacagcgagaaagacggaaaaaaagtgaacgaagcgtcaaaaccgattccttgccaatcaatttcggtaattggagatacagtcaaatcgacaatattattcatcacctttatcctttattccaaaattttgttttatttttctttaattattaaattttgtttagcc

SEQ ID NO: 95707 - DNA, 687 bp, Heterodera glycines
ttggagggcgacccggctaaaagaggcatcataccaaatgcggcacaacaaatcttcgatgaaattgagggaaggcgtgaacaggcccgcagatctggcaaagtgatcccctctttggaggtttccgctcagtttattgagctgtacaacgaagaactcattgatcttttgtcaccggaccggggctcatcctccatcaagatcatggagaacccgacaagtcacgaaattttgctgatgggcgcatcatcgcgaattgtcaaatcgcaggaggacattatgtccgcgctggtcattggtgcccaaaaccaaacaaccgcacagctgcagcgaaagtacgccgcattggagacgcgtgtgcgagaatacgagacggaactcgaaaacgggcgggagcagatggaacgtgccaagcgctacattgttgaccaggagaacagaccggagaaggacgcacgtcgcacactgctcaaattggctgaaatgttcgagtcgcccattcccacaacatcgaatgtggcccgtttacgcaaacagtttgacgacgacgacaacgatgctgatgacaattagagaccggacactgcttcaatcgattaatcggggaaagatcgtcgatttttctgtatttttcttaagactaatttacataaaatgtatttttaaataaattaactgtttgcaaaa

SEQ ID NO: 95708 - DNA, 631 bp, Heterodera glycines
gttttcccccgcagagtctgtcgacgctcagcctggcactgctgctctcgctcgtctattacccatcctttgaaggccgaaccaacgcgtacaaacagatgctttcaatcttccaaaatgcacaagaagtgtcctcactcgccaacctcgaggccagcttcaagttggacttcacccacctgtacaaccgcctttgtgccacactccattccgaaagaatgccgcttctgctgctctatctgctgctccataacaatgtcggcttccgcaactttgtgctctcccgcattaatcttgaacagctcgtgctccccgtcgtccgggttttatacgacggaatgtgctcagtgcctggccatggatttcaacgttcttcccccacgtcctccccgaaaatgcggcgacagtcccaattcagccacaataactcaacagttcacacccaccaaacttatttggcactgattgttctgctcatgctcagcgaagatgacttctttaagaaagtcatccatgaaatgacaatcaaaaacattgactggtacactttggaccgaacaacgcatttggcagaaaccacgttgggcggtctcattgtgctggtgttttcaaagacaattcaaatcaatac

SEQ ID NO: 95709 - DNA, 635 bp, Heterodera glycines
gacacaatgaattttgtcaagagaattgatttttattatgatgttacgacaatatcttcttggataatgttcgagcgtttaaatgtcacgcgaagactctgtccttccattgagtataacttccgacctgtgcattattcgagcttattaacttctgctggaagtttggtccctttctccacggcggcattgagaaaaaatttctttgaacagcagagagaattggcccgagtccatggcattacaattgggaccagacatggcgtaattgatgatttactcgcaaaattatcaaacacagtgctgccccaatgttttatgaatatggttgcgtcggaaagtgggcacgaaagcctcattgaactttcaagaagcttttggcgcaaattatggatttcaaatgtacacctggaccatgaggagtttctcgagagtctcagacaattgaatattcaaattccacccgatgaaattattttcgataaccgatgggggaaattgatcgaacaatggcattgtgaacttctgaatcaacatcaatgtttcgatgtcccatggactgtgcttcactttgacaatgatacgactaagaatttcaatagctttgacaaatggcctcttattgcttcgctatt

SEQ ID NO: 95710 - DNA, 661 bp, Heterodera glycines
ttgttggctgtgcctcgttcggtgctggcaacaaatacagggactgtgactttccgagactgatttatccgtcggtgggctccgttttcacggactcatactgctggtacgtcaacgtgacgtgcgaagaggcgaattatggcctcccggcgtacattgaattcaatgaaaacccaagcacaattgtcgccgcaccggagccaacacttggcagacgcataacggtcactttgcaatgcgtgggcaattcgtatgggcaaagagtgtggaccaagttcggcgtggacggtgaccccagcgcagtggtccaagtgaaaacggttagatgcgggacaaagtgcgcaacgaatgtaagcacaacgcctgccacgttaacatctccaaattcggaggggctgccgtactgtcgcgacagttgtgccgcgagaattgggcacggcacacgtggccaggactgtgatcaaactctgctaaacaacgctttgattgtttatccaagttatccgtacattctgtacggttgttggtatgttagcgtcacatgcgaggcaaaagccaacggcaacccaatttacatcaaactcaatgacgaagaaaaaacaattgtcacctcaactcagccaccgttcaacaaaataacggtcaatttgcaatgcgcgtg

SEQ ID NO: 95711 - DNA, 636 bp, Heterodera glycines
caaagatttctgcattatgtaattcttgattatgtcgagtgttggaaaaagaggcacaagaaaaaccacgcggaatgacagcgacggcagttgtaattccgcggaaatgcaagacagcgaaaacaacgccgaaaatgagaggagaggggaaagcggaggcgccggtcgtggagaagaagacggggcatttgaaccgggcagttgggaatgtacagtttgcacatttcgcaaccgttacgaagcattcaaatgtttgatgtgcgacactcgaaaagggacttcaactcgaaagccgcgactaaatccctctgttgttcagcagcaaactttggtgcaaaaattagcggttgaagttgaaaaggcacaccaaaatccgtgtacttcggcaatggccaattcgccgaagccctcacgtgccccatcggccaatggtggactgtccaacaaacaacagtccaaactgaccatccgtcgtcggcccgtccctttccgagatgccctcgtcgttcggagtgcagccaagaaaatggtggtcaatgtgagcggtgtttcgttcactgtcactgagtttaaaccgcgcacatcgccgcgagggcgcaagaaattgccggtcaatcaaaacaatggcaaacacaa

SEQ ID NO: 95712 - DNA, 589 bp, Heterodera glycines
caagtttgagctatacacccgcccccgccgcctccggcgcggcgccaccggtgcctggggatgatgatgaagtggaagaggaatgagcccgcatttgagcggccgctcgaagaatggcgggagcgccgcaaccaacacgcgcaaaacaatattcacccgcctccggcgccaccgcaggaggaggaggaggagcactgggcccaggcatggcctgaggaggaggaggcggcgccggaggcggcgttgccccgagagggtttctacctaatcggaggtgtccatgacccgatcagtcttcgttttgaggctgcgatttgcgcgagatgatgcggaacgtgtggcgccgcattgacccttcgaaacgtgccatgttcggcggtggccgctcggccggggtgccttcgcacggcggaggagcgcgtggcgggcgcggcggtggaaacttggccgaaaaatgaccaacgggaaaggacggtttaatttatctgatacatggcatttatattgagcctgcaattgtttcgttgctttatcctttttgaattgattgtctgtttttgatttttaaaaactcacatttttttgtttc

SEQ ID NO: 95713 - DNA, 479 bp, Heterodera glycines
caacattcagatttaaaaaaggtattcagatttaaaaaaggtatagcgcttttattattgctttctacaacaatgctcgcatgtaatgcttctaaagaacgctgccgatcagaaaaacagcaaggatatatgcagaaaaataaaataaaaatacaaaaaacaagtaaagcagcacaagaaagaaaagaagcagcaaaagcaaaagcagcggaaagaagaaaagaagaagtaaaaagaaaaaaagaagaaaaagaaataataaaagaagcagaaagaagaaaagaagcagtagcaatagcagaagtagaaagaaaagaagcagaaataaaagaagaagtagaaagaaaagaagcagtagcaatagcagaagtagaaagaaaagaagcagtagcaatagcagaagtagaaagaaaagaagcagtagcaatagcagaagtagaaagaaaagaagcagaaataaaagaagaagtagaaagaag

SEQ ID NO: 95714 - DNA, 540 bp, Heterodera glycines
aagctggagctccccgcggtggcggccgctctacaactagtggatcccccgggctgcaggaattcggcacgaggatgtaaaaatggtacttaaatttataaaaaaaaaatgctgacatttgctaataatgttacggttttcacatcaattacggataatacggtcgtatcagcaagctttatgtggaatgtttcaacgaacgcgagaagtgtttaacggtcatcggagggggcaaaatggctactgctttagtgcatggattagtttccgctggttttatcgacaagtccgaagtgaatatctgctcaagatccaaagaaacggcctttcgttggacggtttttaaagactgcgactgactgggaacggtttttaatttcagacacaaggttaccaaaatgcatatacaaatgatgaattttacagcaaagtgaaaaagccacgtggaattgtgattgtcgcagtaaaaccacagatctttcccgggtttctcgacgaactgcgtaaaaatggttggcttaactttgttgggcctgaagt

SEQ ID NO: 95715 - DNA, 476 bp, Heterodera glycines
tgaccggtctccaagtgcacggcaatgccaccgtcgagggttacatttcggcacttcgccggggctcacggctgttggaattggatgtgtttgacggtgaacatggtgagccacaaataacgcacaaacgcacattcattggggcgatcagtctgcgcaatgtgttgaaatgtgtcaagaattacgcatttgtacaaaatccgtacccagtgatccttaccattgaaaaccatgtgggctttgtgcagcaacggatcatggccgacattttccaagagattcttggtgaccatttgctgattccatcggacgacttgcacaccaagccattgccatcaccgcagcaactgaagcacaaagtgttgttgcgtggcaaaaccgccggcggtgctaccactgctgacataaacggcggcggaacgcacgccgaaacgacagcggcgacaatggcaccggcgagtgttgccgcaaacaac

SEQ ID NO: 95716 - DNA, 616 bp, Heterodera glycines
gtttgagatggattcgcccaaatgccaaactttgaattttgcccggccgtttttcccaaataattttgtgcttttggaggtggaaaagtcggtggctgatgctttttcttcgtccaatatgatcactgatcaatttaatcacgaaagtctttcgcttacaatccgtggccattgctctgaccctttggtcgtgtgcacttcgtcccgaacattcggcgcaaaggacgtcgaagtgtccaacactttgctgttgctcgacgggacgccaaacggcgccggagcaaatcagcaacatatcgtctccatcacaaatcgctttgtggagctttccgaagcttttcttcccgaccaaacgttccgtctgaaggcgcttttggagcaaaatttgctcgatttttacaatgaaaatgcaccggcggcggaggaatcgaaaggaatcaaactgaatgaactgctcgaccatgtgcagatcagtgagcagcaattgcgtgaagaattggccaaatttgccgtcgttgaaccggctgaaggcattttccatttgttgagcgacgaatgtcagcagaaatttctcgacgaattggtcgaactctttgacgatgccgacacaattggg

SEQ ID NO: 95717 - DNA, 291 bp, Heterodera glycines
cgctgctgctgggctcagttcgtcgtccggctcgtcgccaaccatcctgcagcaacaacaacatcgacagttttcttcggcaatttcgcagcaaaaatcgttgacaccgccgcctctgtcggtgggcagttctaccttcaacccgacgcttgaacaactgttgcaggcaacgcagaacatatcttactcgctcagtccgctcaactccaacgggggaatgaatggcagcggtggcgagcaacacgacggcacaaattttaattctaacggcacgaacaacagcaacggcgg

SEQ ID NO: 95718 - DNA, 446 bp, Heterodera glycines
ttgaatcttttatattttaaatcatttaattgcgccaaatgtttcgtccctttgtcattttggcgttttgcctttttttcctttgcgctgtcgaccgttcaaatgccggcggaatgtttgaggatttgctggagggaataagcgacaaatttagtgaggggctcaagtcaatgcagcagggatatgagaaggcgaaacaggcatttgaagagtcggaggcacgcgcatggctaattgagtcagtgctcccaacgatcaaacagaaatttgaagaagtgaaggaatgggtccatgagaaaacgacgacagtttctgttgagggaccgcaggagaaagagaagtacaaagtgatcgaattggacgaaaaataggaaaacaatcgaaaaatcgctgaacaattaattgtttgattattattatccatttggaataaatgctcaaaactt

SEQ ID NO: 95719 - DNA, 412 bp, Heterodera glycines
catttcaattgcgctaaatgtttcgtccctttgtcattttggcgttttgcctttttttcctttgcgctgtcgaccgttcaaatgccggcggaatgtttgaggatttgctggagggaataagcgacaaatttagtgaggggctcaagtcaatgcagcagggatatgagaaggcgaaacaggcatttgaagagtcggaggcacgcgcatggctaattgagtcagtgctcccaacgatcaaacagaaatttgaagaagtgaaggaatgggtccatgagaaaacgacgacagtttctgttgagggaccgcaggagaaagagaagtacaaagtgatcgaattggacgaaaaataggaaaacaatcgaaaaatcgcgattattattatccatttggaataaatgctcaaaacttaaaa

SEQ ID NO: 95720 - DNA, 596 bp, Heterodera glycines
gtccaaataagtcaaaaagttgcgtaaaaatgcgtttcgttgcggtgattggcgatgggaaagcagtggatattttcgtcaaagtggcagcggtcgtttcaaaattgtgtcggaagagagcggtcgtccgaatcacgccgaatgagttcagttttgtcaatgtgtacaatgtccgtgagggaatgcacgtcgacttccgcattcacaaggataatttatttaattcatggagctttgacggcctttccctggacaacaacgcgattttcttcgaattgtccaccgacgacttcgtccgttcgctgcattcgcgtgccactcaaatcaaattgaaaatgaccaaaaaggacggggtgccgcaccttcgcgtggagctcagtgccaattccctggtcaacgaaattcccattgttttggttgttctacgacaatggcccgacttcaacccaccaaacatgggcatttctcagttggcagttgcacttccaaacgtcaaaacattgacaaaaattgtctcgggtgtgaaggacattggcggaaggcatttgatatttcgcgcaaacaatcgtggagagttcaacatcattggttatgcc

SEQ ID NO: 95721 - DNA, 539 bp, Heterodera glycines
cctcgtgccgaattcggcacgaggattaagtcaaaaatggatcctccgtcagtaattgcaagtgccgatgcaaatggtgaccaacgccagcagggcggcgatgtcaaaattgagcaagtgcgaaatcaactcgacggcgtcacaacggtgatgtcgcaaaacgtggagcgtattctcgagcgtggcgaacgccttgaccaattggacaaccgcagccaggcgctgcacgagtcgtcgcagtcgttcacccacacgagtcagcgagtgcagcggcgcatgtgtctccaatcgatgaaatggtccatcattttcggcctcttcctttgtgttatgcttgtgctgctcgtgctgaccattctccgcattttcaacgtcatctgaaggcgaacggagcggcgaaacgaaaaacaaaacaaaactaacaaaatgagaaaataataaataaaaacatttattttttactcatgaataaatttacattctttacaaatgagatgaatctgtgcgcatattttaataaatcatcaaatagataaaaa

SEQ ID NO: 95722 - DNA, 664 bp, Heterodera glycines
agaagaaattgtgttcatttacaaacttgcagcaaaaaacaaaccagcaaaaagatgaaacgcaacggaaattccatttgctcagaaaccaagccaccgcttttggaattgacgccaaagaatgcattaactttccgtggcaaactcggccacgtcggttccgtctctttggacatcaaaaattgtgagatctgctccgtttacttcaaagtcaaatcaaatgccaaccacttctattcggttcgtccaaacaccggtgtgattggggcgtacgggcgcgtgaaggtggtcatccaattgcacgacgacagtctggcaaagttggacgagattgaggaaaacaagcacaaattcctgatcatggcagcgattgtttcggatgcgtccattggaacggagaaattttggaaaggcaaaaaagaggggatggatggcatttactcgagcaaaatgaagacggaggtgcacaaagtttgtcggtgggaaggagggaagggtgtgctgagccaacagaactcggaagaaaatgtgccgaacggaaagaactcagtgtctgtggagaaagtgccgaaccaaattttggagttgtgttcggagaaggaagcgccgaaccaattctcgaacttggaggaaaatgtgccgaacggaaagaactcaatgctgc

SEQ ID NO: 95723 - DNA, 602 bp, Heterodera glycines
attaattaatgtccgtttggtgccgttttcccttccgaaaagcgtttctttcctccgccttttttcctaagtgtgtctctgcttctgactttgcctttgttcccacttcttccgcgcttcgttctttccgcctttttgtcgacggtccgatgtcttcggatgctctctctgctgaccgagtcgccgctgttttgcgttcaaaatttcctgcgaccgatgggtcggcggtgcacgtggaggacacttcgggcggttgcggcgcaatgtttcacgtgcgggtggagtcgcctcaattcagcggagtgtcccgcgtcaaccaacacaaaatgatcaacgaagtgttgcgaagtgaaatcagagatatgcacgggataaccatcgaaacgaaagccgtggacagagggagagacagcggacagtgattagcgaagggaaagggagagactgatcggagtgaagggagagactgatcggagtgaagggagggactgattggcgcttgttttgtttttttgaactgttaaagttatgggagttttaaattctttcgcatcgtcagtacttgtcccattgtttgtatgtaacaaaagtctaaaaaccaa

SEQ ID NO: 95724 - DNA, 470 bp, Heterodera glycines
gcagtgccaatggcacaaaatttccgccttttttgccaccaaacgccaccatccgtcaattcggacggttccgaggcgaaacggcgccaaataaatgagccaccaaaggaggggtccggcggagctccatccctttccgtcgacccgttcggctgggagccgaccaaatgggaacgctttttcctcgtgttgacgcggtgttacgagcgcagtgccgacattcccgcaattattcctctccgagttggtaaacagtacacgaaacgaatgcgcctcctccgcttttccttcgctttgctggtcgcgatcatcgtctgctttggggccgagttttacatggccagttgggaccgacgcatgcgcaggggccaactgagcgatggcgacgtgaaatttttggaaaagatgcgcgataaagttagatgacaaaagagacacatacacacacatatatatattattttttcgca

SEQ ID NO: 95725 - DNA, 462 bp, Heterodera glycines
tctcgactttgtcccttccaatgcccattcttccgtgcccttattaatcgtcgtccttcctcgtgttcttcttcctccgctgctctgctgatgttcccctacagttccttctccaccgtgcgtccccactccatctcttcccaaagttcatccactttctcctcccggaatttcacccaatcggacaccgaagcggaagaggagaagaagtttcagaagcgaatcgtccaccgaagagaagtgctgacaccgtcgagaatgaaatgggactgggacagaagagaaatgttggcctcgtgttccacgccaaagtcaagtcaggaggatttgctctgtcactttcgccttttagacgaaacttcggtgtattttcgacctaagcccagcgatgataaccaacagcaacggcatgggaataataaacagcgccaaaaacgggcaaaatgccaacagaaacagcag

SEQ ID NO: 95726 - DNA, 550 bp, Heterodera glycines
aaagctggagctccccgcggtggcggccgctcttcaactagtggatcccccgggctgcaggatttcggcacgaggcttcggcgtcgtcgcccaccaccggctcatccgccgctggcacttctcatctcggagcagcggtggcccctcccaaagccgctgtggcgtccgacagcggagcattgccgactggcacaccaacaacgacagaaaccccaccgtcgacgacagcaagcagtacaacgacgaaagccactgcgaatgaaaaacgaattgcggaggagggctccggcggtgggctggcgttcgtcaccatgttcatgctgctcggcatctccgtctccgtttggctgctgtacgcctacttcaacccccacactcggtccggccaactgctgatcaaatatcgcccttcaaaatggcaaattccgagcagtcatgtcagatactcggcatctgtgcacatgtgatgaatggttttggtggtggtgctgcggcacagacagagagcagcgaaggccgggtgcagtgaaaggcggtgagcgggtgccgg

SEQ ID NO: 95727 - DNA, 408 bp, Heterodera glycines
agcactttaaattataactgttcactcccaaaagtgaaagatgactgctaaaaatgtgtccccatcttccaaagagagcagttgttcaaggacttcttgcaactctgaaacgagtgaaactcgtccactttccatttgcaacgcacaatccatcgtcaatttccaaaagtcattgcgcgtttacaacggcaaatcgaaatttgctacgaagaaattggcttcctctgcgtccgttccgaccaatgcaaacaaagcaacaaccaaatagaggacaacagaacactcacaagcttttgttctaatggaattttcttacattctgtgtaattatgattgtctcatcttttacgacttcgatctctgatgtttttatttccatgaacattgaacaataaatcattacaaaaa

SEQ ID NO: 95728 - DNA, 685 bp, Heterodera glycines
tccatttgcactccatttcgcttctcattttcaatggatcaattagaagtttttttgacctatcctcctaccgtggaggacaaggaactgatcgccacttattctcttgcgggacgtttgcttcgtcctcttctgccgcgcgatgagaaccaccgacgactggtttatttcaccgaggaattgaacagcactgattactttttttctgatggtcagaacgggagattttgtgtggtttctctgcgacttatgcgtgccgataagcgtcagagaatgcgcgagtattttaacgagaacatggcagttttttctgaaacgtacgactgttcattcggtttccacgaactggaggcgatggagtgggacgtagcggtcattaaagtgtaccgtgagcacatggctcgttgctggaacgacatgatgggacagcttctgtacgtcgttaacatgtacgatcggggtcttgacccagtggatatggtccgcacgccgtctgctggtgagtcgtcgaacaatggctcggatcagtctgatgtgtctcataatgatccgttgccttcggtgtagcaaagagaatttggacggacattttcactccatgttttgaaacgttaagcatttttattgttacaccaaaagttaaaaatatctcgcaatttttgtggaataaagaacatcccaatgc

SEQ ID NO: 95729 - DNA, 812 bp, Heterodera glycines
gacccatcttacacacaagttcgattagtacaaaaattttatcatccaaaactacgtgatgcgacatgctgcagctccaattcgtgactatgaccatttgttcaagttgctcataattggcgatagtggagtgggcaaaagcagtttgctccttcgcttttcggacaacactttctccaccagttacatcacaacaattggtgtggatttcaaaatacggacgattaccgtgatgggcaaaaagattaaacttcagatttgggacacagccggtcaagagcgattccgaacaatcacttccacttattaccggggcactcatggtgttatcgttgtgttcgacgtgaccagcattgagtcgttcaacaacgtaaagcgttggcttcacgaaattgacaccaattgcgaaaacgtgcaaaaaatactcgttgggaacaaagtggacgagccgagcagacgtgccattcccgaagctgaggctcgacgttttgcagagtcaatgagaataaattatttcgaaacttcggccaaagaaaatctcaacgtggagcagatgttccaatgcataaccgaaattgtgctcgagtcgtgcgtggaccgggagaagaacaatccgagacaggcgacggatgtgctcaaattgcgacagagaccggagaagaaaaggaaatgctgcggctgacgcccccccccctcccttgggaccgctgtttaaataacttttgtttatatttggactgtatgcattacatccttaaattttatcattaatttatatgatcatatttcatcatttgaagcttttacttttg

SEQ ID NO: 95730 - DNA, 489 bp, Heterodera glycines
gtccaattaagatcattgatatttattgctaaacggcaaaacgtttcccaatctttaaatggaggatcaaccacaactttcacaaggatttttccagacttttttggatgaaaaagtgccggccgactttcagccgattttgcaagtgcttgagactcgtaccattggctcatcgtcggcgatgggcggctatccgccacaggggcagcaaatgcgggctcgtctcagcgacagtttgtactcgtacagcggttgcgtcattccacagacggtgacgcggcggttccaagacgacgggctgagcacccacaacggcatcatccaagtgaccagttggaaacgggtcgacggtggaaagctttgtttcttccaagtgttggattatacgctgtactcgcttgactttcctgtcattggcaacccgcaaccacacagtggaaacccggcggaatttcgccgagttgttcagcctcaaaaagatcccgacac

SEQ ID NO: 95731 - DNA, 489 bp, Heterodera glycines
gacacgctgaaaagggacagcggagcactgctgtcccagttgttgacgttggaagggttggagaagaacagcaaagtcagtcagtccaggggcacagcgacgcctttggtcactgattaatttggaggtggccaagcgaatgagcaacggcaccattttcatcgacagagacggcgaactgttcgcctatgtcctggattacctgcgcaccggcaaattgcttctgccggagaattttcgcgagttggcacgccttcgagaggaggtgcaattctaccaaatcgacgaattaatgcagcagctgatccccttttacaacctcaaattccccccaaagacacccaccggccaaaacaacggaagtgtcgctttgaccgctgcggtggcggcagccgtggcgaaaacgaatgctttgtacgaaacgggtggcttcatcactctcggctaccgcggcacttttgcattcggacgagacggacaagcggatgt

SEQ ID NO: 95732 - DNA, 583 bp, Heterodera glycines
attccatccccttataataaatattacttccttctcttccgaattctctattaaaatttgattgccgtgcaaaaaatggacggggacggcgacgaaagctattgcgactcggacttggagttggagcggagctcgtcggcgaacaatgtcaaccaactgccgttggtgcccaccgaattcacttccattccggaggccatgcagaattttaatgccgtttttgactcgagatacggggcccagcatgcgccgttcttccatggatctctgcaggatgccattgccgaggcgttcgactcgcccgcgggtggcgctgaacatcgacggcctttggccatttacctccacgacgaccaatcagttgcggcgcacatcttcgctcaaacggtgatgtccaatgtgaatgtgagcaacctgctcaagtgtcagttcattttgtgggcttgggacgtttcgttggcggacaacaaaaagcatttgttcgattggttggagttggccaacctgaccgaagtgtccaactgcatcggaatgggggccgcgttccgaatttccgatgcttattgtgctgatcaaggatcgt

SEQ ID NO: 95733 - DNA, 485 bp, Heterodera glycines
attttcctctgtttattagtcatcaaaatgggaaacattgtctattctgacaagttgtcctgttacgaaagtgccgactattgtgctcgttcatgctccgcatcttcgcagtgcgtttacgtggacaattgtggcgactcggccaatgcgcattacgcgtgtttgcccttcgacacgcgactgctcacgtttgttctcgttccgatgatgtaaaagcattcagagagagaagaattaaaacaacgatagatagaaaaagttgtccaatgcctcaacaattaatcaggtggattttggtcgtttccttcctggtaatcgtcctctgctgctccgctttggtggtgttctacgcccttagggtgatccgacgatcattccgaaatccggtccaaactgacggagacatcgttttctacaatgccagaaacgtgcacaattttccgcaccctgcagcaatgaaacagccaacggtcgaagacgacggc

SEQ ID NO: 95734 - DNA, 1016 bp, Heterodera glycines
aatcattgatgagtcacccgtcgcaattggcaatggcggcacagaaacacagctgtcaactccattccgtggcgttttggacgtgcgctttgagcccggccaaactttgacagtgaagggaatcgtcggggagaaggcgcgccaattcagcgtcaatttgcacagtcggacggccgacttcagcggcagcgacgtgccgttgcgcgtcgcggcacgcgtcgaccgggcaaagattggcctcaattcgatggtgaacaaaatgtgggggaaggaacagcggaaggggcactcgttgaagcccggcaagcccatcgacttgcgaatccgggcgcatgacaaggaatttcagatcataatcgacggcaaagcgttcaaacggtacgcctaccaatcgccgcttcagtccatcacccatttgtccattgacggcgacttggccatacagcatattcattggggcgggaaagtttaccctgtcccctatgaaacgggccttccccacggcttcccaattggcaaatgcctgaaaatgtccggcactccgtcgctgagaaagggcgggcgctttgaagtcaatttgttgcgcaaaaatggtcacattgcgttgcatttaaacgcgcgttttgacgaaaaagcggtggtgcgcaattcgctcgaggcaaatgaatggggaaatgaggaaagggagggcaaaatgccattcgaaaggggccattgcttcgatttggccatcacaaatgaagccaatcattttgggattttcgtcaatgggcaacattttgccaattttgtgcatcggtcaaagcccgaagacatttttggcctgctaattcagggagacatcgaactgaccggactggaaatggaatgactgacctaattaccgtcattatgaaaaaaacttttggccaatctcaaccaaaataaattgggaaatatattcataaattaatgaccacaatttgttgacatatcttttaatcattaattaattggcaaaatactgactaattttc

SEQ ID NO: 95735 - DNA, 379 bp, Heterodera glycines
  unsure (1)..(379): unsure at all n locations
cggcgaagagacgcaaaaggaaggcactgaaagagtcgggcggaggagacggcggcgagtcgcaggagagcgagcacaatcagtacagaggtgggcaaaccatcgttctgaactcgttcaatggcgcaaatgggggcaatgggatgaggagaagcggaaacggagcgaacggaggggcggaaagggcggcgcaacggcaaacgattgcctcgagaagcattcccgtttagagacagcgcaacggcacaagccaattaaggaattaattaacgaattaattaattaattaatgaacaaattagctaattaacgaattaattacgaatatttgttgatcagctcgttttgtttacttattaaatataattttgctcaaaan

SEQ ID NO: 95736 - DNA, 379 bp, Heterodera glycines
tttattgtgaagtcactaaacttgcgcaagtgattcactttcaccagcagcaagtttgaagaacaccttcgattaattatgtcgcctctccgttttatcattgcctttcttttggtcgttttgtgcgctttttccgcactgataaccgcgcaagaagagagagttgacaatgaacctgctgctctgcgcgccagacgcggaatgtacggttcgccgtacggcggcggaatgggcggcggcggaccatggtgaggaaatttcggaaagaaatgagaagggagcaaaatgtggtgatcaagacgaacagaacaagccatttgattgaatatttgtgaaaatagtcaatgtaacaattagaaagaaataaaattacaattta

SEQ ID NO: 95737 - DNA, 360 bp, Heterodera glycines
ttttaatttttcaccattcgctaccttcgccaatgcttgcaccaattccaataattgagccggcaactgtcactgttccgcccaatgaagacgttgtgggctcatatgatgagaatcagcaaagagaagaggaactcctggtcaatcaatttgtcatcaattcggaagcgatcaagcgcatattggacgacccgcgctacgctgacaaaaaggtgtgtgtagtcagcgtggcgggcgccttccgcaccggaaaatcgtttattttaaacttttttctgcgttatttgcgttggcgctcagcaccaagtgtcgatgagatggtgaacgattggttgaaaatggacccgaagttggaggggt

SEQ ID NO: 95738 - DNA, 476 bp, Heterodera glycines
gatatcttgaatttattttgtttcctcatccgatggcctcgagaacgttttctcgttttgcgagcaattttcgtcttttcggttcagttatggcgacaaatttgtcaggaaggagtcactgtttcgttgccaagaagtccttaagcacgtcccctttggtctatgctactgcagcagccgcttcgcagccgaccactccaaaggcgaccgttaagggaaagaaagggcgtgtcgttgctgtcattggtgctgttgtggacgtgcaattcgatgagggacttcctccaattttgaatgcgttggaagtgcagaaccgcgcttctcgcctcattctcgaagttgcacagcacttgggtgacaatgttgtgcgaacaatcgccatggatggtactgaaggtttgattcgtggtcaggaggttgttgacactggtgacccgatcaaaattcctgtcggacctgagactcttggtcggatt

SEQ ID NO: 95739 - DNA, 477 bp, Heterodera glycines
gtttgagaagccactgttatttgtaatactcacttttcaaacgggtctcagcgccgccggcagagcacaaattctgaacagcgactcttctcttccttcgactttttcttccgtcctttcaattgcattgagcgatttgcacgtccgaatgcaaaatgtgcaagaagaccaagtccgagccttgctgcaagaagttatcgtcttgcttcagcgaagagatgaaggggtcccagatgttcagacaagtggtggagctgcgcaatgacattgccaccaacggatgcatcgccgggggcgtcgaatgctgtgatttgacggcgcacactgtgcagcgaagaccccaaacgactggccaactgtttctggagaagctgtacttcgtcaagcacgtcgacaacaattcactcgctgattctccccgcgagcgtgaaattctggccgaatatcgcaatttgctgtactccatcattctgaatg

SEQ ID NO: 95740 - DNA, 411 bp, Heterodera glycines
tatttcatttcatctttaaatctgccattaataaagcatctcaaataatccgccactgaggtcaaaatggtcgaagttcagcaactgatcgaactgatcttctgcattcttttgcccccggtcgccattctgttgcacggcggcttggacattctgcatttgatcctcaacattgtgctgtgcattctcggctatgtgccgggcataatccacgccctttggtactgcttcttctcgtgatgttaattgattcactaattgatgaccaatttcaaagtattatgccgtagacaaaatggatacccccgcattactcatcaaatcagatagcatttagctgaatttcaaaaattttgcttaaaatgttaataaagacatttcctaccagagaacaaaaacacactgacaaaa

SEQ ID NO: 95741 - DNA, 388 bp, Heterodera glycines
  unsure (1)..(388): unsure at all n locations
gttttgccattgctgtggtcgcctccactcttttccatttggactaattgaaaacataagaataatttttatcccaaattatgttttctcatttgaccttttccccatttctctgttcatttgttttgtacacctcagaagcattagccaaaggacggcttaaattttgttagcattcccactgagcattagtaactgttatttatttactcataatataataattctgaattgtttgtccatttgtcttttccacttttctattctttgttatttattggttttcttgtcatttttccttttctggtgccattgtcatttatttttgaattttctattttttatttttctttaattttttaacaaaaataaaaacattttctnnaan

SEQ ID NO: 95742 - DNA, 260 bp, Heterodera glycines
gtccgtccgaactccgccgtaatgaaaaaaccgctttttgcttccttgccttacccgaataatggcgttcatcccgcgcaccattccaacgcttaacgcaaagagcagaacggacagaaggcattcggcaaatgggaaaaaactggtgatggctacggaaaacggcaaaaattgggacggcggaaacatttctggcatttctcgttgtttcgaaaattaattaataaataaatatgctaaataattttttataaaaaaaa

SEQ ID NO: 95743 - DNA, 512 bp, Heterodera glycines
  unsure (1)..(512): unsure at all n locations
aaaaaatgatgcgggagataatgacgaacggacccatccaagttcaagtggattggtatgtggatgcctatttatatggccaaaacagcacacaggtcaatgtttacatgcacaccatcgtcaatcagactgacaagggtgattaccaagaaggatcattgaaactaatcggatggggcgaggaaagcacggacaaaggcgagctggtcaagtactggttcggcgtcaatagttttggcactgactggggactgaatggactgttcaaatggcgtcgagggacggatgaatgccgcattgaatcaaagggtatcagctttggcacccccgatgtttgagaaggcttaacgatatctgctagatgtcaattggaaaaaagaatttgacttaaaacccacgcgtctctaataacataataatgttaagtagatggttaaatgttgttgatacagaataaaaattaatagggctgaaacnaaaaaaaaaaaaaaaaaaaaaaaaaactcgagggg

SEQ ID NO: 95744 - DNA, 475 bp, Heterodera glycines
ggaatagccgcatggcaaacgacgtttggctggacactctgttttggattgaccgcactgaggctggtggccacgcatttcaaactgcgcaaatggaagctgggcgagctgggcattcatcgggcaccaagcggatgggactggggcggcacggcgactgtcaccgttatggacgaccacccgttgatgaatccactgccgcttgccaagtgtcctgcaccgaacggcgtgattggcttccgtgccatctacatttggtgcgtcgacctggaagtgatcacatttctgcagtgcctgcaacgcgttctcaacctcggcatcgctgtgcagttcaccatccattcgaaggatgtccgctgctggtatttcgaagcgccgagtgccatttcggtcaattacgtcgtcgtttgtcatcgcgtcgcaacaccgaggtcgttgagcgggagaatgaacggacgggcgagtggctgacgct

SEQ ID NO: 95745 - DNA, 538 bp, Heterodera glycines
attaagtaataatcataaatggtgtttgcgggtgttaattgttctaccaatattcggtgggtgcatcgttgggcatggacgtctcgccgtttgtgctcttcgaccaaaattatttatgagcaaaacgggaatcccgctgaggtcctcaaacttagcaacgaaaaaatcgaccaaaatgccattggagcaaacgaagtttttgtccgatggatggccagtccgataaatccgtcagacatcaatcaaattcagggggtgtatccgattaagccacctttgcctgccgttgcggggaacgaaggctgtgcccgagttgagaagattggttccaacgttcgagagttgaaagtgggcgacatcgttcttcctaccaatgccggccttggcacttggcgtacccacggcatttatcagtcgactcaactgttccctattgacagttctttgcaactcgactcaatcgcaacggcaatgctccaagtgaatccgtccaccgcctatcgaatgcttcatgactatgccaaattggtccccggtg

SEQ ID NO: 95746 - DNA, 475 bp, Heterodera glycines
attttctcaaccatacgctgtcttcatcatcgacaatcctttcggcggcggccgccggtgccaatgaaacgaccgaacgatttcgactggcattggatgactttgtcactgtccatccccatttgacttgtgcactcatcgccgtctccgtctcgttggccacccatctggcgctgttcgtcttcgcccgtctctttgactttgcgttggcaaagtttcgcccatttgtccgtcgttgtcgtcttcttcgtggaggaggacggtcattccgcgttcacatcagcgatgcgccactgttgtcatccaacggaccgttcattcactcacaatttacgcaacatcagcaacgggcgagtggcaaaagccaactgctgcacaaagtgccaacaattgaagcggatggcggagacgacgacggtggcattgccaacgctgaaaaagcgaaacggacgacgacgcccgtcgccacgtctcg

SEQ ID NO: 95747 - DNA, 633 bp, Heterodera glycines
gcgctcaagtttgttgttctggcactagccatctctgctgcggcaggaaatcatccctttctagcgctaacattcaagagctgcagtaccgggtggagggatgtgccgcagacttccccggccgctgggccggctccttcaacagctcaccccagtaacagtgcgttacaaacgctaaatacaatgccaggaacggatccagcccccaaaaccaaattattaaggaactgccaaagtgtatgctatccgccggcgccgctgaatcccacattacgaaactctcaaagtgtctgaacaaaaacattcttctgccatggaccttcgtcgaaggtgacaccgtctacacccaattggaaacttttacgcacatgttcgccattcaagactgcctggaatcgtctgcggatgtgaagaaggttgactcactcgtgggcaagacctgtgcctaccagctgtacttacaatatggctacggcgcttcagaggacgcagcaaagaagtggttggaagcgtgcttgcacagagcgaacgttggtaaggccaccgacgccctgaagtgctatagcagtgctctcacagaccccgccgtcatccagcgcgcagcggactacattgctaagatgaggggttagg

SEQ ID NO: 95748 - DNA, 477 bp, Heterodera glycines
ctcagcatcagtcatttccggcggcgaataacggccgcatcgtaccaagcaaaaagtcgggcaaaaagaacatgcgaaaggagcgcgggaccaccatcaacgtgaaggagttagctggttactttggagaccgtggcttggatgaaattttgcgcgagtttcaacccaatcagccaaacaccggcaggacggcaccaaaaaaggaaaagaacggcaccgatgccaatgtcgtcgccaccgccgctggggccgcgtcagcggccgtggcagtgccaccaccaccagagcaaaagcagcagcagcagccggagatcacagctgacaacaatgagccgagcacaaagaaagggaagccgaagcacgtttcctccacggcccatcgccccacgctgacgaaacagcagcgacggcgtcagcagcagcagttggcgactcaatcgcgaggcagcagtgcagaggaggtggaggttgccatcg

SEQ ID NO: 95749 - DNA, 545 bp, Heterodera glycines
ctggagctccccgcggtggcggccgctctagaactagtggatcccccgggctgcaggaattcggcacgagggagcgcagcgcaattgatcgagccaaccgggcagaaattaacaaagtgaagatgcgcctctgtctggcattatttattgccgcttcagcattgtcacttggccgatggattgaagctggagtggtcgaggatgtaaaagactacgtcgatgccttttccgaaataagcgcaccggcagcaaccattggcgagcagctcaggaaaatttcagcccgagtttcaaagctggttcagttaggaggtccggtcggaagcctcgcagcattggctatgcagaaagcccttgaaccggagagcgaggaaatggtcgcgttgaaattgttgcactccaccatggtcaagagattcgatgtattggaccgtcgagttgagcatttgggcaataggctagttcagcacatggcattggtcgaatatgaccatgtatgagtattactattcgattaattactgtgttaatatatttaactagac

SEQ ID NO: 95750 - DNA, 625 bp, Heterodera glycines
caacaacatcaaaatgcaccggcgacaatggaaattgacgagcagcaccaggcgaacagtgcgggccatgttgttgcgtcgggggaatgcgtacagcaaagggagcagcaacaggaaatgcccgatttgtcagcaatgaccgaagaggaacatttggagtatgttatccggctttccatgacaggaaaccaaccgacgcaaagtgctcaagatggacagcacaatcagcaacacactcgctctccttcgggcgcaatgagtacacctgctccaactccgatggaagtggaggagggaactgctggcggtaacaatgctaaagggccggctggtggcggagtccaactcggcgatttgttgcaacacccggaaatgcttcatcaattggttggtcaagtgccggttgatagcagtgaggcaacaacgaaggaccaaccgacggaagtcaaagaatctgatgagaagaaaacgagtacgaagaaagaggcggaacgaaaggacgacaacaaaaagggaaattccagcgaaaattgaagggcaaatgctgcgaaacgtcgtattattcgataaactgaactgatccatcatctgttgcttgctgactaataaagtttttttttttgtt

SEQ ID NO: 95751 - DNA, 347 bp, Heterodera glycines
gtgggccgggccggaaaacggcaacaaattcgaggctcaacgctatgaacatggccaaacgtgttggaatggaccggagaggtccactttggtgcagttcgagtgcggtgaacagttcgaacttgtggaaaccagcgaaccgtccaagtgcgaatatcactttttggcaaaatctccgaccgcttgtgctaacccggaagagctaaagggggaacatgctgaactctgaaggataatttagcaagactaatgttgttcttctaaatgaaaattcttaatttaattcgacttgtttggttaaatttgtaatttcctgacattcaaatcctgagaattggagaaattgt

SEQ ID NO: 95752 - DNA, 662 bp, Heterodera glycines
gagcttgaatatttccaccacgaatggagtgcatcggctgcttggctttccgaacttcgttctctgttttgctcagaccattcagttcggccaactttggtcagggagcacgggacattggttcccgtcacaatgtttcgtcacgtcattcggccctccttgaaaaagctttggctccctttgtaccgcgtacggcgaaggaattggccgaatatttggccaaaaatgtcctctaccattctgtcggcgatgtcctcgtggtgcacaaaccttacggcgttggctctttgggctatgttcaaaaggaatttggcatttttccgacaacgcaatacaaattcaaagatcgaatggacctatttaacggagtgaaaaaggatgattcggttactttggaggatgcaattccgcacttaaaagaaatattccacgagccaaagttacacttttgcaccggtctcaaacgttgggtgtccggccccgtggtgcttccctgctctgagaaggcttttaaaaacatcggtcacagccttttccaaggagagtccatcagtcacagcaatgagcattggacagcccagcacatgcaccgagcattggcaatttgcatttcgcgccctcccagagacgaaggtgccgtcgatggctacgccacgttccaa

SEQ ID NO: 95753 - DNA, 574 bp, Heterodera glycines
ggaaaaaacaaaaagacttcgtcttataaagaaaggaaggccatttcgtaccagcagggcagtgaccctccgtttttggcacaattcaaaaacaaactcggatacaaagaatggaccgtcgaggataagtttgccaaaagtgatgacgaggaggaggaggagggggcggacaatccgacggatgacatccgaaagatgcgagaagaggaaagaccccaagtggtggtgttggacccgagaacggatctgtcggcggaagaactgcagaaagagattgagaagggaaacgaggaggaagacaagcgcaaaataatggaaggaaaaattatgtttcggaagcccgagaaaaggaagacggaaaatggatgtgggaaagaaggaagcaaagaggaggaggagaaggagaaacgagccaaaagagaagagaaaccgggacagcagcagaaggagcagaacagacgacttctttcgtttggagaggaagacgaatgaaccaaaggatttctcgatttttatgcgatggtttaaaagcatctcgatgtaattttagtgaataataaaaaaactcgactta

SEQ ID NO: 95754 - DNA, 580 bp, Heterodera glycines
ttacttcgaaagtgcgcaaagcgtttgtttggagtgcgacaagtcgtgcgcaacttgccatgggcctggtccgctccaatgcgacgaatgtgcacagggctttgccaaccatacgatgggttactgtcgccagtgctgttctcccgaccaattgactcagaaggacttgcactgtgaagattgctccaagagttaccccgaattccgcacgaaaagccatctgtcaatgctttctcttttggccaactttttcacaatcattggcctcgtccttttgggcactgttcttttttatttgtgtcgccaattgatttgctgttgtttcgggattggtcgcaatggaaatctttctgatctcgagtacactcctctgacaacaattggtgatgatttggacggcagaaaaaaggaccaaaaacaaaacatgggttttgcgctagaagatgatgaatccgaatccgacagtgataatgcggagtcattgatggaaggtgaaaagagttcgccagaagccgagaaagagcagaaacagcagcggaaagtgccgacggaagaagccgagagctaaaaagcgtcggag

SEQ ID NO: 95755 - DNA, 662 bp, Heterodera glycines
tgagctttgacaaaatgagtgtaaacgtaaaacaaaagaagacggcgccgaaaagagacgtttcgtcgtcgccgagccaatcgtcgacgagcgactcgagcgaagcttccaacgaatcagttgacgaagcgaaggaagaaacgacgccagccaatgacaaagtactgacgaagtattccatggcagctgaaattgtgaataccgtcctcaaagaactcatttcggaggtcaaagaaggcgtcgaagtgggccatctctgctcggttggagacaaccgattgcttgaacttaccggcaatctttttaaaaaggagaaaagtgtgcagaaaggaatttcaatgcccacgtgtatttcggttgacaattgcgtgtgccacttttcgcctctgaagagcgaacctccagtgctgctaaagcagggccaattggtcaaagtcgatttgggtgctcacgtggacggatacatcgccaccgccgctcattccgtcgtcgttggtgcctctgcggaaaataaaacgaccggcaaaaaagcaaatgccattttggctgcttacaacacgatggaaatggtgctgcggatgctcaagccaaccaagtcgttcaaaaatgctgaagtgactgatcgtattgggaagtttgcaaaaacatacggaacgacacct

SEQ ID NO: 95756 - DNA, 476 bp, Heterodera glycines
tgtttcttcatgtatccaccgaaagacagcgacagcaacttcttcccgaatcgaatgttgagtgtggacagaagccggagcagcagctcccatctcgtcggtctcaatgctgctctgcaaggctgccgttcggacattccgttcatgttgcagcgtgtctcattttccaaggacatcaaattgcatcggatgcttcgctatctgcgcgcttgcttcgtccgtgacatccgtgaacacaaccgtggcttcaacaatgggacccaacaaaccacaaaatgccaaccggagatgatcgaccaaacgaatggcgtgttgaacaagcgaagctggctggagcagaacgcctactttgccgagaacaattgcttctacccattctacggccaagcagtgttttacgcatcgtttggccagcacagtgagggacgggtggtgtgctgcagcgatggacgcattgatgaggaagagagcttcaa

SEQ ID NO: 95757 - DNA, 425 bp, Heterodera glycines
aaaaatatttttgtgccatgacttcaccgccattcattcacgtggaaattcagcacaattctgtgcgtgaaggaggatttgacattaagattttcaagaatgggatcaccaacaaaattttctgcctcactcacacggacagcaaggagaaaatggtcatcatgccgcgttgcattgtcccggctatttgccgttaattggcagcgacgaccaaagctggggatggaatttggtgaacaatacaattgcgcacaacggcgaattcgtggaacgatacccgcgtctgaacaagaggaggaacgacgggagcaagcagcggaagacagaacgaacgaagaaagtgatcaagacgccgacatcgatgtcgttgactgatcgaggattgatggtttattttcactacacgtataaataaaaatgttaaa

SEQ ID NO: 95758 - DNA, 487 bp, Heterodera glycines
gtttgagccatttaaaaaaaaatctgacaaaatgaatttttctccgatcactctgtttctgctctcttcacttgccattttctatgcagcggttgcattccgccaacaaacggtcgccgttcgcggccgtttaatgtgtggggataagccattgacggacacgaaagtgaagctgtggaataagaacaaaattggccgtgatgatcagctggcggacgtgaaaacggacgcgcagggaaatttcgcattggacggcggcgtcgggtccattttcggcatgaatgtgcacctgaaaatttatcacgactgtgatcgtggcatccttccgtgccaacgcaaagttaacctcggcattccgggcgagtacgtcacgcggaccagcaccgttcagcgatggttagacgccggcacaatgaacatgcagctgaagtttcatgacgaatcaacttcatgcatcaactaatttaatgtttaagaggatgagatg

SEQ ID NO: 95759 - DNA, 628 bp, Heterodera glycines
aagattcaagacaaggagggtatcccacccgaccagcagcgcctcatctttgccggcaagcagctcgaggacggtcgcacgctgtcggactacaacatccaaaaggagtcgactctgcatctcgtgttgcgtctccgtggtggcatgcaaatcttcgtcaagaccctgaccggtaagacgattacgctcgaagtcgagtcctcggacacgatcgactcggtcaagaccaagattcaagacaaggaaggcatcccacccgaccagcagcgcctcatcttcgccggcaagcagctcgaggacggtcgcacgctgtcggactacaacatccaaaaggagtcgaccctccacttggtgctccgtcttcgcggcggcatgcaaatttttgtcaagacgttgacgggcaagaccatcacccttgaggttgagtcgtcggataccatcgattccgtcaagaccaagattcaagacaaggagggcattcccccggaccagcagcggttgatttttgccggtaagcagctcgaggacggccgctttgtcggattacaacattcagaaggagtcgaccttgcacttggtgttgcggttgcgcggcggtcagtaaaagtgcgtgtgcggtccgccctca

SEQ ID NO: 95760 - DNA, 823 bp, Heterodera glycines
accctttaagagcaatttcattataccgcgattcgcttttttccctcataggagtgacaaagatggagccgtcaaatgaaaatgttaacggggacaacgtgccaaacgccgcgttgactggcgggcatccgccggccgaaaaaattggttgcatgcgcattgcacgcaaggagcgcaacctgagccaacagccggaggagcgggagaagagcggcggcaccacgcccgcctcggcatcggagagcggcgactcggcgcacagcgagggcgagacgcgtgtgcggccgggcgcaaccaatgtgcttgcgtacaccgacttggccaaacagaccaagttggtttatccgactgatgcggtccgccactgccatgagaagccgttcccaagcaagcaggcatacactgcgcaccgtaccaacgcggcgcagatgcaagcgcaccagcagttccagccaagacgctttggacacctgaagttccagacacgcgagtacggcccgttgcacaaacagtgagggggaaaatgaatagtgccaccgacggatggatgggagagggatgcataggaaaacgatcgacggatgatgagataaaattgggcgagagcaaacgacgacgagatgccaagagttgtttattttgttgttttgattccagtgtctgatggagcactgcttttctctttctttcttttctgtcatttccacacttttcccttccttttttcttgacatggtccaaaatgttgatgattgttttcgtaacaaaacttcaaattgtacaaatgcaacatttctcatttatagtaaattattttgttttg

SEQ ID NO: 95761 - DNA, 575 bp, Heterodera glycines
caattaagcccccgttccggtccaaattcggcccgctcgccgtcctccgcgcacggagtccttcaccaatacgctgatcagccgcaacaccaattggactccgcccgttcgttgagcattgaattggcctctgccacccattcgctttcaaacgctgtccaaatggcttccaccgggtcgaccaaaaagatggctttgcatgcctcggaatgcattgaggagatgacacgcgcatgtgacaaattgatcggcactcggcaattgatcaacaacgaccccgacatcagcacggacgaacggcgtcttctgctggagggtgttaaccgtgccatctccgccttccgtcaacggcttcattctgtccttggcaacggtgacgaaggtggcgccgggatggacgacggccaaacatcagcgactgctcacgtgggcaaatgggacggggaagaaagcggtggcctgagggtttgagccgaacgcggaggcgtcgtactgtataatatttggcgggtggacagaacgccaatttttgtgtttgaatctgtgcaactccaccatggttgtgtgtgccctcc

SEQ ID NO: 95762 - DNA, 475 bp, Heterodera glycines
atacgaacagtcaagcaaaagactcgtttcgcatttccatttttttcttcttccattcctatggcctctgccccgtcctccgatcgcttttcctccgatcactttttctccgatcggtcccttcgcccgcaatgtctgcccaattgcgcttctctctcttttggctttgtagtggacaaattggcccagcattgtcactgctttagccatttgttcgaatgcggccaacgcattttcgaagtcagtgccaccgaattgagtcccaccaacggattcacttcacgagtgtttcgctgtgaattcgaatttggcacatttgtcggagaaaagcgaatgccaacgccaaagaagcggacaatgagtgcaattgcaaaagtgatttcactggagagaatggacactttgtgggagaatttcgttggcaaaaagcaaatggaaaagatgcgaaatagcagagagcagacagaaatgataa

SEQ ID NO: 95763 - DNA, 298 bp, Heterodera glycines
caggatttttgtccaggaaatcaaggtccaggtcaaatgtgaaaaaaaatccaggtccaggtccaggcaaaacaggaaaaaacctggattttcctggacaaaatttttgaatttattttttcaagtgaccgatgtttgtcaagttttcaaaaacaatttatataaatttaaaaacacattatgatttttaattagatatttttagatgcttctaagcaaataattaatttttttcaagattttttttgatttttaaaagaaatttcaaaaaaatccaggtccaggcctggatccaggt

SEQ ID NO: 95764 - DNA, 365 bp, Heterodera glycines
  unsure (1)..(365): unsure at all n locations
gaaggacaaactttgcgtgatagctgaacccagcttggctgagaagggagacagcggtggccctttgatgtttaaaactggcaaaaataataattgggcacaagtgggcgtcgctagcacatcgacgtgtaacccggaaaagcccaaaagcaccgacggtcttacaactgactacactcaaattgattgcaattggatagaagaagcgacaaatggagaagtgaagtgcatagaataatgaacgaagttgatatatttgattgaactgaaacttttttaatgcttttaaatgcactaaaatattctatttaaataatttttcaattctttcaaaaagcatatttaaaataaaaacgaanctccnn

SEQ ID NO: 95765 - DNA, 751 bp, Heterodera glycines
tcgggcttctttcgttggcggatcgtattgatgtgctcaattcacttactaccgaagatcgcaagttgatggtccgtcttcacagtcttgaaattcttggcgtttcgaaagttttcgatggaatcagaaccgcatacttggcactcaaacacaggaagaatcgcaaccatcgtcagcgtattgtcgtattcttgggcagtccattagacccgttgcttgaagaaaaggaaacgtttataaaattcgctaaaaagctaaaaaaggaaaaagtgagtgtcgatcttgtcttgtttggggaggccaccgcctgagaataacaatatcattgccgattttgtcgaccttcttaacggggctgaagagggaaattcgcatttgttggtcgtgatgggtggagacaccaaactggatgatgttttgctccgttcgcccatttttgcgggttcgggggctgcattaggcgcaggcggagaatttggcatcaacgaggaggacgacccggaattggccatggcattgcgcatttcattggaggagcagcgtctccgtcaacaacagcagcaaggcggcgaaggaacggactgaaagatcgaggcgcattcaaccccaatttacaccatcccagacaattctgaaacattggacggagggaaggatgatggtataccaaacgatcatgttgttgggaagtttcggactcactttattttgtgtacgaataaacaaaaattgaaataatgtgttaggaagt

SEQ ID NO: 95766 - DNA, 642 bp, Heterodera glycines
catccgtttatttccttctcacccatttaatctcaaaaactgaattaatccaattttgtcatggatccgtccgccgtttcttcttcgtccagcaccgatcagcaacaaaatgcggaagaggcgcaaaagggcgatttgacattggcacagcaaattgcggaggacaaacagaaaatgtttgaacgctcccagcagtaccaacaggaaattgaggacgaaattcgcaagactcagccgttggtttcgtccaagcaaaacattgtccatttggttggcgaatttgatgagaagacgagctctcagtacttcaaaaaggcgacggagcttgccggcgtttactcggacattcggcgaatccgtggcgatggcaattgcttttaccgcgctgtactcaccgcccaactcgagcgctgttttgaggacgccgaggagctgaaaaggttcaatgagcttgtcaaaggttggcgtgctcgtctgatggccgtcggctgcttccccgaattgaccaccggtgacttttgcgattcgatggagcaactgatgacttcgctgctcaatggcacaatgctaccccaaattttgctggacgacctcaacaaggacgggattgccgattattacgtggtcttcattcggctgatg

SEQ ID NO: 95767 - DNA, 642 bp, Heterodera glycines
tccatattttattgttttattggaaaccttttcatccattccccttcaatgatctcctttcgtcattcggtcaacaaatgtttgctgccacaaattacaaatcggttgacttccaatttgtccgccatgtgtctttcaacggctgcagctgacaataaagttgtttcaaaatatgacgactatcagaaggaaatgcgtcttaagcaaatcgaacgcgcttttgacgaggcgatgcctaaactgttgcacggctcctacaacaatttgatggcgttcctcgacacgaattccttccgttttgaagacaaagtttggctctttgagtctgatagcattcacaagacggtttttcgcatggcaaaagtccgtttgtatttggccttcaaatctccgcacaatcgttttgagacattgggcacacatatttgcctcgacgagaatttggtgacattaatttggcagctttcctggccaaaagatgcaaagtctgcctatctattgtctccaaagtcactggctgccaacttttctgctacgtttaccggcggccctcgctcccaaattggacgcattgagcacaaattggccacgagtgagtcttctgatcgcccgccctccaacgcgacaacccaaaatggccga

SEQ ID NO: 95768 - DNA, 504 bp, Heterodera glycines
tggatcccccgggctgcaggaattcggcacgaggaaatcccttgcctaagaatgttggtattaagatgtttgccgattagcttatacaatggtcctttatctgggtgaaaataacacaaaatttatttattttcttgatggcgaaccattgcagaaacaaaaggatttgggcattttaatcaatcaaatccttttctaaccatattaataaaattttaaaaaattccatatttttcttgttatcagcttcaccgagcattaaaaactcgaagcttgaaactttaatttcggcatataaaagctatagcagaccatagttaaaatacgccaaagaaacttggaatctattaaaaaaagaaaaatgcacgcaaaattgaagcagtccaaaaattttacaagaaaagcattcaaaaaagtggccttgttcccatgccgtatgaagaaaggcgtgcattttcacctctcgtcccaaaaaacgagaggtgagaggcgagagtcccaaaa

SEQ ID NO: 95769 - DNA, 462 bp, Heterodera glycines
gccaaattccctcgcctccctttgccctttgatctgttcctttttgttttcaaatgtgcggttgtccaacttccgcaaatgtcgtccacagttcgcccgaaccaccaaccgaaaaaagtgccgagttggccaactcatcgatcagcagatcggtcggcaacatcagcacatcgcctgccaagggattggcctgctctctgtcggtcaaccaaacgttcaaattggtcggcatcggctgctgtttgacttgcattacgaactttcccagcgcatttatgcacacttcggtgaacactgccgtgatggagttgaactcgtacctgaacgagtcgtacacgaaccgcggcactcagctgaccgaccagcacttctcgctgctccgctcggccatcaacagctgctggtacgccggccaaattgtgggcgcactctgttcgccgcgtttgtgcgacaaatacggac

SEQ ID NO: 95770 - DNA, 751 bp, Heterodera glycines
aaatgaatagcagtgaagaaacaacggaaaatgttgggattggcggaaataaggacgaacggcagacaacttcaaaagatgagaccgacgaaagcagcagcgaaaatcaacggaatgaacaacgccaacgacaaatggacagcgaaaaggaggactcgaggttcgaatgcaatatttgttatggacatggccaaagatgcggtcgtttcgatgtgcggccatttgttctgttggccatgccttttccaatggatggacacgcgtccctatcgccagctgtgccccgtgtgcaaatcggcgattagcaaagacaaggtgattccgctctatggtcgcggtggtggggacagcgacccgcgcgagaaaattccgccacggccgcaaggtcaacgcacagaggagacaaatcagggctttcccgggatgttccattggggcggcgacaacggtggccatggcggcggcggtgtgcaattttcgaccccgatttctctttggccgaccaacttcgtccgacacggaagcgccatgtccattctctgtcttggcaaagtggccgatgtttatctgatcgacgagcccagcgcgtacttggacttcgagcagcgcttacatgccgccaaaggcataaaacgcaaaaagagtggcttcattgttgagcacgattttatcatgtccacttatttggcggaccgcgtcatcgtttttgacggccctcaaccgctggtgaacggaatgaaccgttttctga

SEQ ID NO: 95771 - DNA, 617 bp, Heterodera glycines
gtttgaggtagtctataagtgataatttatcactgttaattattatcattaacaatggtagccgcgccagatgaagcgcaatttcatatttcgttttacactgacgaagaagagtgtaagaatttgttgcctgccgagtccatcaatgtgcccgcgtcttcgcactcggaccaactcaatgtgttgatcaaccaaatcgggtcgatgaacgatgacagttggaagcccgtccaattcgactttctgctccattccgtgctgttgcgctgctctctgctcgagttggtcgagcagcaacagttgtccctggagaatgtgctgcgcatcgaatgcattcgccagtcgcccgctccgcggccgaccgccgaactgaacgaagcgcaatgggtggccgatcttagaacattgagccacaattgtgttttgtccgtgaattttgccggtctgctgaatgtgtgggaattggccggtgaatggaccagagccgtcgtcaaacaattggacgacgaaccgttgaaatgcgtggacacattcactcgggacgacggaacaactttcgctttgagtggaggtcaaaaccaaactttgactttggtgcgactgcgggcgcagaatag

SEQ ID NO: 95772 - DNA, 462 bp, Heterodera glycines
gtatttatgagctctatagaattcagtttgcctgtgttttgttcgccaactcagctaaattttgtgattggaaagcgagatttatgcgagagcaaaccgatacaaatattcaacccttacaatcatttactgcgctttaaattcttttcaaatgcgcctgagcgttggcgcgtggaaaatgctcagggcggcatccgggccaacaattacgtcacgacgacagtccaactgcgcgagccgcacacaatccgacagccgaccagcgactgtctccgcgtggaaattttcagggacggcgaaagcgttgcggtcggaagaaaagacattttgctcaacattttgacggttgagccgccctcttcgtccgtcgatggcgcaaattttgtcgaattttctgacggcaccgacgcggcattaaacagcacggcacagcgcggcgaggccaaattgcggacgaattcc

SEQ ID NO: 95773 - DNA, 519 bp, Heterodera glycines
gagctccccgcggtggcggccgcttttcaatagtggatcccccgggctgcaggtaccaggcacgaggatttgttccaattttaatatgaatttcccatcaagaactcgaactcagttggtcacggactgcatcgattactcgaacgaaatcgaaggaattattcgtgctgttcccctaatatggcaacgatttgaagaagcatccaaattctttagagtgatcaacaaatttgtcggctatttcccaccacttcgcgattcatttcctacgccaggcaacgaaacattggacgaaattctgcgctgtgctggtgtcggagtcagattgttagttgaggcagagagtgtttcggactattccctctcaaacttacgtggcgccctgttcgccatttattattcggccgtgtactacatgccaacgactgatgactgattttgctgatggacttattcgtgacgaaaataaaataatttgttgttgcatttctctgttgttctgataaaaatttatttctc

SEQ ID NO: 95774 - DNA, 613 bp, Heterodera glycines
aatttatatttctttgctctgcatataacaatcaacgagagaaatggggaattgtaagcccgcggatgccactgagtcggagaacgcgtcttctgtcgagacggttgaagttgaagtacctccggaccctctcgttaacccattctggaagatgcaaaaagccttcgagaagaaactgcgtaatctgttgaagcgtgagaagaagcttttgcaactgaaggaagaacgcgattccgacaagccgatcactaccgaccaacacgaggctctcagcaaattggacgaagttaaaaccctcattgggttcgttgatgagatgatgaagttgaaccagcagcagttcagccagtataagaaagccatcaaaaatcgtgaacgccaactgaaaatggagaaggcgcgttctcaaatcggtactccacaattgtcggatgagctgaaaaagtcgacggaggtacagacgaacggagtcgccgaggaagtgcaggcggcggtgggcgtcgtgggaccttccagtgaggtttagaacgtgtgcatttgggacgaaagagacggacaaattattgatgtttatcaatcagatgcttttgttggtaaataaatgtgaattgtc

SEQ ID NO: 95775 - DNA, 254 bp, Heterodera glycines
gacaggccgaggcggaagccgagagggcgatggacaacaaccaaatgaccgctgaataccaagcacgctggtttaagaaggtgcaagactcccacacgggctctgtgatccatgttgttcgggacgaagaatattggcgatgcaaaataaaccgggactggtctcgatgtcctgaaattttctaattaaatcggatgggtgcacggggtaacacacggattgtgataatttgccataaattatttcaacatttc

SEQ ID NO: 95776 - DNA, 387 bp, Heterodera glycines
gcagcaaatttcacactgaaaatgtcttctttgtccaccattcttgttcttctgctgataatttccatttgcttgtcattaacaattgccatgccagcagtggacaatcaaattgaaagtgttgcacttcgtcaaaagcgttatgactatggctatggctatggctacggctacggcggcagaagagtctaattgacggcggaatgggcatggatgggctttgatggacgcatgggcatgggcggcggatttgaacgccgaccctgacccatgaagaatataatattgtgaatcatctgaaatagattatttacaaaatgccattcgcaattaaataaattttgaataaaaaaccccaaaatacgagaagaagagaagacatgaaaa

SEQ ID NO: 95777 - DNA, 323 bp, Heterodera glycines
  unsure (1)..(323): unsure at all n locations
ctcgcgtagtgttgtcagttgctgtctgtcccattctcgctgccccaattcattgacaaacttggccattctctcgccacctttcgtgcatcctccacactacgcatctgcacgactctcatttcgccgaagcggtctgtcaaccaagaaatcagaatctcatgtatgacaactgagaatcaccgccgacataaccagcaatttccctgcgcccttagagctttgccttgccgcttttgccctcctgatgcttcttgagatactggatcgtcttctccacgccacccgccttgccaattacaatacatacaattcaagattcn

SEQ ID NO: 95778 - DNA, 481 bp, Heterodera glycines
gtccaattaagatgcccgcccctttggctgttcaacagaaaatgataagcgaagacgggtcggacgcaaacattccccagcaacacttttccgccaatggcaccccccagcaaccgccgtccgccactgtccctcccgccgccgcggctgcgcaccttttgaagaattcgctgtccgcccctctgctggccaatttgccgcccgtccctccccaatgcggccccccaaccgtttctttggcattgctcatcgatttcgccatccattggaactaccgacaattcgaaattttgtccgaactgaacagcaaaaagaaggagacggaccggaagatcagcgtggtcgagtttgctcacaacactcgtctgattttcgtgcgtcttctcgccattgtccgttggctgaaaagtgccaaaaaattcgagccgctcgcctccattcgccacttgctcgacgaacaggcgacccgttacgtggagac

SEQ ID NO: 95779 - DNA, 477 bp, Heterodera glycines
cccttttggttctttttccgctgtttctctgctcctccgctgctctctcccacctttcccaattgggcaattcgcccccgcgtcagtcgtccatctttgacagggtcaaggtcagctgaaacacatggaaaaggaaaactgaggaggcggagattgccaaaaagcgatggagccaaacttaaaaggattatttcaaagttggggtaccaacgcttctccccccaggccccgctctgccatcccatcgacatttcgttgtgccgtgacatcccttacaatcggacaattcttccgaatccgttcatcgatggattggacccgcaaagtctccaagcgcaaacagaacatttcaagccgctgattcgcaccaaatgttccccgcacattctgttcttcgtttgctcagtgttcgtgccaatgtgtcccgcacaattgccacaggcagtcacttcgtgccgttccgtctgcgaggaggtt

SEQ ID NO: 95780 - DNA, 677 bp, Heterodera glycines
aagcagcttaacatttccttgcaccgcacttcggtcactctcttttctatgaagggcccaaatgatgccaattcgtccatgcaatttgaactgaggctggtcagtggccgaacagaattcccttccgttttcctcgccactcgcgccaattttctacttcaaaaaggcgaaaatcgcaactcggccattatttcgctgagggaccctttggatgggccgcacgaagtgcacctggaacttgtgcttcgtctgagtgtccgcggaatatttgccggaaaatacatggccaatttgacggttttcgtctcccaacaaaaagcgcaaccgcaccatccgccgcaattgcagcagaaaaacagcgcaaaaagacatcggaggaggagacggacacaccgtaacagagaagaaagaggcgcaagcggacaccgtaacggaatacgtaccgtaaccgaaaaaatcggcggatggtagtcaagtcacaaatcaaatcactcactgtcagcaactgcttttaaccggccatttcggtgtttgttctgccgaatacctcaatcattggaggatgctttttctctttttgttcatttgttttgtgccgcgaattgcaaatttcattttggcatttcattttcattttggcattcgcttttattctgattagataaatcgctagagaa

SEQ ID NO: 95781 - DNA, 962 bp, Heterodera glycines
gtccataaaaggttacggaaattgtggcctatccgaaaaacaacttccataaaaaacgaaacttggcttattgtcatagagagagaattctttgctttgcttttccgatgcttcttcgtccgtgcccttctcttccgctcctttcaaatgcgctttctttcgttgtccatttgccttttcatcagcaaaagacaatttccacttcggtctttgccctcacagtgtttgaccctcgaattttcaccgagcccatcgtttctactgaggagttgaataaaccacttccgccaaatgacaagcgcaattatatgtatctgaaaccaatgttatttgaccaaactcccgttttctacagggatgaaattgtggacaaaatggtgcgcgtatttttgatggagggcaaaaaggaattgtcacgcgtaaatgttctttcggcactggaaattgtcaaacgaacgcaatacgaaaaatggcttaatgaaaaagacgagaaaagacgtgccgaaatcattttggaccccatcgaagttgcgaaccgcgccattctcaattgtcgtcctttgatgaagttggaaaagacgatcaaagccggcaccctttacttagtgccaatgccaatcagcgaaaaggtcgccattttcaaagcgatgaaaacaatgcgcgacatttgccggctaaaggcgggaaagaagcgcaatgagaaaaggccgcactacccgcactttaaggatgtgctcgcgtccgaattgctcgccgcgatggaaaacgaaggactgaccattcaggcgaagcaggagctgcacaaaatgtgcgagcagaacagaagttactcgagcatgaagaaattctgactgtttttctttgttttgtgatttggtctaaatttgatccgtttttattttatttatttattttttggtcgcttttccttccatttccttttaaatattaatttatttgtt

SEQ ID NO: 95782 - DNA, 716 bp, Heterodera glycines
gtttgaggtacattttcttccactgatcagtcacttctgatcaatcgttcattttgcttcttcgtttccctaaaccatgatgccctcgtcgccatcctccgcccccctaggcgcaaatgttttggtgaccggcgccaaccgcggcattggccttggcattgtcaaggaaattttaaaaactgacggcatcgtccatttgttagccggatgccgaaacccaagccaagcggaggaattgaaagagctgtcaaaatgtcacaaaaagctgaaattgatcaaaattgacgtgagttgcgatgaaagcatagcaaatgcggtggccgaagtgcgcaaaatgttgggctcagaagaggaaaaaggactgcacacactcattaacaatgccggaatattggagaaagagggcggcactttgttggcgcccgaccgcgccgcgtatttgcgccatttcaatgtgaacgtcgtcggcaccgtggccaccaccgccgcctttttgccattgctgcgaaaagcggcggcaacaaattcggagggccaaacggaggagcagcaggcggcgcccgttgtccgcgtggtgaacattggcggagcgttgggatgcattggcaaagtgttcttaaagccatcggagtgtccgtatcagaacatggcctatggcatgagcaaggccgccgtccatcacttcaacaaaatgttttcgattgatcagcccgact

SEQ ID NO: 95783 - DNA, 659 bp, Heterodera glycines
cttttcacctgctgatctcattgccgatgtgcgcttccgctgctctttccgcttttgcttttttggatgattctgaggccgaaatcgactgggacgaacgatgcccaattgtttattccgaggattacaacatctcctttttcggcattgagaagtgtcaccccttcgactccaataaatgggcaagtggtgccctcgtcgaaagtgccgtcctccgaccaatcgaagccaaaaaggagcatcttttgctggtccactccaaaaaataccttcgctcgctgaatggccgcttcactttgactcgcattttggaagtgggcctcgtcctcctttttcccatttgcctaatcgaccgtcgcatccttcgtccaatgcgaattcaaacgggaggaacggtgttagccgcgagagtcagcctaattaggggctgggccattaacatcggtggcggctttcaccacgcctcagagggaaaaggcggcggattttgcgtttatgctgacgtcactttggcaattaaacttttgttcgctaatgaattgatcaaaagtgcaatgatcgttgatgttgatgctcatcagggaaatggccatgagactgattttgcctctgacagtcgcgtgtatatcctcgacctttttcacgcgtccatttacccc

SEQ ID NO: 95784 - DNA, 292 bp, Heterodera glycines
gagaatttccatttataatggccttggcccattacggctttttggcacccaaacgacgcattgagccggccggcatttcttatgaattctcgttgatcaaagatcggctgatcctcggcctttccacacttcccgtccttcaaattgtctttcaaaacagcaggacgacggatggcgacgacattgacggagccgctgttagtggaacaaaaaatggcatatattggccgctttattttcttgatcaaattttttgtttggatttcaatgcgttaaaatcataatcaacgcg

SEQ ID NO: 95785 - DNA, 1199 bp, Heterodera glycines
ccaagtttgagcgaagatcactcaaaaggggacgcccatggagagcagcgacgccaacaataacatcaacaacagcgagggggaggccgaaaataccaccaaaaacggcggagaggagggcgtcgagaagaagatcttgagcaaaggcgtcagcggggtggtcaaatggtttaacgtcatgaatggatacggcttcatttgccgtgatgacaccaacgacgacatttttgtgcacaattcggcaattacagcaaataatccatccaaaattcagcgatcattgggcgatggtgaaaaggttatgttcgacattgttgatggtgctaaagggccagaggcggccaacgtgactggtccggacggagtgcccgtgcaggggtccaaatatgctgcagatttgagccagcgtcgacgttttgcgggtccacgacggaattatttcttccgcggaaatcgaaaccgccgtccccggcatagcgaagaagcggcaggtggcgaagtgccggtgggcgaaaagaaagaaggcgcagaaaacaatggaaaagaggctaagaaggaagaggttgcaaaggacgccaacggaggacgtggcggtgggcagcgtcgaggccggggcgttcgtttccgcgggcgccgcaacaatcgtcgaaacgtcgcgggctcaacatctggtggcacagaaaatgaaggcgaacagaaaaaagaacaaacgcagccggaggaagagacgaaagtgaacggaggcgaatgagcgaaatgcgacctcttttgtttagcgataattaaaaaagtaataagtctgcttcctacgatgtgttatgaattgtgtcgacaatttaaaggatttgctgacacaaagatattacaatgctttttcccacctctcaattggattgaatgatatcctcacttttttaatcggttttacatttggactcatcagcacaataataattcaaaaaatagtttgaatattttacgcgaaacaattaaacaaatcattgagttgcccatcgggaagtgcttacagccctttcacacgggtttgtagtcaagactggtctccaactttttggcgtccgcaactttacggactgccttcatgaagtcctcctgtaccacgccgtccctctcctttcggatcgcattcagtccagcttccgtgcacacattgcgcaggtctgcccctgagaatccct

SEQ ID NO: 95786 - DNA, 557 bp, Heterodera glycines
taaattaaaaccctaatcgaccgtttttctatctgcaaaaaatgctgcaattcgaagaggtttgtcctaatgtcgtcggtgattcgccatgaaatctgttcgaaactttcatgcaggcaatggcccaattcaacgcaatgtttccaaatttgaattcgtccgtcgttgagtcagtgctgcgcaattgtgacggcgatgtgagcagaaccatcgatgaattattgcgacgaagtggccaagaagaaggaaataattcggagacggatgaacggcgaaagagtgtgtccactccgccgagggaccaatgtgccaatgacgagaaaatcgctttgctggtccaaaaccgcgagtttctgaggtatctccgtcgcgacccaaacttccaacgtgaaatgctcggccgttccaattcatctgattatcgacatcggcaccattcttcgactcatcgaagacgcaatttgcccgttctattaacgtcgtctcgcacttcccaatcgcctaattcaatccgtttttttcgtacatccgccgatgttatgaccaatccagcggaa

SEQ ID NO: 95787 - DNA, 476 bp, Heterodera glycines
  unsure (1)..(476): unsure at all n locations
caattaagaattttaaatactcatatttattacaaatgtcggattgtatgaccgacgacgacgccgaggaggccctccgacagttcgctgaaataactaatacggacgaagcatttgcccattttattctccaggatgtcaatttcgacctcgatcgtgctttggcccgttattacacggccgatgaccccgaggcctcctacaaaaaattccaaaccgaaggtttggacagcgcacaaaacacgggcagtgaggtggatgacgaggaagggtcgggtggaaccccaaatgacaaatcaaagggtaaacagccgccgcacaaacgttcgcggcatgaggacgaatcgaaggaaagctcgaaattccctgccgaactgacgctgnatcacttggaatgtggacgggacggacggacgcaatttgaacaaacgattctatgcggtgctttacataattgcaagaacgaaccccgaagt

SEQ ID NO: 95788 - DNA, 1126 bp, Heterodera glycines
gaaactctggtataattttgggctttcaattcaaaaaaatttcgccatccctgtgcgtaaatgactaaaaaaggcgacgacgaaagcggcggtgaagcagcggcggcaattcgtgtgctcgtgacgggtggcaccggactggtcgggtcggcaattcgacaggtggtgacggaggaagagcagcaacagaagccccagcggttgcaggagcagtggtttttcgtgggcagcagcgagtgcgacctgaccgacttggagcagacgcgggcgcttttccgccgcgttcggccgacgcacgtggtcaatttggcggcaatggtcggcggactgttccacaacttgcgccacaacctccaattctttgtcaagaatttggcgatctgtcaaaatgttctccaatgctgccatgagactgacgtggaacggtgcgtttcgtgcctttccacgtgcattttccccgacaaaacgccgtacccaattgacgagacaatggtgtacaatggaccgccgcatgacagcaattttggctattcgtacgccaaacgaatgatcgatgtgctcaaccgcggatatgctcaggagcacaatcgaaagtacacttcggcagtgccgtgcaatatatttggaccgcgtgacaattacaatttggagaacgcccacgtggtcccggcactgatccacaagtgctttttggccaagcgcgacggcggccctttggtggttgccggctcgggcaaaccgttgcggcaattcatttactcgttggacctcggccgtctctttgtgtgggcaatccgcgaatacgaggacgtggaacccatcattctgtccgttgacccttccgacgaagtgacaatcactgatgtggtcaccgccattgtcaaagcaatgcaatttaagggcgaagtcattttcgacacgaccaaggcggacggacagtacaaaaagacctcgtcaaatgctaaactgcgcgcccggctgcccgacttcaaattcacgcccttcgaacgtgccattgcggagtctgtgcaatggttcgaggccaattacgagaaggcgcgcaaatgaacgaatggacaaacggccgacggacaaacgaccgaaaattcttagtgatagacaatta

SEQ ID NO: 95789 - DNA, 481 bp, Heterodera glycines
cacaacagtacaaatttgatggagcttttgtctcaacaatcggcaaagtcggcggcgccggtcgatggcccacaaaaactttggcaccaaatcaatgacgaaaacggcaccgaagcatgcgaccgccacaacaatgggcgacggtgctgcttctgtttagactgtcgccgtcggcattgttcctttaccatttcgcccatcgacggcatggagtggctgcagcagtgccacccatcgtacggcgttgacgcggatttgtcggcaaaacggttcctggaggaaaagaagttgaatttgtcgcgccgtttccaactcatcgagcggggctatgtgctcaaattgaagaacgacgacggagaagggccggggggagggaaagcgcagcgaaggcggtgctccaaatgcgggtgcaagggaagtttgttcgatcagctcactgtccgtttgatcgccggtagcgaaatcgaaaacgaaggcaaaa

SEQ ID NO: 95790 - DNA, 475 bp, Heterodera glycines
aaatgacagtcgcgtgcatttgtacgatttgcctgccaacggcggcgcatttgttgagaaaaaagtattacaacatgcaggtgccataacctcggtgaacttcagcccaaatgggaagtatttggtggccacggacattgccagaaaagtggtgccttacagtgtggacgacggtttcaaagtggcatctgaaaaagaatggtcttttcatacagcccggatcaactgctgcgcctggtccagcaacagtcggtacatcgccacgggttctctcgacaccaatgtgatggtttgggacttgcaacaaagcggtgaacatccgctagtcatccgcggtgcccattcgatgagtgccatcaacggagttgcttggctttccgacaatcgactgcttactgttggccaagactcgaatgtgaagcagtggacactgaaactgtgaagacggtttacgcagacaatgagaaaacggcct

SEQ ID NO: 95791 - DNA, 1245 bp, Heterodera glycines
tttatctttaaaatgattccggactcggcgtacatcgaaatcatgaaaaactgctcaaaatggaatagccgaacaatgggtggtagaactcggtcacaaacggctgttttcgatcaacaaaccggaattgtgcacagaccgaccgagcatttgtttcgccatccctccgaacgctgtcgggctcaaaatccgatgcaggtcttcacttatccgcctgtccgatgggttaaacccaaaaataatccctcggccggcatcgaaatgaattattttatgcgtgcgaatccttcactgaaaagcgcaatatcatcaagtgttgaacagccgcaaaatgcctcaagcggagagcaacaaatcgcagaggcacaacaacaaattggcaccaatgttccgtcagttcgaagtgccaccggcggaagtggcacaaagtcttacattgagaatgaattggacttggctgaatacgacctcgatgagttggaaaccaacgatcagtcggacgaggaagattggggagccagtcgaaaaaaacgcaagaagacgggaccaggttttggtggaaatgtaccgggccgaactgcgcgaaaagtaccgtcaaacatttcgtctgcgaccgccaaaaaggagcagccgactgacaatgggtcaaatgggggaacgcctactgcagcaaatgtcatcggcggcggcgcgggggtcgcaacgacagccacggaaacgcgcccttacgtttgccagttgtgcggcgccaaatacaaatcgaggcccgggctcgcctaccacaaattgcacgttcatcaatcggactcgaacaatgagacgccgaaaagtccgataatctcgccgaaggtgcaagtgtctgaatattgtgacttttgcctgggtacgaatttgcaaaatgcggagggcgaggcggagccgctcatttcgtgccatgattgtggtcgttctggacatccgacctgtctcaaattcactaaaaatatgctcgtctccacaaaacgttacggttggcagtgcatcgagtgcaaaagttgtgcaatttgcggaacatccgaaaatgatgaccaacttttattctgtgacgactgcgaccgtggcttccatttgtactgcttgaagcccccgctgaaagaagcacccgagacggattggagttgccatctgtgcgtgaaggaattcggcgccgaagcgtccattgcgaaggcgacaaaaagcacggaagacggcacatcatcaccagcc

SEQ ID NO: 95792 - DNA, 454 bp, Heterodera glycines
ggcccctttcatcaaccccgacgagcagtcgatgatcgactggcctcattaatttcggaccgataaacgtgggaatttcggttcctcccgacatgaaaccgtacaaatcgggcatttaccatccgtccgatttcgactgccaatttaaagtggttggcctccattcgatgcttgtagtgggctatggagaaaatatttatggagacaaatattggatagtaaagaacagctggggacaaaaatgggggcaggagcacggatatctgaactttgccagaggggtcaatgcgtgcggaattgaggacgaaccaatcggactgatggcgtaaaggaacggacggaccaaaacatttgaattgaagagaacagaaaacgaacaaacaaagttaatgacaaaatttatttttgtattgaaattttaaatacgaaaatggaaattaattggttctattgt

SEQ ID NO: 95793 - DNA, 480 bp, Heterodera glycines
cacacaaatcaaaatgttcttcctttgccctcccattgttcttcttccattgacccttttctgcgtcgcttcccatggcttaacaaatcattcgaaagcatttggaaatgaaagcgaatcgaatagaacggacttttttggcactgaacccatggaaattccccgtcataaaagtgccgacggattcgacccaatggtggacgacgtattcgctttgctttctgctggagaagagggggaagaggagggaaatgggacgaaggtgggaattacggtggaggaggaggaggaagaggaagagcagcagctgcttctccgttgtgccgatcagctgtcgccctttgtgccgcttttgctcgtgccgccccattaccatcgctgggacttcagttgccattttcaaggcaatcagtccgaaaagcccgccgatctttccccaaacaatgccaatgaaaatgccgacctcttcttgaaaatgtc

SEQ ID NO: 95794 - DNA, 483 bp, Heterodera glycines
attcgccagtcgacctttaaccatcagaaagcattgaagaatttgacagccataaaagaatatgtggcacatttggagcactttttcgactcaccgcaaatgaaggaacatttgaagacattggaatccttcccggaggcgcagttgccgcgcaatttcgacgcgcgtgacaaatggccaatgtgccctagcatccacgcggtgcccaaccagggcggttgcggatcatgctatgcggtgtctgcgatgggagttgccgccgatcggacgtgcattcacacgaacggcaccgacggcactcagttgagcgcattggacgtaatcgaatgttgcgaagtgtgcggcaattgcttcggaggcgacccgctgaaagcgatggtttattgggcattggaaggcgtcgtctccggtggccccgacggatgccgaccgtacgcagtgagcagcgcttgtgggacgccgtgtacgcccaacctttacgcg

SEQ ID NO: 95795 - DNA, 437 bp, Heterodera glycines
caaggacggtggaaaatttctgtacacacgcacgacggggttattataacggacacgcctttcacagagtgatcaagtcattcatgatccaaacgggcgatccgacgggccgtggcaccggcggacagtccatttggggcggtgattttgaggacgaatttcacccggcactacgacatgacaaagcattcagagtttcgatggcaaatgccgggccaaacactaacggttcccaatttttcatcacaatttgcccggccgaatggctcgacggaaagaacacaatttttggccaagttgtggagggattcaacgtggtacaaaagatcaaccaagtgcccgtctatgaaaagagtgggagaccccgagaagagatttcaatcatttccatttctctgaagagtgtttagcttatataaattcattgctttacaaaa

SEQ ID NO: 95796 - DNA, 120 bp, Heterodera glycines
tgatggacaattacaaggtcaatccaaaggacattggctttctcgcggttggcaccgaaacattggtcgacaaaagcaaaagtgtgaagtcagtgttaatggatttgtttgccgattcgg

SEQ ID NO: 95797 - DNA, 423 bp, Heterodera glycines
aaagaggaggcggaaaagcggaaaaaggacaaaggcttaagacaatttcaatccgtcgaaatgaatggccatgacaacaaattagcgaagtcagttgagcctgaagaagaaataatggggcgagaagagacagacgaaagtgagggggaggaggaagtgacggatgatgaagaggaggaagaaaaaaagggaagggacgaaagaaaagccaattgcaaggacgtctttaggcacagaccgaccaaaatgccattggccactcattttggccattgacctgtcacggtctttacgaggaagaaaaggagacggtgagcacgcaattttgaaaggaccagcaaatttgaaattgcaaaagtcaccattctttgaaatgtacaaaacaccatccgattgatcgttaattaatcacctgctgagatc

SEQ ID NO: 95798 - DNA, 446 bp, Heterodera glycines
cgtcgatttcctccctacaaaaagcatcaaattctcgaagaagaaatgaagccatcattcaacttcaacctttttgcatccgtctttcttgtgctttgtgtggtctcgcttgtcctctgtgagcataagcgagcagccgcagcagaagcatgtaatccgcccaaagacgtgggaactggcaacttggcactcaaacgatggtggtgggacggccatagttgtaagcaattcatctacaaagggcagggcggcaacacaaacaatttcccatcaaagaagcattgtgtccaagtgtgcaagccatgaatgagccgtggaaagaaggtgcagcgtgaagagaccagcaaaagaagaaaagcgaagaaattcaaagaaatttttgaaaaataaaatttaccgctaatagttaaaatgattttggtggaataaacaaaaaatttgcaaaa

SEQ ID NO: 95799 - DNA, 761 bp, Heterodera glycines
atttaagtcaaaatccaagcttaataaataaaaggaaggcgacgagacagaagacaaagcccattttgatgagcagtcactgcaaaactttggaggaggacgaagaatggatggccaatttgcacttcgtccgctcggacattgacccggcgacggtgaaaccaatcgactcccgacaattggcttctttggtcaatgaattccttctccgttcggcagacattctgaacagattttgtgctcaatttgaaaatcggatgatggaattggactttcgtttggacacttttgaacgaatgttggcacttatggaaagaaaacttgaaaatgttaatgttgacgaagtgaaaaaacaatcggcggaagagaaagaaacggcggagaaagcggagggaatgacgcgcaaagaaaaaggggaagaaacgcccgaagggacgggggaagaaaaacgcacagacaaaaggcaggggaaggaaacggcggcggaagggacaacgaaggcgaatgaacaccccaaattggccaagtatttcaaaatgctcaaaatgggcgtgcctgaggcggcggtaaggcaaaaaatgagaagtgaaggaatggacgacgcactcctaaatgacccagagaaggaattgccattggaatcaccacaaaacaaagcgcaaatggtacatgatgcattggcagaggacgacgaatcgtcctcaaactcagatgaatgatttcctggccttcattcctttttatttaattttataactgaa

SEQ ID NO: 95800 - DNA, 640 bp, Heterodera glycines
caagtttgaggtattttcatgtctgaccatttttgggacgaaaatgtcttcgatctgatcgttgaactagagaaggaaggccgccatgtacggcttgattggctgtcgtcaaattcagcgttggtcgaccgctttcaaacggacattgcgcgattgtccgaggaggaatattcgctctatgccgcctccagcagcaaacttcagcggatagcagcagccgaatgcgcgtacaaatacaaccggacggaggagttggataaactgtttgagaaggaccgcgactcggaggcgttgagggaaacaaatgtgaggcactttctgattaatcgcattctcgacgagttccggccgaacatccgtcgcctttctgccctgccaattgagcggacaattgacgcgttttgtttgaatcagccaaaggacattgaacagcacgtgttggatgtgtacgattttctgatggattgccttgagcttcgaccgccgatcagtgccgacctccgctggctttggatttgcgtcgtcaccggtgaccaggcggaccaaaatgatgatggccaagtgcgggacaatgtgcgcaaatttattgacaaatgctgcaacattttcagaaatgacgtccgttccgaccagtacaaac

SEQ ID NO: 95801 - DNA, 263 bp, Heterodera glycines
cgtgcggatcattgacaacggcggacagtacaaagcggcaattggtggcgaacggtgagtggggggggcgacggacgaacgttgcgctggtccaaaaacaatcgtttgggatgggttcgagtcgacttggcctaaagggtttttcgggcatcccatggcattctgttgtaccctcatcagttcatattttctttcccttttttttgccttttcatttgcatttatttgtccattttttatatatttttcatccattcgtttat

SEQ ID NO: 95802 - DNA, 476 bp, Heterodera glycines
aatttaaattaaataatttttcatttgctgtatgatatggtccataagcagaaccagttagaaacaacagcagtgccaattgctgtggcacataatgacaatggcacggccgacatatttgagcaattcgaaattatgttcaacggtgacaaatcggtgttctttggcaacgaaacagtgacaggcagtttgaagatcaaattgaagcaagagaccgttctgaatgctatccatttgcattttatatgtgtagccaaatggattggcacgggacgaaaggaggacaaggagggccaaaccgagaagatttattttgacaaaaattttgttttgctggaacgtccgcctggccatcccgggcctggccacttcaaatttgttgcccattttgcctattcattgccatttgagtgcccattgcccagcgggtgcgagacaagctacgagagtgggtcggcacacattcgttactttgc

SEQ ID NO: 95803 - DNA, 386 bp, Heterodera glycines
attccttgtgcgcttcgtctttttaattctctttttgcaatatgaatccaacgtacccaatggtcttttttctgctcgttttggtggccgttgttctttcgtccgttcatctgaaggaagacaaaattgatgtgccgcagcgcgttaaacgcggagaatacggcggcggtgcctatggcggtgacggcggtggcgttggtgcgcctgccccgggcggtggcggcgcggcgaacattgccaatgtgttcataaaccaacagaacggatgcaacgggcggggaccgcagtaccaatgggcgtacacgcggaagacgggatgggtgtgcatcaacatcataaacgtgatcatcaaccagcaaagcggcggaaagtgatgagaggagccg

SEQ ID NO: 95804 - DNA, 494 bp, Heterodera glycines
gaaataattaattaattcaatttgtattttctcgcttcttatcaagtgctattagtagaaagaaatgaatcgtattggttcagcactttcaaagtcggttttcatccctcgtttgttctgtcaccgtttcttcgccagtggacccaccgatgcgcgacaaaatgtgctcgttgtcattgtcgatttcaacggcgaacagcaattgcttgtcaacggaaagtacagcgaattgctcggccgttcccccgactttccatttccgggcaacgtgaaaccgttggctgaaatgcaacagcaacaacagcagaaatttccattccctttggacgccttgccaaccaaacaactcggcaatggcttgggtgctgtcatgccactccacaaaatcgtcgagccttcatttgttgtttcggacgatcgtaccgccataccacgagcgttaaggcatcaccgaatgtggcaaatgggtgaagatgatggacggatgacggcta

SEQ ID NO: 95805 - DNA, 341 bp, Heterodera glycines
catggcaaggttgacaaggtcaaacggatcaaggactacgcatttgtgcactttgaggaacggtcagccgctgtacaggcaatggaagcattgaaaaacacggaagttgatggtgccccgatggaagtgtcgttggccaaaccgcaaggagaccaaaaccagaagaagaagctggccatcaagtcacggttcaacccacaacagtacggcgctggtgttacccccggcattggcccacgtggacgcaaagggtacgagtacatgggagcttttcgtggtggacgcggcggtgccggcccaagcatgcacatgggttatcaccaaccgtacccgggctaccc

SEQ ID NO: 95806 - DNA, 485 bp, Heterodera glycines
ctttaacaatttgtcgtcaaaatttttgaaaaacggaccgttcacaaaagtcgcacttccattttttagtcgcttttgtttttcaaccgaagcatttgagaaggcgcaaaaggacatgaaacagctgaaggacgagccggacaacgacaccaaattggagctgtacgctttgttcaaacaggcaaatgaaggcgacgttcggggcgatcgtccaaaaatgctcgaatttgtggcgcgtgccaaattcttcgcctgggaaaaagtcaaagggatgccgaaggcagatgctcagcacaaatatgcggagattgtcaattcgttgttgaaaaatgcggggattaacaacgcgaacacttcggaaacagaatcggacggaatccgacggacgaaggagggcaaagtgtacaaaattgagctgaaccgttccgacaaatacaatgccatcacttgggagatgtatgagggtctgatcagcgcacttggcg

SEQ ID NO: 95807 - DNA, 203 bp, Heterodera glycines
aattaatccagataaacaattctaacttacgtcgaattaaactaatttcacgtttaaaaaatagaagaacagtcttaaaaagaaaaaaaactaaaaattttacttatttataaaaaacaacaccgatgtaaaaaaatcctgttaactctagagaaattttaaaaaccaaaaagggtcacaaaaattataaaaaattttaccct

SEQ ID NO: 95808 - DNA, 873 bp, Heterodera glycines
atttcgaatttttaaaatccaattaaaatggcccatcaaatggcacgagcggcgatcaacaaaggggcacgagtgctgagtgtacttgagaaggtcaaattggtctgctggtttgaggagacgcattcctttgcgcaagttgctcgaagatatcgggccgagttcggcatggagccaccgcaaatggaccaagtgaagaagttgcaccaacgattcctgaacacgggctcaattctgaatggcaccaccacaccgcagacgatggcaacggcattatccgccggcatcgatgacgtcgtggtcaaccaatcccagcaaatgtcggtggtgtgcgatgcgggcgcgttggatgccgaggaacagctgagaatggcacggatgtgaaatggtgttgttgttgaacggcgagtaccaagaaaaacaccaagacaagttccaacatttttgtaaaatgtactttttatacatagtctccctcatttttaatgccttttcggtgtcatgacaactcatacaattggcttaggctaggcctagaattaggcttaggcctaagctttattcctatgcttaagcttaggctttttgtaaaaaattttactgtacgagttgccattgacgtgccttttcactcccccattgccgtgtcttatttttgcacgaacgctcatctctcaatctctaggctagggctcaatacatacacacctatttattgatttgtttttctttctgaatgacctcccccacccctcccgaaaattgttttttcttccgccgtcggttaacctttaccctttacacattttcccaatacttgtgacattggtacgttcaattcagcagcaatgttttttgatacataattttgtc

SEQ ID NO: 95809 - DNA, 951 bp, Heterodera glycines
gtttcatttgctgtatattttacaaaatgtccgtctcgtggggcactcaatactccaaactgaagacaaatcttcggctggctgcaaatcgactccgattgttgcagaagaaaaagactgagcaggcggtgaaggcgcgctgtgaaattgcggactttttaagcacggacaaagaggacagagcccgaattcgcgtggagacaatcattcgcgaggattttgtggttgaggcctacgaactgctcgaaatgtattgcgaacttttgcttgcccgattcggcatcattcagcagatgaaggaattggacgatggcatcgcccgaggcagtgagcagtttgttgtgggtggcggcctcgcatcggacacgaaattgcggaattcaaggtgatcaacgacgagctgacccacaaatacggcaaacaattcgcggaggccgcccgtatgaaccaattgccggagccgagccgagtgtcgaccaaattggtgcagaaattgtccgtcagcgcaccgtccaaattgctcgtcgaaaagtatttggtcactattgcgcaatcggcgggcgtcgatttcgcgccggacgccaaagtgatgcgtgaagacgacgacgaaattgcgcgggcggaacgcaatctgatcaacttcatgaacgaggagcagtacgggtggacggtccgtcacaacgacgacccaaacagcaaaggcagtggcggagggcatttcgctgctgccgtcgctggcgccgttggccccgccgatccgttgatgaaccagggcagcaacaacaacaatggcggtggtgctactgcaatgcctatgccaccaaatggtagcggtgcgtttgccatgtccccctccacgtttgtgccgtcgcatccgtctcccctcgccacttcgtcgtctcctccgcccgaatacgcgccgccgcctccgctgccggcccatggcgctgg

SEQ ID NO: 95810 - DNA, 329 bp, Heterodera glycines
atgtcgatgtttgctttaattttcttctttttattcatcaatatttttattgagcccgtttcgatggcaatgaaaaaatcgagcaaaagctgcaaagttggcgtaggcaatctgacggacgaaaatggcaacgtggtgatgaaaggacgattcaaaatgtgcccaaaaggattcaaaaaatgtgccaaaaatgaggcttttggcaccacggcattctgcgttgagctgttggaatgaatatgaagaaaattggaaaaatatgggaaaatgatacttaattaattcaaaatgttaataataatggaatataataaatgtgacattgttgt

SEQ ID NO: 95811 - DNA, 503 bp, Heterodera glycines
gtttgaggcattaatattacttttgttgcaatgctgccatccaatcttttcttcttgctgatgaccatgctcagcagttccctcctccatcagacattggcaaataaattttcagcagagaccgacgcagtaaatccgacgcgattaatccagagacggcatttgattcgaagccgcgcaattcacaaagaaaaaatgcactcgaacgtaaatgaaggctatttacagtgggaaaaggataaattccacgaagcactgggagaaaagtgcggaaagaaatcaaattgggaacagagagattttggcattttaaggattttgccgaagagttcccgatctctgatggaccccaagtttttgggatcggtggaaccgcggcttttgaaaacatcggcggatgggacgcggacaaaaagcgattcggaagaggaaaagtggcggaattggctgcgcaggcatttcccagctgcgagaacaatttctgatcagtgatcactgatcac

SEQ ID NO: 95812 - DNA, 325 bp, Heterodera glycines
ttactcggcaacgaggtgaatttgcttacggtttaatgaatacagttacagtacaataactcaatgttcaacaaataaaaagctggaaaatgaagtcccattatttgttcgaattcttcttgtccaaatttgtttaaatgttgctgttgaatggccgcaaattggacgtatagaataaagaaggaaggaaggaacccagcagctcgtctgtaccccaaacagaccaacaaggaacaacaacagcaggggggcggaccgtccaacggttttcatgacatcacatccattggaggcggtggtggtggtggctcggcattgttccaca

SEQ ID NO: 95813 - DNA, 671 bp, Heterodera glycines
gtttgaggtaaaaacacacaaattatcgtgtggattattgtaatgcatccctacgaattcaaattggacgcgatactcagcagatcagaattacccgtggaaaaacttgaaaagcacgcgtggaacccggaggaccggtcgttgaatttgtacgtgaaggaggaggacgtgctgacgatgcaccgacacccggtggcccaaagcacagacggaatgcggggaaaagttggctacacgcgcggcttccacgtctggcagctgaattggccggtcaaccaacgcggcacccacgcggtcgtcggcgtggccaccaaagacgcgccgctgcacgccccgggctatgtgtcactgattggggcggacgcggagggcttcggctggaacattgtggagaacaaatgctaccacgacgcacagaacacaaagccatggtccttcccttatgagcagccattcgtcgcgccggagaagcttttctgcgtgttggacatggacgagggccaattggccttcgccaccgactccaaatatttgggcgtcgccttccgcggcctcaaaggcaaaaaactgtacccggccgtcagtgcggtgtggggacactgcgaaatcactctcagatatttgggcggactcgatccggacagtcacttgatggacacttgtcggaggtc

SEQ ID NO: 95814 - DNA, 632 bp, Heterodera glycines
gagccctttatggcattttgcaaattggcattttgtttggtgcccagaaaacgcactttgaattgcttgtagctaaggtcgcgcaattggatctgaatttccttggtagctttggcgcctttgcaactgaaaaatgaaaaaattaaaaagttacccaatttcttttgaaaacatatgcttaaaaatagggaaaataaataatcgactgtcaaatatgcgatcacagtagtatatagcgtcaaaaggttgcgggttggttgcgggtgtttcccgcacgagcccgtgcctatgggaggggtgcagccctttgaagttgccgccccatcaaaaaatccacgatgtgggggtgtttcaaaaccaaaacctattggaccactttgaagttgccgcctgaccaaatccgatttcccaaattgttgcgggtgtttttttcccgcgccgcgcagcgccgcgggaaggtcatcaatcatccacctgtcaccaaagtgacaggtggaggaaattcaatttaacttttgcaaattttaatcttttgtttcaaaaccttttagcgttttattttctcaatcctgaaatttttttatgatgattttttcggatcctgaaattaaaaattctttttgaaaattagc

SEQ ID NO: 95815 - DNA, 483 bp, Heterodera glycines
ataaaccaaaatatcaccatggttttcgtcaaggccgtcaagaacaaggcttacttcaagcgctaccaggtcaagtaccgtcgtcgccgcgagggcaagaccgactactacgcccgcaagcgcctcgtgacccaggccaagaacaagtacaactcgcccaagtaccgccttgttgtgcgcatcaccaatgccgacgtcatctgccagatcgtctactccaagatccagggtgacttcgtcttgaccgctgcctacgctcacgagctcccccgctacggcgtcaaggttggtctcaccaactgggctgccgcctacgccaccggcttgctcgttgctcgtcgtgccctcaagaagttgtcgcttgacgacaagtacgagggtttcgtcaaccccgacggcaccatcgccgaggtcgagccccttgaggacggtccccgtcccttcaaggccttcctcgatgtcggtcttgctcgtaccaccact

SEQ ID NO: 95816 - DNA, 508 bp, Heterodera glycines
gggctgcaggtctctcggcacgaggttaagatgttgagtcggagtcctgaaatggaagaagaacgtttgcccattgtttcgatggtaattgtcgcggacaaaagtcgtgcgccggccaatttcattacgctaacgaaaacttacgacgacggaagtgacgcagatttatggaaggatgggttcggtttcgggttgttcaaccgttccgttcgttatatcgctgtaagccgacacatcgccgaaacgccgcccagcggtttggaagtgttgactgacgtggccgtcatttcggacaaagaagcagttccgtccagcttcgtctgcttggacttcaccgttgacaccaaagaacgcgccctgaagaagaaatatttgtgcgcccgcttcactcctcggactgatgcaattgacgcggtgaccaatttaattgttttggcgcggtcgcggaggccccccaaagggtacactttggccggtgacattgacggcatggccatttgtttccgag

SEQ ID NO: 95817 - DNA, 789 bp, Heterodera glycines
gaacgcattaagagacggcaaatccataatataatgaagtttcatttcaacggaggccttgactgtcccgaatggatactgtcgcaaattccagaaattgcaaaaactgacacaaaaatgttgcaaacacttggcagcacaatcattgaaatggccaaagtcaaacagacggaatggcatgagacggacatcaaaaaattttgcttcgctgaaatgagcgttgatggtctcagggcattgaaggccaaaactgctgcattgtgtttcatttttgagaagacaaccaaaaatgattgttcatgcaaagatttggagaaggaactgctccaacttgggctgccctccgaccatgtcagtgtactggttgaactctacaattcaaacagggccgcattgtgtgacagtttggcagggcctgcaatcaaagccccttcactaacagtggtgtgcaaagagcaggttccaacggctgccgacccgtcagtgaaaagtgactattttcgcttggacacaacaagttcggacgggtcaacagcaaccctgctcatccaccgagatgagttggtacagttgagaacctgcatggaagatgccgtgaaagtgctcgagtcgttggtggtcaacaaagaatgatgcccgcttattggagacacgccccatgtccaatttttcaatttgtgacttgccacttaaactaaagcatggcacttacaactagtgccattccaaattctgccattcatttcttccgcgcagcacattttatttaatttaaaatattttattgtc

SEQ ID NO: 95818 - DNA, 580 bp, Heterodera glycines
tgtccttttctgttgaccttgaacagttggaaaaggagatccaggcgaaagaagccgcttctaaaagggacaatgtgacggacacaaaagtgcagcccgacttaaaagggaacattggcagcggaacttcggcacaaacaaaacggaagagcaatgtggtgggattggaggaggacttcgacacgttggacgagccaatttgtgatacattaatcgggacttgaaaatactgtacggaaagttctcgcaagtgcttttcccggccaagagtgaacaaaatgtgctgaccgactgggacttgtggggccctctgttcatttgtgttgccctttcgatacttttgcaaggcgcggacagaggggcgcaattcacgcaaatattctccttggccttcttcgggacgtgcattgtgacgcttaatgcgaaattattgggcgggaaaatttcctttttccaagctttgtgtgtcattggctattgccttttgccgtaagttttcgcgtccggtggcatcaaaagtctgtcgcttcttttctggcacaaatcttccgccaatttgcttcttcgggcacttgccact

SEQ ID NO: 95819 - DNA, 769 bp, Heterodera glycines
ctcgattttgctttaattcagcaaatttttgttctaagaaactatttcatcttacatctgatcaatatgcttaccaacaaattggcaaaatgtgccgctatgaccatgacccgttgccaaccgctgaacgcgttggcaatgttgggcggggcccgactgtgccaccacacgccaccaaactgcatggacgccattcgtccgcttggtccgaaaagcagtgtgccgagttttaagggccaggcaattgtgaacgcggaaatgaagaccatttcgtacgacgactacaagggcaaatggttgatcttcttcttctacccactcgactttacgtttgtgtgccccaccgaaatcattgcgttcagtgaccgcgtcgccgagttcaagcagctcggctgtgaggtgatcgcctgctcatgtgactcgcagttctcgcatttggcttgggtgaacacaccgcgcaatgatggcgggcttggcaagatggaaattcccgtgctcagtgacttcagcaagaaaattgcggctgactttggcgtgctggacaaggagaccggactgtcctatcgcggtctttttctgattgaccccaatggcactgttcgccattgtttggtcaacgatttgccggtgggcccgaagtgttgacgaggcattgcgcattctgaaggccttccaattctttgagaaacatggcgaagtttgtcccgccgattgggaggagggcggtgaaacaattgacgtcaaatcgcccaaggagtacttcaaaaag

SEQ ID NO: 95820 - DNA, 441 bp, Heterodera glycines
tccgcttttaataatttcaaataattttccgctttttccaaatgttccatttgcgtttcgttgtgcttcttctgctggtaattgtcggccttttcattggccccaattttgtttctgctgattgggataaaaaggtggccggttgggacgacaagaaagtgaacaaaggctgggaggaagccgaagcaccgctcaacatccgtgcccgtcgcggcggatgggatgagcgcattttgggcggtcgtgaacaatgaatggagagaatgagtgaagaagaagaagaagaagaagaattcgggatggatgccaaaaaagtaaacattcattttcaatttaattccccctttccgcccccatttgagcccctttttccaaatttcaattatcaaatgcataaacctgttctttctctcccaataaatgatccgattttgccaaaac

SEQ ID NO: 95821 - DNA, 479 bp, Heterodera glycines
caactctcagcggtacagcccgaaattgaacagccaaacgaaggagacgctgacggagaacagcaaccggcggaaccgattcaattgatcgataaggaaagagaatatttagcggtaaaagctgcgagtagggcagtgatctcacatctctcagagtggagcacgccgattgaaatgcggttcgcaatggacggcaccgtcgaaacaaaacggaaaatgcggaggcgtttttgcatcgaccgtcaacaaatgctgcatgatattgaatgtatgtatgcgccaaaaataggtataaaacagattctcaatgtggacattgtcgggtgccaagacgaaatcagccaagctactgaaaatgtataccaaatggtctacgacggaggtttcttccgcaaacaaactgggttatgcaatttcaaggttctcaagcctacaccaaccactaaaaatgttcttgacaatgttattaacgggatttt

SEQ ID NO: 95822 - DNA, 518 bp, Heterodera glycines
ttccgcaccagaatcccccgggctgcatgtatctgaaacgagggtttgaggacccaatttaaaaatgtttaaattttttgctctacttttcctcttcatgagcaccaaacaacaacaggcagcaagtgcgcaatttgaaagcgatgaggtgagcggaagagtggggcacggacagaaaaatgcgcggtcgcgcatcgctatttggaaaataatttcactatgattaaaaaaccaaataattttgtattattttcacttgatataaattaaaatttgaattttttaaaaaaaaaaaaaaaaaaaaaaaaaaaaaaactcgagggggggcccggtacccaattcgccctatagtgagtcgtattacaattcactggccgtcgttttacaacgtcgtgactgggaaaaccctggcgttacccaacttaatcgccttgcagcacatccccctttcgccagctggcgtaatagcgaagaggcccgcaccgatcgcccttcccaacagttgcgcagcctgaatg

SEQ ID NO: 95823 - DNA, 420 bp, Heterodera glycines
ataaggggttacacatttccctttctcctctttcctctctgttgttatcacaacacaattccaattcgtcaacagcttcttcactcatcgacgagatgacttcttcaagatcgcgaacgcgtcgtgcgacttccaatactgcttcaactactgctactgctggccgtagacgcagccgttcaagacgccgtacacgtgcagaacaagtacgagaagcgactcgccgcgcgttacgtcagaacaacggcggcaacgcgaccaggacgaggaagaagcgcggggcagcgatgcgtcgtccgcccaagctcaaaccgctccgtggaaggccgaggggatcgcgcaaatcgagggcggcgccgcgcactgctggacaaaagcgtggccgtggacgtccgaggaccgtgaaaaaaggccgtgccc

SEQ ID NO: 95824 - DNA, 475 bp, Heterodera glycines
atcaaaatggctgtcgacgcttcgtccgctaccatccgtactcgcaagtaccttaccaaccgtctgcttcagcgcaagcagatggttgtggatgtgctccacgccaacattgccaacgtccccaaggacacgattcgcgccaagttggccaagatgtacaaggtcgagaaggaccttgtcgttgcctttggtttccgcactgccttcggtggcggcaagtcgactggctttgccttgatctacgactcgattgactcgctcaagaagttcgagcccaagtaccgcctcgtccgcctcggtctcgccgaggaggccaagactggtcgcaagcagcgcaaggaacgcaagaaccgtgccaagaaggcccgcggcaaggccaaggctatcgttctcggccaccgcaagtaaggtgttttggctgttttcaaatcatggcacttgtgtctttgtgcttttcttgtggtgaactcgttgt

SEQ ID NO: 95825 - DNA, 492 bp, Heterodera glycines
gctaaattgacccaaaatggcggccacaagtgccaccggttttcctgtttgcattttgacgccctgcagcaactcacatccatttgaggaacggagaattttggtcacacggacggaggaagacgcggtgaaaattggccgatcggtggtccgactgcagccgtcatcgaacaacgcgatttttgactgcaaagttttgtcacgaaaccatgccgttctgtgggcgaatggcgccggtcatttcatgatcaaagacacgcgctcatcaaacggcacattcatcaacaacgaacggttgagcgccagcggggaggagaacgagccgcgcgagctgttctccggcgacattcttcagcttggtgttgaaataattgacaccgcaaagaaggtggccagcggctgtgtgacgtgcattgtccgactgctcaacgaacgtggcgaagaatgcgcgggccgacccaagccggaccatggcacattcccaacactgtt

SEQ ID NO: 95826 - DNA, 808 bp, Heterodera glycines
gtccaattaagagttttgatacctccttaaaagcaaggagcataaatatatttttgtgtatttttccttcatttattttgctttgctttcaaagttagtgctgaaatgacaacggaagaacccatcagcggcggacagccgaacacgccgccaatccccgccatcgaattgtcttaccccgtctccgtcatttactgtggcgaatgttcgatgcccgtcgaatactgcgagtacagtggcaaatttgagaggtgtcagcagtggttggaacgcaatttgcccgatttggcggagaaacaaatgaaaattggggcaggagatggaaaagcggcggaggaagggaatggggaagagacggaggcaaaaaagcaccaaaagcgaggcggaaagggattgccgaaggcgagtgggggcgggaagggctcgaaagagcagtccgctgcggtgccgcggattacgctgaagacggaagtgcggagcaaaaacaaagcggtgaccgtcgttaaaggcctcaccacttgcggtgtcgacttgaaaaccgcctccaaattcttcgcaaatcgtttcgcctgcggctgttccgtcaccgttggctcagccgacgaattggtcattcagggcgactttaaggacaaactcttcgtagaaatcccgaagaaatggggcgtcgatgaggaagtcattgaggatttggacgaccaaaagaagtgaccactcccctttcacactgcttgtttttactttaatttatatactaattcattgctttgttgtcgtgccgaaaagataaattttaattcatttaaaa

SEQ ID NO: 95827 - DNA, 639 bp, Heterodera glycines
ctttttagctaattaactaaaatggcaacaacggacggaatggtcgaagatggcaaagtgggaaatgacctccaatcagcaaagttcacaaaggacaaagaagtcgttgacattgtgcagccaacggccaaattgataggattgacgaaggagcagctcgagcagtaccgaaatgaccccttttggaaggcgattcgttactcacttttcgtcgccttttggctgatttggctggccatgttcgtgggcgctgttctgattgttgttttgagcccaaaatgtcagcaagtgaattggaccgaaaaaatggtcgcttacaaaattttcaccctcgcatacaaagactctgagtccaaaaatgggttcggagactttgaggttattgagaaaaagttggaccaaatgaagggaattggagtcaatgcaatttggccaactcccgtgctcaaatactataaaaatgcgcttggcccagaggcaatcgaaaagttggaagtgtcggaccaactcggcggggctgaggggttcaaaaaactgatcaagcgggcccatgacaatcaaataaaagtgatcgtcgatttgccattgacagtcaatgccaaaggaaattgggccaacaaaacttctgatacaaaaaat

SEQ ID NO: 95828 - DNA, 1164 bp, Heterodera glycines
tttcttcttctcaaaatggcttcagaagatgcttccaaaatcgtcacagagcaacgtaattttttcaaaaccggcgcaactcgtgccgcggcatttcgcaaggaacagctgaagaaaatgcgcgaaatgattgttcaaaacaaagacaaaatttgcgaggccatttacaaggacttgcgacgtaacaaggagacaaatatgaaaatggaggttgatgggcctttgcaagccattgactattgtctgtctgagttggacgaatggatgaaaccccaaaagctggatgaccaccaattgggcaagccgttggtcatttttgagccgaagggcgttgtgttggtgatcaccgcttggaattatcctgcagccctcgcttttcaaccggccattgaagcaattgctgctggaaacaccgtggtgatcaaaccgtcggaagtgtcgccgaacacttccaaattgttgaaggaaatgtttgatgccacttttgacaaaaaattcatcgccgttgtggagggggcggcccccgaaacgcaggcgcttctcgaccaacgctttgaccacattttctacaccggaagctcgtcaattgccaagctgataatgcaagcggccgccaaaaatttgactcccgtcactttggaactcggcggaaaatgtccggtggtcgtggagaatgacgccgacttggagaaggctgctttgcgtatcgcagaagggaagtggttgaacagcggacagacttgcctggcgccggactacgtcatgaccacggccgagatgaaaccgaagctggtgaacgcactgcagaagagcattcagacgctctacggagagaatcccaagaagagcgagcagtattcgagaatggtcaatcaacgccatttcgaccgagtgaaggcgttgctggacaagacgaatgggaaagtgctgtacaagaatggggagccggaccgagacgatgtgttcattccgccggtcttggtggatacggacttgaaggacgcactgatgcaggaagaagtgtttggacccgtgctgcccatcctcaccgtgaagggacttgacgaggcgatggacgtgatcaacgacggagaaaagccgcttggggcgtatttgttcacgaacgaccaacaaaaggtggacaaatttttgaacgaaacttcc

SEQ ID NO: 95829 - DNA, 480 bp, Heterodera glycines
cacttggacaacaaaatactgaccgcatggaatgcccttgccatctcgggcttttgtgctgctgctcaggctgtcccaacacgcgcggccgagttccaaaaacgtgctgaaaaagcggttgcattcattcgcagccatcttttccatgggggcgaattgctccgatcggcttacttggacaatttgggacaagtcgttcaaataagacatcccatcaaagcgtttgccgatgattatgcttttcttatcgaagcccttctcagcctttactcgctgaacttggatgagaatttgcttcaatgggcgcataatttgcagcttcaaatggacgaacttttttgggatagcactttcgactcgggctatttcatgtcgagggttggcgatccgtcgataatcgtccgaatgcaagacgaacaggacggggctgagccctgcaccaattcggtggccgcttccaatttgctttgccttggcttt

SEQ ID NO: 95830 - DNA, 362 bp, Heterodera glycines
agcactatggcattatgccacatttcctcttatttccgtctttgtcaacagaattactaaatttggcatagctaaatgtcacatgacaaaattcacgctgcacgctgattaagataaacaaagtcattaataaccggatattcacaggaaatggtacctcattattgagaaagatccccgacatttttgcgctccctgactctgcttcccgacctgtcatccccgagaatttcttcactgacaaatgaggggccacaactacagaacagacaaactgattaatcactaacaatttttgttgtatatggtagttaatttttttattattatcaggattttttaaaaaaatagcactaagtgtt

SEQ ID NO: 95831 - DNA, 482 bp, Heterodera glycines
cacagtctcgcttccatcacatcaacgcccacccaatccaccagtcaaaatggccttcctttcctacttctcccggaccttccgccaataccccgagattctccctctcgtcggtgccgtttgcgttgtcacctcattcggtatctactcatccacggccaagatcttgggcgatcaagacttgcgcatccgtcaaaaccacggccacatcacttgggacgagcgcctcaggcggtgggaggaggccaagaagcactaagctgctccgctgtttcgagttcccgtcctcaacctgatcctctccataccaagtcaacccatcatcctactttctttcgtctaccgacatagacgaccgccttcaccactcgcttgtggttgcgtgcctattcaatttgttgttggttcccagcctgctgttgcagccatcgtcgcttcacactttgtacatgtcttttatgaaccccactgtttgcacgctt

SEQ ID NO: 95832 - DNA, 474 bp, Heterodera glycines
gtccaattaaggtcacaatgagtaacagtaatgacagtgacgacctaattatttatgacgacaatgaagacattaaagacgtttcatccgattcgggtgacgaagtagcgatggaggaagtcaccaatgcaggcacttctacagctggggccttatctaacgaagaaatcagggactaccaagtgctttctcagacggagttggtcgacgaactgaataagctttcatctgaaacttcagcagtgttgcgtttcaatggctcaatttgcaaggtacttcttcatcacttcaaatggaacaaagtcacactaattgagagattcttcgaatttcctgagacttcaaacaccgattcattcttccgcaatgcaaatcttctcgatcctacaaagcataccaaaatcgagggaaaggttgattactgcaagatttgctacgatttaagacagctgactggattgctgtgcaaccatt

SEQ ID NO: 95833 - DNA, 654 bp, Heterodera glycines
gggacgacgaaatgtgtccttcaaaaacgcaacacttggaacagttccattcgcttaatattcctatgattttcattctctccgcacttttctcactttctgcgacattcgcacagtttgtcccggccaaaaatcgctgctacagttgcgcatcggacaatatgaaagaaaatttcctcacgcgcagccgcggacccccggggcgcgtgcgcgagccgcgtctgttcgattcgatgtgcgactcggacacgtgggtaattcgggaaaaaagtgccatcgaatgtcagggcgcttgcttcaaatggcagcagacgctgaacaattcgggcgtcctttcatacgccaccatcagaggatgctacgaatggatgttcgattcgtccgttggtggccccactccctcctccgacagttcgtcgtccgtcgccttcaacactgaatgcaaacacacgcaacgcgcgttggtctgtctggacgagttcagctccgtcgaggagtccacctgctggtgcttcggcgacttttgcaacgcggcgacggcgaaaggcgacggaattcgaaatgccatccgagcgacggcatcggcactttttgcatcatcacttttcatgtcattttggaaattgcaacaaataaattgcaaataaatatacc

SEQ ID NO: 95834 - DNA, 634 bp, Heterodera glycines
ggagtgccttagaagtcaaaaaattcacttttatttttgtttttgtgccgtcatttcccattttgtgccaccgcgctccgttcgcttcgttttgtgccgtccaatgcaaaagggaggatgccaagtctgctgctgaacccgggcccgtcaacaatgaactttttctcctcctccctgccgttgccttcctttttcttccgtaaccgaaaaaaatgttacgatttgaacccgccggaagagagccaccaagtgacatacctcggcaacatgttgacaatcatgggcaagggcgacacgtccattgaccgtccgttggaagtgattacgcgcgcgtggggcgccaccgtcgccaaaggcgcgacgcgccacggcgccggcgccacttttggccagcaacaggcgcaacagttggcgatgcgcctgtgcgtgtgccggtctgggctcagggccgagacgtgcattggtgtcactgaatattttacgcaccgaatcacttggtcggcggcgcccagtcaatacccgcgcgtgttctgctggatttacaagcacgagggcaagcggatgaagcccgaactgcggtgccatgccgtgctctgtcgccgggcggacgagccccaacagatgcaccaaacat

SEQ ID NO: 95835 - DNA, 420 bp, Heterodera glycines
actttctcttccgttggcactgctgggcagcgctgtacgagcacacggcgactgattatccatgaaaaagtgtacgacgtggtgttggaacgggtggtcaacgcgtacaaacagctgatggacacgcgcatcggagacccgttggatgagcgcactttgatcggtcctttgcacagtcgcgagtcggtgctcaaatacaaaacggcgattgccgaggccattgccactggcggtcgaattctgtgcggtggcaaagtgttggaggagtcgaagggcaattacgtgctgcccaaggtgatcactgggcttgcgcacgacgcaccggtggtgctcagagagacatttgcgcccattgtttacgcagtgaaagtggccgattttgaggaggccgttgcggtgaacaacgaggccagccagggc

SEQ ID NO: 95836 - DNA, 475 bp, Heterodera glycines
ggaatacatcctttctgtaacattggtgtactgcgaaagaccgatgataaatcattaatgaatggacagttggcgttaaaggggtgtgaaatcatggcactttatttcggcgctcacatgagtcagcgatgtcgtgaatttataccggtgctcaaacaattctacgatcagttgaaaaaatctcccgacgcagtgccttttgaaattgtttttgtgccctttgaccgttccgaggatgaattccgcaactctttgcgcgatttgcacgacgattggctgtacattccctatgggagtgttcacattaactcattggccgcgaggtttaagatcattaattggggagtcattccgacattggttgtgcttaaggaggacggcactttgataaccatggctggagaagcaaatgttaagtatttgtcggcatcagaagcaatggtccgctggcgttccttgtgaagcacagcagaag

SEQ ID NO: 95837 - DNA, 475 bp, Heterodera glycines
gtccaattaagccgttcaattccaaaatgggcactaattactccacttcaaattcggctccgtttgattacggaatgacgtcacggaagaaaggcaaaaatcgaacatacgaatccaatcactttgataagaattatctgatcgaaggcaccgaattttgggcagagaacgaatatcgcaaggacagttatttatttgagaggagaaaaggaagcgatcgggcaaattttgccgaaatttacgtaaaaactccggcggagtacggaagtccgcgcgtctcctgctgggcattttcctgctcaccgtgcgcttcttcaaaagaaagtgccgttgccattccgtcccattccctccctccttcttccgccccgtggtcttcaccaattcaaccgaatggtgccaaaagtgctcatggctcccgcccggtgggcgtccgatcgaaatatttgccaacctttgggtgaatttggccaat

SEQ ID NO: 95838 - DNA, 628 bp, Heterodera glycines
aatcctttaaaaaaaaatgcacattccaaaaatagaattccccaaagaaattgttccaagtttggccaatttgtcgctaaatcgtcaaccaattgatgaccgtcttttgaagttactcgaacggacgcaaaaggatgtccagcgcctgacgaccgccaaccaacagctcaccaccgccaaccaacagctcaccaccgccaaccaacagctcacgacaacaaaccaacaacagcagaacacaatcaaccaccagcagcaaaacatccaacaactccaaaacttattggccggtcagcaaccgcttgttccagcgtttgcccccggggtttttggtgaacaacagcagcatcatcatgcgccagcggactttctcggcgaccagcatgcgctcggcggccagaatccacacgcggcaccttttggccccgactttttcggtggtcagcccgaaaattttggtgttcagcagcagcacatgcaggagcagcagggtccccctcctccgccgccaccgcagtaagacgttgcaagtggaagtcgaatgatgagttgacgtttgaccttttaacctcttatgttttaacgttattttgtctgatgaagaataaatctaatgcctcgtaaaaaa

SEQ ID NO: 95839 - DNA, 650 bp, Heterodera glycines
cctcgtgccgaattcggcacgaggcttacgtattcccttttttgtttttgtacttcaaatttactgctaatttcttagaattgcttcacacaatgtcggcgatcgaaaatgacgagacaaagagcagaatttggcagcaactgaagaccaaactccactcgacgatggtcgccttcggaagcgggtcggtgcagttgcccaagctgatggacacgttcaggcatgattggggctccgaattgacttcgtacgcggtccaactcggcttcggctgcaacgacgcggcggtgtacaaaatgttgctgacgatgcccgacgaaattgaaagcggcttcatatcggccactggcaccttcgcgttcaaagtgattccgaaggcggagaccagcgaaaacttgacgaagatcgaccagagcaaccaataccaagatgaaatgcgaagaatatttgcacggcgtcgctcctcaatgtcgagcggcttccatcgttcattccctttcaaccagtctttccatgtgcgtccgcctgtcagaatgcctccaccgccgcctccgatgcccttcaatttgagtgcacccatcttaaacggaccgaaatttccaggacttgtcattcagttgcctaactgtgcggatgcgcagcgtcgcgtt

SEQ ID NO: 95840 - DNA, 261 bp, Heterodera glycines
  unsure (1)..(261): unsure at all n locations
aaggtgttgtagcagtaattgctgtttgcatgttcaacttctgctgcttcggtgccatcgccctcatcgtcgtccgttgaggtgccaatgctccgattgaaaattcggccgtgccctcaaaaggtgcggtggtgccaacttcggcctcgttgagattgtcctcgtcaatgtacttgaaagaagcaatttatgacaaaaacatttacgtgtatttattaatccattaaaaaatgtacttttatcattaaaatagcaattatn

SEQ ID NO: 95841 - DNA, 635 bp, Heterodera glycines
atttgacccccgtcggcccttctgtcgctccgttggctttttcttcgtcttcaaccgatgcttcagccgttgaattgccatatgccgtcccaaactttggcacacccactgaaaaattgttgctgggcggggagctgattgccgtgccaagcgctctgttggccgatgagaaaatctttcgttctgtgctctgtccaaaatcgttttggtcactttcgcaggcgtcgcgcgaccacctcgagcattttcttcccctcccttccatttcgtccgccattaaatcatcgtcagtttctgtcgctcgtcgcaattgtggcgccccgctcgacgagttgctcagttgcgcattcaccagcgacccaaatttttgctttggcaatccgttggccaaattttttgcgcgcattcgaaatggttacttcagttcacccgaacaagtccaactgagggaccaccggcgagtgctgtacgaccattacattcgccactatcagatgaacttgctgaagaccctgttgatcaactcccatgtgctgctcgagcagtccaccatgctcaactcgtttgatgagcacgtacggttgaacccacgcactttttgctccctgagaaagttggccaagcacaaggaagtc

SEQ ID NO: 95842 - DNA, 632 bp, Heterodera glycines
gtttgaggcttatattcgtctggacatttcgaagctaatcacagcagagagccgaatgacagaggagatgcgttcattggtccgtacgcgcaataattttgaggttgaacgcatcaaactcacttgtgagcaaccacttgcccaatcagtcgccgatgcagtgaaagaaagcgaggagcttgtcaatgtggaacagaagccgaaaaaaattccaatatggaggaggaaggattctgaactcttttcaaggccttgcacctttttggaggacacccgcttttatttgctctccaagcggcaaccaatccccgccgcattacgccgcaatggacttacatcgaaagctattgatgccattgtgaaggatttgttcggcaaagcaaaaagtggtgaagcaaagtcgccctcccccatggaccataagccattttctgccaaatcgtccacgaatgccaacaccgccgccaaaacacccgccacggtgggcaagcgcttgcgcaaggcccgtttgcggaaattgcagtccgccaatccgtcaacatccgccgcaaaattgttggtgtctttggagccgttgaatcgcaaagttccgcctcagcttcggcagtgcaattttacgcccaattatgcag

SEQ ID NO: 95843 - DNA, 815 bp, Heterodera glycines
caattgtatttcaatttcatttttaaatccattttgccgcactttcgcaaatgccaaaatcgaaacgcgacagagttgtttctctcacaaaagtgaagaagaagagtcgcgagggcaaagaaaacattttgaaagaggtcagagaatgcgttggtcagtacaaacatttgtttgtcttctccacggagaatttgcgctctgcaaggctggcggaggtccgccaacatttcaagcagaattcgcggattttcttcgccaaaaacaatttgatggccgtggcgttgggcaaatcggcacaggacgaacaggcaaacgaattgcacaaagtgagcgcacttttgcggggccaaagtggactgatgttcaccaatgcgaaggcaaacgaagtgcaaaggtttttcgccgagcacaccgaggctgagtttgcccaggcgggcgccgtcgcctcggcggacatttcgctgccggccgggccaatgccggcggaattgcacttgcacggcgccatggaaccgcagctgcgcaagttgggcatgcccacacggctggaaaatggtgccattgagctgttggaggagttcactgtgtgcaagacgggtgaccaactgtccgcggaccaggcccgcattttgaagcagttcggccaccggttggcccaattccgcgtccgtctgctcgcccgatggagcaaaaagaagggatttgaacagattgacggaggagcggaagaatgaatgaataattgttgtgtttttcggatggacccatctaccaatttactttgttaaatttgttttttttatttaaattgaatt

SEQ ID NO: 95844 - DNA, 419 bp, Heterodera glycines
gacacgttgaaatgtgttcggcaattgattttgtacgggcacgagaatcgcatttcctgtcttcggtgcagtccggacggaacggccatttgcacggcgagttgggacgcgcccctccgaatttgggcctaacacttcgcattggccattctcttctgatcagtgatcacattttgtatttagtgcgctattgctttaacatccgttcgatttccttcccttttttctcctttttacctcagaaattcggtcccttccgtcaaatcatttttaattctcgtcaaatgttagctttttcggcattttggtcattcttcccctcccccactctctcttaatgctttagtcataatatttcttctattcagttatatccgacttccaattaatctctgtcaaaatagttttaaatgattagt

SEQ ID NO: 95845 - DNA, 478 bp, Heterodera glycines
gcgcattgtgctaattgacacaaaatgaaccgacgttgggtttgtaccgatgtttggatggacattctaccattttttaaccgtcttcaactcggcctcaaattggcacttctttcgccacgtttcgatgttttagtggacaaacattttgatggcaaatgcgaactgacaatttggagacatatcaatattctaaaaggcgctggaccagaaccagaattatctgtacggattgatcgcaaaactatgaagtttccattgcccgaccgtccgctgcccaccaaaatccgcattaaggaccttcatatcgagtacactgaccattccgtcatcacatttctccgtgccaatcagcaaatttttgacaaaggcatcgatttggatttgtattgggatgatgctctgcatgacaacaacagcgatgatgttcagcaaatttgggatgtttttgcacgtgaaatttggcccatttttgcgc

SEQ ID NO: 95846 - DNA, 473 bp, Heterodera glycines
attttctaacgcaataattctgcaattattcttccctttgtgacatctttcggaactcggccaaaattgtgctaattgcgaaaaatgaacagacgttggatttgcaacgacgtttggatggacattttcccatcctttgaccgtgcccaactcggcctcaaattggcacttctttcgccacgtttcaatgcgttggtggacaaacatttcgatggcaaaagcgaattgacaatttggagatcaatctataattagcaaggacaaaggaccagaaccgaagctgtctgtacgaatcgatgacaaatttgtgccatttccattcccagacgaccgtccgctgcccagcaaaatccgttttaaagaccttcggattgattacatcgatcactccgtcatcgcttttcttcgttcaaatcaccaaattttcgacaaaagaggcatcaatttatatttgtggattccatcaccacaca

SEQ ID NO: 95847 - DNA, 606 bp, Heterodera glycines
ttacccaagtgattcctattcaccacctacctgctgtcctgttgggctagcgttggcaccaccaaatgcccccgtccgctgacgggcacaggtcgttcgagctgacttgtggacgctgcccaacattacggggcagctgcctcacgagccatgcttttggggtgcttccatacgttggagctgtggtataccgctcagtgctgcacatgttaaagcctgtgtatggctgctgcgtggcaatgtgtcggtggcgggctgcctcgcttggttggttcgctgcgccaatgtggggtgcacgctcgtggggcgacctaacggctgtgttggcgtctgtgcgtcgttgagcggttgttgtggcaggcacataacacactgactggggatggtggtttcgttcccggtcttacgtgccgtaactagcggtgtgtttgtgcttgctgctacgtccgtggccgtgatgagacgacgtggtagggcccgtgcttggcctagcacgtggcttaagactcaatgagtgtcagctcgggcaccgccagctttttcttttttttcattatttttttttacacttctgttgaagaatgaattctagtcttatcggtggat

SEQ ID NO: 95848 - DNA, 770 bp, Heterodera glycines
gtttgagccaaatgtttcccgctaaatacaaagcctttcgactggaaaataaagtcgcggtgatcacagcagcgacaaatgggattggattggcaattgctgaacgattaggccacgagggagcacgtctggtggtcagcagcagagacgaagacaatgtgaagcgggcgatcgatcggctcgtctcttcgggactgaagcgttcggaccttgccggttgcacttgccatgtgtccaattcggaggaccgaagtcgcctgctgaaactgaccatccaacggttcggaagtgtgcacattttggtgaacaatgctggcatcaacccaattttcggcgatttgttggacgtggacgagtcagcctgggacaaactgttcgacgtgaatgtcaaggcgggcttcatgatggccaagctgttcgcgccagaaattgaacagagcggtggagggtccatcgttttcaactcgtccatcggcgcctatcggtccccccagggaatcgctgcttacggcatcacaaaaacggcactgctaggtcttaccagagctctggcagaatcacttgcacccaaagggattcgcgtgaatgcaattgcgccagggattatcaaaacaaaaatgagcaaagcgctttgggaaggcattgactaacggaccagtgactaagccattgtcacacttatgggacggctgggaatgccggaagaatgtgctgcactcctcgcttttttctgctcttctgacgccagttacataacgggcgaaactgtg

SEQ ID NO: 95849 - DNA, 494 bp, Heterodera glycines
ttttaaatgatgtcttcgagttcttttgagcaattatcgtgcgaaattgccgaattggagaagttacgccaacaatcacaactcccaaatgttcaaaaggctatcgatgagctaattggaagatggaaagtgaaaaaggaagaacagaaaatgaaaacggacaaagggacagcggagacactttcagccccgacagaagcaccgaaactgatcagcggaagtgtccacgttcgtccgacaaagaaactgaccacttacgcgtttgatgagagtgacaagttcgtgaagctgtactattccctgcccggtatttccgactccgtccccggcacaatttcgaccgatttccgtgaaaactctttttccattgtttgctccgacgtcaaagggattgactacgaaattcgagtgcaaggactttgtcaggctgttgagccggaaaagtgtgtggtgaagcaaaaaagcggtgaccaattgttaattatgctgaagaa

SEQ ID NO: 95850 - DNA, 356 bp, Heterodera glycines
  unsure (1)..(356): unsure at all n locations
attggtttgaaattcataatactcaattttatcctcctcattttgcgtgaatcgcaccacacatgtgaatttttcttgagcagagaatccatcaaaatatgcaaatttatgggccaatggcgacaaattttgcgaggaatggaacatctgaagggtggaaaaacatgctggcgcccaaccgtgagcgcccaactgacgtagaccgtttcctccacctgacaaagtgtgccctcaacaaattgccgacaatgccaagcgaaagaaggcacaaataagcggacaattggaattgcatgatgcaaaaagattgatgcgcttttgtatttctcaattagctgaaaatttttgaaaatcnn

SEQ ID NO: 95851 - DNA, 710 bp, Heterodera glycines
  unsure (1)..(710): unsure at all n locations
agtttgagtgcatttcctttaatttatttgctttctgaacaattgaaattgcgaccatatttaagcagtttgatgtagttgaagcatgtccttgcagtgcctaacacaggaagaagtgaacacaatttgcaaagacgtcctcgaaaatctgatcggtgcctcaacctatcagcataccgaagcagtaaaatggaaccaaagtgtcgttgagaaaatcaccgccagattggtccagcttcaaaaaccctataaatattgcgtgtgtgtaattttgatgcaaacgggttcgggtgcgggtcttagcgttgcgtctatgtgcttttgggaccgacggtgtgacaattccttcgtcgtccgttgggagagcaaagccgtgaccgctgtttgcaacatttttgcgattgccgtcgactccggcgctgtgtcgcccgtgccaatgatggacaacgacgccgccactgatggggagggcggcactgttgctgcatccgccaccgcaaccaccaacggcggggacatcgtcggcggcggcaaaagcgaatgcgagtgacagcgacaaaaatgtgaccaaacgcggcggacggagggacgggcgcgaacgacttgccatcatttcaatgccccagcaaaaaattagaggaaaagaaatgcaaaaatttgatttgatttttattgattgatttgtgtgtgacttttanatgacgggagag

SEQ ID NO: 95852 - DNA, 581 bp, Heterodera glycines
gggctgcaggttttcggcacgaggatttagctaataattctgcaaatgaagctcttttgcccttttgtgtttctcgttctgctgtccgccactgcttttgcgttctcaaatctgaacaaaacgccaaagactgtccattgggaagacgcgtgcgacgagtgccaattgatcatcaaacgcgttgtcaatgtcgccaccgacccggaaaaagttgctgagttgaagatccttctgtcggcactgtgtcaggagacctcctacgtggaggagtgtcgtctgttcgtcagcaaattggaccttttcctcggccgtctgttgccctttttgagggatgcccaccacgtgtgcaaagaattgcggatttgcaacaacggacggctccaacagtttcacgtgctcggcttacactttgcacgtgtaaatgcttcgttccaacgtaaggatttgatctgcgaggagtgtcaattggctgcccgggaattggcacgtgaagtcagtgagccgaaattccagcagtacgtggaggaatggctgcaggggaatgtgtgtgtccatctcggcactttgaaatcatcgtgtga

SEQ ID NO: 95853 - DNA, 631 bp, Heterodera glycines
ttttttaatttaataaaataacagtcgcaatgtcttcaaaaagagttcgtttcaccgaggaaagaaatgcaacagaaagagtgaagagaagtcggacggaagcggcggaggaggagaaaagggaacgattggacgacgaggaggacggaggaccagccgaaacggcggaaggaatgaagacaaaacggacgaagaaacacacgttggactcggacgaggaggacgaaacggagggctaccaacggctggacatggacaaggtggagggtcaggaggagtcgaccctcgaatatgagggacacgtgaagatcatgcctttcaacatgaaagacgatttggaggaggggcatttcgacgcgaacggcacattcatttttgacaagaagcaaagtgtgatcaaagacgcgtggttggacaacatcgagtgggacaatgtgaagaatgcggccgggaaacattggggcaaattggatgacgaggatgacaaaaaggcggacgatgagaaggaagtggagccgaaggaagtgtatcgacgacttgtcgaattgctaaacgaaaaagagacaattggcgctgcgctgaagagactgaacaacgaaaaaaagtcaaacgcagcggaggagcgcaaacg

SEQ ID NO: 95854 - DNA, 624 bp, Heterodera glycines
tgagaatgttttaaatgttcgctggtattgatgggcagcaaaatcttctcctttccgctcaattacagcgtttactttgccaccacggagaaacggcgaatgcattcgttttctgtcaccaaatgcaaccggagctgcaaaaggggccgacttgcggattcgccgttcttttgatggcgttgcgctgttccgtcggcgatggtacgttggaccgattggtggaaatgggcaaacatttcgggatcacttacaacggcgaactcttttccgctgattggatgtgtgaatttgtccaaaaacattggccaaacgcttgcgaattgcgagtggcccaatttccatctccaaattccatcgtgcggcatttgatttctgggaaaaaagctcatcatcaatgtacaacgacagttttggtgccgtacgattgtgacaaaaatttcgagccatgcaatcggcagggcgttgctgcacattgggcaatcattattggatttgttatttttgatgtcaccgctcaaaatgggccagaaaatcaaaatgcgaaagttattgcatttgacgaaaatgacttccgctgtgatggctttgacaacgaacaccttttgtatcttatagcgcttcagg

SEQ ID NO: 95855 - DNA, 498 bp, Heterodera glycines
attttttcctacattttttgcatttcccgtttttgttcgcaatgtttgagcttgcggaccagtctgacggtaccagcggcataaagcagttgtgggctttgatagacccaatttggaaatttgaccgtgccgaattggtcgactgcatggcaaaacgggtcatctacgagactgatgaccttatcgcactggacaaaccattccaaatggcattttcgtcgggcccggatgaccagccccaacttgacaggattttacaggacttaaagaagcacattgcgcccaaaattgaccggctgtttctcgtcagttcgttggacaaaaactgcagtggcgtcatcgttttcgccaagagccacgtcaagcagttggagatgaaggcccaactgcagaacgacgccctccttttccgttaccgagccatttgcaagggcgtcccgaagttggccaaggcgcgcatttcaatcccattgatcaaggttttgcgcggctccaacc

SEQ ID NO: 95856 - DNA, 344 bp, Heterodera glycines
  unsure (1)..(344): unsure at all n locations
cccaagccaattggaccatctcaaaatctgcttaatttgccatgaacaaaaaattcatcaacgcacttttccatcaacaaatgttcaaaaatgcagttcttcttccgttccgccacttcgctgctttgactgccacgcaaacgcacattgatcccgttcctttgtcctttcttcgccaatccgaagatgaaagcgaacagaagacgacgattatgccaaaatggaaggaggagggactgaaaattgagaggaactgctcaaatcgcattttccaaaccattgccaaagacgtaaaattgttgactaattgatcaacatcatttattaatcaatggctaatgacn

SEQ ID NO: 95857 - DNA, 289 bp, Heterodera glycines
atgcgtttgctgtgctgttgttgctccaacaatgcacaacatcatcagcccatcaaccgggaaggacaagacgaattaaactgaagatttgatttttttgaacgcccgaaaatgaatcatatggcgaagatttttatacaaaattggcattttaaattttttttgatcccacattttttgctttatttttcttcgttttgcaacattttttcttctgcttttcctattctcgccttcttatacaaattgattgtttcaccttctcagaaaagaaaaattcttcttttat

SEQ ID NO: 95858 - DNA, 491 bp, Heterodera glycines
aaaaaaactacccaaacaaaataaaaatacaatagacgcacggggcttgtaccatacaggtaaacacaacaagaaaccaagccgagctatcctggaattgcctggatggcaatgggatagagtacctataccgaaagacccaacggaagaatgtggtaaaatagtttttgaaattaaggtagatgcaaatggggaggtggttgcagttcgaaccatagagaaaaccattacgcccctcgtagaaaaaatctatgcggatgaactgcgtagccttacgtttagcaaaacaaaccataataatgcgtcttatcgtaacctatctacaggaaaagtgatcttcatactcgtagcaaagtagtagctgtttgctcgagggggggcccggtacccaattcgccctatagtgagtcgtattacaattcactggccgtcgttttacaacgtcgtgactgggaaaaccctggcgttacccaacttaatcgccttgcagc

SEQ ID NO: 95859 - DNA, 494 bp, Heterodera glycines
attaagcaaaaatgacttccaattctactgatggttggggatgtaacaacagtgggtggggtcaaagccaagcaaaaatgacttccaattctgctgctgatggttggggatgtaacaacagtgcgttgcgtccgaaccaagcaaaaatgacttccaattctgctgctgatggttggggatgtaacaacagtgcgttgcgtccgaaccaagcaaaaatgacttccaattctgctgctgatggttggggatgtaacaacagtgcgttgcgtccgaaccaagcaaaaatgacttccaattctactgacggttggggatgtaacaacaatggctgggctccgagccaagcaaaaatgaccaattctactgatggttcgggatgtaacaacagtgtgaggggtccgcgcgaattttctcggagtttcagtggacgcccaggatttaatcgccaacctgtgcctctaatgaacaagttgcctccaattcctccgtccaca

SEQ ID NO: 95860 - DNA, 630 bp, Heterodera glycines
cacaattaataaatttatttgacaaatgccactttttcttggcattgacctcggcacaacgtcagtgaaaattgccctaatcgatggagacaaaaagacatttttggaatgggacagaaaacacaacgcattaattgagagagaggagaaggacaaacacgaacaaagcccaaagaaaatattggacaccgtacagaaattgatgggagagatggaaacggacaaattggcacaagtgaaaggcattggcatttcgggacaaatgcacggagtgatgctgtgggaagccgactcaattggtttgggcgtggaccgttgccactgctcccctctgatcacgtggatggactcgcgctgcgacgagcaattcctgcggaaactgccaaacatccctcttgactcagtccaaaagtgcgtttatttcctcacaaaatgccgagtcgtggggtttcgtctccgacttcatttggaccgtccaacagataagctgattgatgccctccctctgtttcccatttcattttgcttttcctcacgcccatttccccactcatttgctgccctccatcgtttcccccggcactttcattggccgcacttcgcttcccttcgcccatttgccaaaaggtg

SEQ ID NO: 95861 - DNA, 118 bp, Heterodera glycines
tgggggatcgggacaaccaggacaacccggacaaaatggagttgtgtataagaccgttcctggaccgaagggacaacccggcccaaccctgggagcaccccggggaaccaggcctggg

SEQ ID NO: 95862 - DNA, 773 bp, Heterodera glycines
ggtaattcaattactacaaatttctttttcaacttgaaaaaatcgccgctatggccactaaagcaggaattttcattgtgagtgcaaagcgctgcgctttcggtgcctttggcggctcactgaaaaatcacacagccaccgatttgggcgaaattgcggccgctgcggcgcttaaatcgtcctcaatcgcggctgagcacatcgatcacgttattttcggcaatgtcatccaatcatcgaaggacgcggcttatttggcccgtcacatcggcctccgagttggcgttcccgtccatgtccctgccgttactgttaacaggctttgcggctcgggcttcgaggcgattgcgcagggaggccaacaaatcctcgcgggtgactcaaaggttgttttggcgggtggaactgagtcgatgagtcaggcgccgttcgcagtgcgcggcgctcgcttcggcacacagctcggtgccaagattgagttcgaagacgtgctttggcaaggacttaccgacgcgccacgcgaacatgccgatgggaatcactgcagagaatttgggtgcgaaatacaatgtgacacgagaggaggccgacgcttatgccattcggtcgcaaaaccgctggagactcgcaaacaatgccggctatttcaagtccgaaattgtgccggtcaaattgcagggcaacgcgcgagggaaaactgtccaggggaccaacccccgggaaagcaccgccgacaaatggcagctgaaaccgttttaaaaaggaggcctctc

SEQ ID NO: 95863 - DNA, 338 bp, Heterodera glycines
  unsure (1)..(338): unsure at all n locations
gtcaaaatgaatttgttttcattgactccattggtcctctgttccctactttttgttggggcacctgttgtgcaaagtgccggaaaagttgcgccgccgccgccaccaccgccgcctccccctccgcctccagcgtacgagccaccagagccgccaagctatggcgcccaaccgccaccccaaccagcgtattagcctccaccaaagtcgaaaaagccgaattgatgagaacgagatgagaaacaacattttcccaattttgaagatgattaaatttctttgtgctcgattatttaacaaattatgaaattggctgtttaataaatatttgaatgacn

SEQ ID NO: 95864 - DNA, 228 bp, Heterodera glycines
tgccttttcatgacataaaagcattaaagatgaaactgtggttagccatccaaaacaaaacaatcgattgggcctcacaacatctccacacacaataatatatacttgttgagcaagatactacacgttactctctctcaaagaaaagaatctaaagtagcaaaactttaacaaaagagcttcaaatttgcttcggaccttccatttacacaagctcctacctcaagc

SEQ ID NO: 95865 - DNA, 479 bp, Heterodera glycines
ccgacgcggtcgcaaagcataaaaaaagtgactgaacatggcagttcgttgaagcggggccccggcggaagtttgggcgcggcggacagcagcggggcaatttcgcaactcgccattccgacggtgggggcgctgaaggccagctcagccggagacatcgcgcaacagcagtctccccactcttgcttggctggaaccagctcgacctcatgtgttgagctgaacgcggaggcggaggagcgacgcctggtcgagctggtggagaagttcgacatggactggggcagcgatttggaggttgacactgaaattccgagtctcgagtcgctggtcagttgggaaattctcaagcatctgaagccaaaagagaagaagcgccaggaagtggtcaacgaactgtaccaaaccgaacgtacccacgtgttgcgtctgaaggtgctttacaaagtgttctatcggcccatggttctgcagcgggt

SEQ ID NO: 95866 - DNA, 908 bp, Heterodera glycines
ccgccgtttcgcttccacaccgacaccgacacgcacacttgacttgacttgacgacttgacttcaccaccaaatcttcccaacatgtttggcttccgcaaccccgctggctccacccacaaccccaacatccttgtcactgaaggcgacacttggaccggcttctacgctgcctggtcgctcttgcgccaccaccgcggcggccacgactcgacctccgcacccgcgccaaccggccaacccggcatcaccccgacgcaccacggccatgtcaacaaggtgattgtcgatgtgcgcgactccaactcggactttgccaaggaactgcacaagctcggagccgagttgcgtgaatacgacccctacaacatggacaaggaccagatccaaaagcacctgctgcgcaacgacgtggacggcgtggcctttgttcccgtgcacgactcgattggccacatgatcaacatcaactagatgctgctgcgcgcctttgaggaggaggagcggtgcaagtgccttgtcatgtggtcgtcgattgggacccagattcatccgggcagcggccacgatgacgacgaggatgtgcttgccaagagcaagggcaagtcgacggccacgcggacctcggccacgggcggcggcatgccctcttggggtcagcttttcgagaacaagtcgcagattgaagggccgtgaggaacagcaagtttgagcacgagtgtatcttgcgcattggctttgtctcgcaacaattctttggcctctcaaacgtgatccagtcccgcggcatgttccccgtcacgtcgcgctccaacaagtgggctcccatcaacgccaaggacgtggccatggtctctggtgctttgctagccaacccgtcgctcatgtccaagttcaccaagcaaaccc

SEQ ID NO: 95867 - DNA, 494 bp, Heterodera glycines
attaagccaattaattcatccgtaaattattcaaatcattccgccgatggcatcaattgtggacagcgcaaaagtgaacaattttggaattggcactgttgttgagccgattctcgtcaataaaaatggatccaccggcggtggcggacggaggaaaaataaaactctgttcggcatttcacaagcagtgcatgccgaacatcctcaacagcaattgtccgaattcgctggtggcatttcgcctgtcgacgccgtgccaatgccaaccgcggccaatgactgcaacaataattccatcgaagacattcaatcggaccgccgaaggggcccaattgatccgacaaacttcgaccatttggtccgtctgagtgagctcatccgttccatggccgaccttggcactttgcagcccgagttcggcataatctgtggctccggattgggcgcaattgccgaccaaatggagggggcgcggattttgcctttctccgagg

SEQ ID NO: 95868 - DNA, 148 bp, Heterodera glycines
attaccagcatatgtttgtgctgttcgagtggcgagtggggcgcattgtcggcgtgttcaaccgctcctccgaggcgttgttcggcgcgttcgagcggcacaacgagcagttccgcaacgggcacattgtgcgcacaatgttccccac

SEQ ID NO: 95869 - DNA, 622 bp, Heterodera glycines
gtgtacaattatttaaagaaaacagcgctttctgttcttttctcgcttcaaaatgtctctttttcttcttcgtgctttgcctcttttcttccttttctctctgtgcttcgctgcctctcccttcaattttcgcgcaaatcattcgcttggtgccgaaaccactcaacagattgtgcccaccgtggcgactgaaacgaccgacggaccgaagcctacggaaaatgttccccttatgttggagaatgacaatgtcaccgaagttgccaaagttgaaggacggaatgccagtgacagcgaaattgaaacgagggaggaccaagcctttgccaacatcactgctcattcctccgacaatgcttcgcttactgagagttgtggcttcttttgccgaaacgtgcctttattcgtcggcttcatcttgaccctcgtctgcgtttctctgctcctcattctttccattgttttgtaccgttattttacgcggcgcacttacgccgacgagtgaaaagacagcgaatggacgcaaagaaacgatgattcttcttaaaatgtcatttcattttgttgagccatcaatcaatttgttgcttttcccttttgttggcctcctttttgaggcctt

SEQ ID NO: 95870 - DNA, 518 bp, Heterodera glycines
ctacactagtggatcccccgggctgcagttaatcaggacgaggatttaaatttcaataatggaccaacttatcagtgggcttctcggaggtggcggcggaggaggagcaaattctggtgataatcagccgcagcagggcggcggaggcagtggcaatcagttggcagatatggccggggaattaatcggaggatttcttggcggtggcgggggaggaagcggcgccttgggaggaggcgcaggcggcggggacattctgtccacgctgttcaacgcggtcaaaggcggtgacattggcagtcttttgggcgctttggccggcggcgcagatgtgaacgccaaggacacatcgagcggcaacactctgctgcaaatggccataatgacggggatcaccgaaattgtgaagcttctgctgaaccgcggtgcgaatgttaacgcgacaaacgctgagggcaaagacgcggtgcgaattgcgcaagagcaggcggaacaagcgccggacgaggacagcaaag

SEQ ID NO: 95871 - DNA, 534 bp, Heterodera glycines
gtccaattaagtgtttttttaaatttatatttctttgctctgcatataacaatcaacgagagaaatggggaattgtaagcccgcggatgccactgagtcggagaacgcgtcttctgtcgagacggttgaagttgaagtacctccggaccctctcgttaacccattctggaagatgcaaaaagccttcgagaagaaactgcgtaatctgttgaagcgtgagaagaagcttttgcaactgaaggaagaacgcgattccgacaagccgatcactaccgaccaacacgaggctctcagcaaattggacgaagttaaaaccctcattgggttcgttgatgagatgatgaagttgaaccagcagcagttcagccagtataagaaagccatcaaaaatcgtgaacgtcaactgaaaatgcagaaggcgcgttctcaaaccggacagcaatttccgagcagacaaagttatgtccattgttttaactgattgtttgatgagtaaaggaaagcgaatgatttgggatagaattttgtaatttg

SEQ ID NO: 95872 - DNA, 605 bp, Heterodera glycines
  unsure (1)..(605): unsure at all n locations
cctttgagcctttcgatttgttccgtttcggtgcagtgaatctcgacccgctgactgagacgtacggattgcccttttatttgcattatttggtgaattggcccgattattttatggtcgctgaacatctctccggcgaccttatgggatacataatgggcaaatcggaggggcgcgaccaaaattggcacggccacgtcaccgcggtgagtgtggcgccggaataccgccgcatgggcctggcggccagattcatgcagaagttggagttggtctcagagaaggaggactgtttcttcgtcgatttattcgtgcggattagcaacgaaacggccattaatatgtacaaacggttgggttatacggtttacaggcaaattgtcgattattattctggcgatgacacccacgaggacgaagatgcattcgacatgcgaaaggccttgccccgagacgtggacaaaaagtcagtagtaccgctgaagcaccccgtgtcatgcaatgagatagactttgactgaatttccgtttttgtttcgtatttaaaatcaacaacgatgaaaaatatggataaaaattcattccttttcngganagaaaaaaaa

SEQ ID NO: 95873 - DNA, 191 bp, Heterodera glycines
atggcattcgggtttgtgccactgaatgcttttgtggcgatcactcggagaaacggaattgttttggtgagaaacacaacgtcaaaatattaccatcccgccagaatacacatccttttggttgatcaaaacgccatttgatcaattgttgttgttgttaattttgtttttttttgcaaaatttgaattat

SEQ ID NO: 95874 - DNA, 400 bp, Heterodera glycines
ctttacgacgatgggcagcgcgagactcggcgaggcgcaacgaaagcaacttttggagcctttgctgaaggagggcgggtggcaaatggagcagggaagggatgccatcaaaaagagcttcactttccgagactttaacgaagcgtttggcttcatgacgcgcgttgcactaaaggcggacaaaatggaccaccaccccgaatggttcaacgtgtacaacaatgtggacataacactgagcagccacgacgtgcagggcatttccgagagggacgtggcattggcatcttttgttgaggatgtgttcaaagcgatgaacttatgatgatgacgataatgaagtgttatttatacaaattattttcatctcaaacccgaatgcgaatataaattcatttca

SEQ ID NO: 95875 - DNA, 644 bp, Heterodera glycines
ctagactagtggacccccgggctgcagattcggcacgaggctcatgaaactcaattgattttggacgaggcccggctttttctttcaatggacgacagcttcctttggggactgaacattctgagcatcttcttgccaacttccctcagtccggcgcaacacgatgaatttggcgctaaactgagtgaataaattgtggttttgttgtgcagcccaggcatggaactgaaagctttcgtgcgtgcttttccatactcggtgctcgactttttgccagacgtgttgatggcttgtttattgcatttcaaagaaaaaataaaaatgatcatttataattaattaatggtttgtttgtcctccttccaattgtaccaccatttcctcatccttccgttccaataaagcttcatatgctcgccatgaaacacaacaccaacaaaagtgaacaaacaaaggccgagaccaagttgagggccaaaccgataaaaattcatgtattggtctctgaataaaacagaatttggacgtgatttgttaatctattcgtttacgcatccaatcaacgaccatactcagtttcttaggtcaaacattttccttacttgatcaaggcctacattcttggcatcaataaaagcttaggt

SEQ ID NO: 95876 - DNA, 690 bp, Heterodera glycines
attcattccaccttcttccacttccatcatcatacatatcttctgcgaatcctccctccccttcttcctccgctgatggccaaccccaactccgaccactctctccccctttccccctctccctctccttcccattcttcccactccttctccctccgttctgtttttgcccaccacttttgctttttctgctcaaattctgtgctcatcgccctagtcgtgttcactttgtcactgctaatggcatttttgctggggaaacggcgctcttcgcaaaacgcattggcaaaacggcgcagagacaaatcgccagaaggcattgaattggaggagaatcccgaggtgttcaaaagttcgttgctgaaggactccaaagaacacatcatcagtacgtactttcctgatgtgcgcacacttttcgatgctttccaacgcggtctcaaagttgccgaacattcggcctgccttggctttcgtccggcaaaaggttcgccttaccaatttctcacttacgctgaggtagccgttcggtcgcagtcctttggccatgctttgatctccaaattgggccttcagcccggcaacgaaacatttgtggccatttatgcgcagaactgtcccgagtggatgatcacggcgatcggctgtacccgccactccatggtcattgtgccgttgtacgacactttg

SEQ ID NO: 95877 - DNA, 448 bp, Heterodera glycines
ggtccttgaaataatgcaaggatcatcggcacgttcatttttaaactttaagaaaaaattgcaacgaaaagaagacttggagaaggaatttgtggagagtggtgagaaagaccgggtccaagaggttgtggaacgacgacttcacgagtcggggtgggcgaaacgagtggagagcatgtgcgaggagtacatcgcgaagaagggctatgaacgcgttgaactgcaagcgatggttgacgagctgaaggatgcctcgcgtcgaattgtgccggatgaagtgaagagagaactcatgcagctgattcaggaatttgtgaacagccgaacatcgacgggcgaagggtggtgataaaagacggaaactcattaattttttaattgttttgaaagacagacttgctttcgatttcttattacgaatcgtttaaatcaaaacatttaaaaaaaa

SEQ ID NO: 95878 - DNA, 450 bp, Heterodera glycines
tcatcgtttccttgtgcctcttaatttcggtcaaaattttacgtctgacaaatctcgacattttgtttcgtattcgggacgggcttagaagtgggaagccatttattacggcactttttcgggttgacattgaatctcagaggcatggcggtgaacttgtggccgaagttttgaaggcccatggagttcgcgagcttttcaccctgtgtggtggtcacatttcgccaattttggtcgcctgtgaacaaattggcattcgtgtgttggacacgcgccacgaggccactgccgtgtttgccgcagacgcggccgctcgcctgcgccaggacattggggtggccgcggtcaccgccgggccgggcatcaccaacacagtgaccgcgttgaaaaatgcccaaatggccgagtcgccggtgcttttgttgggcggcgcgtcgccttcccttttga

SEQ ID NO: 95879 - DNA, 613 bp, Heterodera glycines
tattagttaacgacgccatcacaatgtgatgatgacccattaggaccacatcgaaagtttcattcatttcgttcgttcgatttccatggaatgccctccgggttcttcgttcgacccttccccgtctccgtctgtcgcttctcagccgttttccgaggaatgccattccccggacaaccaaatttctcttgataattctgtgcctgaggaaagtccgaatggaaatgccaacgtttgcatgggcgaggcaaagccccgctgggggccgacccatgccggggccaaacagttggcatcgatgtacggcaaagggaaacgactccaagaagtcacttgcatttgcgttgcgtcagccctttttctgtcggtcggctgctccctcctttaccactttcggcttgtccccgtcggtcagctcattttggcatccctcgtcggtgtgctgatggccgatttcaactcgggcgtcgtccattggggcgcggatacgtggggaaccgtggacactttcgtcggaaggaattacaatcgttcgtttcgtgaacaccacgttgactcgacagcgatcactcggcatgatttagtggaagtgaatggagacaattttatgctg

SEQ ID NO: 95880 - DNA, 648 bp, Heterodera glycines
gtccaattaagatttgatctgcgtcaaatggctaatgattctcgcagttcttcgagcgcttcctcccgttctcgctcgcgtagtcgcagtcgttcgccacgccgtcgcgagcagcgtcggcgccgctcgcgttccaccttttcacgttctccatcacctggccaaaaacgactgcacatcggcaatttggacgagtcggtccgtcgtcgggacattgaagacgtttttggaaagtatggacggatcagcgactgttggatggccagttaccctcccttctacgctttcgtcgtgttcgaaaacaacaaagatgcgtccgcctgcatgaaagacttgggcaacacggcgtacatcaaagggtgtcgtgcgcgtgttacggtggctcttccaagaaaaggatcttcacttgatgccaattcaatgaatggtgcgacttatcgtcgcggaccgccgcctcctccgcgacgttattacgacgaggaggacagtcaccgacgccgtcgtcgttcgcgtactcgctcgccccgtcgtaggcgctcgcccagtcgctcgcgcagtcgcacaccgccgcgccgcagtcgttcgcctcgtcgttcggcgcgtcggcagcgctcgccgtcgccgaagagagaacccagaaacagggga

SEQ ID NO: 95881 - DNA, 548 bp, Heterodera glycines
aaagctggagctccccgcggtggcggccgtttctcgaactagtggatcccccgggctgcaggaattcggcacgagggtttgagaaaaacgttcaaatgtttcgcttttcgctgcttctgctgcttgtccctctcgtccgctgtgtccccaacccaaagcctttgttcggaattggcatcggtcgcaagcaaagcgcgggagcggaggggaagctgacctgcgctggagagccgttggcggatgtgaaggtgaaactgtatgatgacgaccgcggggtggacacggatgatctgatgggtgagacgagaacggactcagagggacgcttcagattggaggggtacacgcacgaaatcaccaccatcgaccccaaaattaacatttaccacgactgcaacgacgggctgaagccatgccagcgcaaaatctcaattatgatcccggacaaatacatcgcctcgggcgaacatcccaatacatattacgacgcgggcacaatcgaattggagggcaaattcagtggcgagacaagggactgtctgcactaa

SEQ ID NO: 95882 - DNA, 474 bp, Heterodera glycines
taagaaatcagcaaattcaatttaatttttctacctaattctttaaaattcttttcttttttccaccaaaaaatggtgtttttcatttgcgaccaatgcggcgagaccatgaagaagaagcaggtgctgcagcacatccaccggtgccgaaacgcgcactattcgtgcatggactgccaagtggtgttcgacaaaaacagttaccaagggcacaccaaatgcatcacggaggaccaaaagtacggaggcgcgagacatgtgccaaaagtgaacaagggtgaacaaaagcaggacgcctgggtgtcgcaagtgcgtgccgccatccgtcaggtggacgagccgcggctgaagaatttgttgcgctccgtccaatgccacaccaacataccgcgcaaggaggccaaatttgtcaactttttgcaaaattcgttgcgcattcgggaccgcgcgttgtgtgtggacgcgtggaatgca

SEQ ID NO: 95883 - DNA, 590 bp, Heterodera glycines
agattttcgtcctcaaacgtcggttgtttttccgccgttaaaatgaccgcagcggcaaaactcagccgtttcttccgccgtttggtgcacgtccgacagatggactttgaattcgctgcttggcaaatgctttacctgctggtcaatccgcaaaaggtgtacaggaatttcatgtacagaaaaagtttgttgtccctctcaattaattcattaatttctaatttcgttcagaagccaaagatcaatgggcccgcgatgaccccgcctttctcctccttttggcactttctctgctcggctcgagtgttctgtttgcattagcgctcaatttgtccttttcttcgttctgcgcctttttcctttgggttgtgttcatcgattgcatcggaattggcattgccattgcaaccgcactttggttcatttcaaatcgctttttgcgtcggacgagggattgcgacgtggtcgagtgggcctattgcttcgatgtccatttgaatgcttttttcccgttgctcattcttctccacgtcattttacctttgcttttctacggattggttgattaccaaaattttctcgcccgcttt

SEQ ID NO: 95884 - DNA, 471 bp, Heterodera glycines
gcggccattccgcttccatgccccgagtcgttgttgatgaagaaactgactgtgcaccccgacattatggacattgtgagggagttggacgacaaatgccttcgatctattgaagattcttattttgacagaatgggtcaaggcccaacctatcacactgacgaaaatgcccaacgtcctgaacttctcgacgagaatggccatcgttacgtcggcctcttcaaccaagcgatgacttgctatctcaattcgctgattcaaacattgtacatgacccctgagtttagaaataaagtttacagttggaaattcgtcgacacgccgacgaatgaggacaataaaaacattccttaccaattgcaaagactgttcttgttgctgcagaccagtgagaaagcgtcgctggagaccaaggagttgaccaccagttttggatgggtgtcaaacgaagcgtttgaacagcacgacgta

SEQ ID NO: 95885 - DNA, 566 bp, Heterodera glycines
gtttgagttattccagcgttatgaaattctctcatgtactcgcgaagggcaaggttaatttgaacgcgcacacttggttccgacgcgtctgggagaagggctattctggaccgccactgccaaaaattaaacgtactggaaaacctcccgtgccggtgacaaatgaggcggtcaacgaagtgcggacggcactgatgcgggaatggaatgtcatgcagtggctggccaacccgtacctcaacgcggaaaaggaggcgccatatttggagcgtttcggggacatcaatgacgaatggacacagcgaacggtcgaggcgaaacatcgcaaaatgcccaacaaaccgaaaatccggcaaattgcatctggcgaagtggagaagagacgtgccaatgttggcaatttgttacacgctcatcggacggtggaggacgaactgaagaatttggagcgcagaaaccgatgggactgaacaatcgatcacttcaatttccttgtcatttcaacaaatcattgttttagttctacttatatttgctggccacataaaatggggttgttcgaaaaa

SEQ ID NO: 95886 - DNA, 829 bp, Heterodera glycines
gtttgaggtggttataatcttttaattaaaacaattacgcaaaatggtcacccaaaacgaccatttgatggcaaatttgtccgaccaactcacaaatctgcaaaaggaattggacacactgaaaaaggacatgacggcgaacaacgacgcatttttcaattgtgccatggcactgatcatttttctgatgcaatgcgggttcgcctttctcgaagctggagcagtgagaagcaaaaactgcacgaatattatcatcaaaaatgtgcttgattcgcttctcggcataattgcttatgcggcggttgggtgggcactcgccttcggctctaaccctttgcccgtgttggagccctatttcggcttttcccaatttggaatggtcggcaccacggaattctcaaagttcttcttccaatttgtgttctgtgccactgcctccaccatcatttcgggtgccgtggcagagcgtgccgagttcgcctgtttcatcacttattccttggccatcaccgccttcgtttaccccgtgcttacccactggggatggacgaaacagggttggatggcagccagcggatttgtagtcgacgacgctcaccaaatcacttacgtggactttgccggctccggaatggtccatgtgtgcggcggcactatctctttgatcgccgccgcactgatggggccaccgatcggacgcttcccggagaggacagtcagcgtgccggtggggggaccgaggcggaagcagaacgagcccaaaagtgtggagatcaaacgacattcagtgccgctcgcctctatgtggggcttcattctgatagccgga

SEQ ID NO: 95887 - DNA, 449 bp, Heterodera glycines
caagtttgagatttttaaacacttaccaaaaaatgttgggccacttttccaaacttagtgttcgttgctacgcttctgccactagctttcgtccgttcttcgaccgggtgctcatcgagcgttttctgcccgaacaaaagacgaagggcgggattatgattcccgagaaggctcaggggaaggttctcgagggtactgttgtcgccattgggcccggttatcgcaatgacgaggggaagacaattccgatgcaacttcaaattggtgaccgtgtcttgttgccggagtatggcggtgctaagatcgtcatggaggacaaggagtaccacgttttccgcgaatcggacatcatcgggaaattcgaatgagtttgtgaggcggtctctgattttatttgtttttgtttgaatcattttttactattgataaattgttgtcactttcaaata

SEQ ID NO: 95888 - DNA, 571 bp, Heterodera glycines
gtttgagacatctctttcgcgcctcattaaatgcatattcaaacggtcccgtaattgcagaaaacattataaattcgttgaaaagaaatcgagaaatggggaaggagcaacagaaacaacaaaacaaagaaaaaaaggttgccgcacaacagcagcaaaacaccggagatgaagcggggactaagaaacagacaaggcttgggttggatgtgacaaagacggagaactattccgaatggtattcccaggttatcgtcaaggcagaactaattgagtattacgacgtgtccggctgctacgtcatccgtccctgggcgtattccgtgtgggaacacatccaagcattcttcgacgctgaaatcaaaaagctgggcgtcaagaactgttactttcccatgttcgtctccgctgctgcgctcgaacgcgaaaaaacgcacgtggccgactttgccccggaggttgcttgggtgaccaaggccggaaacaacgacttggccgttccaattgccattcggccgaccagtgaaacggtgatgtacccaacctttgccaaatggtgcaaatcacacag

SEQ ID NO: 95889 - DNA, 474 bp, Heterodera glycines
gtccaattaagttggcggtttaataataaatttatttaaacaattaatggcagcggcaacaacaacaatgccgtcattttattttcacaaacatttttttcaacgaatttttcctggcaaaccttttttcgtgcaagtattttcggcaggcgttctcgcagcaaccggcgacattttgtgccaaaaattcattgaaaagcgcgacaaatgggacccatttcgcacgtcgcgctttgctctgacgacagccattgtcattgcacccatccaatttcattggtttcgcttcatggaccgacgtattggcaaccccaaaagggagggcccggctggcaaagtgacccttcagacggggctcaagcgggtgctggtggatcagagtctgatcgcgcccgctttgaccgccgcctttttgttttccgtcaactttttggattcattttccacacaaaatgcgattcagcggacaaaacg

SEQ ID NO: 95890 - DNA, 242 bp, Heterodera glycines
tcgacgagcccctttttctcttcagctctttttggcactgaaatatgcgagcgaagtggcgtaagaagcgaatgcgtcggctaaagcgcaagcggagacaggcgaagaaatgagcggacggacggagagaaaactcagccgaacgcggaaacggaggcgcaaaatgttgttgctgtttttttgttattgttgtcaaccgcccctttactcagataaaatttgttgcaataatgatggaaaat

SEQ ID NO: 95891 - DNA, 230 bp, Heterodera glycines
  unsure (1)..(230): unsure at all n locations
gttcggttaaattacgtgctgggaagaggtggaaagagcgttggacgaattgattgagcaacgccgccagcggggcgtactgcccgaggtaaccgaatgggtaccgcccgctggcggaggaaggaggagagggaggtagctgcaggggaacctcgttcttcccgaaancagtctggttttggttgacagacgattccctttttccgcatnanagctaanacgacgaagaa

SEQ ID NO: 95892 - DNA, 466 bp, Heterodera glycines
cgagcagtgtccgacagacggaactgtctttggagcgacacgagtggcaaacggtgatgtgttccaatggagtgatcgcgtgttggcacccgcccaaacaattcccatttgagcactcgcgcacctttaacatggaaaaggcaatgtcagaaaaagagaaatttcttaatcgtaaacccgatcaaactctttttacaacggcgcccgatgataatgcgctttgcgaaattttccacaccgaaaagcaggaatggaggccgatatatcgagagaagcggctttacaatgcgaaagttgaagatcaattgaagccgattctttccaatccgctggaaactccgactgcccctgtcatcacaaaaaatgtcgaaaacgaagcccatcgaattgaacagggagtcaatgaagggaacaacccaaatattttgtcggaatgatatctcattctacggttaaatttcttcga

SEQ ID NO: 95893 - DNA, 705 bp, Heterodera glycines
ccaagtttgagacctttattgaaattgagtacgctgtgccaattgtgcggcgctaaatgcgacaaaattggcgcaatctttggcaaattcctggcaaatttttcaatgtgagattttggcggaaaaagccttttcaaagtgctcgccgacagtgcctttgagaagccttcgttggtcgacatctttttctcgtctaaattattccaagcttctctgaatgacgcatgtgaagcattgatcagaacgcaatcgcaacaatttaagctgcttaagaagcgcaacttcgacgtgatcatttccgagcagctcaacttttgcggcgcgggcattggccatttgctggacatttccgtgaacattgtgctcagcagctgttccctccaagagcaccttgcttcgctgattggccttccgtttccctccagtttcgtgccttcattgatggattcaaattggtccgacaaaatgtcgcttttacaacggttccaaaatttgctacacaaattcgccggctacaattatctcagttttggcatcgacccattgacacaaattttccgaaaacattttggaaatgcttttcccgaccttcgttcaattgtcagcaaatcgccgctcattttcgttgcttctgatgaatttgtggactttcctcgtccccttttttccaatgtcatttatatcggtggtcttggaatggagaaa

SEQ ID NO: 95894 - DNA, 393 bp, Heterodera glycines
taaggtaatttggatcccaaaaagaatttggggtgaatcgttggcatttgctggaattttaattgggctgcactttgtttactactcaatgcaaaacaacccaaatttaataccattgaatgatcgtcgggaactgatttatgtgaaatggatcaaagaaaaattcccgtcattgggttgggttggcattgacgacagcgaagcaatgaaaagaagggaacggatcatgggacagaaagagcaatagacagaagaagaacagaaaaagaatggccaatcggagggaccgatttattatatttatttgtgtttccgttccattatatgtaattgaaagctgtttacatgtagaaagtagaaacaaatgaaatagaaacagcaaactgttaaaaa

SEQ ID NO: 95895 - DNA, 273 bp, Heterodera glycines
gacagtcagagtgatttcaatttcaatgctttcttgggcaagccggacgagttcagcaaggaagtgacggaaggcgctcttttcgatttcaacttttgagctttttctgttttcatttggctttggttgtgctgtaactgttaattctattttaatctgcttatcattatatttggccattttttctttgtttagcattgttttgttctggtcatttcatttgtgtaagtaactctgtatttctgttatttttcccaataaaatcattttttc

SEQ ID NO: 95896 - DNA, 278 bp, Heterodera glycines
aaccatcgcccgacttttgcaattgggatttcggcaaagagccaagaaaatgcgttttttgcattgcgaaagaagaggaagaagagtgggaagaagaagaggaagaggacaaagaatgagtggaagagagagaatgagaagacggggggagccgcgaaacaaaaagcaaaacttccagaaaatgttaacaatgtgtcaaatatgtatactgacaattctaatttagagcacatcgaacatctattattaattcttaatatcaaatacacgaaaaaacc

SEQ ID NO: 95897 - DNA, 478 bp, Heterodera glycines
tgctctccgttaataatttggcacaatggtttgtgtttctaaacgccgcgttctctccccaaaaaacgacggcaatcgactgagcaaaacaccgacactcctccaaatgaccatcccgaagtaaaaaaggccaaaatcgaggatctgctaaaaaagttctccaatggagggttcgatcagttttggaatgaaggactccaaccggaagaggaactatcgcccgacttttgcaattgggatttcggcaaagagccaagaaaatgcgttttttgcattgcgaaagaagaggaagaagaagaggaagaggacaaagaatgagtggaagagagagaatgagaagacggggggagccgcgaaacaaaaagcaaaacttccagaaaatgttcaatgtgtcaaatatgtatactgacaattctaatttagagcacatcgaacatctattattaattcttaatatcaaatacacgaaaaaacaaaa

SEQ ID NO: 95898 - DNA, 460 bp, Heterodera glycines
tgaagtttatacgggaaaaataatgttcccgggcaagtcaaataaccaaatgctcaagttcatgatggatttgcgcgggaagttcccgaacaaggtgattcgaaaggcggtcttcaaggaccaacacttcgactacaactgcaattttttgtaccatgagacggacaaagtcaccggcaaagacaaagttacagtgctcaccaacatcaaattgttgcgcaatcttccggctgaactctccggtgatcaggaacttgacagagatgggtttgccaaggttgaccatttccggtctttgctcgaacagatgacagctttggacccctccaaacgaatttcgtgttcggatgctttgaaacaccctttcattgtagaaaagtgatgtgaactttaagcgcagaacatatttgaacttaattccacttcctttataatttgttttcattaaacaatcgaaaag

SEQ ID NO: 95899 - DNA, 595 bp, Heterodera glycines
tccatgatatggttagccatgccaaaaatggacatgaccttccccttccataccagtgagttcattctcctcaaagaatggcttcctcagagtattttcgcttatctcttttctttgcttgctgtgctcgccctttcggtggcttatgaattgctgcgtgtgttcagagccatccttttccaaatcgctgaaagacgtcagagtgaagagtgttgttcgccggtggcgagtgctgccccatcctccggtgccattaccgcctcctcctcatccgtcgccgcctgcaactgcttgtctccccaactcttttacaatgtcccccaatggtccttctcctcccaattggtctcccatttccatctcttccaatctctgctccatttcattcagttttttttgggtttctctctgatgcttgttgccatgacttacaatgtgcccatctttgtcgccctcctcttgggccattcgctcggttactttctcaccgcccctctctatcgccatggattggctgaagaaaatcggactggcggagattgctgctgttcataaacttcactttttgtttgcataaattcattagcaattaaaa

SEQ ID NO: 95900 - DNA, 488 bp, Heterodera glycines
ggagaaaagcacagatccaattccgctgacaaatgtcagatttcttcctcgacaattccgacatggacgacaacgagctggagctgaagctgaacaatttgcaaatgttgaaaaatcggcgtgccaacaaatctctgaaaatgccacccactgacattggcactaccaaattgccagtgaacggcaaaggcattggctaccgaccgctgccagaaaatgcacaattgaagcgggacattgaaacaaaaatgggcaccactgacagcgaagagaaggaaaaggagccgaaggaggagaacagagtgccaccaaacgaaaatggcaatggcaatcgaccgctgtcagacaatgccaaggaaaaaaatgcccaattgaagcgcgaaatcaaagaaatattgggcataattgacagcgaagagaaggaaactgagccaaaggagacaaaattctgcgaaatgttttcatgggttcagctgttctttggcttg

SEQ ID NO: 95901 - DNA, 874 bp, Heterodera glycines
ctgatctcttgacaaaacaactaacagcggtcgaagaatgtaaatctgtcactgcgacttacaagccaattcgtgtttccgacatgcccattcaattatgcgaacatggccgtgtcatgcccggcccgtttattcggggtgaaataaaggcggtgaacacttcggctgcccgacgcctgatcagggaatttaatgtgaacacgactttgtacacgggagctaacatctgtgtcaactgctgctcaagacttcgtgatcaccaagaaactaggcgaaggggacggacagaggcgattttatactaccccgaaggcgctactttgtttatcaaattgaatggggatgagaatgatgggaacacaacaaagggcaagaaaaccaccactggaccatccgcggcagtgacgcgtcgagcagcgtcaaaagggctaataaaaattcgaatttgttcggatgagacgatcaatgccctgaagttgcgcatttacgagaagatcgaccagtctccagtcgaccagttgctttacatgggcggacaagtgttggatgggaatttgacgcttgagagggcgagggttcctgcaaacaatttcgacaacccgcttattctgatcgtccagcagagaaggaaaagtggtgacgacgatgacagcgaccagaaagcgggctccagtggtggtggaggatttcatgacaccgccttgtcttgataataatgttcactgagtacaaaactcacacgggcgtcgacacactcatccactttgtttattaatggcttatgccctagttcttgttcacgtccattaagtacgagtactgtttgttttgtcaggtgccgattataattaatactcgataaatacttttatta

SEQ ID NO: 95902 - DNA, 475 bp, Heterodera glycines
gtgagttccgctgctcattttttgtttatgctcgagtcggctgttctgttccttttgaatttgttctacgcttttgctaatttctgcttggatttgttgcccaattcgtcccccatgggctccaagtcgacccctgcaaccgccgacgtcgcttatgccaattatcggctgtttgacgaactgaacaggaaagtgcgggaaagtctgagaaaggccatcgaagctgacgagacgaggattgccaaatcgcgagtgatcggactgtacgagaatgtgttgaagcaaataaacaaagcattggagatacggcacacttcgtgcccttcacacaagcagacggaaatgcaggaacagcagaaaaaattaaaagcctttgttggacagacgaaggatcggctggaaaagttggcatccattgagccgatggcgcttagagcgacgcctcttccactggcaacggtcgaaaccggcaaca

SEQ ID NO: 95903 - DNA, 200 bp, Heterodera glycines
acactatttactgttggtcctctgctggggtcatcaaagtgggaacatgctcgggaacagccgagtggactcgtccaaattgacttgggcctcaacatttgcggacgctctgtacctggcaacttggtcatatgctttgctgtacaacgaggcaccgttgaatattttggtgaccaacagcataaaccatgcaaaaactt

SEQ ID NO: 95904 - DNA, 554 bp, Heterodera glycines
caaaacgaaggatcactaaagagaattctatttttaatcattctcgaaaatgccaccgacttgggccttagtgccgcttttgcttctgttctttgtccatttcattgatgtcggattcgctcgtcgctacaaagcgtcaacaaaatacaatccgccggcggaagaaacgacgacagaaacgacagaattgacaaccccaacggaatgccctgcgccggtgtgcccatgcgaatgtcccaccgaagaaacgtctgaaacgcctccttcgacgggcgggggagggggcactgacgacgacatcgtgacctcgccggaaggagaggagacgaccacgcccgtctccggatgtgttccgggcccgtgaaaaatttatcacctctaatccggatttgattgaatcgctgcgcaagcaaaagttcgacgtggtcatcgaggagcaactgaacttttgcggtgccgggctcggccatttgctggccattcccatccacattctcatcaacagctgtcctctccaagagcacgtcgcttatcttttcggccttccttttcct

SEQ ID NO: 95905 - DNA, 475 bp, Heterodera glycines
ggtaaatttaaatggcaacgcaaagtaactttggaaaatttcaacagcgttcaagtcgacaatccagtcggatcatttctcaacaacccacgaaatgctttgatgaagcggctaaacgacggcgcattcagcaacaattggagtcacttgagaaagataatttccaagaggatccccacgcgaatatcacttggcacaaagcggcaccaaaatttgacgatgaaatggtttttggagacaaagaaaagaaaaggcgaaaacggaaaatcgcgtcaccctcaaaagtcagcggagcggagcaagcaacgaaaaagggaaagaaaattgtggccgctttgacaaagacgcgatttaggaagacatttgctcaacttttggaagaagcgcagcgaaagcgcgaggaagaaactcaacagaggcggaaagaggccagcccagaactccttttgcccacctattacgaagtcgcttcatc

SEQ ID NO: 95906 - DNA, 599 bp, Heterodera glycines
tctgctacattttctgcttccgcatttgggttgctactgcttcgacagcttcctaccgtacggcgggaccgaaaacgaaagtgccagacaaaaacgaatggatgaagcgatgtgcggcggaatacgagcgaaagtactgcgttgagacggacaccaaactgaaacagcagacgacgaagaacaaggagaagaagcagcagcaacagcaagacgaatcgccggaggagtattacccgaccaattacgagcccgccttcaattatgacaaattgcatgtgtccgatataacccttccactgacaattcatcaaaaggatcaatatcaagcccaaaatggaccgactaaatacgaaccgaaggcggaaggacagcacgtgacgagttcagtaacaaccgcagaagcaggaaagtactcgagttcaagcggacacgcgagttcgtctgaaagtgaggaagaagaccgctgggaggagccaagaaagcggtcgcgaaaccgggaaagagatgagcgaaacggacgccacggggaaggtgaagacaaagcagcgaaacggtggtacaaaagcgacgagtcgaaggaagagaaaagagatggaaaa

SEQ ID NO: 95907 - DNA, 331 bp, Heterodera glycines
gaggagcaaaagcctgctggtaagaaggagaagcgcgccgcagagaaagaggaaaagaagtcagaaagcaaggaagcagagaaaaaggagaatgaggagcaaaagcctgctggtaagaaggagaagcgcgccgcagagcagaacagtaagaaaggtgattaaaagtgagggaatgagaaacgcacgaaaagaagagacgcttttgaagatggtcccaagtcaaggactccataattaggagcaaagagggggcggttaagtgtaagaaacctcactcgccacaacacctgcggatgtgagcagaaatgatgctagtttttgctcaaataag

SEQ ID NO: 95908 - DNA, 676 bp, Heterodera glycines
gtttactttttctcaaaaacccgagaaacgcccaaaaaaggatgacagaaatgagaacaatgacacatttgagcacaatacgcaatcgaactcattcgttggggctgcaatttccgctctccaattatcagctaaagacgtggacacgacctttcagggcatcgttgagcagacggtgttcagagggtcagccgatggcaacccatttgcaattcgcgaatgcacgggctctctgcttgtactgcttggccacgctgccaccatcacaattgacaagtgcagcaattgtgtgatcatttgcggcccgtgcagaggcagcatttttatgcgcaactgtgccaattgccttcttctcgctgcttgccaccaatttcgtctgcaaaattcgcgcgacattgaggcgcacttacactgcagcacaaacccaacaattgaagactcggatttgattgtggccccgttgctgatgagatacgacggcttcaaagaggacatggaatccgccagactggacaacgcgccgaatttgtgggacaaagtgcagaatttcaccgcggaaacgggccaattccaacggatgaatttcgacccctttgccaacggtgccattagcagcgaagtggtcagtgatgaactgctggagaagctgagcacggtcatggaggagcccgaggcg

SEQ ID NO: 95909 - DNA, 622 bp, Heterodera glycines
ggaaaacaaggacggctcattcttgaacaaaagggacattagcgacccgtactgcgaaatccaagtcggctcgcaagtgttccacacccgagtgatcaacaacaatttgaaccccgttttcaatgagtgcttcgaggcggtggtggaccaggccagtgggcagaagttgcgcatcgaactgttcgacaaggacaccgccggggcggacgaagagttgggacggctgagcattccgttggaaagtgttcggcaggcgggcgaaatggagcggtggcatcatctcgagggctgtaagcatggcgagttgcggctcaaagtgtgttggatggacttgagcacggaatccacgggcgtgggtcgtgacgagtgggagcaggagtggttgggcgcggacaaacccatgcaccccgcccttctgatggtgttcatcgactctgtcgccaatctgccgtatccaaagtccaatttggagccgtctccgtttgtggaggtttcgctgggccgaatcactcagcggacgccggtgaagccgaagactgtcaacccgttgttccagagcaaattcaacttcttcgtcaaacagcccgaggggcaggaactgaaaatccgagcggtggacgaa

SEQ ID NO: 95910 - DNA, 957 bp, Heterodera glycines
caagtttgaggtaatgtattaaccaaagcttaaaaatgaaaagcaattctaaaactgctgacattggtgatttttacgagatattgggcgttcctcgtaatgcaagtgagcaggaaatcaaaaacgcttaccgaaaattggcactaacttatcatccagacagaaaccctgggaatgagcaagcgcaagaacagttcaaaaaagttagcatagcctattctgttctctccgacccaaataaaaggcggcaatacgatgtgtccggaccatcgatggcaatgaatgattttgaaggactcgacatatccgaacttggcggagttggtcgcttttttggcgcaatgtttaccaaattgggaataccaattcctacccaaattggaccgaaagtgcttgctcaagctcgtgatctctctcgtggcaatgtcacaaacggcctctcgagccaggtctggtgctgtccgaaacagtgaacaatcaggaggcaaatttctacgcgtttcagatgactcccgaattccaacaacacggagtgatcattcgatgcaaatcattggcaatgagcaaattcaaattggtccttttcgatcaggaaggcgcagtccgtcacattcgcgagagtcagaagaaaaagaaatacacttccgctgaacttttctttgtgccgttccaacgaataaacatttccgaattcattccaattcgtttttacatggaggacaaagacactccgctgccatttcactttctggacactttagaaacccatggtgctaatgtgatggagcttcagccaggaaagcacatcctttgtgtatacggcgacaatttcttgagaatggtcagttacgaaatcactttcctcccgctgaatcattacgccagcgcagcaattaacaaaatcaacgcattggagcccgtgttggcatcgaagaaatcggaaatgcaagaattcca

SEQ ID NO: 95911 - DNA, 456 bp, Heterodera glycines
tgagattataaaacgatggcaaaacgaaaatcgaagcgaaaagcgccgaccaaagcgaagtcaattgtggcattggagacgcagttcaattgtccgttttgcaaccacgagaatgtgtgcgaggtgaaaatggaccgtgaaaggaatgtcgggttcattcaatgccgcgtttgcatggaagacttccagtccaacatcaccgctttgtccgagccaattgacgtgtactctgattggattgacgcgtgcgaggcggccaatcagtgaaaaacaaaagtggacaaatcaccaacagagaacggacattgtgtgcacagaccagggatcaccttattattcactgatcatattggcattattttccaacgcatttttttttttgatttcctttttccattaaaagtcgtctcgtaattcgattttccccatttatgtgtatataaattttgaatgatt

SEQ ID NO: 95912 - DNA, 547 bp, Heterodera glycines
  unsure (1)..(547): unsure at all n locations
aaagctggagctccccgcggtggcggccgctttcgaactagtggatcccccgggctgctttactcaaaacgaggattatgacccggacatttggcactctaaggagcagcagcggcaactgatgcataatgccaaacagtcgcgcattttgaaggaattgggatgccctgctatgggtgacggttgttgttcgattgcccttttagaggcgtcagttaaagcgcgtgtgcgcgacgtagcgcggtaccaactcagacgcgcgttggcctccaacaaattgttcaaatcacgcggccgaaatgatcagcagtgatcagaagcagatcaatgcttgaccaagaaaacattctattctattttgttgatatattaggagaattaattatttacacatttcccaaaatattggagaaaaaaatgtaatcnnaaaaaaaaaaaaaaaaaaaaaaaaaaaaaaactcgagggggggcccggtacccaattcgccctatagtgagtcgtattacaattcactggccgtcgttttacaacgtcgtgactgggaaa

SEQ ID NO: 95913 - DNA, 407 bp, Heterodera glycines
ttttgattttttgataatttttggctatgggcaaggacacgaaaggagattatgacccggacatttgccactctaaggagcagcagcgccaactgatgcataatgccaaacagtcgcgcattttgaaggaattgggatgccctgctgtgggtggcggttgttgttcggatgcccttttagaggcatcagttaaagcgcgtgtgcgcgacgtagcgcggtaccaactcagacgcgcgttggcctccaacttattgttcaaatcacgcggccgcaatgatcagctgtgatcagaagcagataaatgcttgaccaagaaaacattctattctattttgttgatgtattaggagaattaattatttacacatttcccaaaatattggagaaaaaaatgtaatcaaaacgaa

SEQ ID NO: 95914 - DNA, 427 bp, Heterodera glycines
aatgactgcctttctcggctgctgatttcttcgattgacatctgcaacttggttcaattgaaatggattgttttgacaatgatgatgcgtttggcgagctggtttatgaggaagaggaatttgaacaggaattggaggacaaacggaagcagggccaaaaatgcacgagcactcagcgggaagaagaggaagaacttcgtgagacagaaaatgagattctgccggaattgaggtcggaaagagtgttcattaatattcctgcgatcaaattttccttagttgtccaattaagaggatttacttggtctaaagtaaagcttcgtccaactgttacataaaatttgttcacaataacgagggtcttcaaaaaaaaaaataaaaaaaaaaaaaaaaaaaaaaaaaaaaaaaactcaagggggggcccggt

SEQ ID NO: 95915 - DNA, 543 bp, Heterodera glycines
aaagctggagctccccgcggtggcggccgctctccaactagtggatccccccgggctgcaggaattcggcacgagggcagcgggtagtgccatgcaaattggcgatcaattagtggaaattgacggcgaaagttgcattgggatgagtcacgagcgagccattggcatgatcaaggagaggcaatgcgtgaggctcacattgagccgacaaaagctgtaacatttgccggacaaagaaagaaaggatggatgaatcgacgaatcatcaatcacgcgaacactcaattttaataataatttatataaataaatcattaattttcaaaaaaaaaaaaaaaaaaaaaaaaaaaaaaaactcgagggggggcccggtacccaattcgccctatagtgagtcgtattacaattcactggccgtcgttttacaacgtcgtgactgggaaaaccctggcgttacccaacttaatcgccttgcagcacatccccctttcgccagctggcgtaatagcgaagaggcccgcaccgatcgcccttcccaacagt

SEQ ID NO: 95916 - DNA, 706 bp, Heterodera glycines
aataaattcactagtaattttttgaactcctcccatggccacccttctcgaatatccggcttctgttgtggagcaaatttcggtgaagctgtcagcgccaaacttgaacaccatcgcaatggcatacccaaaagttgaagtgccaaaatattcgcgtgccactctttcggctggcattgtccattttggggttggcaatttccatcggagccatcaggccgttttcctcagcgaactgttcaacatgggccaagacttggactgggccatcattggcgcgggtgtgatgccaacggacgagcgcattcggagttgcttaagcggacaagactttctgactacggtggtcggtcaggacgagtacagtaatacggtccagatcactggcgcaatgattgacttcctgccgattggcaatgccgaagcgattgtggcccaactttctgatccggcaatacgaattgtgtcgatgaccgtgacggagggcggctatttcatcaactcggccactggcgaatttgacccaacccatccggcaattgttgcggactcaaaagatccggccaatcctcgcactgtgttcggactgattgtcaccgcgctgagccgtcggcgagcaaatggaaccgatccattcactgtgctgtcatgtgacaacataaccaaaaatggtgaaatggcacgaaatgcgtgtgttggcatggca

SEQ ID NO: 95917 - DNA, 660 bp, Heterodera glycines
gtttgagcgatggtagatgctcattttgctgggtgtgcacatatcaagtcggagtacgtcgtattacgaagtgaaacgcaacagcaagaaggaggcaacaaaccaccaaatgaatccaatccattggaagggaattcgcacgagggaattctgccaagaaatgtgagggcacgcggaatggaccgccaaagagagcaaaaaatggccaaggcccgagcggaaaaccgtcaaaaaatcgtaagaatttgtccgtcggttctttttgagagcgaaggaaggaagtgcaaatatggagagaaatgcgacgcggagcactcgctgacaaaatattgggcgaagaaaccgccggacattggtccgtcctgctttttgttcgaccaaatgggcaagtgctctttctcattgagctgctgtttcgcccgagcccatacgaatgagtcggatttgagccagaagagcaaagcggggcactcggaatggcagtccgttctcaacacgcacactttgcccattcagcaacagctcagaaaacgcacttacgacttttctcgttctgaacgtgctctgcatgaatcaccatcgggttgtatggaacgcgaagcaccgaagtgggacatgcgcactctccgcggcaaaaaatacttggcccctcctgacgac

SEQ ID NO: 95918 - DNA, 267 bp, Heterodera glycines
tcattaaattgttttccaattgctgtttatccaaagaagatctgtccgcttcgtcctcctcctccgccccttcgttggagagtaaagactagtgggtgaaaaagtgcctggacctagccgcaacgaagaatgcctccggggctggtgtttacgagatggaaatgcgtgaaggccgagttggaggggtatagcttgttgatctgggttttttgaattgttgtgcacctttttcttattcagaataaaaatatagaaaaacgaaaaaat

SEQ ID NO: 95919 - DNA, 904 bp, Heterodera glycines
ctttgttcaccaaaattgaaccggcgaaggtggccgagtggaaagaactctttggcagtgggaaacagcagcaaaatcagccgaagaacaacggaccaacggcgatgagcagtagcagcagcaaaaaggcaccaaactcgacggagaagcagcagcagaaacagaagaagaaaaaggaaaacatggcggaagagcggggcgaagtgggccaaatttacgcggaagtgatggccaaattcgaaaaagcgaaagcacttttcgtcacaaatgaatctgaaaaattagacaccgaaattgccgcattgaaagaacaaataacggagcagaaggcgcgcctgggcttcaccggcgcattgttctcaccgccgatgccaaaagcaacgccggcaatcgttgtgccaccagcagtttcttccccgcaaacaccgcccaaattgacagcagcgtcaaatgcgagcaaagaacaaacgcaacagaaacagcagccgaaacagaagaagccgcagcaacagcaagcgactgccccggccgatgacaccgtcgacgtcggttgcctcgacctccgtgtcggtcgtatcattgaggcacagaaacacccggacgcggacgcactgtacgtggaacagattgacctcggggaggagaagccgcggacggtggtgtccggcctggtccgatttgtcccacttgagcagctcaaaaaccgtcttgttgtctgtctgtgcaatttgaagccggccaaaatgcgtggcgttgagtcccaggcgatggtaatgtgtgcgtcgacgcctgaaaaggtggaagtgttggaagtgagcccggaaagtgtgcccggtgatctcgtcgtctgtgaaccgttcgtacgccgtccgcctcagcaattaaatccgaagaagaaaatttg

SEQ ID NO: 95920 - DNA, 591 bp, Heterodera glycines
tgttcggcttaatgttggtactcacagaatattcacgtgatatccaaaacttcctttcttctatgtcgcgatcctaaggcatcaccaatggactccactgtggtgactttatatttctttcggatttagacgtctctatgaattgtgttttactacacgccggcgtgggggaatcggacttgacactgccgatgaacctggaacccgaatttcaaatttcactgttgcgagtggttggccaaccaggattgcctacccgggcgcggttcaagttgcccatgcattgtgtgcaacaccaacagcaaatgaccatcgaatttgtgccggatggcttcaaccagaccgagttggaagctgacaatacttggtatctgacgctccaattcaaccgcaccggcacaaaggaacagggcacgtttttgctggccaattacacactcgatgtccgtttcttcaacgtgcaaaatgcttcatcccattacaatggcacttatttgtacgcgaaggcgcccagctttaagccggaatggagcgcaacagtgcaaaacggacagccaaatatctttacctgctcaaagaatgggcttcatt

SEQ ID NO: 95921 - DNA, 340 bp, Heterodera glycines
ggcgcaacagacactgaccttcgaacgttccgcgactttttattccaatataacgcagtcaccgagcagtgtttcgacgcgtgcatccgcgatttcaccagcagagacataagcgagaaggaggaacggtgctcaaaaaattgcatggacaagtttttgaaggccggccaacgcctgtccatgcgttttcaagaacatcagttactaaatatggaagcacaaggagcaccggtcatggcaacgaatacaaaagtgcagattggaaagtgatacggcggaaacaccattttttgttgtattgtttgaatattttgagtttaatacattttgaaagataaaa

SEQ ID NO: 95922 - DNA, 723 bp, Heterodera glycines
gtccatttaagtaaaatgggcgaattcttcttcaaccttgatcacggctatctcgaagctttaatccgaggatttaaatcgggccttttgacaagcacagactattcaaacctcgttcagtgcgaaacgttggaagatctcaaattgcatatacaatcaacagactatgggaactttcttgccaatgagcctgggaatatcactgtgcaggtcattgatgaacggctaaaagagaagctcgtaacggagttcactcacttgcgcaacaattctctggagcctcttgcgacttttcttgactatataacttattcatacatgatcgacaacatcattttgctgatcactggcactctccatcaacggccaatcaacgagctgatctccaagtgccatcccctcggctcatttgagcaaatggaggccattcacattgcatcaaacccggctgaactgtacaacgctgtgctcgtcgacactcccctcgccccatatttcgtggattgcataagtgagcaagaccttgacgaactcaatgtggagattatccggaacacactgtacaaggcgtacattgaggacttttataatttatgcaaaaagatgggcgggaaaactgctgaggtgatgtgcgaaattttagctttcgaggctgatcgacgagcatttatcatcacaatcaacagttttgacacggagttaaataaagaggaccgcgctaat

SEQ ID NO: 95923 - DNA, 379 bp, Heterodera glycines
agatgactttcctagcccattttatcgtttcgcttttgctgattgttccgtcattcattccaaatgtttttggagaggactgctgcaccaaatgttacaattccatgacgggctgtcttcagaagtgcatcattgagcacaagggggacccggcctgtcgcaagacttgcaagcccaatgtgtacaaatgcgctgccaaatgcgggccccactgtccgctaaattggacgacgacgacgccgaagagcggctaatgtggcgagggacgatcaaagaaaaagccattcattcattagcgagttaattaatgagttgattaaccattatttgtgcaaagctgttgttgatccgaaaaagtcatgaaataaaatgcttgttt

SEQ ID NO: 95924 - DNA, 629 bp, Heterodera glycines
attcgctaacaatgcactcaccactgttcggctcaatgttggacaacaaggaatattcacgtcatatcgaaaacttccgttcttctatttctccacccaaaggcatcaccaacggactccactgtcatgacttcagatctccttcggatttcgacgttttagtgaagttggcaaaagaccccgccggggtgggcaaccgcgaattgcagcaacggatggaccaggaccaacaattccgacagcaagttttgtgtgcaattgtcaacggtggaaaagaacgttttctgcaattgtgcatcgattgcaacggatgtttcgtcattcagaagttagttgagaacggttcaaaagaaaccaatcaaatgttgctcaatttggtccgtccgctcgcctttaaaatggtgctcaatcgttttgcttgtcgcattgtccagaagctcgtcgttaatttgtccgggtcccaagtccgccaattgttctgccaacagttcaaaggacacgagaacactttggtcaccgaccaaaacgggaaccattttgtgcaatgcgtagttgaccattttgcgcccgacgtgtacggaccttttatcctcgccttggccaactgtcccacccgactgagcgccgtt

SEQ ID NO: 95925 - DNA, 417 bp, Heterodera glycines
tccggaattgatcaatagagttttccaattcgtccaaatcccgtgctgtgccttaaaattgtttttaaattcaaaaaataaataaaaaacacttgtaaaagtttgtatttttgccaaatgccccaaggtttgacaaatgatttgtggccattcagctgagtaaagcctctccaattggtccgcatgaatcagaacttttcttattgagttccccgtcatgtcctttttctgaacgcttccctcctgccctgatgctccggaaaaattcgttcgcaatttccgcgttttccgtcgatgcttcgagctctttgataagagcatttccaatgccctggaagacgtgaaaaggcgccagaattattcgttcaaactcaattgattgtaaaagtggctcatcgacagttcccatggtgagcg

SEQ ID NO: 95926 - DNA, 505 bp, Heterodera glycines
ccatttattgtctgttacttttagcccagaatttagttaagcaaaaccaagttttcacttgataccataataaactgagattgtcattgtttgaacgcgtgaactcgaacattgtttaaaatgatcatttctctggaatttttcagttatatattttttgtttattaaagtctcgtaaaattgccaaaacaattcttttcatgtttaagtccattcttcgcaaccgaaacgaacggtcgccaattaacaacgaagaattgcagaaaatgtgcaaaagagatattgtggagtttcttcctactccgaaggagattttgggtgatttcgttttcgagaggagcgccgggaacaacagagagaaaaggaagccgaggaaagggaggccaatgtcagcgtggaaaagtaggaaaatggacttgtcgagcagtgacgaggagagaatttaattcgcgaaatatttattgtatttgtttttgttatcacccattttgcaattatttttttc

SEQ ID NO: 95927 - DNA, 339 bp, Heterodera glycines
gtttgagcttaagttcttttttaatcttttcacagttcaaatggcagcttatagacccatttacaccaaggaaaaagaatgggtcaacacgggcacagcggacggagagataatggtttttcgaccgacgatggaggagttttcgaatttcagcaaatacatcgaaactatcgagcgcagcagagcgcatttatcttctggcgtttgtaaggtcattcctccgcccggttggcacccgcgtccgtccaaaaatccgtccgattactccgatctgaacgacttcgtcattcattgcccagtgtgagcactgcacattctgcaaaaaataatagtcatctg

SEQ ID NO: 95928 - DNA, 445 bp, Heterodera glycines
cgacgtcgccggcggtgcgctcctcggcgtagcggtgggagcgtttttcctccgaaatgtcctccacaactttcggcccaatcgctactccgtcttggacacgcaaatgctcagttcggcggatggttggcaagacattgagggaatgccgaacggatcggaagcattgatcagcgaaaaactaacagtgccgaaaacaatcgtaacgaaagagcaacaaaaaagaccaatcggagggcaaagggcgaacgattacggaagcgtaagggaaatgagtggcggaaggagcgacggcaggacggagacggcacaaatcggctgacaacgatgactttcatccctcccttacaccacaagaaaaaacataatttttgtcccatttttctttttgctattgtccattttgaaagcgcaaattattatagttcatgtttagaaacggaat

SEQ ID NO: 95929 - DNA, 496 bp, Heterodera glycines
cagtcctcgcgccaaagaaactcacctaaatacgagtcgaatatttcttttttaattggcgtgtggcttcaaaacagaaaagtgccaaattattttcgaatttgagaaatgaattccaattcgttgctcttctctctgttcactttactgttgagcatcgccgccaatggccatttttgcttcggaaaagccatgggccagcagcgctcgcgacgagtggcggctgtggacaatggcaattttatcgtcgtggacggatccgtcagtgttgtcaatggagtgatctccgggaatggctggtatttacatgacggaaaagggcggattttggaaaacgcggaagctgacgggccaaaacgggccaaattgaaaaattcctccaccaaatggacgaaaataaccgaaaatttccgcaaggaaattccaagggatttacaaggaattttttccgataggaccccacccggggagccccctcccagaattttattttaac

SEQ ID NO: 95930 - DNA, 591 bp, Heterodera glycines
tcttctacgtcactttgccttctgttgttcgctgtgttttatttgattgatgcgcgaactcaatccgtcgcggtgaaaggacgtctgctgtgtggtacggcaccggcacgaaatgttcgggttaaactgtacgatgaagacgctggtgtcgacccggatgaccaacttgatgccggatattctgacccaaatggcaactttcaactttctggccatacctcagagctgacgaacatcgacgttgtttttaaggtctaccacgactgtgacgatgggattaagcccggctcgcgcaagttgaagttcaaaattccgaattcatatgtcacggacagtgcgacgccaaagaaaacgtttgacatcggtgtgctcaacttggagactgtgttcaaggacgaggaacgcgagctgatcgtgaccatgaagaagaagcggagaagccaccgttaccaagactttttggacattttgccatgaaaaagtttcgagaaaatgacaaattgccaagaaaattattttcaatttaaaaatggaagcgggatttaaaatggaaatattgattattaaagttaaaataaattgtaaccattt

SEQ ID NO: 95931 - DNA, 532 bp, Heterodera glycines
  unsure (1)..(532): unsure at all n locations
ggccctaacagtgccattttatggacagtgcagcgcaattcgaccaccatcagtcgtttggtggcggcacggcgccgacgagggcatcgacgggcggcggcattggcactgtttcacttggcaccgtcacgtacatttgcggcgattgccacaaggaaaacgaaatccggcccaaagacccgatccgttgccgggagtgtggttaccgtattctgtacaagaagcgcagccgcaaaatgatggtgtacgatgctcgataaagaaattcccagattggccattgttatttggtttgtgtcactgaatattgtttaagaaacaggaactgccatttanaaattgaaaatggaatgacaatccggttgagatatttgccaacattgctgcgtttcacttgcaattcgacgaacttcccaccgatccaaatgtgaaaaagtggagtgtgcatgtgttgaaattgtcctgtacgaaaaggcatttggaccgggcggagctgcacaaattttgggaaatgctcgacaggcacatttcc

SEQ ID NO: 95932 - DNA, 540 bp, Heterodera glycines
cttaagaccggctcaaaaattgttgaaaaactaattcgaatgtcaaccatcccaatgccaccaccaccaacacaagacgaaaaggaccaacaaaagaaatcccaatggaaaccgctggagataggaaatcggatgcgcacgacctcagaagattcggccgagtcttttgacgcctatggaccggattcgccaaatatgaccagttcggggagacgaatgagcatcacagaacgcttatttggacgtccagtgccccaagaacgaagaaactcattgggagaggaacaaatggggcaggaaaagccgaaaagcatcgcggagaacaaagacttcaaagaattaatgaagcgtcagcgaaaaattttgggcgatgatgagtggcaataaagaaaggcaaaagaaaagaagccattagaggaaaacaaagtcggaatggatcaaagggtagaaaagggaatgacaatttatttatttgtttattttatttaacacttcttctgatttttcaataatgaaataaagacaaacccaccaaaaaaa

SEQ ID NO: 95933 - DNA, 724 bp, Heterodera glycines
catttaccgatatctgccaccgaatgctcaggttgtgcttttgagtgcgactttgcctcacgatgttcttgagatgaccagcaaatttatgacagatcccattcgtgtgcttgtcaaacgtgatgaattgacattggagggcatcaaacaattttttgttgcggttgaacgcgaagaatggaaatttgacacactctgcgacctttatgacacattgacaattactcaggcggtcattttttgcaacactcgtcgaaaggttgactggttggcggacaaaatgcgagaggcaaatttcactgtttcttcgatgcattcggacatggaacaaaaggatcgcgacgctattatgaaatcattccgtgcaggggaaagtcgtgtattgattggtaccgacgtgtgggcccgtgggttggatgtgccgcaggtttcgcttgtcattaactacgacttgcccaacaatcgtgagttgtacatccatcgcattggccgttcgggtcgttatggacgcaagggagtggcgatcaacttcgtaaagaacgacgacattcgaattttacgcgacattgaacagtactactccacccaaattgatgaaatgccaatgaatgtcagcgaattgatctgagagttggtatgaaaccacacaaggaattggatcctaaacgtatttgtgttttacttttctcacgtttattgtttttgataaatggatactttggtg

SEQ ID NO: 95934 - DNA, 480 bp, Heterodera glycines
aattaagaaaaaataatttgctgttaatttattttccgccgctacacaaattctccagtattaccgaaaaaacgacctcaaaatgagaactgtgcaaaccgcacgcaaaagcaccgggggaatgccgccaagaaagcaaactgcgcgcaagtcagcaggagggtcagggcagcgactgcaaactgcacgcttgccagcagcaggaggaggggaaccgattctgggcactgcgcgcaggtcagccggagggtcaggacagcgactgcaaactgcgcgcaggtcagcaggaggtgcagcaccgcgaccgcaaacggcgcgcaggtcagccggagggtcaggacagcgactgcaaactgcacgcaaagcagcagcgggaccctccctacggaatgatgtggctgatgaggatgatgacgatgaatcggtgtcagaagaaatggaggagtcgtctgaggacaatgagccgccccaacttgttca

SEQ ID NO: 95935 - DNA, 624 bp, Heterodera glycines
gtccatttaagcataaaaaatttgctttttattttcatgaacgcccattttaatggtgccttcggttttaattttgggtttatgcacggggctctctcatgcgcccgtacaatttctgcttgtcttggctcccatgtccatttgattctgccgccaattctgtccgtattggacgaccgcaaaacggaggagaaagtgcgtacgtcggcactggacactttgcttgagttggcccgtcgacattccatcgaggattacgctttgcccgtcatgcaaacatggcttcgttgcattggcatcaagtctcaacagccgcgactgatggagttactcggcatcatcgtcagaaaatggactcagttttctgtgtacaaagagaatgtaaatgccgccttggtgcggtgtcgtgtcgaaccaatgctgtgccatgagtaccaggaacagttggcacttctccaggcgccttcatacgcacgccaacagcagcagcaacaacagaatgccgttggcagtggtggaggcgtttaccaacaacaacagggcacattcagtgccagcacttcatcaccattattcgcgcgtcaagtgtcttttttaccgccgacgcaaaacggcggggcgaca

SEQ ID NO: 95936 - DNA, 508 bp, Heterodera glycines
gactcgtgtttaagccaaacgcacaaatgggccgaccatttttaccattggcattttctttggttttgctgctgctggcggtggtgatcagcaccaattgcgcaaatgcttctccgatcgttggagaggaacagcccatggcaccggaacaaaaagcgacaaaaggcaccaacgacggacaaatgggcgacgacaatcggaccaatcggcgcaataacatggctgctgctcagcatcaacagcagaaccgcaacgccacatccttggtggcacttggctggttgggcttgcgtagcggcgcgagcagcgtcaacgcggtcaacgtggcgtcatgttacgacagccgactgtccagcttcataaacgacggcctccgctattattcgcataacatgggccaactgtctaaatacatcattgaccagattaagcgtgtccgatactcgggctattggtttgtgcatgcggcaatgatcggcggacaaacacagggactccaatggcagtc

SEQ ID NO: 95937 - DNA, 161 bp, Heterodera glycines
gccaaacatattctgttgcctttcaaacgtaactaccattgcaatcacatgatttactttcacagcctctgcgcaactctttcatacaaatcacgaggccaattcctccttaaattgtttgcaatgaaacttgcaatctgaaaaaaaaaaaaaaaaaaaaa

SEQ ID NO: 95938 - DNA, 172 bp, Heterodera glycines
atgacgatgacctctacagctaaagtgtgaacattgattattcggaagtgatatcatcagatgatgagtaaaatatgtcattgtttaattgtattggctgcatttttgcgccttgtcggttattatgtgtattgtttttcatttatggaaaagtggaataaaaactcgactc

SEQ ID NO: 95939 - DNA, 251 bp, Heterodera glycines
  unsure (1)..(251): unsure at all n locations
aaacccatgaggacgagcgcataccgccacactgcacttgccggtctggctgccgtcgcgctgatcaccgcgggctgcaccgatgacaaggacgtcgatgcgtcaatgtctccccaggtcggattgatctccacctcaacggttcaaaccccgccgcatcccgcggaagtaaagctcatcggggagagggacgtcgaggtgacgctgaccggcccgatcgctgctaagtacaaaataaaatatcgaataan

SEQ ID NO: 95940 - DNA, 803 bp, Heterodera glycines
gtccaattaagtcgcagctacaaaatgtttctcttaccggggaaatgtcgcaagaattggcgttggaattgttcgaaaacggcgatcttcaaggacttccctaagggttgtgagttcggcatggattatcgctcgtggattgtcggcccaaatttcctcgggatgaaaatgatacctcctggcattcatttcatttactttagtgtaccgggtgcgcctcgcattgctttctttcacaattttcggcaaaaggaagtgattttgaggaggtgggacacgaaaaaggaagacttggtgactgacgaaaagtcggacgaagttgaattggatcgacttcgcgagaatctcagaaacattgatcgctttttgggagtttatccattcgcagactatcgcaattggctttccctttcgtcgtacattacgccaaactccgtccgtcgtctttccccctcaaattcactcggacgcatttcgtcccaaaatgaaatggtcacgcaggaggcgaaattggagaagaaattgggtgatccctttggtctttcgattgtggacagagaacaccgcgggcgcattcgcttcacggacgaaggcggacttccgctgatgagcgaaggggaggaagcgaagctgaacttcactcggatatcgcagatcacattggctgacacaaatttaaggagggcgggcattgacagttccgacagacttttccaatgtttcgaagcaatgggcggtgattatcgcgaagtccttgcagaattccaatttgcttttgtcgtttttctcgtggggcaggttta

SEQ ID NO: 95941 - DNA, 827 bp, Heterodera glycines
gaaaaatgatgcccaaaaatttttgcggcaaaacatcaaaattttcttcgtgccttctccctgctcttctgctgatcatagtattgtcaatactaaattctgtgagctcttctcgtcgccaccattctcctgcttctggtcataatcggcggctgtcatcaatttcatcgcccgccgttgcaaatggtggtagcctctttgaacatcgaacaaagcatcaaagtgttgccgcggctgatgagtcggccgggggttgtgccgttgttccaccatcgctttggtgcggctgtgacaagctgcagacacagtgtggcaccggacgattgtgcggccgatacaccggcgccatgcgaaatgagccgcttcacatcacactgctctatgaaagcctgtgccccgactgtcaaagtttcatcaccgaaactctgttcgatgtgtaccaaaaattcaagacgcacttgcgaattgaatttgtcccatttggcaatgcgaaagtgttggagaatggcacaatcaaatgccaacatgggcctgaagagtgtcggatcaacaaatttcattcgtgtgccattcacttcatgcacgacccaatgccattcatttactgccttgaaaagctgatcagttcaggcattccgctggagaaagcatccaaaaaatgctatgtcaaattgcatccaatcccgcacatttacgaccagattactcactgtttcaatgggccgaccggcgatcgacttcaaagggaagccggtcgtctgacggcacagatttggcctgatcagcatgaatatgtgccatggattttggagaacaatgccagtctg

SEQ ID NO: 95942 - DNA, 656 bp, Heterodera glycines
gagtaaacctaagtaataaatagtcaaactaaatcttcttgctcgtcctcgttgctcaatgcatacaacggcagcaccgccacctcatcagccttctgttgtcatgtcggcaattgatgacaacaattcggttcgctttccgatcattcaagtggaagtgaagattcgagtgcctgaccatcttgtcggtcgactgatcggcaaaagtggcatttgtgtgaagaaaataatggaggacacccagtcacacatttccatcagcgaatcacgaagtcaacaggaggtgaatcagtaccaaactccggaactgctcgaccgaatcatcaccattcggggcactgcttttggctctgtgatggcggccgagaagcaggtgcagcagaagttgcgctacattcaggaacaggacatgaacatcagcgggggaggcggtggagtgagcgcggcaagcggacggcagttctgccccacgcctgtgtctgctccgcccggtggcattttgcagtctatggacggcggtggaggcgctgccattggttcgtacattgctccgtcggcggtcactgtgacgggtgcgccaatgctttcccgtggtccgccggacaatgccttccatcaccatcctcccacagccgccgccatgtacagtgcgcaat

SEQ ID NO: 95943 - DNA, 462 bp, Heterodera glycines
gatgaattttaacaacgtaaatattagaaaatacgacaataaaaatgagagaaatggtgctgggtttggagcaaattctgacactgcggcgtttgagagctgggcttgcgagtctttcaacctttttgagtttttgggagaagacacatcgccacttgacgaagttgttcccgagaaaatggacgaagatgagatcgaaaaacaaaaggaggatgccatgtattcgcagtttcaatacagtgacatgcttattggggggcaacacccgacaaactctcaccatgattttggcgtaaacgatttcgcaaatgtgccctctgacggccgttccgattttgacgttcccactgctttccatgaaggagttcccttcccaatgccgcccgctacacaccaaatctattcacagaatttggatgcaattcctcacgtgccaagcacttcgaaatcatcgatgccgtt

SEQ ID NO: 95944 - DNA, 397 bp, Heterodera glycines
gtgacaattcgatggcaactttggacgctgttgaggaaccgcttgacctgatccgactcagccttaacgagcgtgtttatgtaaagctgcgccaggaacgcgaactccgcggccgactgcatgccttcgaccaacatttgaacatgattttggccgatgtcgaagaaacggtaacaatcactgaaacggacgaagaaacattcgaggaaattcacaaaccaagcaaaagaacaattccaatgctgtttgtgcgtggagatggcgtcattctcgtctcgccacccacaaaatatgtcccatgatcagacaaaactgcttttgttctccatatttttcattgttaaagttctttcaatttggttgagctaaatgaccattaaaattttgtattttaaaa

SEQ ID NO: 95945 - DNA, 460 bp, Heterodera glycines
gtcttcctcattctgattgttacttgttctgaagcaacaattcttttagcttacttccatctttgcgccgaggattaccattggtggttccgttcctttatgacttccggatttactgctgtctatttgttcatctactgcattcactacttcaactcaaaactcaccatcactggtgtcgtatctaccatcctctacttcagctatacttcgatttttgtctttttgttcttcttaatgaccgggaccatgggatttttcgcaacttattggttcatctacaaaatctacagttcagtgaaagtcgattaaagatgtaaatttgatttgtgattagaatacatgttaatttttttttggtcattggtttttgagcaatgatgggcttctttcaatgtttaatatatttttgtttcccttgtcttaatgtttttttttataaatgtgattagaagtcgaa

SEQ ID NO: 95946 - DNA, 476 bp, Heterodera glycines
acgccatgaattgatgctgttacggatgagcgatgtaatttcgaatggattgggaaatcaccgtcccgataatgcatttgtcttcccaacgattgcacaacatcccaacgaaatcaaacccacaaatgcgatgagaagttcaaacccattggttggtctcgcttcgtcacgttcatctactactgcatgttcatcattgtccgggaaagatgacgacgaacaacagctacagaagtgttcgattgatgcagcaacactttgtcgtaatctgatcagattcgcctaccaattgtcagctgctaaacgacgaacactcgaagacccggagctgtatcggatgcgcactcactcaaaaacggaggagagactgagacggaaggttgtcagagacatgattatggagtgagttactcgaaaagagggcctgacccacttctgaccgcgaacttatttattcctttcttaagaatgcccgg

SEQ ID NO: 95947 - DNA, 476 bp, Heterodera glycines
agctaatttatttgcccgcacttaaacataaaataattaataagcgctttttttattattgttattgaaaatgacgtccgaaactgtgtcaagtgacgcgtcggcagcgggaggggcggacaaagagaacacaaaaacggacacaaccaccgacccgagttccagcgaaaattcggcgtccatcgaggcggaccacaacaacagcaaattgcgctacgccgacgagaccaccatcatcccgcacgacctcgtggagcggcattttctgcaaaacacttgggctctctggtacttgaagggcgatcgcaacaagaattggaccgattgtctgaagaaagtgtccacctttgacaccgtcgaagatttctgggcgttgtacaaccacatccagccggcgtccgggctgagctggaacagcgactattacctgttcaaggaaggcatcaaaccgatgtgggaggacaaaggcaatttgg

SEQ ID NO: 95948 - DNA, 673 bp, Heterodera glycines
gtcaagtggccagcccggcggtggtggccctgttgtggtccacggtggcaatgcggtcaactttgctgctgccgctgctcatcagcagcagcaacagcaggctgctggtgacccatcgcaacatgttgcggctgttcatcatcaccaccagcagcaacagcagttgcctccgcaacaaaacaaaacgcttttcacaccggcagcaaacccagcgatggtaagcgcaacgccggccatgcaacaacatttgcaacagcaagctcagacaatcttccaccagacctcagccactgcagtgcctcagttccccagctacaacatgccgtacatgtattcgccggtggccaccgcgcaaacgttgcaaggaccaaatgcggagattgaccgtttcctcatccaacagtatgggacgccgtattcgcagctggacttgcagatgggcgcaatgtcaattggaccaccgacgtctttggcaccaaaccatcatcgtgccacattggaatcgtacatggagaacaaatttgggcagcagcaacaaaacgtcaatcaagcggccaacaatggacactatcaacaaacgcagcaaagtcagcaacaacagcgcggacttgcccaatcggagcaggcaactttgctggggggaccgccaagccatgtgggaccgcctcccggc

SEQ ID NO: 95949 - DNA, 740 bp, Heterodera glycines
tcaagtcactttccaagtacagcctgaaaatttattctttgacaatggcacaacaccaggaatcgttgatccgtcagaattttgcagctgaaactgaagccggcatcaacaaacagatcaatattgagctgtacgccagctacgtctacttgagcatgtccttttacttcgaccgtgaggacgttgctctccacaacattgcgaaatggttcaaaaaacagtccgacgaagagcgtggacacggcaccactttcatgaaataccaaaactctcgtggtggtcgtattgtgcttcagaacgttcagaagccggagaaggatgagtggggcagtgccttggaagcattccaagccgctttggctctcgagaagttcaacaatcagtcgctgttggagctgcacaacctcgcttcccaacaaggcgactctcagatgtgtgactttcttgaggacaaatacctccgtgagcaggtcgaatcaattgaggaaattggcaaaatcatcaccaatctcaagcgtgttggaaagggtttgggcgagtttctttttgacaaggaatttgccgagaccgactgaatgaatgtgcattttggacacattcaatgggttgccactggctgaatccaaaataactttgcagattgtcagatcatttacgaattttattaatctctccaatggcgttcattctcctttttctctccgacatttataaacacgtggataaattaatgaatgcgc

SEQ ID NO: 95950 - DNA, 331 bp, Heterodera glycines
caattaagcccatagttagaataaagcgaaacgcttttttaattcgaaaatgtttgctacaccggaatttatggatgccgaagacagtttgatggagatgaaatcgaatcagttcaaaatggacaaaaatgagttcattgccgcggagaaattgatcgacaaggactactacagggactttggcgatatctttgacccggatgtgaagtaaatgcggctactttttgtgcggaaataagcaaaatgtagtgttgttgtttttgatttttgcgacataaaattgtgtatgaggtatatgaaatggaaacaatgaaagcgtagaaattccaag

SEQ ID NO: 95951 - DNA, 438 bp, Heterodera glycines
  unsure (1)..(438): unsure at all n locations
attgcccgccaactttgtgctccgcccgatggcccgtctgaaggtgtgggcccgtaaccagggcggcctgcacgccccgccggatcagctgatcttcgatggcgaagaatcgttcggcgtcggctcaaacgtgcaaaccattctctataatgcgcaaggagaagaacgtgccacgcacatccaacgttcaagccagacagctgcctgaagaggaagagagagataatgctgataagagtgatcactgggggacggaattttaaattttttaattatttttcgaaaaatcgaaaaatgcacccccccccccccctcctaagaattgattttcttttttaattttcaaaaaattccccttatataaaattgattttttcaatgaccaaccgacatttaaccattaaattttaacaaattggataaagtgacaaataatnn

SEQ ID NO: 95952 - DNA, 465 bp, Heterodera glycines
  unsure (1)..(465): unsure at all n locations
aattaagtcgtttattatggaaaaggacttctcaattaattgttacatcgccttttccaatcccatcttttgtcatcagaaaatgctgatgcggaagggcgagttcagcttcaattcacaagagcgttctttcacagcaaaaattcacaacaaaacgaggctccgcctttttccatgtgaattatgtgcggttggcaagaaaagatgtcctaacggccgatgtttgatcattcgctacaaaacgggtttttaatgatgacattaaggaattggtattgaaagaactcgaagagggagacaaactgaagattcattccgttttgctgggcattgccggatgaaattgacgttgaaatatcactttttcagggcttctgagtgtttttttttccaaaaatacagcaaatttggcaatgataaagttttgttgtttcttcaaaaaataaatttgagatcacgaaaaan

SEQ ID NO: 95953 - DNA, 964 bp, Heterodera glycines
ccattcaattcaaacgctctccgcttggcttcttcaccatgcaaaaaaacacgcggattgcattttggactgttggcttaaggaagtgcgcaataattcggagaacgaacgactgatcagtctgattaatttggcaaacgatgtgatacaaaacagtcgaaagaaagtgccctcctttatggcagccttttttgaagtgttacagccggcatttgtccatgcctccgagtgtttggacgaatcgcaccggaaaatggtggcgcgaatcgttgcggtttggcgcgaacgtcaaatttactcagctaagaatttggatgatttgtcaaagtgtttaaccgcggacgaaccatcaactttttccgtctctccgaatttgaattccgaaacggaaagcccttcgaagagttcgccggtggacgggggacaatcgcccgttgcttcggaggaggacacaaagaaaatcaaggaggaattccacgcattctccacactcagttccaacatgatcgcccttctgcgcaagttggaggaccctgcttctacggacgttaaaatcaggcaactcatcgccgcttacccggaaagcattgccaatccgacgcttctcaaacaattcaaatcggcggacgaatttggcgaactgtcgaaaaaaatcgcagaagcgatgccagtggtcgacgtttactgtggccgactgcgcgaagagctaaaagatcgccagaattttcaatttttactcgaagattatatcaaagcattaaacgaagccaatgaacgaaacaaacaattggtggtgtccgtgaaaagacgcattggaagactggatgaggagaagcaagagttggccaggcatatcgaaagtttgcccgacctgacggaaatgttcgggtccgaacccgcaactacgaacctttcatcgctaggggaattgttcactccaacttcatgaatcgttgccaaagaa

SEQ ID NO: 95954 - DNA, 529 bp, Heterodera glycines
aagctggagctccccgcggtggcggccgctttttcaaaagtggatcccccgggctgcaggttctcggcacgaggcatacaaaaaatggcggatgaacaagaagaaacgcaagtcgctccgcctcagccagttttacacacagaaaacgtctcttccttcttggatttgcaaaccgagttcatcaaacgtcgcgatgccgccattgcggggaagtcgcagtcattcgccacggagccgatgcaccggcgcactccacgaaataacattttggccataagcaaagaggaaaagaaagcaaaaagcgaagtttcaacgctaagagtttatctaattcgtcaaaatgaggaagcaatcagaaaagaggagcaacagagggccaagcagcagcaaatccttcagcaaaaggcggcaatttatgaacgaatggcaaagggcgaacgattggtttacgacgacggaaaagaggccgaatttttggtcgattttcacgcgaaaaaaaaggaattggaggaagaagcgaggaacaaac

SEQ ID NO: 95955 - DNA, 489 bp, Heterodera glycines
ctttcaacgaagtcggctcccgagacgcgctttttttactgtccgttcttcagcttcatctgaccatttcagtgaacattgctacgatcataacaccaaaatttatgatttcttccgactcgcaccgacgcgcgttgggagacatcgccggaatgggcgtcagcggaagagcgcacccatcgctggccaaaatgcgcgagaatttgatcaatggaaccatcgactttcaggaagtgccgatcatcgacatgaaccccgaggacattcgggctgagctgaagagagtctacacgcagttgaggatgtacaagctgaagaacgcataccaggacaacccgcacatcagcaaacggaaaggcggcggtgccgtaaagaaaagcgccgcgggcgatgcgactgtaagcggaagactgtcaagcggcgcgggccttagcggtgcgggactaccgaagggcgtccgcggaacggagggctattgtgccgtaaaac

SEQ ID NO: 95956 - DNA, 510 bp, Heterodera glycines
  unsure (1)..(510): unsure at all n locations
tcgactgaaaatggcgcacaaatgttggagagtgacacatcgggtgagcaactccaattgttgcgcaccattgtcgattcgcatctgacaaatggacagacatttttcgtgccgtggtccgataagcgggctttgcagtctanatttttgccattcaaagagctggccaatcagggcgttgctttggaatttatcatcgacgcttgttcaaaaagtgtcgccctttttatggcgttgacaaaaaatgggcgagaaacgaccaaaaagttgggtgtatttgtcgactgtatggaaatgacttatgaagacgccatgcgattttatgcgaaatgggcgagcggactcgaagaagtgtcggcagattgtgttcagcaacggctgagcattttccttggccgcggcgttcgggcgggtgcccaaatgcgaagtgttgtgatgcgatgtccggagatacttttcatgggggttcctcancaaatggacatgttttgggagaatattttggatttc

SEQ ID NO: 95957 - DNA, 477 bp, Heterodera glycines
aagcatttcatcgttaaattaacagtaattttactttggaatttgaacgtaacaatttctcgtcaaaatgtttggtggcggaggagaccccttcagaaacccatttgatcaaatgcaccaacaaatgagacagatggacaacatgatgaattcgatgttgggcgatgcgtgggacatgctgaacggcttcggaatgatgggccccccgttccccaaccatcctatgctcaccgatggtctgaatcgtcaaaaccaagctcttcgtcgtcagcagcctccacagcatcactttggtcctgatacgatgatgagtccgtttggaggatttggccttttcggcggaatgatgcagcaaatgcaaaatatgcataaccatgcaattagtgatccgaattctgttgttttctccgaatcaacaatggtttcttacgatggaaatggacaaccgaaggtcgtccaacattcgacccgtaaagc

SEQ ID NO: 95958 - DNA, 804 bp, Heterodera glycines
ttatactggctggtgaagagaagcgtattacttgggttccgcttgagtcaaaccctgaagcatttaataagtacatcgaaaaaatgggcgtgaaaggagttgagtgccacgaacttttcggttttgagcctgacttggtcagcttcgtgccgggacctcacttggcgctaattttctgctacccttaccaagacaaagcaaatgactatcagaagggaatttacggacaattgacggcttcagacaaaggaggcgtgccggaatgggccttcttcatgaagcagaaaatacacaacgcttgcggcacttttgctctttttcatgctctgacgaataacaccgaccgaattgacattggaaacggcgtcttctatgattggtttaaggcggcaaaacaactcaatgttgaacaacgctcggaccttttggcaaacgattcggagttggctcatttgcatgaacactgtgctttgagggaatcggagacagatgtcccaaggaatgttgctcaccacttcatctcatactttacacatggaggacgtcttttcgaatttgactcgggacaggaatttccgcgcgactgtggaccttccagcgaggagactcttttaactgatgctgggaagatttgcaaagagctaatgggccaattggaggacatttcatgcaatgcaattgcactctgtgcccaaaacaatttaattgatgaaatgacaaagaaaatattacgatattcccgtgttttctgagttcaataaatttgacaagctttggtcataattttattaaataaaccaattg

SEQ ID NO: 95959 - DNA, 453 bp, Heterodera glycines
caaatcttcgtcaagaccctgaccggtaagacgattacactcgaagtcgagtcctcggacacgattgactcggtcaagaccaagattcaagacaaggagggcattcccccggaccagcagcggttgatttttgccggtaagcagctcgaggacggccgcacgttgtcggattacaacattcagaaggagtcgaccttgcacttggtgttgcggttgcgcggcggtcagtaaaagtgctcgtgtttgcgcgtgcggtccgccctcattgctctcgctcgcccctcgcccttatgatgacgctttgttgtccttgtgttttgtaagagtgtgagtttgtacatttattaaccccctcacgccatccagcaatcttcccccgtcgagttcgttttactgttgtttttcacaatttgaaaacttgtttatatacattccaactcgtctctcgaaaaa

SEQ ID NO: 95960 - DNA, 347 bp, Heterodera glycines
  unsure (1)..(347): unsure at all n locations
gtcgtttttcctctggatgaacgaaaacaggcacagattctatcagccggggatgactcaggcggacgtggcaaaggccgcaggcgaggaatggcgtcgcatgtccagttccgagaaggccaagtggggagagaagtcggtggaggacaaagaacgctacgtccacgaaatgaacgaacagcgcgagaaagaagaaggggaggaagagggcgaatgagaaagagcgaagggacagaagatgagagagaggatatacaaacagaaagaatctttttggattccaaacttaattaatattaattggccatttcttttgccttttgtttctcaaataaatcattttgttn

SEQ ID NO: 95961 - DNA, 650 bp, Heterodera glycines
tgagaatgcaatcagccgaagagacaatggcccttgttgcagttacaaaatttcgcgattatctgcgtattaacaccgaacaacccaaccccgactatcataaatgccgtgatttcctcttcacatatgcaactgaattgggattcatgccctgggaatacgaatgtgtgcctggaaagccaatggtcgggatgacttacgctgggtcggaccaaacattgccatcccttctcctttacagccataccgatgtggtgccgacttttccggaacattggacttacccgccttatgaagcgtttaaagacatcgatgggaatatttttgggcgaggagcacaagacatgaaatgtgttggcatccaatacatggaggcgttgagagaaattttatttgaaaatggccaaaaaccatttttaaggacggttcacattctctggggtccagatgaagaaattggcagccacgacggaatggaaaagtttgttcatacggacaaatttcgttctctgaacatcggttttgcgcttgacgaaaggttggccagcgaaacggacacttactcagttttttatggggaacgatgcgcgtggtggctgcaaatcacttgtcctggcgcccctgggcatggttcgcgattcgttgaaaac

SEQ ID NO: 95962 - DNA, 620 bp, Heterodera glycines
gttttgacctatctgaccaacataaagccatccaggatggagctcttaaattcgcgaaggaagtggttgcgcctaaagccgcggaatatgacaaaacaatggcatttccttgggacattatcaaacaggcgcatcaattgggattgatgaatccgacaattcccgaaaaatatggtgggcctggttgttccaatttggagactgctctgatcgttgaggcgttatcttatggctgttcggctattcaattggccattatgggcccatcgcttgcgttagctccgcttcttttggccggaaacgaaactcaaaaacagaagtacgccggcatgttggcagcggaaccactgattgccgcgtattgtgtgaccgagccgggggcaggctcggacgtgagcggagtgaaaacaaccgccgttctgaaaggagataaatgggtgctcaacgggagcaaggcctggattaccggtggcggatacgcaaaatggttttttgtcttggcgagatcggattcggaccccaagacacccgctggcaaggcattcactgcctttgttgttgacggagacacgcctggaataacccgcgggaaaaaggaaatcaacatgggccagcgttgc

SEQ ID NO: 95963 - DNA, 484 bp, Heterodera glycines
atttatttaagattttaaagtaaaaaagtgctttgtttgcttcatgcctgtctttgcgcttcaaatgagtgccaatttggtcggtgtcactgaccttcgtccgtcggattacgacgaccatcggtggtaccttaagctcaaatgttccgcgtgtggcgagtcgtatccctccgagcaatacgccaacactcgggaaacgcacactttgaccaaagggaaaggcatttgtcacatttccgccaaatgttccttttgcggcagaatcaattcactcgagattctcattgattcctatgcgagttattctgctgacaaaaatcggcttttccaaacattggtaaaattcgaatgccgcggaattgagccgacttcgttcgacccccggattggttggatttgcgttggcacagaatcgggctcaattttcgatgaaattgacctcaacgaattggaatgggccgattacgatgagaagaattcttcc

SEQ ID NO: 95964 - DNA, 347 bp, Heterodera glycines
caagattataataattataatgttcaagaacattttcttcttctttttaattgttgcgccatttattgctgcttataaaccaagttgcaaatgtcccgaaaatgaacagccaggccaattgagttgtaacggatgtgagccgagttgtgacaatcggaaaccggaggtgtgcaccaaaatggcatgtgaatgctcatgcgactgtgtgccgggattgctgcgagacaaaaagacgaaaaaatgcgtgccgaaagagaaatgcccttattaaagaggacaattgagtgataaaaaatgataattaatgcatttggagataattagtgaggaataaattaatgttgaat

SEQ ID NO: 95965 - DNA, 550 bp, Heterodera glycines
tccggccaagagtgcaccaccggacagtgttgtcgtcgttgtcgctgctgttgaacatcaacaacaacaacagcagcagcagccgccgctgtcgtcgtcgtcgcactgtcctcctccgccttctgttccttgtacgagtgcctccccttccatcgctacgtcttccattgttcttacgtcaacatcttcagcagttccaccagcagcagttgaacaacagcaacaacaaccaccgccaccagcgcagcagaataataacagtaacaatcagccccagcagcaggaatcagccgctgagaagcttgtcacttcattcatgcgatacattggtcaacgtcccggtcaagatgggcatgccttggtgcaagagtttgtccaacagtctgctattcctgtccaattccgttcattggttgctgaacagcttaatcatattgtggcagctgcgcgcgcgaatgtgtaaatttggagagagagagacacagagaaagagtgcctcgctgatctttttttgcgttattttattcattgattatcatttgaattaaat

SEQ ID NO: 95966 - DNA, 1138 bp, Heterodera glycines
ctgaaggtgtccgttgtcggtttggaacgcgcgttggagcagtacacaagtgctgctcattttgatgctccatttgacctgaagcaagtgcctttgtccactgagccgttgaccgcttcaaccgatgaggtgaaaaagaaagcggcgatggtggacgatgcatcggctgccatgaaaaagcagaaggaggagaagaaaagcggtacttcccgacaggagcaatttgcacttcaattcgcgtccatgccggaatttgccgcctgcggtgccctgttcaagtcgtgtgccgcggttgagctcaccgaaaccatcactgaatacaatgtgtcatgtgtgaagcacattttcaacgacgactttgttcttctgcagtttgactgtcgcaacactttgaatgaccaactgttggaggaagtttttgtcgaaattgagccgcaggatgagggcgaagattgcccttggcatgtgcaaagtgttcacccgttggcccagttgcccttcggccagccttgcaccacttatgtgctgctcaaaatgccggaggacggacgcattgccggcacattcggcgccaaactgaagttcaaaatttgcgacgtcgacccggcaaccggcgagccggaaagcaacgatttgtacgacgaagtgtacacgttggagcccatcgatgttggcctcgccgactttctgttggccatcgcgccgaagggcgcctcatttaccaccgcgtgggacgcgctcaaggaggaggggcacgagacggaggagtcgtacgcgctgtccaatgtgcacacattggaagatgccgtctccaaactgctcaaatgcaccgcccttttcccttgtgagcattcgaatcgggtgccggagggcaagtcgtcccaccagctgttgctgtgcggcattttccgtggcggcatcgatgtgctgtgccgtgtccgcctggtcatggacccatccgaccagacggtgtccatgaacatggttgtcagatcaatggacgaaacagtcagtcaaatgatcgcaaacattgtcagctgaggaacggcaaaaaacattcattcatctgttgttacatcaatgataatatttctaaatttacactatttgattgatggctggattttatttatttact

SEQ ID NO: 95967 - DNA, 644 bp, Heterodera glycines
gaacaaatttcaatttttatcgcatgggaccaaacgaagaagcacataaacataattcgtcttcgacaccgaatagaattgactctgttgaaagtgatgatgatgaaatcgcgggatggagggcggaggggtggcgaattgggttcgacgtggaaatgcgcgtcggtgtcgcgggcgtcgaccgtccgcacgaatcagcggaaagtgaaagcgatgcaacggaagatggccacaacactgcgttcgatgctgagaatggtccgtcgctgaactgcggctacgtcctcctgccctcctccgccgtcgacgacgcgccgccctccccgcccgcctcaacgcccaccgccacaagtccaacgcattgtcagagcaattggctgttgcccgctcccccacccgcagcggatttggactcaattcagcacaaacccaacgatttcaatttggacagagtgaaaacggaggaaataaaacaaataatggcacaaatgtcggtgtcgagccgaaagccagaatgggctcaacagatcgacgatggaaaactggccgaactagttgagcgactgaagaaaaggaaagtgacggaagggaaataaacgataatttgtgctttatgcttggacataactaattatgtcactaat

SEQ ID NO: 95968 - DNA, 782 bp, Heterodera glycines
  unsure (1)..(782): unsure at all n locations
cctcgttccgaattcggcacgagggtttgagttccatcacaaaatgtcatcggcagagcgtaaaattgacgtgaatcggactaattattcagtggttgactccgaatttgattctatgcgtgaacgctttgagaaggaaatgcgccgagtggacgaggaaatgcagcgtcttcgccacgagttcgaggggtaccgccccgccgcttcgcgttcttcgccttatacaacggcgggcactcagcccatttatggtggaggaagttcactgagcaatggcgcgggcggcggggcgatggcgcgccattcgccgacttacgacccgtacttggaaaacctaaagagcccactgatcaaagacgaaagtgacgggaaaacgttgaggctcagattcgacgtcgcccaatacagacctgaggaagtgacggtgaaaacggtggacaaccgtttgttggtccatgccaaacacgaggagaaaacgccaagccgcacggtctatcgggagtacaatcaggaatttatgctcccccgcggcaccaaccctgaacagatcagctcaactttgagtactgacggcgttctcaccgtcgaggcaccggcttccccaattggccatccaaaaccattaaagaaaacggagaaaacaatgaggagagaacagagcgtaattttttttgaaaattacttaccgtccccacatttgtcatcttcaaaagaacaaatttatttttcaattgccttttaaaattacatggnctaatgtgagaataaacaattttttgggc

SEQ ID NO: 95969 - DNA, 511 bp, Heterodera glycines
cgcggcttgagactcatcgcgtgttgacttcctttgtcggcaatctttgtgcgcccaaccattttttccgaccagaccacaacagcggccgtttctgtgtggtgtctatcaacacgcatgaagctaacagagagatggtccgcactttctttcacgacaacgaggctgggttcaccaaaaaatattatttctgcgaactgcaattttttcctatgaatgaattgccttgggacgttgccgtgttgaagttgtacgcagaaaccatgggacatatttgggaccccctttttacgtacctggacgaagtcatcacttcactggagaatggtgacatgccgccgtacatttccgaatcatcgccaaataattcggccaattcactcgagaatctcccgtcggttgaggcaccgcaatcggatgattagttggagtgaagacttttctggcatttctgttccttcaccaaaaatgcctttgttgttgttgttggcataataaacaatgaattctc

SEQ ID NO: 95970 - DNA, 428 bp, Heterodera glycines
tgccatttgccgtttcgccctctttcaactttttgcgtcgtccgttccctttgttggtctttcgtcgttccctttttaaaccgccattggactcaccgttctgtggcatttacaggacaaaaatggctactaaaaatgggagaattccttatgaattgcttttcgaactcatttccgctcttccgtttcacattcgatgggccgtcacccgtgtttccaaggcttttgatggttttgtgtggcagaagcaattttcatgggttagagctgagctgatccgcaaggaagcacaaaggcaaaaagaaggcggcgcattcctccaaatggttgattctctttcgacggctgtcaattcgctttcggaggcttctcactcgctttcgcaagcttctcactcgctttcaaactcggcggcgcaggaaatgcac

SEQ ID NO: 95971 - DNA, 550 bp, Heterodera glycines
aagctggagctccccgcggtggcggccgctctagaactagtggatcccccgggctgcaggaattcggcacgagggttaagaagaccacttaaattttaacgaatattcgtgatggaaaatgcgagattggagtcttttgctacaaagaaacgtgataagatcatacaaataacgaaggagcagtttctggcgcccatcaaggacgaatatgtacggcgactgtcacaaacgcccattgaacagattgtcgatgacggatataacccaggcccacaaaaaccggacggtacggtgaattttgagtgccattgcgttgcccatctggtggccagcccgtgcgggcacgacttccgcaaagcgatcagttgccaaaaagcggccaccgacgcggagttggagaagggcaaatgcacggaggagttcttctcgttcatgaaatgcgcgatgaaaactcagtgcttccgatcaagagatgaagaaacactcaacgacccattgcagcctcaggacgcggagggcgatcactgatgagaaggcgggaagaaccact

SEQ ID NO: 95972 - DNA, 463 bp, Heterodera glycines
cttctaaaaacgttcgatccattgcaaattagcgcaaaaatgttgcacagttttcgcggtgttcgcctttcttcccataccaacaacacatttgagttctcctcctccttctcgtcgtccacttcaacaacaacaaaacgtacaaaaagcagcaacagcaacgaggatggcagaacgccaacaaacggcaaaaatttgtcaccaaaaaaacgcaaccattcacaacagcgtcagcaacagaacgacagcaaaaaaagcgcattgtccacagatttgggcctcaaatcagtggtggtacagagaaagctgaacatccagacgaattattcactgcgtgcagtgcgcaagaaaatcacggcctccaacgaattggtggtggagcaggacgaaggggtcgcaaaggccaaaccgccgaacgaacaccgctacaaaagagccgccaaagacgaaaatgaaaatgacg

SEQ ID NO: 95973 - DNA, 1012 bp, Heterodera glycines
gtttgagataaatgattttcaaccatttctacacccaattttacattctgcttaacgtgttagcttcaactggctttgttttctgtacaacagaatggttcggagacctcagagcccatatgaatcctccgaaatttcctccgttttatgacatcgtatacgacgaaccagattgtccatttgggcttgaaagtgtggccatccccgagtttgtgtactttggggaaatgattgcaactaaatttgttcaagagcattcacaatgtctgcagttttgcttggaaacctcaaagtgcaaagctgtgaatttctttgaatcgatcgaaggaaaaaatcccgaagtcggtttctgtgaactgttggtcgaaggccagtatgacaacccacgactgatgcgacctttcaaaaaagcaacttaccatgaaaaaattcactgccgagctgaaaacgaagaggaaaaacagccattcatttttgatgagaaggatggcaagcaattgctaattggaaacgaaagtaacgaacgcaaaaacacgtcgtcgacagcgaaacaaaccgaaaaagggacaaatgaaaacggacaaaagacaaccgcggaaaatcggcaaagtgaaggaagaatgaacgagcaacggagccaaaaaacaacggaaaaacagccgagaagagaagaacaaagtgaaggtcgaggatttttttgtcgaaaaacggagacaaaggaagaaacggcacaaaaatcggaaacgcaggaaaaggcaacggaaccaccgacagcacaattaaattcactgattctcaaaagacttgcggaaagaattcaagaactcaaaaagcggttcagaaattgacaaatgaggaaccaaattgatttgatgaggaaatactagtatttattaatgatactaatcatgctgccaattcatttgtattattttttggccagtagttttgacccattttagagataatttcgcaaaaaccttatttgtgtcatttgaattagttttactta

SEQ ID NO: 95974 - DNA, 468 bp, Heterodera glycines
tcctcccaataaaaagcaccaaattctcattaacaaaaagccttcaaaaaaaaaatgcattttttgttgaacttcaagctttttgcatccatctttcttgtactttgtgtggtttcgtttgtcgtctgccaggacaagccagctgaagcatgccttcatcccaaagacgagggaactggcggcttggcactcacacgatggtggtgggacggtagtgattgcgaggaatttacctacaaagggcagggcggcaacacaaacaatttcccatcaaaggagctttgtgatgacgtgtgcaagccatgaatgagccgtggaaagaagatgcaatatgaagagacaagcaaagaagaaaatcaaagaaataaaattcataaaacaaaatgtagcactaatgcctaatgattttgcggaataaacaaaacattgccaaaaaaaaaaaaaaaaaaaaaaaaaaacctcgagggg

SEQ ID NO: 95975 - DNA, 859 bp, Heterodera glycines
aaagctggagctccccgcggtggcggccgcttttcaatagtggatcccccgggctgcaggtactcggcacgaggcttaccattttttgccttctctctctgttgcgctatcacaacacaattccgattcgtctacagcttcttcttccctcatcgacgagatgacttcttcaagatcgcgaactcgtcgtacgaccaccaatgctgcttcaaccgctgctgctggccgtagtcggagccgttcaacacatacgggtcgtcgttccgcgagcagaagagcaatcggcaacagggcaacgggtcgttcatcgtccgtcatgaacgcgtctcgccgagtgtcgcgccgtgtgtcgtccgccaggaaatcatctcgccgacgtcgccggattgtggcgcgcagagcaacgccaaagaagcggtccaagtcggccaagaagcgtgggcgtggacgtccgagaaagccgcagcgtggacggagtgcgcgtgcgcagcggagaattaccatcacgcaaggagtgttggatgtgcccggtcatggccaaatgacggaagccgagctgagagaaatcttcatggcgggcacgacggcgaatgaaccgacgaacagaccgttgggcggcgcggaagtgattacgacgacgaatgccaacaacagaacgaccggtgggaatgcgaccagcagcagctcctcaagcccctcactcagcgacagtgtctgaacgacgtgacgcgtggtacaacaacaataacaacggcatggagaaaagaggcgatcggaatggatgagaatttttgcagaggatactaattaaatcacggataattgtgcccatcatagagagtgtggctcccctttatgt

SEQ ID NO: 95976 - DNA, 475 bp, Heterodera glycines
ttttcctcctacaccaaaaaaaagaaatgtttccatttgtccatttttgtgacactttgtcttctcattagctgcttaatccccttctcgtttgactatgatgacgacctgttcgaaattggcactgctcagtccgtagcagtcaccggaattttgacgtgcaatggacgaccaagtggcggcacaaaagtgaaactgtacgacgtggacacttttgacccgacgatttgatggccgaaggctttacggacgaaaaggaacactttctgctggagggattcgaaacggaaataagcgacatcgactcgaagtgaacatttaccataattgtaacgacgaacatatccctgtctgcagaagttctccattgagatccccgacaattacataaccgaagaaaaacgatcaccacaaaagattttttacattgggaaattgaatttggaaggcaaattctcgggccaacatcgagatt

SEQ ID NO: 95977 - DNA, 548 bp, Heterodera glycines
ttgacctgattacgccaagctctaatactccaagactatagggaagctggtacgcctgccgaaccggtccggaattcccgggtcgacatcatcatcatcatggccgctaatacgacccaatatagggggcactttgtctactcattagctaaattaaccccctcctcgtttggctatgatgatgatgatctgttcgacattggcactgctcagtccgttgcagtcaccggcattttgacgtgcaacggacggccaagtggcggcacaaaagtgaaactgtacgacgtggacacttttgacccggacgatttgatggccgaaggctttacggacgaaaagggacactttctgctggagggattcgaaatggaaataagcgacatcgacccaaagctgaacatttaccataattgtaacgacgaacactttccatgtctgcagaagttctccattgaggtccccgacaattacataaccgaaggaaaacgaccacaaaagatttttgacattgggaaattgaatttggaaggcaaattctcgggccaaca

SEQ ID NO: 95978 - DNA, 698 bp, Heterodera glycines
gttgctacaattaaggtttcttcttcttccgctcatcagttgcacaacaacgcatcaataattaacattgacactgtccgtttcacttcgcactcaaaagagaatgacaccgaaaatagcaatggaagtgatttcactgtgaataatgggggcacttttgtgaggcgaaaggacccagtagaacggaaagtccaaccgaatgtgaacccgtcttcaaacccttcgtcctcttttacttcccatgaccactacccaccggtcgttagtgacggtgatgaaactgccgacgatggcaccggaactattcgaatcatttctccctcaaaagcggtccctccaataccacctcatcattttcatcgacaacaacaacaacaacttcagcacaaccaggtcaacaatgtgccatctacttttgttgccgatgtttcggttggcattgctccgccaccgcctacaatccgtggcgttcgctgtagctcactagagaacacactgcttcctgcactggataagttgactcgaactcggcacggtgccgcccatttggacacaattgctgtcgcactgaaacgcgctgaacaggcaagccccgggctgtgcgatcacttagtcaccgaattgatcaccaccatggcacatccccaatgcacgaacgcggagctgcgcaaggctatcgaccgattgaccacgcgaag

SEQ ID NO: 95979 - DNA, 487 bp, Heterodera glycines
atttcaattttgccttcgctttaaaaataaaaacaaaaaaaaaccttttctcttttggctttacattaaatttctccgcgtttttggcccctgatcatttctggggcatttctcaaccgcttcatcgagcgtttcttccacccctctgctcattatcacacaaagggcagcggaccaagttgaaaatccattgcttaaataatcgtgacttttttttgacgaattgggatgagattttcttgctttctttgtgtgtcctggttgatactttgctcggaaatttaacggcctttaaattttgaacaaatttactcaggccatcagatttgaaaattctttttgaaagagacagtgccttaccaaacattaaaaaaagaaaccaaaaagtttctatttcataacccatttcatttttattttcattttagctccgtcgcatcgccgccccgggtgagcatttgcgcatttgtgtcgactcgggcggctg

SEQ ID NO: 95980 - DNA, 513 bp, Heterodera glycines
ggataaaatgccaatttaaaaaaaaaatagattatggatgattctcatcaggataatggacgaaagcagcaaaacacttttttgactccaaaattctccattttgctgccgacgtacaacgaagctgaaaaccttcccatttgtctctggctgataatcaaatatttaaaggggctgagttatgaagtgattatcatcgatgacaacagtccagacggaacacaggaagtcgcaaaaagtttgcagaaagaatttggagcgggaagaattaaattgttgacgagggagtgcaaactcggattgggaagtgcctatgtttttgggcttaaacaagcacagggcgaatttgtcattttgatggacgccgatttgtcccaccatccgaggcatattccggagatggtcactcttcaggagaagcatggctatgacattgtcacgggaacgcgttatgcgatgggcggcggagtgtccgggtgggactttagacggaaaatgatcagccgaggagcc

SEQ ID NO: 95981 - DNA, 504 bp, Heterodera glycines
ccgcgcctcaggcttctcctcatgtggcgttcgattatggggcgacaaagcttgctgcagccgcaccgtccagctacggctcggcctccgaggcccagcctgccccagcaggcgacgaaaatggcactaaagaggtgtcgcaacgaaaaaatgcaacacccgcgcaaacggcacagcacaataatgcaccaccacaacaaccggcacggcaaaccactgcagcacaaaatgtgctggagcaacggcgtgcaaaacggcgttgtcccagggaagccgggtttgtgcaagctgatgcagctagcggaggaggcatgcatagcccagcagcagcagcacgcatttcgcacagggttattggtcatactgcaccaagcactgaatatgcgtccggtccacggccagcgggaactgatgcaccacgagtgtatgcagcgcaaccctacgctgcaccgacgcgatcaatttcatctgtcagcaaatcgaggggctcaattggtcccgaat

SEQ ID NO: 95982 - DNA, 764 bp, Heterodera glycines
gtttgagaaaaatttgtcaaaaaatggcacgaatgcacaaaattccgctggaccctgactcggcaaatgtgccaatgtttgttgctaaatgcgagcaatggttggccaatttgccaacacactttgaacaggtcgaaatgcagcaaaacttcgatcaaaattttaatggctcttctttgtctgagcagttaactgagctaattaaagcattggaaacttctgaatcaccgttggtggtgtttgcgcacaacgatttgctgctctttaacatcctttttgacgaggaaggcactggcgatgtccatttcattgactacgaatatgcgggccaaaactaccaactgttcgacattgcaaatcacttttgcgagtacgcaggtgttgatgagtgtcccgattatggaatgaattcggccagtgaagacgaacgtcggcactttttgcgccgttatttcgtctattttggccaaccaattgaggaagagtgtgaaatggacaaaatgttgtgcaaaattcggcactttgaagcggcagcccatttttctggactctgtgggccatccatcaggcagcaaaatccgcgattcaatttgattacatgcgttacgcgatcacccgccatcgttactgcacccggcttatgacctcatcaggcattgctaaaaataattagccacaaaagcacaacattattgatttttggttttcgttatctgtactttatcaactctcttaataaaaggtgacgatcaacgcgaaaaaaa

SEQ ID NO: 95983 - DNA, 199 bp, Heterodera glycines
aatataataatttccatataaataaatgggcactaaaaatgggcgaattccttatgaattgcttttcgaactcatttccgctcttccgtttgacattcgttgggccgtcacccgtgtttccaaggcttttgatggttttgtttggcagaagcaattttcatgggttagagctgaactgacccgcaaggaagcagcaagg

SEQ ID NO: 95984 - DNA, 745 bp, Heterodera glycines
gtttgagataataggaatcctttctatcattattcaaaatgtctcaccgtaaattttctgcacctcgccacgaggtccatgggacttcacgcccaagaagcgagcgaagcgtcatcgcggaaaggtcaaggctttcccgaaggatgacccaaagaaacccatccatctgacggcgttcatcgcctacaaggctggcatgtcacatattgtgcgcgacgtggacaaacttggctcgaaggtgcacaaaaaggaagtggtggaggcggtcacaattctcgagacgcctcccatggtcattgtcggtgtggtcggttacatcgaaacgccgcgcgggccgcgtccgctcaaaaccgtttttgctgagcatttgagcgaggactgcaaaagacgtttctacaagaattggtacaagtgcaagaagaaggcattcacgaagtatgccaagaaatggcaagacgaggcgggacagaaatccatcgaggccgacctgaataaaatcaagaagtactgttcttatgtgcgcgtcattgctcacacccagatgaaactgatgaagcaccgcaacaagaaggcacacataatggagatccaaatcaatgggggtaccgttgccgaaaaagtggactgggctcgtgagcactttgagaagcagggtccccgtggagcagtgtgtgagctcgctacaccatcgactgcatcggtgtcacaaaggaaagggttgaaaggagtgaccagcggatggcac

SEQ ID NO: 95985 - DNA, 412 bp, Heterodera glycines
  unsure (1)..(412): unsure at all n locations
ctttttcttcttttcccttcctttaaccaggccaacaatgccgatgagtccaccgccgcctgttgccacaaatgctacgtcgcgttcagagattgtttccgcgagtgtttggacaatcagtcggagaatttggtgtgcgtgccgaactgcaaaattgccttgggaaattgctcgaccgacaaatgcggattgatctgtccccgacccaaaaatccccaattcagcccaccggaaaagtacgacagattctattgaaatcgccaaaagagcagaaagagagagaaaaaggaaggagagagcgagagagagaggacgaaagaatgagagagaaaagaagagacagacagacaaagggaaaagacattatgccacaaaaaatataatttgaatgataaatgggatatgtggttan

SEQ ID NO: 95986 - DNA, 477 bp, Heterodera glycines
tagacgggaaagttgaaagagacgcggatgggaaggaagttcgataccccgttattctaagtgctaaagagaagacaattgcgcgaagagttgtgttggcatttgggcaaagtgtctgcggattcgatttgctaagagccaacggctgttcgtatgtgtgcgatgttaatggattttcgtttgtaaaaacgtcgaccaaatattacgaagataccgctaaaatactcggcaataccattttgaggcgtttagcctcttcgctgagcattccttggcacattcctttccaagatgacgacccgccattagtgtcgacgcccagtggcaaaataatggaacttcgctgtgtgttggctgttattcggcatggagacagaacccccaaacagaaaatgaaagttgcggtgaaggatgagcggttttggaacatgttcaaaaagtatgatggaccgagaaagcgcgaattgaagctaaaaa

SEQ ID NO: 95987 - DNA, 352 bp, Heterodera glycines
  unsure (1)..(352): unsure at all n locations
aattattgcacggatcattaagaagaatcttttaatttcctccctaagaatttttccaaaatgtttccgttccgttttctcttcgttttcgctttcgctttgctcactttgtgcggcttttctcacatgacattggcacagcccggaagcaatgggccaattggcgaacctaacaaaatgttgcgcatccgccgggaaaatgaacgcaaggaaaattgacgttttccatggaacgaaccaaagaggatgaaaatgaccgaagaacaaaaaacactattagcaattaaattccgttttcattgttactttttagggtggtgttttggtataaaatcaaaaggttgatcnctan

SEQ ID NO: 95988 - DNA, 476 bp, Heterodera glycines
acggtttatcactcaaaatgagcgaatctgccagtgatgatgaaaatgcccatctaatcgaaatcaaattcaaaacgatacaggaaacttacaatgtgaaggtcaatgaaaactcaaccataaagcagcttaaaaagacaatggcgaagaaactcaatcagcctgaagagaaaatttgcctcattttttctgggaaaatactgaaagaccatgagaatctctcacaacatcatattggtgatgggatggtccttcacatggtcatccgaaatcagccctcaacttcgacggcttccgccgcaacaacttcctcagtttcgactgcgccgacgggtggcgctgcgccgaacttagctggaactccgccgtcgttaggcggaattggcgatcttttcaacaaccctgaacttgttcaaggcattctgaattcacctttcatggagagtatgctggccaacccggacataattcgaacg

SEQ ID NO: 95989 - DNA, 476 bp, Heterodera glycines
gttccatccccaagtccgcgtttcgtttcggcactttcgaatttctgaagggtcacgcggtggatgaacgcggcaatctctccccgttcatgcgattggcttgtggccttggtgcgggaatttccgaggcgatttttgctgttactcctatggaaactgtcaaagtcaaattcatccatgaccaaacgctggaaaagccgcgtttccgtggttttatgcacggaatgggcgtcattatgaaggcggacggtccgcggggtttctatcaagggcttaccgcgacaatggcaaaacaagggagcaaccaggcaatccgtttcttcgtcatggaaacactgaaggattggtaccgggacggtgacccgaatgttccggtcagcaaacccgtggtcggattgttcggagcaattgctggggcggcgagtgtgtacgttgcatttgctattgtcacaattctttttttttacttccgtccc

SEQ ID NO: 95990 - DNA, 476 bp, Heterodera glycines
acgacgaccgttgcaaattgttggtgaacacgttgcaggacacactgaaaggcattgaggcgcagtcttacaatggtggcggtgccggtctgtcccgtaaacaccgcgttcgcgaccgttctcgctcgccaattcgctcaagcaagcgtcaccgccggtcgcgttcgcgcagtcgttcgcgcgactattcgccgatgcgttactcgtcggccgtgtcgtcgcgacgcttttgagtggcaaaaggggaatgagtagaatatgttgacggattatgggatggttgaacagataaaagctgggccgataatttatgtaagcgcattaccttggcttgtcctctgacttcgcgtgaattgtcacaccatttgtaactttctttgactcataaatcagctgttatctaaagtgtttcctggcacaataaaattcgtttgtggtgggtccttcccatttttcattcgttgtcgtttgtttta

SEQ ID NO: 95991 - DNA, 664 bp, Heterodera glycines
gtttgagacaggcaaacacaaagtaaataaatgacggccacaaccattgcccaggatccgactccctcccctcggcgtgtttttctccgtgacctttgttccctcttttgttgcccgccgctcccttcggctattgttgccaaattggcttttatgccaccggaaccgagttaccgaattttgaccaacgactcgggacggacgacgttggagctgatcgacggcaggacagagtggccacatgggcaagatgagctgaacaatgtcgaggtgttcttcacccgtactcaacgtcgcaataaaatcgcctgtatgttcgtccgacccttcgaactttcgcatttcacccttttgttttctcacggaaatgcggtggatattggccaaatgtgtaacttttaccttgggctcggctgtcgactgcggtgcaatgtgttcagctacgattactcgggttatggtcagtctacaggtcgtccttcggaaaaaaatctctacgcggatatcggctgcggcacttaaatctctcgaaagccgttatcaaattccaccggagcaggtcattttgtacggtcagagcattggaactgtgccttccatcgacttggccagttgtaatccgcgcatcgctggcctcgtcctccattctccacttctttccggc

SEQ ID NO: 95992 - DNA, 743 bp, Heterodera glycines
attttgttcagtttagttggagatgaagcgagttacggctgatcaaaataaacaatcaaaatggcagtgatcagcgtaaatttgaattagcgcgaatttcatttttttcatacgtattatatatatgttatataggttttgagtttcgtttcaaaaaacaaaatctcccggccgaagtgaaaatgacaaatgtactcaattctccgatgctcgaagggattaaggacagcggacgacattttgtatcggggggaattgcaggtatggccgaggtttgtttcgcacatcctttcgactgtatgaaaacgcgattgcaaatcggccaattccatggcattctcgattgtgcgcgccgtacgctgcttaatgaaggcccatcaggtttttacaaaggccttttgccaccgcttgtcatcgaaacgccaaaacgtgcccttaaattcatggcttttgaccgctattggcgtgttctccgttcggatgcgcttcccacttggctggtgattgaatcattattccatgtccggactgttcaccggtctcactgaagctgtgctcgtttgtcccttcgaagtggtcaaagtgcgactccaatcggagctgaacacgcccttctttcaacaaaaaagttcagctaccgtcgcccgtgaaattgttcattcgaatggttggggcactgagggcctttaccgtggcattggtgctaacctttggaggcacggcgtgtggaactcgtgttactt

SEQ ID NO: 95993 - DNA, 619 bp, Heterodera glycines
cagcaccgaatgtcgaacagccagcaacgccggaaatcattgagaatatggaggtggaggttgaagcagttgcggaagctgaagccgaggaggagttggacccgaagggtcgggtgcagcaactgctggaaatgggcaagtctctggaatgggagatggccgtccaatcggacgatgagcaaatcctcgacctggatgatgatcttgagatgtttccaaggctgattttcctgcagctggccaagttcctgaagaatgcacctgatgggttgaacgaacagcaaaagaaggaactgaaaaaagtgttggtcaattggatggaagagcaaaagcagccatttacggtggatgaggaaatggcacaagtggacgaaactgtgcaaagtttgagcaccttctgtgaccaaattggcaaaagtttcaagggaactcctgccattttggacattttccttgatttccacaaaaatgaaactcttgaaactgagaaattggaattcatgtggaaaatggtgaaccgaaaggtaacgcactatgttaaaagcgttggccaattttacggcggcattaaaattgccaaggaaaatctgaagcaagtcaaaaaaattggcaaatgggc

SEQ ID NO: 95994 - DNA, 739 bp, Heterodera glycines
aaatatttttttaaaacctatttctattttatactcacgctatctcaccaatgagtactaaccgaggacgaggacgtgtgtctttaccgaaagaccattctcaaacttctgaatatggaggtcgtggacgtgggatgtattctttccaccaaccggacgtgaaagaaagttcgcaaatcgctggccgtggacgtggaactactctccaacagaagacggaacacggaggcggctacagcatgggtatgcaacaacagcaagaaatttcaccaatgcgtgggccccgagggggccgaggacacgacgtctcgggacatggcttagaccgtcaccctgttgctcctaccatgccctctccagttccctttggtggcgtttccgccgtccaaccaacttctgggcgcggacagcttccatcgatgagccgttacggagcgtatgctgcattcaccaaacaacgtgaccaattggaccagcagaaagctgtgcttgaagaagtcgcgactcgcttggaagaacacaaaggggaggagacgagcgttggaagtcaggctgaggaagttacgagtacgacgttgcagcgtggtctgcttcagcacgaagtgggaggaatggaggcacagcaaatggttgtgggtgagcaggcgcaatgcccatctgctgagggtgttccgcatgccttcctttgcgccgggtgtcagttccgcgcggattgtgccaacttgcttcgtgccatcgg

SEQ ID NO: 95995 - DNA, 888 bp, Heterodera glycines
agaaaatatttttttaaaacctatttctattttatactcacgatattctcatcaatgagtactaaccgaggacgaggacgtgtgtctttaccgagtggagaccattctcaaacttctgaatatgggggtcgtggacgtgggatgtattctttccaccaacaggacgtgaaagaaagttccgctggccgtggacgtggaactactctccaacagaagacggaacacggaggcggctacagtatgggtatgcaacaacagcaagaaatttcaccaatgcgtgggccccgagggggccgaggacacggcgtctcgggacatggcttagaccgtcaccctgttgctcctaccatgccctctccagttccctttggtggctttcccgccgtccaaccaacttctgggcgcggacagcttccgtcgatgagccgttacggagcgtatgctgcattcaccaaacaacgtgaccaaatggaccagcagaaagctgtgctcgaagaagtcgcgactcgattggaagaacacaaaggggatgagacgagcgttgaaagtcaggctgaggaagttacgagtacgacgttgcagcgtggtctgcttcagcacgaagtgggaggaatggaggaacagcaaatggttgtgggtgagcaggcgcaatgcccatctgctgagggtgttccgcatgccttcctttgcgccgggtgtcagttccgcgcggattgtgccaacttgcttcgtgccatcggtgctcttttgaaagacttcggcagtgctgcatctgttgacggaggacgcaacaacgggactacctaaaagacataacgaatcgtcataaatatctccaccgtattttaacactgaatttgagttctagatttccatttaattttctta

SEQ ID NO: 95996 - DNA, 651 bp, Heterodera glycines
ctaaaatgcaagagactcacattgttctcgggattgcctcggtgtgctctctgttggctatcatcgccacagtcgtcactctgccatctctgtactcggagatgagccaaatgaacagcaaagtgcgcgacggagttgaggccttccgcgtcaacaccgactcggcctggactgacttgatggacgtgcaagtggtcgtgacgaccgccgtcgaagccccgtgataaccccttcaactccatcttccgtgccaaacgtcaactgcccggacactggccagtgcgcctggcctccaacagccaagctgtccccctggtccgccccggccgtcccggacggcctggacagcccggacagcctggaggcgcaagacagccccgacagcctggaaagcctgggcaacccgcctcctccttgcccggccccgaacatcccctggcgcaccctgccctggttgggccccccccgcggcccccgaaggaaaaggaaccgcccgggccaccaagggagcccccggaaaacctggtaacccccccctccagggggggggaacctggaaaaccttgggggcccccggaccccaaggaaagacctggggaaacccgggaaaccccccgaaagccctgtgcaacccccggaaaacctgggaga

SEQ ID NO: 95997 - DNA, 341 bp, Heterodera glycines
cagcgctcagttagcggcggagatgcggcgcagtcgcggatggacaaatgggtaccgaatcggacagtgacaaaaggccaaaacgaaacgaaaaaaaagacacttcggcaacgccataaaaaaaacaaaggcgcatcgaacagttgaaaagccaggcaattagcggaaagcaaacaattaattaatggctaattttgttttttgtaaatacccatccaaaacaacccccggggcattcgttcttcactcatttatttgtttaacggcgcattgaatctcagtgattttaaacacataatttatttctcacgaattgaaatgataaagtcggtttgataccc

SEQ ID NO: 95998 - DNA, 886 bp, Heterodera glycines
gtcattttctttccatccattcaaagagtcattctcccatcacccagataaataattaattaattaattgactgctcgttgattctcttaattgaccacaatgtttctgctaattgctctactgctcgtcgcttttcctctcttttgcggtgccatccccgcgctgcccaactcagccgcggcactaactcaacagcagcagcgcatgatgcaaattgatgctttttctgcggcggatgacgcacagcgaaaggacagcgacgccgcgggcggtgcggcgcccttcgctttcgaaccctccgagcaaaaggcattcgtactgaaagggttgcgtcgcgtgaagaatccgtcgccgccggcggtcgttccgaaactgacggcagatgccaaaatcatttcattgaacgcggacgacgacgagtggcgagaaatgggacaacaacagaaacaacagcagcaacacggcatgggccgacttttgccaccgacggattctttggcgcggagaatgagcggcgccgcggccgcggtggggacacaacgcgcgcaacggccgacggcgacggaagtctttggagacgccgcaaatggcgacgcactgataaatccggcagcgtttttcatgggcggcgccgacctggacagaattgctgcgccctcgtgccatttggtgggctgcgtcggccctttggccaacgacggggacatcgccatggagggacggacggggccgggcgcgggcggcacgcgccagtgccaccaaacatttgtgccgttgaacggctgctgggagaggggggcggtacgcgactcgtaccccgtgggaatggtgtgcacaatttgctgtgagtgcagcgctcagttagcggcagagatgcggcgcagt

SEQ ID NO: 95999 - DNA, 120 bp, Heterodera glycines
gagaacggcggtccgggagttgccggcgaaattggaaatatgggcacatgcgaccactgcccaacgccacgcaccgccccgggctattaaacggaagaaaacagaacgaacaaaggaaat

SEQ ID NO: 96000 - DNA, 525 bp, Heterodera glycines
actagtggatcccccgggctgcaggaattcggcacgaggtgcttctgctgattgggataaaaaggtggccggttgggacgacaagaaagtgaacaaaggctgggaggaagccgaagcaccgctcaacatccgtgcccgtcgcggcggatgggatgagcgcattttgggcattcgtgaacaatgaatggagagaatgagtgaagaagaagaagaagaagaattcgggatggatgccaaaaaagtaaacattcattttcaatttaattccccctttccgcccccatttgagcccctttttccaaatttcaattatcaaatgcataaacctgttctttccctccaataaatgatccgattttaaaaaaaaaaaaaaaaaaaaaataaaaaactcgagggggggcccggtacccaattcgccctatagtgagtcgtattacaattcactggccgtcgttttacaacgtcgtgactgggaaaaccctggcgttacccaacttaatcgccttgcagcacatccccctttcg

SEQ ID NO: 96001 - DNA, 360 bp, Heterodera glycines
caacaaaattaggcttcttcaccgagacaaactgaagccatgcatgtggctcaacaaacacattcagtcgcactatcgtccgcttgaattgccctggacactttgcatcgttcaattttccaatggaacaatgaaacagtgaatgtttggagccacctgctcggcttcgtctggttcgtctacctccaatggtgggccctcaatgaatcgcttccgtcggtgaacgcgccgattgcggactattgggtgatgggcacggcaatgctgtgcagtcagctctgtatgcttctctcctctgcttaccatattttcgggtgccattcgcctcagcgccgcaaacaatggcttcgggccgacctt

SEQ ID NO: 96002 - DNA, 1008 bp, Heterodera glycines
ctaaacttaacctcacaatgaagcggttcaattcatgggcctcccaattggagaacgaactcgagggatggaaggacggatgtccctgcgactttcttccgaatatgtcgccaatttcggatgcaaatgactcctcttccctctcctcttcttcctcctggtcttcgccactccttcacaaatatcgcttgctaattgagcccggtaattctccgtttgaatacgtcgcccccggtgttagagctgttcgtcgtctttggaattttttgattttgcaagagaatttagctccaatatttgtgcgctattctttcgcaaaagcgaaggataaaatcgcttcttcggtcacaaaaggagcagatttgaacagtattttgaatgtaatcaaattagtccaccgcgagcacgacccaatcgtcgcatttgcagcgaattcgattaggcccggtgtgatggtcgtctccactgggcgtgagcttcaggaactgagcatcgaccgtgtgttggatgagcatgagcgggtcgtctcccgtctgcagcactatccgtcgaccagctcttttcttcttgcgcagaattgggccgagttggacatttcaatgcagcaaatccgtcgtgacccgctcagggacaacgatgactaccaattgctgatcccgggaagcgatggtcagccgggcaagaacatccccacgcaaacatcagcccatttgcggaaacgacttttttctggcgttcgccgtttggaggcccattcatcgctgccctactatgccagtggctcttccgatggttctgttttcctatgggaatggggcgttgaacagcctgtgttcgtcgcccgtgttgctggccaattcgcaaaagtggctaaattggcattcgctcagaacggcgcccgttttgcggctgtcgatggggatgggctgctgtccatttggcaggcacaacctggtgttccggcaaagaagccttatttcatccaaaagtgtcacaccaaatttgcat

SEQ ID NO: 96003 - DNA, 472 bp, Heterodera glycines
tgatttgaatgggaaatgaaagcacataaaaggagcgaatgaatcagtgaaattattcaactttaatttgactgtgcttccgaattgtcaaaatcattaattaatttatcgcgcaaataatggccaacaaatttttaattgttgcttttattttgacaattgccatttttgtcaatggacaaagtgaggcgccaaacaattcgtcggaaatggcatcggaggagagcaattcggaagagtcgggcagtgaggagcagcagttcaacccattcaaatttcgacaatttgctggccacggcttttttggtccctcgtcgtccaacagttcggcaccgccgcccttcggcttttggcccccttttggacgaatgccgtcgccatttaaccgccccgccaaccgaccgccgtctgacaattgatcactttttgagtgatttttgtccgtcgatcagtgcgaaatgaaaccgttgat

SEQ ID NO: 96004 - DNA, 378 bp, Heterodera glycines
  unsure (1)..(378): unsure at all n locations
tgactgtgcttccgaattgtcaaaatcattaataatttatcgcaaaaatggccaacaaatttttaattgctgcttttattttgacaatggccatttttgtcaatgggcaaagtgaggcgccgaacaattcgtcggaaatggcatncggaggagagcaattncggaagagtcgggcagtgaggagcagcagttcaacccattcaaatttcggccattttttggtccttcgtcgtccaacagttcggcaccgccgcccttcggcttttggcccttttttttgggcaaatgccattgccatttaaccgccccgccaaccgaccgccgtctgacaattgatcactttatgagtgatttttgtccgtcgatcagtgcgaaatg

SEQ ID NO: 96005 - DNA, 573 bp, Heterodera glycines
ccaagtttgagcattaagattttttgattcaatgttggtcttacgcccacccgatggcgaacagtcagtgcgtcaacttatgttgctcaacatctcctgtcttccaatcaattatgggaccaatccgcgctcgactcattacaaaagggtgacacgaaatcgactagcggaaaaaggccctgacaatggggacgaatgcgacacgagcttttggaccatgatggcctatcgtcaccatttcaatgatcaaaatggcactgattgtgaggaagacgcccccatgcttgtgggtgccatcaccgtgtccaaccgaaacagcaactgttcctgttgcagttccaataaaaccgatggggtcgtccagccacaaaaacaaatgttttctgtccaaattcagacattggcgtgcgattataacgatttttcatttttatgaactgttatttgccccttttgcagtgttttgcccacttttcgtcgtcatggcgttgccactcgtctgttgaattcgctgataaaccaatgtgaaaaatgggctaacgtcgaaaatatctttttgcactgtcagacgac

SEQ ID NO: 96006 - DNA, 527 bp, Heterodera glycines
caattaagcaaaacattcactttccatcctcccaaatttcccaaaaatttctcaaattctaaatttgaccctttctttctttttctttgaatcggccgaatgtcgtcgcttgagcaattggcttcacctcacaacgatttttacgagagtctcttcagacagctgaatccctccggaagtgccgaagtcgatgccgcgtctatcgctgcttttttgaaaacggcacacggcgttagcgtcgcacaactctctcagatttgggaaattgcgagcgaattgagcggatacaaaaatcgaagcgcactgaacaaaattggcgtgtatatatgtttaaagttggtcgcgggcattcagcatggcttccctctcgcgccctccgttctcgacgtgccgttgtccgccgtgccccaatttgagtttctgtccttccccacgccgcctcctctgccccccgtgccgcctccgccctccgcggactcaaaaagtccgtcagtctctgccgaattggccagcggaggaggcggtga

SEQ ID NO: 96007 - DNA, 473 bp, Heterodera glycines
atgcaagagactcacattgttctcgggattgcctcggtgtgctctctgttggctatcatcgccacagtcgtcactctgccatctctgtactcggagatgagccaaatgaacagcaaagtgcgcgacggagttgaggccttccgcgtcaacaccgactcggcctggactgacttgatggacgtgcaagtggtcgtgacgccgccgtcgaagccccgtgataaccccttcaactccatcttccgtgccaacccgctcctccttgcccgccccagaacatcccctgcccacgctgccctgctggcccgcccggccgccccggaggacagggaccgcccggacagcaaggagcccctggacaacctggtacgcccgctcaaggtggaggacctggaacgcctggcgcgcccggaccccaaggacagcctggacagcccggacgccccggagccgctggccaacccggacagcctgga

SEQ ID NO: 96008 - DNA, 357 bp, Heterodera glycines
  unsure (1)..(357): unsure at all n locations
aattgatcaatctcaccacgaagatgaatgtttcgatagcgaattgttcttcatttcgtccaataaatggtcgccctttcgctaattgctaattcccccgttaattaccccccccccccaaatgcgtcgctatttaaaattttattttaccctccaatgcaaagtgtgcctttgcttgctcagctgctcgccactcactttccccttcaaataccgtccctttcgttttcctcgtgccatttccatttgcttttcatcccatttttaccttttctatgctttttccctcttttctgctactttttctgcccaccgtttttgctcccggcccaagtcgagaaaataaattgttcntcg

SEQ ID NO: 96009 - DNA, 459 bp, Heterodera glycines
tttgccaagacgtattaccaaggaaacgcaacgtctgctgcaggatcctgtccccggtatttcagcagttcctgatgaggccaatgcacggtactttcatgtgataatcgcgggtccggacgagtcgccatttgccgggggcgtgtttaagttggaattgtttctgccggaggagtatccaatggctgcaccgaaagttcgttttatgacaaagatttatcatccaaacattgacaaacttgggcgaatttgtcttgacatactcaaagataaatggtcaccagctttgcaaattcgcaccgttcttctctccattcaggcgcttctgtctgctccgaacccggacgacccgttggcaactgatgtggcagaacagtggaaaaacagcgaaacagaagcgattcaaactgcaaaacagtggacccgattgtatgcgcatgcctgattactgtgtgagtt

SEQ ID NO: 96010 - DNA, 474 bp, Heterodera glycines
ggaaaatgccaaatttgctccaagttctgttcggaccggttgtttaccgcccatatcaacccaacctattggaatcgggcggtaacaagctgttcagcatcggtgctggtgcctacaacacttgtgttgtgctgtcgcccattctcgtgccgtacattgccttttcttggacccactcccatcacttttcttttttgcgcttcgttttggtgttttatgccattgccttttccttccgtacgattggtcggctgacaaatgttgactacgtccgttttatcaaattgctcggaaccgtgcgcaaatctccgcagaatgtcactttgctcgacacactcaaagactacgattttcaagtgtacgctgcgcccgctgattttaaagcatcgccaggccgaacggccaaatggcaccctccgcgtgaacgccttccggacttgaatcctccgcttaattttctgcgtcaggctatcg

SEQ ID NO: 96011 - DNA, 476 bp, Heterodera glycines
ccagcacaatgccaaagacatttggtccgaagtcagtcagctgaagggaatgcctctgctggtcgccggaaaccgtactgcgcgtagcgcatacggtagctgccaagagtgttgctccggcggtgcccaaggccaacccggccaacccggacagcctggacgacccgcctccatgcaccccgtgccctggcggtcagcccggtaacaatggcccacctggacccccgggagcgccaggagcaccctgccagcccggcaccggaggaggacagccgcaacccggagagcccggcccacctggacccaatggccagcccggacaacccggacagcccggagcccctggacagcccggcgcggccggacagcccggcccgaagggacctcccggaggcccaggacagccaggcaatggcggagccccaggccagcccggccaacccggacagcctggaaaccccggagagcgcggaatc

SEQ ID NO: 96012 - DNA, 253 bp, Heterodera glycines; identical to SEQ ID NO: 78715

SEQ ID NO: 96013 - DNA, 636 bp, Heterodera glycines
ggagtgtttcttcgctttcgtgtcttcaaatattttttgttaaaaatgatgaacattcggtccaacggcaaaattcggtttgctgtcagttgctcgtcaaacatgaaccgcagcatggaggcacactttttcttgcaaaaacgtggcttcaacgtgcaaagctttggctccggcaattacgtgaaattgcccggcccaagtgtggacaagccgaacatttacgagttcgactccaccacatatgagcacattttgcaggacctgaagcagaaagacagcaaactctatacccaaaacggtctgctgaacatgttggacaggaatcgacggataaaaaaatgtccacaaaaattccaaaattacaaggagaaattttgtgtcatcatttgtctggaggaacgggtgtatgaccagattgtcgactttttgcagacgcgcgagtcgaccaccggcgaaagtgtgcacgtgatcaacttcgacatccaggacaaccacgaggaggccaccatcggcgcgctgcacgtggtggaactgtgcaaaaagttggaagactgcgaagatttggacaacgaaattgacgaggcgctgtccgagttcgaggcgaataatccggagcgcaatttgctgcacacaatt

SEQ ID NO: 96014 - DNA, 229 bp, Heterodera glycines
ccaatgagcagattgatataaaaccgaaaattgaggtgcgcaaaagccacgaagagaagaaaaagaagcgacgccattactcatcggaagaagaggaagaggggacggaagaagaagaaaagaagccggaaccgatcgatcaggaacaattgctggtgaacatgcgtgaggagcacaatttgaagttcaagaccggcattctgattggtcttcgagcggacgaacacat

SEQ ID NO: 96015 - DNA, 1057 bp, Heterodera glycines
  unsure (1)..(1057): unsure at all n locations
tgttccggcgcctgacatgggaacgggagaacgagaaatggcttgtattgctgatacgtatgctccaactgtgggacacactgacaaggaagcatcggcttgtgtcacgggaaagcctattgttgctggcggtattcatggacgtgtttcgacaacaggacgaggactctggaagggcttggctgttttcatcaatgatgaaaagttcatgactaaacttggccttaccactggcttcaagggaaatacattcatcgtccaacgattcagtaacgtcggcttgcactcccaccgttatttgcacagagatggtgcaatttgcatcggagtacaggaatatgactgcgcaatttacaatccgaatggaatccatcccaaagagcttgaggattggaaaatcgcaaatggttcaattcgcggctttcctggagccaaggctttcgagccattcaccgacttgattttcgagaagtgcgacatccttgtcccggccgcttgcgagaaagctattcacttggggaatgcacatcgtattcaagcaaaggtcattgctgaggcggccaacggaccgacaactccggctgctgatgcagttttgatgaacagaggcgactgtcttattgtgcccgacatgtttatcaacagcggaggtgttactgtgtcgtacttcgagtggcttaagaatctcaaccatgtctcttttgggcgtctgacttttaaatatgagcgtgactccaactaccatcttttggcgtcggtgcagaagtcactcgagcgcaccttcgaccgtgccgttccggtggatcccagcgaggagttccaattgcgcattgccggtgccagcgagaaggacattgtccattctggccttgagtacacgatgaaccgttcggccaagcaaatcattgccaccacgaacaaatacaacttgggcttagacttgcgtactgctgcctatgccaacgccatcgaaaagatttaccaaacctatgagacgtctggctttaccttcgcttaatcgattnttcgacgcattcgtaatgtagttaattctcgg

SEQ ID NO: 96016 - DNA, 550 bp, Heterodera glycines
ggagctccccgcggtggcggccgctctccaatagtggatcccccgggctgcaggtatccggcacgaggcccactttgggtacaagccaagtgaaaagcgtgcgaaaagaactgaaaatgcacctcctaagaatgctcaaacatcccggcactttcactttgcacaacctccacccgaggatgaagcaattgctcatcgaattgggcgcttctcagtccgaaattcaacgagcgatgcccgccatcaacgaaattgatgaggcactgaaaaagcgtttggccgctgcgacggcggtggccgctggcacggcacggcaaacgacgacggaaccgaaacggcacaggaaagagccgcaacagcacgaacaggaggatttggacttgagggacatcaagcggattaagttggatgaggacgaatacgacgatggcatcatcgacctttacaaacagttggacaaccccgactccgccaacgctgccactcagaaggcaattgacatcaccaccaattttgtattggaacggctctctattcacgtggtcactaa

SEQ ID NO: 96017 - DNA, 289 bp, Heterodera glycines
ctgtgtgtccttttttcattggtcggttcgcgtcctcagctgctcaattcggtcagtacctcgggccttttgatcggaaaaggaagcgaagtcaaatcggcttcggtcccccttctgtcggagccaatgattgaaatccattcgcattcggcgccagtgtcgccttcggagttgaacttcagcagaagacgaaggaagcgcataagcaacaacaaatccaattgaacaagaaaatttataatacgtatcgcaaacttaaaaatcaaagaagtaaatcgtcaatgaattc

SEQ ID NO: 96018 - DNA, 511 bp, Heterodera glycines
cacgggtacactgccggactgctcactttgccacttcctgcgcttgtctttctttgggggacgttggccagcccgcgcccctccaaattgttttggattgtcatgataatttacaccgaattcgaaatcgtggccaaattcgcttttcaattcggattttggccttggaatggggacacagtcggcaataacaaagtgtacaagacggagtatgtgttcggagttcagcgcattcagggctttgccggcaaggacgtcgccctgctcatcgcactctttttccaccgttatatgttgaggaaatttggactttggagagacgcaagttccgacagattgattaacgaaatgcccaaaaaacggatggacaatgggtcatcttcatcatcatctgctgaaaaaagtccacagaaatcgactcaatcgacggttgttccatcgtcgagtggagaaaactttgaatcggtggccaaggcacaacgggaacagaactccgacgacatcgaaaagg

SEQ ID NO: 96019 - DNA, 672 bp, Heterodera glycines
  unsure (1)..(672): unsure at all n locations
tggaccccgacattttctctgtgcctcctaattccctttgtccattgagcaaacaattgcccatcctttgcgtgtttctgctgctcatttgcaacccacaaaggacaaaatgatgacacgaagggcattccgatgttccgagtgtgccacgatgctttacagggaccaattgtcgcccaatgatgtgaagccactacttcaaagctttgcgcttgaccatttccccgaaattcacatttcgaggcccgtaaaactcggccctggacaaaactctgccatttttctaactcttacaaataattcgtctggccctattgacatttcactgacggggaaaaggctcgaagaggaagaaaactgcgtaaataattctgatttctccctgcaacttgtcctctctaatcgcggctcgaccgacgaacagccaaaaatggcccatcagcaaagcgacagccgcatcattaacatcagtcagcacagagtgggcatttgcgcagaatgcgtcccttccgcggactcaattgaccactacgctctgttcagcctctcattcagccacacttcgtctgaccttccggagaagaagttgaaatccgacgtcatagtttcgttgaaacagtcataattctaccgtttattgtgctattaataatttatataaaatatcgnttg

SEQ ID NO: 96020 - DNA, 421 bp, Heterodera glycines
cacaaaccgacgagggttagcgtcaaagtgatggacgaacgatatttggcgcagaacataaaaattgcacaccaacgactcgctgccattttgttgaagcaaaaggttgacgaggcgacacgccggcacgagtcccatcgaaaattgcgggttggcacgatggaacgggcggagaaaattcggacatacaattaccgggacaatcgcataacggaccatcggctcaaagtgacagtacacggggttggacaattcttggacggtggccaaatgcttgaacaaatggtggacgcactgatcgaaatgtacgaacaggaaagtgtggagcaaacgggggaacagccgaagaatgaggaggaagaaacgggcaaaaaagtttaatgttaaattttttttttgtccaataaagcatcatattttt

SEQ ID NO: 96021 - DNA, 367 bp, Heterodera glycines
ggaatttgtgttggtcttgctatcaacaaatctctctgtgctgggatcgttttcaatccaatcactgatgagctatacaccgcaattgaagggaaaggcgccttgaaaaatggctttccaatttcagtttcatccgcgaaagcacttgatcaatctgttatttgtcaaacttttggtcagcataacatcaaagaaaagggagaaaaatggttggacaatgcattcggcaatttgcgctccgcagttctttcgggcacccacgggtacgttagttcatttttgagtcatcaatttcacgatcactgaagttgtgcatgtttagggggtctgcgattacttacgcttaatgtgtacatttcgttgttgc

SEQ ID NO: 96022 - DNA, 476 bp, Heterodera glycines
cggcacgaggctcaatttatttgtttgtttgtgtttttattttctaaaaattacttagcaaattctcaccaacttccttcgtttcctggacaacaagaaccgttacagggacatcatcagcaacacgcacaacaacagcagcaacaacaacaagtaaatgctggagcggaacatcagcagcagcacgctcagtttggtggcgaacaagtcaaagacgaaggacacataaaggaacatctcgaggggaaagtcgaccctacggcacacatgacgccagaacaattgcaattccactatttcaatgcatgacttggacaaaaatggaaaattggatgggatcgaactaattaaggcgatcacccactttcaccaagaaaatgcaagtcctgggcatcaaggtgccagcattccgccgcctttacccaatgaaaatgaactggagaatatgatcgactcgattttgcgcgaagatgact

SEQ ID NO: 96023 - DNA, 573 bp, Heterodera glycines
ggtgatgcgctccgaagttccggcaccgcacgcgctcggccgttcgcgctcgcttgccgatgtgttccgctccaactcgcgctatgccgagtcccaattttctcccaccgttgtgcccatcggaatgccgtcgaagccgatcagtgtccatcgaccgtatttgacttactccgcctattggccctatcgataccatcgaaatttcaacacttacgacaatcaaatcaccgattccttctattggcattaccctttccgcctttggacatcctacaaacacaattggtaccaatacgacagcccctattactatcgccgttaccatgacaattacaacattttctacaacactgaactgatgtcatacggaaatcggtcaaaactgatggagaatttgtaccaaggaacgccgatcacacaatgaaacgattggaacagagaagaagagacagaagagagagagagagagagagcggaaaaggaaattataagacaaagaaacaaaatgccaacatttttaaaaagattcaattgaaaaatatagcagaatattgaggatgaaaagaaaaaaag

SEQ ID NO: 96024 - DNA, 462 bp, Heterodera glycines
gaaattgaagacatggaggaattttggaaacaagcgcaacaaatacaaacggacaatcacgaattgtccgaaagagtgtcttctttaactcgagagcacaacactcttcgcaccgaacatgaacgaattcttgtcgatcacaacactcttcgcaccgaacatgaacgaattcttgtcgatcacaacactcttcgcaccgagtatgaacgaattcttcagcgacagcttgacgatttccactattggattctttgtttcgccttctttatcccgccgctgtcaatattagccaccgcgcgtaacaatgggctctcatttccggtaactgttctgtccgcactcgccgcgacaaatttctgtgcctttctgtggatccccggcattctcttcgccttggcattttattttggtttgaggaagaacgcgaagaaagagtgatctgtacgaattggaattcccagt

SEQ ID NO: 96025 - DNA, 470 bp, Heterodera glycines
ggaattttggaaacaaacgcaacaaatacaaacggacaatcacgaattgtccgaaagagtgtcttctttaactcgagagaacaacactcttcgcgtcgatcacaacactcttcgcgtcgatcacaacactcttcgcaccgaacatgaacgaattcttgtcgatcacaacactcttcgcaccgagtatgaacgaattcttcagcgacagcttgacgatttccactattggattctttgtttcgccttctttatcccgccgctgtcaatattagccaccgcgcgtaacaatgggctctcatttccggtaactgttctgtccgcactcgccgcgacaattttctgtgcctttctgtggatccccggcattctcttcgccttggcattttattttggtttgaggaataacgcgaagaaagagtgatctgtacgaattggaattcccagtctttcagtctgagtgtattttaaaa

SEQ ID NO: 96026 - DNA, 481 bp, Heterodera glycines
cattaattaattatgagtgatcagcaacagtccaaaattgtgggtacggtaggcgctgtgtgcgcgctgggtacggtagcggtccttttgctgctgcttgtacagcggaagaagaagcaaagacaatgcaacacagaagaatatgtacgagctggacatgttgaacagctttacatctacccaatgaagtcatgtcgagggaacaaagttgactggcttgattgtggcgagcgaggttgtgcccatggataacagcgcgatcggcactttttggtggtcgattcggcacggcaaaatcaaatgctgaccggccgcatttacccaaaaatgttgctgatcagtgtccatgtcgagcagggcgtactccgtgttgatttcccgaaccgaagcagccctgtggaggtaaatctgaaggaagtggaagagcgaaacgttgtcctacgagcaaaactgttttctgacctccaaacggatgggttgg

SEQ ID NO: 96027 - DNA, 556 bp, Heterodera glycines
ggcaataattccgtgtttaatcgttctttgaaagtcacaaaatgtccttccaacaaattttctccacctccgccggtcttttcggcttagtttttattacgtcgacgctttcggccccagcaccaaaaccgcgaaaaccaacaacaacacccagcagaaaagcagccattcaatgcttatctaaatcccggctttgacaagcgatctttcgattccttcactggccccggcttcactgggctggacaagcgggccgctttcgacaccggcttcaccaattacgacaaacgcgcgttcgactcgttcactgggcctggcttcaccggacttgacaagcgatttgaaccgtttgatggctatggcttcaacggatttgagaagcgatcgttcgattctttcacggggcccggctttacgggaatggacagaaaatgaacataaaatggacggatggccaaattcaatcaaatcgttaaaatttgaaatttctatgtgaccccagctgttttctttgctgaattgcaccagttcgatattctcaatttatgcgccatta

SEQ ID NO: 96028 - DNA, 575 bp, Heterodera glycines
ctctcctcgaaagtcgcccggccgaaattggccggccttggcgcgagggatgtgttgcgaactgaagcaggactttgtttattcggcaatgaaatcgatgagcggacgacaccagtggaagcggggattgcctttgtgatcgcaaagagacgacgacaaacactcggattccctggggcggaaagaataattcggcagttggaaaagaaagacttcgtcaagaaaagggttggattggcatcaaccaaagcggggagggcagcgagaaataaaatgccaattgccaacccaacagatggttcttccgttggctttgtcaccagcggatgtccttcgccaactttagggaaaaacattggaatgggttatgtggacaaggcgtatgctaaagttgggaacattttgacggtcgaagctgggcgagacagaatgattgaggtcgaagtggtcaaaatgccatttgtgaaaagcgcctattatctgaagccgacttctgtgaacgaagacaaaaagaaatgattaacattaattattgtatttgcattttacattaaattatatatttccatttttaa

SEQ ID NO: 96029 - DNA, 593 bp, Heterodera glycines
tgtttctggatgataaggagaaggaaaacggaacgaaaaattgcgaagctgaagctaaaaaggtggaattagaagatgaaaggaagcaaaaagaagttgaacagaacaatgctgggaagagatcaatcgcagttccccaaaatcagctgtcagtcgaattcttagccaacattgaaggccaccggggaacaacaaatattgttcgattttcgccaaatggaacttatatcgcttctggggatgcggacggctttctttttgtatggaaattggaacaagaagttttggaatgcgaagtgcaaatgctggaagagccggcgactgtccgacaacgtgacgccgaccccgaaatggacattccgccgaacaaggagaattgggcaagggcgtttcgaagtccgatacgacatgacggtgatgtgaccggaatctcctggtcaccggactctcaaatgctggcgtcagtgtccatggacgattcgggggctgtacaccgagcggaaaatgggaagcgagtttgggccatccgtaactttcgtcattttgcaaatggaattgcttgggatccttgtggcaaatatataataacgatg

SEQ ID NO: 96030 - DNA, 610 bp, Heterodera glycines
gagaattaaagcattttaattgttcaatggaagtcaaattgaagccctattccgatccgtcccgttgggtggccatttacccgctgtacatcgatgcctccaagtcgttggcacagggtcgccgaattgcgaaggcgaaagcagtcaacaacccgacatgccaagaaatattcgatgttctcaaccacgccggccttcgctgtgaattggaacagaaaaaaacgcaccctcgggcgcagtcgcgtggcgccgccaacccgaaacagcaacaacaggaggagggacgaatccgagtgcaactcaaaggggacgacggagaaaatgtgggcgaaggggcggcacagccaaagttcatgacccgacaacaaatgatggaatacgctgcggaaatggtgcccaaactgaagacacggcagcagcaaacccaagtcgaacagaacgacgcgacggggaagcagaagaagcggaagtgaacgaacggacggacattcaaccaatgacatcaaaatgtacaattaatacaattgttgtttgttatatagaaactctcgttttctttttgatgttgtatagaattttggttagaaattaataacaaattcagacattt

SEQ ID NO: 96031 - DNA, 488 bp, Heterodera glycines
ttttcgtctcttcaaattttctccctgacattaccatctgaaatgagtcttctgttcgttgtgtcaatgtttgtcgatggttgcgccattctttggagttattgggatcgcttcaaaaaaccaaaaaagaaaattttcatttccgccgactgttggctttgtgtcttcgatttgcttgcgccttcacaacttggcctcggaatttcaatgatcagccaccgttttgattattacgtggacgaacacttcaagacgcgcaaatggacgttgaaatctattcgaattcgacgcaaaattggaaagaatggcacaaagcaaatggcaattgtcaattacgattggaaaccattgccaattccgaaaattcgaatgccacgcaaagtcatcggattcaaaagcatcagaatcttatttatcgaccgcaatgccatcgcttttctccgccatttttgtcaaattttcgccgtctgtccaattaatttgtccat

SEQ ID NO: 96032 - DNA, 699 bp, Heterodera glycines
ttgagaacgatttatggagaattgtttgtcgaatggaaatgattcatgccgttctggttcctttctactcgagatgaagccgtccactgatttggcttcgcttttcgttagccttcctgggcccgtgtcaaacgagggaaaagcggtggatgaaccactgggcattatgagggtggacaaccaatcgttggaaattgcttttgatgttcaggacattgctgaacaaacaggatgtcaatccgccgatttctcctcgtcaatgttttttcaaaaattcggtgctaaatttgtggacattatgctcgaaccgaccaccctttgttctccctcttgggccgatgctcaacaacggctgattatgtgcaaagtgcgggcggaggcggactgtgtgacgtttgcaccgaaaacaatcggactattggaggaggaattggcccagcgctgtctcttgcgagaatacgtcgaacgcatcgaacacaaccgaactttccacgtgaactgtcgccgatgcggtcatttgattcactcgcacagcaaaggtgactttgtgtttggtgtgtttcccaacgacgattggctggagacggcaccccaaatggattatttctgtgccctttcttccgattgttgcggtgctcatttggaaatgtcgtcggtgcagcctcggaattctggcgagggtattttgggcttttcgcc

SEQ ID NO: 96033 - DNA, 750 bp, Heterodera glycines
aaagctggagctccccgcggtggcggccgctctccaactagtggatcccccgggctgcaggaattcggcacgaggaaaaggagacttctactacactgggtgacagaaagcacaatagagatttccaatgtttctccatttgctgggactgccccatcgaaaaaattcatccaaggacatctcgccaacatatcttttcgaaaactgaaatttgcaggtcgtatcggttgtattacaatggattcggaataatgtgaggaccgcgccattcatcttttggataacgcaattttcaagaagaactgtttgagtgttacaaaagcgattgatttaccgaagtgcccaaaaacggtttcagttgcgcaaaccgatgaagctgaaaagagttgcaaaatgctcgttactccgctcttcgatattccctatgaagaacagctcaaaatcaaattcgaccattccaaaaaagtgttggaattacttcaaaagaaattgacgcaagcgcacgcaacgaattctttaattgcgaaggaatccctccctaaaaatgttcttccctctccattaattgaacaatatcgcaacaaatgcgaattttctgtcggttattcgtccggcgacaaccgttctgcggtagttggttttatgagtggcaaaatggcgaacagacagtccaatgttttggcgccggatgagtgttcgaatctcacccgaaacactcggtcaattgtccgccattttgaggcatttgta

SEQ ID NO: 96034 - DNA, 475 bp, Heterodera glycines
caattgccaattgtcccttccttttcgaccgttttttctatttccgtcgcttttcctcccctcccaaaatgggcgaagttcgctttcactccgattacgtttcctccaaccgcggaatcaccaaaatcatccaaattgtgctcggttttgtcgtctgttcggtgctttgttcgaattggtatggcgggtacagctgtttcggggagggccgcctcggttatgtgagcggattgaactttgtctgtttgatgattaacatcatccttttcctgctcaatctgttcaacattcgtccactgaaacttgaacaattgtacaatgtcgccgccgcccttcttctgctcgtcggcatcgtccttctgttatggtacatgatacagtactcttactggaacatttggatgataatcgcagcggtctgtgtgctgatcatctttttgctctttcaatgggacttcaaagggaaccgcacaat

SEQ ID NO: 96035 - DNA, 550 bp, Heterodera glycines
aaagctggagctccccgcggtggcggccgctcttcactagtggatcccccgggctgcaggaattcggcacgaggcagcaacaaaatcaccaatccctggcgtcattcgacggacttttgttcttccgtcttgtaaaggccataagcaacagcagcaggtgtccataggcgacgaaaaggacggaaagacaacgacacttttggtgccaatgtttagccaggagctcgcttcattgcttgcgcctgaacaatcgactgacttctccattcggcttcaatccaaatctaacaattgcatttcccttcgcgttcaagtttgttgtacccttccttcaaaatcagaaaatgaaggtcaaccgttggaagagcctgccgaattggtgcagcactttcccatccgttgcgttgatcctttcgaaccgaaaatcgcaattttttgtgaaaatggaggaaaggcacaatgtttggtctttgggcaaaagtttcgggtgcaattacaactcaaatgcaacggaagagtggcagtgcataatgtacattggaaattgaat

SEQ ID NO: 96036 - DNA, 547 bp, Heterodera glycines
cgtttctccaaggttttatcttttatcagtgccatttgataacataattcgcgcacattatgcttcggccgccacatttcccattgcttttgactgcgattgttgtcgtcatttgtttactctccggcactgcaaatggcgacaaaaacctgttggacgagctgcgcgatttggacattttccagctaaagagcggcgtttcggcgtgtccattgctcgtcggcgagcgatgccccgagtcgagtccgctttactacttcaaatgttgcggtgatctctactcgagctgttgcgttcggttgcaggattgggctgtcggcgtcatcgctcttctgatcgtgctgattttggtcgctgccttcataaatctgatccgctgcatcttttgtgcctgatccgtttgagtacgtcggatgaaacaattgaggacaaagcagtgaaattgttgtaaattcaatttccaattgcaacaaattctgggatctttttttccatggcacttaattttgtttttctttgagtgattccatcaatacattttttcatt

SEQ ID NO: 96037 - DNA, 476 bp, Heterodera glycines
cttgacagtgcggatgcggagaacctggccttgatcaatcgtcccgatttgggggtgaccttcaccaaattgcattgctggcgactcactcaatactcaaagtgtgtgttccttgacgccgacacttttgtggtcaaaaattgcgacgaactctttgaacgacccgaattctctgcggcaccagacgttggatggcccgacattttcaacacaggcgtctttgtctttgttccctcggagcaaacatatcgcaatttgcttgattttgcactcgtttatgggtccttcgacggcggtgaccagggacttctgaacgcatatttcagcacatggcgtgaatcagatgctacccaccgtctcccgttcacttacaatgtcacgaccgttgccatttatggctatgccgccgctttgaagcgtttcgcgccgaacatcaaaataatccattttcttggcaagcaaaagccttgggctct

SEQ ID NO: 96038 - DNA, 475 bp, Heterodera glycines
aggcgcgaaggaagcgaatcggacactttggagtgcgagatagtcgacgacagtcgagaaagcgaaagaaattcgaatcaccgcaagccgtaccgcctgccgcgaacaccgacttcattcagacagcccggggcgcaattcggcgtcagtcattacgcgatcggagtgggatgacacttgcacggcttgattcacaacgtgaagggtccgacctgattaggagttggagcaaggaggatgtgtccaatgaggaaatgtctgcgcatcatttcggcaacgggggaccgtccacctctcaccagccgacagcaaatcagcaaagacgcgactcgccgcctaaaagaatgcagaaacaatcgcagcaaaagcagaagcaaatgtcgccagacgagtggtttaagaagttggaggccgaatcgggcggccttcgagacgaagaggaggagcaggcggagaaagacgtgctgaaagggag

SEQ ID NO: 96039 - DNA, 732 bp, Heterodera glycines
aacagatccctataaaattcaattcttgatcaattcccctcattcatcgcggcggtcatcaaaaaagaggaagcaaaaaaaacaaaaatgattggcatgatgaacaacgccggcatggacggacccgcggagtttttcgcgggccgtcgcgatttgtgcgaattgcttgtgccggcctcgtcgttagcagcggtggacggccaagcgcagccccacgcgccaccgccgaaggtttttgagccgacgcagcagaaaaaactgagctacacgggcagtggccgacggttggtggacggaaagccagaagtgaacgaaacgccagaggaaatgtggcgaaaagcgatgctcagggcaacctgcacaagagcagtgaaagaaatgcttggtgagaaacgccgcaaaagctccaaactgagacaattgatcagcagccaaagcggatcaattcgaaacttttttggcacagccaaaaaccttcgccatcggaccaccggcgccaatcaaccgcagcaacaggttgaggccggtggcaaagtgatcagcagcagaacggaggggccgggaaagcccgatcggatgatcatctgatcagagtaaggagaggaggagaaagacagcgcaactgaaagccaatcagtgatcagtggagaaccaatcgccttcaccgaacaaccaaataacctcacatttctttcgcctttccctcaataataaactgaatacattctcaaa

SEQ ID NO: 96040 - DNA, 958 bp, Heterodera glycines
ttgaggcgcactttcaaaagtttaaatgcttttccaacgacaaaaattgccaaaaatttgtgccactcttttcccaaaatgccaaattcggcgatcgtccaactttgtcgagttggcaggcttcaccgcctccactgactccaagcagtacgcggctaaaaaactgttgttgctcaaaaacggcagctcccgaagttacaacgacgtgaacgtggcagccggacgttttgcggcattgctcaacaaaaagtacggcattcagaagggtgacactgtgttatgtcgaacttcaaaaaatgttgacgcgttggcactttatttggctgtccttcggcttggtgccatttacgtgccgcttaatcccacttacacaaaacgggaaacagagcattttgtgaacgacgctaaacccaaagtgatggtttcgcttaacgcatcggaggacgcctcatttactcagtccggctttgatgttaagcatgtgctgtgtgagaagcgattggcagaggaggcactgaagcaagagcccagctgtgaggttgaacccgcagaaaaggacgacgtggcatgcattttgtacacaagcggaaccacgggaagaccaaaaggtgccatggtcactcacggcggtttggtggccaatgccgagacgtgcactgacatttggcacttcagcgaaaatgatattaatttgcacgttttgcccttctaccacatccacggcctgttcatcagcttcaactgcacgctaatgtccaagtcgagttgcattttcttgcccaaattcgacgtggacgaaacaattgcgtatttgcccaaatcgaccgcgatgatgggcgtgccgacattttacgctcggatggtcgaacacgcgggactgaatcgggccgcggggaaaaacatgcgcgtgttcatcagcggctccgcgcaactaacgccccaagtggttgagaaattc

SEQ ID NO: 96041 - DNA, 560 bp, Heterodera glycines
aggcgcacttccatgggccaacgtgggggaaatgaaagcgataggcgaggcaaagatcaaacgccagaagaaacaaccggaagccgttcgacgccaggcaatcgccgacttgctctccggatgcccgaacgagttcggccaggtcctcaaatacatcgacgacatgaagtacaccgacaagcccgactacgactggatcatcgcgacattgcgcagcagcctcagcaacgccggcgtccaggaattcccctacgactgggagacgggcaagcgcaacgcggcaccgggcgctggaggcggcggaggaggagggggaggagacagctacttcaactgatgagccgtgcagcagcagcagcagcagaagaatcgccaagaagcgtcaccgtgctgaattgatcatatgaccactattactgtattgtatgtattattttgtgtccatgctgccatccccgatatacacatgtattgtattgttgacatatgtattgattgaaattgttgttgcataactgtgtttgtacatatgacttttggcgaaataaaggacattttgt

SEQ ID NO: 96042 - DNA, 480 bp, Heterodera glycines
aaaaccaatcgccacccctggcgatggccccctcacaaatggtcaaaagcagccaaagtcatacggatgggttctgccagttgctccaccatcagtcacgtcccccgtgcgcttcgtccagcagttcggcttcatcttcgggctacgcgtccatggttaatagcattgtcaatccatgcgcaaatcgtttggccggaattgacgaggaggaaacagcgattggagggggaggaagcagcagcagaaggcaatcgacgaccattggggagagtggggaaaatgagggcgaagagaaagaaacagcggtgcaagaagattggcaagcagttgctgaagaagagcagaagcaacaacagaagggggccatcggcgcatttgcgtcgcccgaggggacaaattgctgtagcagcaaaaacccattgatgcgagatgattttcgccaattgccttcctctaatggactcgtcgaggcactttccg

SEQ ID NO: 96043 - DNA, 537 bp, Heterodera glycines
aaataaaacaaataacaattttttctcagactctttcaccggtaccgggtccgccatcattgagaccacgcgcacgagggactaccgagaggtccgcaagaggaggaggacggagcaggacaaccgacaagcaacattccatcgacctccaaacaacagaaggacaaagagacgagcggagattccaaaatcgcattgccacccccaaaattggccataatcgttgaggccaccgaatcagcaccccgcggagtgatttgcccgacacttcctcccatttgttgcgcaatgacactggactggcgtcagtgtgagcagcatcgaatcggtgaaggtggtgtttacgtgccattccccggcggtgaacaatcgacgtgttcagaccgccaaaatcagtccgtcttcaccaactgttttgggaaccggaggacgggaaaattttgaattgagagccgttctgcgacagtccttcagcacatggttgacgtgcgcaagaagctggagttggaggtcaaaattgaccctgccatttttgtc

SEQ ID NO: 96044 - DNA, 624 bp, Heterodera glycines
caatcgtcttcgcgctcttttaggccctctgatgacacggattcgcggggaagctgttcgtcacttttgatctgcttttcctattgttcttcaatcatatgtttcccttgcgccatttgtctttccatccgggtcattcagcagtatgagcgcgctgtgattttccgtcttgggaaagtgatgcgcgaggcggcagggcccggtctgatcttcattttgccatgcattgatgatttccgttgcattgatatgcgcacgacttccttcgacgttccgccgcaagaagttctgtccaaagactccgtctccgtcactgtggacgcagtgatttatttccgcgtgttcgatgccaacaaagctgtcgtcaatgttgagaatgcgacgatgtcaacacagcttttgggacagacgacgcttcgcaacattttgggcaccaaaactttgtccgaattgcttagcaaaagggaccagatcaatttcgaaatgcagcaagtgttggacaaactcaccgacgcttggggcgtaaaagttgagcgcgtcgatgtgaaggacgttcgcctgccgaaagatatgcaacgttcgatggccgcgtaagcggaggcggcgcgcgaagcgagggcaaag

SEQ ID NO: 96045 - DNA, 469 bp, Heterodera glycines
tgagtattacgctaccaggtagagaagataatgatatgctaatccataacttagcgattcatggcatagccgctgccgaggggagtgcttgtagtagtggtagtgcgattgcttcacccgttatagccgcattacagggggaacacaatcaggcaatacgcttttccttcagcaagtatacgacccatgaagagattgcaaagaccgttgaagtattgcggcaccttgccttgtaaaaaggtgctaaaaaaagaaaagacaaaacgacgagacccgagaaagcaaaagaaccaaaggaagaaagcagaactgaggggaaccacgaaaaaacactagaagttcaaggaggatagggaagcgacataaacaaaatggttagagtagaacacacaatcaataggagagagaaaatcaaagagaagaaacaggactagctaagatcacaagcaaaataatagatagccaaaat

SEQ ID NO: 96046 - DNA, 790 bp, Heterodera glycines
  unsure (1)..(790): unsure at all n locations
tcgtagaggcgttgaccgctcatttgttttgtgttgtgctgccagcgccgaccattcgtctcagcccttcccatcatttcaaattccattattcccgtgattgtccaaaatgatcggcggaatcctggaagatatctggacgagatttatcgacttggtggaggacatctctgatcagtacgacgattctgagcaaccaacaatcatccaccacgaaccggcaacaccaacaacaatgtttgacaactatggtccgattgagaagattgttgtggtcggcaccggcctcatgggcagtggcattgcgcaaattgcggtcgagtcgggcgtcaaagtgtgcctggtgggccgtagtcaagagaagtgtgatcagacccggctgaagatcaacacgggagtgcaaaagtcgatcaagaagcgcatggcaaatgaaactgccgaggcacaacagcagttggtcgaggcgacaatggaaagccttgagctggtgaccaacttggatgaagcgggcttgtcagatgccgacattgtcattgaggcggtggttgaaaatctgaaggtgaagcagaagctgttcacggaattggaagctaaggtcagcgagaagtgtctattggtcaccaacacttcgtcctttctgctcgaagacgtatcgtgcaaaatgggcgccgccaagcgcgagcagttcggcgggttgcatttcttcaacccggtgccggcgatgaagctggtggaggtggtgcccggcaatggcaccagcgacgcggcgnacgaagtgctggccaacttt

SEQ ID NO: 96047 - DNA, 506 bp, Heterodera glycines
aaaatgcaagagacgcaaataattgtcggagtggcctctctgtgctccattttggccatcctcgccaccgttgttgtggtgccatcgctgtactcggagatcaatgagatcgccaccaaagtgcacgacggtgttcaggctttccgcgtggacactgactcggcctggaccgacctgatggacttacaaatcacagtcacgccgccgtccaagccgcgtcagaacccgttcagctccatcttccgccagaagcgtcagttgcccggccactgccaatgcgcgggtgtgcaacagccgaactgcccgcccggcccaccgggaccggcagggtcgccgggacagcctggccagcctggacagcccggaggacctggacagcccggagtaccaggacaacaaggtccgccttgccctgtctatacgcccccgtgccaacactgtcccgcgggaccccccggacagcccggaagccaaggaccgcaaggccgccccggagcacctggtca

SEQ ID NO: 96048 - DNA, 476 bp, Heterodera glycines
ggaagctgacgcgggtctgctcatggctgggttcagagctgaactatgatcccgcaaagatcatgctttataagaatgtgttacatggtgacaagcccggcatgtggataccgcaccaacaattgttggaactgcaggttagccagatgctcaacctgaacacaggcagttacgacccacgttttcaacgcatcttcaaatttttctatgccaaattgccacttccaatggtcgactttgataatcatgcacatgtattgctgcacttgatgaatgaaaaattccagctaacggaaatgagtatttttgtggataaaaacgcaagcgtgcaaacactcctggatgaggcgagaaaagagttcaggttctcgtcgatggggaccaaaactcttagacttgtgcaagcctcggccgacgggacttttagagtctatcaggtcctcaagaacgacattctttacaaggatatccaactc

SEQ ID NO: 96049 - DNA, 535 bp, Heterodera glycines
ttccctatttgaatcccccgggctgcagtatcaggcacgaggtgacagactccttatcttgacaaattgcctcccctccgaattctttgcaaattactccttttctccccaaaatatggactttaacctgaaaagattggccggggaggcgtccgggatgttcagccgagccaaacaactaaccgaggaaaagctattgaacgcggagaagacggaacttgaccctcatttcgagcaattgctcgccaaggcggataaaacggaggaacagtcgaagaaactgttgtccgccatggaggcgtatctgcagccgaacccagccctccgaatgggcgacctgttctatgaaaagatggaaatcacttcgccagcccccaatcgctcaaacactttggaataccttagcgaggcgatgcaggaggctgcccaatcctttggcaccgaaacgccattcggaggtgctttgcaaaaaattgcgcagacggaagccaaattgggcgctgccgaaagggaaatggtccaaacgacggccggg

SEQ ID NO: 96050 - DNA, 656 bp, Heterodera glycines
cacctaccaccacctccggcattgactggcctcctaacggtgaacaaaccgaaggtgttagaaaaattgttggagggacaagttcttgggcctgaatcggctgtcatcgaaaatggaaaacgcaaaacaattccaatttgtggacgtccgcttggcattcgtcgattcaattcacaacaattcattgttgctgacgccgtgcttggcttactgctcatcaattttgaagaagagacaaaagaagtgctgttgccaagtataactgttgtggacaagaaacgcttgggcttcccagacgatttggacattgtggacaatgacacaattttgttcaccgatttgtccgcaaaatatggctacagtgattgtgatttggcattttttgagcacatccgggacggacgtctgcttgaatacaaagtgtccactggtcaattgcgagttctgatggacggtttagcagttgcgaatggtgtccaattgcacccagacaaaaattctgttttggtatgcgaaacggccatggctcgtatacaccgctattattttgctggccccaaaaaagggatgcagcaaatttttgtggacaatttgcccggtttccctgacaacatccgaatttcgcgcagcgcagattcattttatgtggcgttacc

SEQ ID NO: 96051 - DNA, 404 bp, Heterodera glycines
  unsure (1)..(404): unsure at all n locations
aagagactcacattgttctcgggattgcctcggtgtgctctctgttggctatcatcgccacagtcgtcactctgccatctctgtactcggagatgagccaaatgaacagcaaagtgcgcgacggagttgaggccttccgcgtcaacanccgnactcggcctggactgacttgatggacgtgcnaagtggtcgtgacgccgccgntcgaagcccccggtgataaacccccttcaaacttcatctttcgtgcccaaaagcaactgcccggaacttgccagtgcctggcctcaacagcaaattttcccctggtcgcccggccttcggccccctggaacccgacagctggaacccagaaacccgaaaccgaaagcttgcaaaacctccccttgcggccaaaatcccct

SEQ ID NO: 96052 - DNA, 300 bp, Heterodera glycines
ctttactcgacaggtcggtgatccgtttccacggattaatcccatcgaagcaaagaaatcccttctctgcagagagtgcgctgacttcatttgttcagcgctccgccagtgtctctaatcgtcagtccccaatccaaaagaaaagacgccccatcaaaagctgtgcaggagtgtcgtgcccacccacacagcccaatggaaccccaaaagcagccgataatggcatttgacgccaacttttagtcggaggagcaccgtcagctccgccgggtcgcctttttctcgattgtgatctccacc

SEQ ID NO: 96053 - DNA, 499 bp, Heterodera glycines
gaacccactcgtccattatgagggaactgccgaagaaatcatttgggcatgcgatggcaaattggatgccatggtggtcggcgccggcaccggcggaacaatgactggaatagcgaacaagatgcgacaaaagcttccgaattgcaaaatcattgccattgatcccgagggttccattttggccaatccgacaaatcgccaaaagcacgcctacgaaattgagggcatcggataccactttgtgccgtacaccactgatcgcaatttggtggacgaatggatcaaaacgaatgatgcgaatgcctttcgcaccgcgcggcgactgatcagcgaggagggattgctgtgcgggggttcttccggcgccaatgtttgggcggcgatggaagtggcaaaaacgatgggcagagggaaacgcgtggtcacaattctgccggacggaattccaaattacatgagcaaattcatcgacgacgaatggatgatagttaagggattt

SEQ ID NO: 96054 - DNA, 476 bp, Heterodera glycines
gtcttgtcctgctcgactgttgcttcattgcactcgcctccacctccccaccgctccaccaccatggccccgaccgctacctcgtcgcaagagtaccgtcaacagacgtacaacctgccgcgcgccatccgcatggtgatcatgggcccgcccggtgcgggcaagggaacgcaagcccccgccatccggtcgcttttcggagcgtgccatttggccacgggcgacatgctgcgtgcggccgtgtctgctggtacccccttgggcaaggaagccaagaaggtcatggacgccggcggcctcgtctccgacgaaatcgttgtcggcctgatccgcgaaaacctcgacaccaacccggattgccgcaacggcttcattctggacgggttcccgcgcaccgtgacgcaagccgagaagctcgacgacatgcttgccgccaagcaccaggcgctgtcgcacgccgtcgaactcaagattga

SEQ ID NO: 96055 - DNA, 864 bp, Heterodera glycines
gtcacaaaccatgggaatcaattgaatgcccaattagttttgatacgccgtgctgctgagtctggagacggacaacaaagcttgttgcacgtgtctgtaaggaggtttctggacgagaaagtgttcccggcaaatttctgaagtcgctggaaacttttcaatatttgtgcaaccagtgtgcaaaaaggtggaggaacagtcggaagaaagcgcaactcacaaaaaagaaggacgacactgagaaggagggagccgaggaacatcagcaggcaacaacatcgaaacctcaagccgacacacacgcgaaggaggaaagtgacgaggcaacactggttcggaacatggtcgatgagctggcgccactttgggaggagctgagcaattgcctgtcacttctcgagaaggccgaagattcgcaacatgcggttttgtgtcttcaaaatgctgccgaggcgtttttcctctcttattcgttggtgataccgcaaactgctcaattggctccatctgcactccctgaaactgcaccaactggcggttcttcacctcagttggcctcctcttctgcgggcggcaactccggcgaggatgagctgggccgataccagaaggaaatgttcacttttgcggaaaaacatcgatcggtgctcaatcaaattttacgtgggaacacgcagaacctggagggaagtgcctttgctattctcacacacttccccaaattgttggactttgacgtcaagacgaaatacttccacaaagaactcaagaaaatggacgagaggagcagatatcgtcacgaagacgttgcaatccgtgtgcgccggtctcatctgttcggtgacagttttcgcgagctctatc

SEQ ID NO: 96056 - DNA, 445 bp, Heterodera glycines
aatgcaccaaggcataccaaatgtgccaacagtgtcgaacaacggaacatcgtttgggcgagtggcacctccgggaatttcggatacgatttctacaactacccaatttactataacagcgacaaatttaccaataacttcttttgtcacgacacaagatcctaacgttagaagcgaattcgaaaaagcggatgctcccgaaattttgaaaatttttattccacctaaacctccagcggtgccacaagaagcaaaaaagatttttgaggatttatgtgccggagggaaatgtttggtgcaaaaacctgaatttatacagcaaaaagcggcggtagagaaagaatcagagcaaatcgaactgaaattaaaccctgggaaaagtgcggagcaagtgaaaagggaagtgaaagtgcgcatggccaaaacgcagcagctgaagaaggca

SEQ ID NO: 96057 - DNA, 632 bp, Heterodera glycines
gaaaaaaacaattggtaggtatttattcagcattttgtgacatcaatcagttgtacaaagggcaaagtgtgctaattgcagcaaaaaatgaacagacgttggatttgtggtgacgtgtggatggacattctgccatcttttgaccgtcctcaactcggcctcaaaatggcattgctttccgaccgtttcgatgttttggtggacaaacatttcgacagaaaaagcgaattgacaatttggagacgtatcagaattgacaaggacaaaggaccaaaagcgaaactgtctgttctgatcgatgacaaatgcgtggcatttccattgccggaccattcgctgcccatcaaaattcgctttaaggagcttcagattgattacattggccattccgtgatcacatttttgagttccaaccagcaaatttgggacagaaaaggcaccaatttggatttgtttatattcgcgacagatcacaacaatattcagtcgatctgggatgttttggcccgagaaatttggcccatttttgcgacaaacattcgccatttggcctttcgcaatggcgatcatttggacaatttgcgcagttacacttcaccaacaattctcactgatcttgatcaattgaattc

SEQ ID NO: 96058 - DNA, 795 bp, Heterodera glycines
agaacataattcacttcttcttctgctaaaccctccgcaacagaagtcaaatttcagaaaagaaaatgcacgaagcgaaaattatagtcggaattgcttccctttgttcgctggccgcgattttggccactctcgtggtgatcccgcaactgtacactcaaatcaacgaaatgaacaaccgcgtgatggacggtgttcaggctttccgcgtgaacacggattccgcgtggactgagctgatggaggtgcagatcagtgtcactccgccgacccgtccgcgagagaatcccttcaactccattttcctacgccaaaagcgccagggattgcctccccaatgcgtttgccaactgcagcagccaagctgtcctcctggtcctcctggcccgcctgggccccccggaacacccggcgagcccggcggcgccgggcagccgggaagcccaggacagcccggacaacaagcaccgccatgccctccgcccgtgtcgacgtgtcagaaatgcccagctgggccgtccggtcagccaggaagccaaggaccgcctgggccacccggaaacgatggacagcccgggcagcctggacagggcggcggacaaggcccgcctggcccaccgggtcctcagggacagcctggccaacccggacaaccaggaggacctggccagcccggtcaacccggacaaccaggaatcaaaagcacgacaattcccggcccacctggacctcccggaaacccaggagcaccgggccagcccggcagccccggacagcccggaaaccccggaggac

SEQ ID NO: 96059 - DNA, 1126 bp, Heterodera glycines
gtctttagctgatcagtgatcactgtcatatagagatacagtgatattttcgtttgttatgagtccgattgaccctgacaaaatggcattgctaaagcgccttttccccgtcctcggcaaacaccttcgcaagggcgactgtggcaaaatcggagtgatcggcggttcgcccgactacaccggtgcgccttatttcgcttcgatcaccccaatgaaaatcggtgccgatttggcctttgtttacgcccattccgacgctgctccggtgatcaaaagttacagtccggaactgatcgtttaccccagcaccgatttcgccacgaatagacacagcattgagcggttggacgcgctggtgttcgggccggggcttggccgacagaaacacacacaaaatttgctggcggacgtcgtaaatttcgtcaggagcaaacaaaatctttgtttggtcattgacgcggacggtctgttcttcgtcaaagaatgttcgcaactgttcaaagggtgcacagacaaagtgatcattacgccaaaccacagagaatttgttcggctttatacccaaatgttccctaaccagcagaagggagaggacacggacgaattgaaaattcaatgcgaaatggcggaacaattggcaaagcatttggaagtgactgtgatgagaaagggagagattgacataatctccaacggttccgccgcccaaacgcgaattgtccaagcggaaacttcgatgcgccgttgcggtggccaaggcgacattctcagcggcgcgacggcacttttcgcattttgggcaaggaaagcctcagatgccgacatttattcctccgagcatttgctggacggggcggaagccgcttcgcttttggtgcgcaacgcatcgctacggacctttcagtctgtcggccgatcgatgaacgctgccgacgtcattgaccacattgtgcccgttgtccgcgacattgactcggaactttcagcaaaagctgcgacaattacaacacgttgatttgtgtacgaaatcttttcaaaatttatttactttcctttaataaattctttttattttgactattgtgacccgatttatgcaaaaataaaaaagtttgctgaaaaaaaa

SEQ ID NO: 96060 - DNA, 475 bp, Heterodera glycines
ccttaagcctttgctaatggaggttgaccatcaatcacttgacagcatttgcgaaaatattttgtcaatttctcgtcatttggatcttccgctagctgataatctcgacaatgcccatttgtcactcttcaagactaagctgactgaatttgctaaagaaagcaaaaaacaaaaagccattccgagtttattgcttccgtcgaatttgtcgttgaatgacaacgaatgggccaaatttggacagtacgtcgacttaatgaatgccgattatgcggagagggcattattgctgaagagacgtgccgaagtgaccatcgattcttttctttggtcggatcgcgtcaaacaaattgaggacaaaattcgacaggttttggaagtcggcggattcacaaatgttcattttgaccctgtccatgccgacgatgttttggccgctaatttggaccttttatatgtgacgaaaacaagtgac

SEQ ID NO: 96061 - DNA, 476 bp, Heterodera glycines
gttgctcctcgtcctctgtccttttgctcgcgcgctctggcccccacactctcaaccacaccccccaccatccaccatgtcggacgaaatttctgcccttgtgattgacaacggttcgggtatgtgcaaggccggtttcgccggtgacgatgctccccgctcggtcttcccttccattgttggtcgcccccgccaccacaatgtcatggccggcatgggccaaaaggactcgtacgttggtgacgaggcccaatccaagcgtggtatcctcacgctcaagtaccccattgagcacggtatcgtcaacaactgggacgatatggagaagatctggcatcacactttctacaacgagctccgtgttgcgcccgaggagcaccccgtcctcttgaccgaggccccgctcaaccccaaggtgaaccgtgaaaagatgacgcaaatcatgttcgagacgttcaacacgcccgccttctacg

SEQ ID NO: 96062 - DNA, 642 bp, Heterodera glycines
cctcgtgccgcgacattctgacgcgtgagactcgcttcgccgaactgttgtacgcacacgcggcacagcttgcgttggccgagccgcgtgcgctcgttgacgctttgttggcactacagcagcaacatgcgtcgttggacgtgttgcaattgttgcccgccttccaacaatgcctggacaaacgcctgccggaccggcaagcgttggcggatgcgattttcgtttttttggattatttccctctccaaaatgcgtctccaccatttgtcaacttcaccattcatttgtacgccgtttttcggccccaaaaactgctcgtccatctgcaaaagtgcgccggcgagtcttcttcccaaccaccgtccgctttgactgcgagacgcactcacaatcattgtcatttcgatgtcgcccaagcacttcgtatttgcacagaaaatggcagcattgcacgagtgttctgtgtttttgctttgcctcgagcgtctttacgaggaagcgacgcgtttggcgttgcgtcacgttggcctcgcgtgtgccaaagagtgcgcgcgacgtttggacgccgactcagccgcagcagacgcattcgccccaatcgggcatttggcgtcctttcatgggccggtggatgaggaggat

SEQ ID NO: 96063 - DNA, 277 bp, Heterodera glycines
  unsure (1)..(277): unsure at all n locations
cggaggagtgttcttcgaggacggcacacgaagacgttgaaaaggcacgaacagtccaaatgcaacaggagaagaagcggaagaagaacagtcactcccccgccccgcccctctccccactttccggtgtccttattgttcttattttttgtagtttccccaattcatccaaatttcgtccccaaaaaactgccatttgttccctccttcgatgagaagcgatcagtgatcactatccgaaattgcaaaagatcagcaaataaaaaaggatagcncg

SEQ ID NO: 96064 - DNA, 479 bp, Heterodera glycines
caacaccagtgcgcgccaagctcgtctacacatttcgtcgcgacaactcatcacttcatcatgagcgacatgagcgcctacatgggatccggccccgccgagcctgcaccgtcgtccggcgccgcggaagcctcttcatcgtcaggagtcgcgagcgcctacatgggatccggccccgccgagcctgcaccgtcgtccggcgccgcggaagcctctccatcgtcaggagtcgcgagcgcctacatgggagcctcgcccgcgtacgagccgccagcgccggagaagtccccggatcagagcgcctacatgtgagaagatgcaacaacgaccggcggatggatggacgaaacctgaagagcgagcgacctgtcagaagatgcaaagataaagaagatgtctcataatcgtgatctgtatttattgatgtattgtacatttgtatgcatatatcatttgctgtgtattatcactttatttcc

SEQ ID NO: 96065 - DNA, 476 bp, Heterodera glycines
ccagccttcaactcaacgcaacatcaacaccagtgcgcgccaagctcgtctacacatttcgtcgcgacaactcatcacttcatcatgagcgacatgagcgcctacatgggatccggccccgccgagcctgcaccgtcgtccggcgccgcggaagcctctccatcgtcaggagtcgcgagcgcctacatgggatccggccccgccgagcctgcaccgtcgtccggcgccgcggaagcctctccatcgtcaggagtcgcgagcgcctacatgggagcctcgcccgcgtacgagccaccagcgcaggagaagtccccggatcagagcgcctacatgtgagaagatgcaacaacgaccggcggatggatggacgaaacctgaagagcgagcgacctgtcagaagatgcaaagctaaagaagatgtcccataatcgtgatctgtatttattgatgtattgtacatttgtatgcatatatca

SEQ ID NO: 96066 - DNA, 693 bp, Heterodera glycines
agaaagattgtttcaatttgacaatgacatcacaaaacgaaggagccgtcccggctgaagagaccaaaaagctggtcaaggagaaggacgaagccacggatggcttttacttccaacaaacgatgtaccgtatcagagacccacgcgtgtccattcccttctactgtaacgtgctcggaatgcggctgctcaagcaattggacttccctgagggaaaattctcgctctttttcatgggctacaaagatttggacgaaatcccttcggacgatgcggcccaaaagaaattcgccctctcaacccattcgaccatcgaactcactcacaattgggaacatggtacggacttcaagggctatcacaacggaaactcggaaccgcgtggattcggtcacattggcattgctgtgcccgacgtggactcggcttgcgcgcggtttgagcaattgggcgtaaagtttgtcaaaaaaaccgaacgaggggcgcatgagaggcttggcattcatcacggacccggacggctattggattgagattttcaatccaaacaacatgtgaaaaacgaacccaaaagattgagaattggattttcccattggcgaagcaatcaatttcgaaaaatcacaatagagcctagacattatttatttttatttataatcgaataaatatttatgacttgaaaagaaaaaa

SEQ ID NO: 96067 - DNA, 853 bp, Heterodera glycines
ccaagtttgagatttgtctgatttcaaattggattgaaacttgagagtgccgatcttaatcgaattttgaagataatttcagaattcccatatattctttcgtaaaatgccccaaattttggatggaataaagcttgactttcgtgatgttttgctaatgcccaaacgttcacagctcgccagtcgttcagaagttgacttgaacagagaatttgtttttaagaactcgaaagcgacgtacacgggaattccaataattgcatcgaacatggacacagttggcacttttgaaatggcggaaacactcagccaatccaatttgttcactactgtacacaaacattacagtgttgaggaatggaaggaatttgctaatcgcgtcagaaacaattcgaatgtgctcaacaatatcgctatttcgtccgggtcgcgttccgatgaccttaccaaaatgcgtgacatttgcgacgccgtgcccgaaataaaattcatttgtctcgacgtggcaaacggctattctgaaactttcgttgactttgtgcgcaaagttcgggaggaattccgcacctccacaatttttgctggcaacgttgttaccaaagaaatggtggaacagctgattctgtcgggtgccgatgtggtcaaagttggcattgggccgggcagtgtgtgcaccacgcgtaaacagactggcgtcggttatccccaattcagcgccgttttggaatgtgcggatgcagcgcatggactcaacgggcacattatcagtgacggtggcacaacatgtgccggcgatgttgcgaaggcatttggcggcggcgctgacttcgttatgattggcggacaattcgct

SEQ ID NO: 96068 - DNA, 485 bp, Heterodera glycines
tggctaatgattctcgcagttcttcgagcgcttcctcccgttctcgctcgcgtagtcgcagtcgttcgccacgccgtcgcgagcagcgtcggcgccgctcgcgttccaccttttcacgttctccatcacctggccaaaaacgactgcacatcggcaatttggacgagtcggtccgtcgtcgggacattgaagacgtttttggaaagtatggacggatcagcgactgttggatggccagttaccctcccttctacgcttttgtcgtgttcgaaaacaacaaagatgcgtccgcctgcatgaaagacttgggcaacacggcgtacatcaaagggtgtcgtgcgcgtgttacggtggctcttccaaggaatggtgcgacttatcgtcgcggaccgccgcctcctccgcgacgttattacgacgaggaggacagtcaccgacgccgtcgtcgttcgcgtactcgctcgccccgtcgtaggcgctcgccc

SEQ ID NO: 96069 - DNA, 527 bp, Heterodera glycines
gtcaatcggtgctgtacctggacggtgtaaaattttctgatatacaggcaacaatacaaggcatttttctcgccgcttgtttcctgtttatctccagatcaaagcccctaaaaacactcgcgaaacaacgaccgatgaccaacattttcaatgtgtacactctgtccaccatcacaatacaatttgccgtccattttgcctgtttgattcacattgtcagacttgctcatgccttagaggagagaccaggaaaaactgagttggaaaaggagttcaaaccgaacttgttgaataccgccgtttatttgatgtccgcttctctgcaaattgcaacttttgccgtcaattaccgtggcagacctttcatggagagtttagttgaaaacaagcccctcttctactcaatcatttgctcttttggtgcaatggtcgcctttgcttcaaatacctttccggatctcaacaataaatttgagcttgtccacatccccgtcgaattgcgtgatacattgatttgttgtattttg

SEQ ID NO: 96070 - DNA, 471 bp, Heterodera glycines
acgggcgaacgaaaagacaccgccacttggccatggcaactgtggccgttcatgtcctgcttgactctcgagttcccgcgcaattccattccaaattcattcactcattcccctttaggtgcatttgtccactctttcggggtaatgtcgagggccatttgtgcattttgccgaacggaaagcccttaaaaagggcaattcgaaaggattttcggcagtttagccatgaagagatggctttgttcctggaagtgatgggccgttacaaatccagtggcctttacactcggctcggaatgattcaccgccgttccggcgttcactcgggcccctccttcttaacgtggcatcgcgagtttctgaagcgacttgagattatcttccgctctcttttcccccaaaataccgacccctccctcggccttccttattgggattcttcgctggacggtgaccttccatcccccgaag

SEQ ID NO: 96071 - DNA, 476 bp, Heterodera glycines
gattgttgccccaacccttacccggacatttgctattacttctccatcaaacgaaacccttcctactacctgttcacgctgatcatgccgtcggcactgatcaccaccattacggtggtcggctttttcacgccccattcgaccactggagaaaatacggagaagtgatgatggtatcggacaaattgcccgccacttccaactcagtgcccgtcctcggccaatattacattggactgatttgcatccaattcacggccacttatgtcacaacttggactttgggtcttcaaatggaaactcgggacggacaattccccgccgtttgcgccgttggcttatgcgagtgaacgcacacggcaattttttcgtgcgccaccttttgggccgcgagttgcgctgcacgcagcagagcattcggaatcgaatgagcaaatttgatcagctgttggaccgggcggacgatcggccgagtt

SEQ ID NO: 96072 - DNA, 616 bp, Heterodera glycines
ttgagagaataaaatctcgtttttggcatccgttggaaatgaaattttcgcttctgttggctttcgcattcgctgtgccattggccaatgccgcgctcactttcccctccattggttatgtccaatcggcggctgtcaatggcactttgacatgcaatggaaagccaacgcatgccaaagtgaaactgtacgacgaggatgacacggacatggacgacctaatggacgaaggagtgaccgacgaggagggatttttccatctgagcggaaaagagagcgaaatcactccgatagagccaaaagtgaacatttatcacaattgcaacgacgacgaaagtcttaacccgctgaagaaagtgtgctacaaaaaaatttccatcgaccttcccgccagttatatcactgatggacccgtggccgaaaaagtgtttccgctgggcacccttaatttggccgggtcgttcaaaggcgaaacgcgcgactgtctcaactgatctgccgaggcggttgatgtaaagagaatggcacaaagaaaggctgaaaggcatttttggccacacaattcttttttcaattttcactcagtcgaataattaatgattctgtcgttggtaaa

SEQ ID NO: 96073 - DNA, 620 bp, Heterodera glycines
tgagtgtccaatgggacaaagttccctatttctatcccatccaaataatccaatttgggctgggacaatacaatttggacagaaaaggggcggaagtgattgtccgaccattggccaacagagcgacaaatgccatgggcacggaaaatgccaacggaacgatggcattgggcgacggcgcgacagtccgtgtcaaactattccgtcgactgccacttttgcttttttctttgaaaacgcatcgaatggacagcgaatttgtgttggaattggaaaaacgccggagggaaggcggaacgatggaaatggcactgttttttaagcattcggaagcaaagggatgcgtgtggagtgatgagagcattaaggccccacgtctctccgctgtgtttaatatcggcccaaaaccaacaatgcgttgggtggattttgttattgacaacgatatttatgtgacaaaggcgttgaaatgttatgtgcccgaaaaaacggactcaaaataaatgcggcgacacaaagggaattgtgccgaaatcaaacgaacgcgaccgacgaaggctttcttccgaaatcgctgctcttcaaaggcccttgtcagcttcggctgcactctctccgac

SEQ ID NO: 96074 - DNA, 854 bp, Heterodera glycines
actctccggtgaactcagctgaaagactgcacatttcgctgttagaatatatcaacgaaaccttcaaaaatgaggatttctaccattttctttctgtccaatatcggtcaaatgaactaattcaaaaatggtccaacaaaatattctacgacaacaaattggtcacttatcagttgacgaaaaacattcacttgcgccaaataataaaccaacaaaatgctgatctctcctctggtcctttgtcctcaaaacaaaaatttctgatcgatggtccgcttgtgctcatcgatacggacaaaggcatttctgacagtaaatggcagaaagtctacagcttgttcaagttgtggtatcccctctctttccgcgagggtcagaatgagcacacgcactccttccacaacattggcgaggctttctgtgccgtccttcacctccacgcgttgaatttattcggcggtttggatttgtcgaaaatcggttgtattacgccgtactcggcacaggcggaaaagattcaaaagttaatggccatgggaagggacgagggaccacgcttcgaagtcagctctgtcgacgccttccaagggcagcagcgagaagccattgtgatgtcattggtgcgcaacaacaaaatgcgcgacatcggtttcctgagagaacaccgtcggacaaatgtggcaattactcgcgccaaacgccaattccttttgatcgcctcttcacgaatgttgaatgtggaccggcttcttagagaactgtacggtgtaatcagaacggatggcctggtggtggggcccgacgctttgctgccaattgctcatgaaatttggcagtgtcatttggaaaggaag

SEQ ID NO: 96075 - DNA, 559 bp, Heterodera glycines
gccaaacacccattcagttgcatcaatgaacaactttatatggacatggccgatcggctggcagaggacggattccgcgaggtcggctaccaatttgtgcacatcgacgactgttgggcggaaaaggcgcgggactcacagggccgaattgtggcagatccgactcggttcccatccggaattcgcaatttgtccgactatatgcacaaccgtggactgaaattgggcatttacggggacattggcacggagacgtgcgaaaattacccgggcagttaccagcactatgacatcgacgcgcaaacttttgcggattggaaggtggactatttgaagctggacgggtgctacatgaattcgtcgatgatgccggacgaatacccaaaaatgggcgtcgcactgaaccgcacgggacggcaaattgtctattcgtgctcatggcctgattatttcgatcacaattttgaagaaaagatcaattacaccgccgttgcctattggtgcaatttgtggcgcaactttgacgatattgcgcgatcgtgggcaagcgtgataaaga

SEQ ID NO: 96076 - DNA, 480 bp, Heterodera glycines
gtttcgctcgacaaacaaacgccgaaactcactgagcaaatgatccgaaaatgccaagttctgcccatcgatttgccgcgtggcattgagacacagcgcgacaaagggatgattcagaacaataacccattctttcgtgctcacggtgttcgtgttgagacgaacatgatgcaagcagaggcgcaacacctttaccctccggcactcggtttctcggcacaaaatgaacaaatcgaaccgaacaatcgtggcgtgttggacttccgtttggctgaccgtggacaaccgttgccccgtcgctatttgcttccgtgtgaatttccggaggtttggactgttgtcatcgtgcaaaattctattcgcatggaccaatgcagatacttttgtgagaatttgatgcgatgtgctcaagcacgcggtgttcagatgggaaagccaagaattgatcctatggaagacacttcgcttaattatgttcgt

SEQ ID NO: 96077 - DNA, 474 bp, Heterodera glycines
attttccaatcacacgtcacagccgcagcatcgttctgcttcatcggtaatcgtcacgcaccatgaggaagttcgcctacttcaaactgtgccaagccgtgctcacttctgtttttctgtggcaaattctctcaacgcaccaattctgtggcgagtttgacgagcctacggccttcttcaactctgcagtctcctccagccattgcgaacagttcacgctcatcggaatggactccaccactggcgaatacggggccatgcccgacaagcagaagtggcacatgcaactcatggcgagcagcggcagtggccaaccaattgatgaacagcaacagaatcacatggacgagttttcgtcaaaattgccgactgttggccgtcactgtattccgattgcgttttctctcgtcaagccctgggttcgcgacaacaaaagtcatctgcagaaggtcgctgatttgtttgccattcaat

SEQ ID NO: 96078 - DNA, 475 bp, Heterodera glycines
gcaagcaccaccatcacatcacacacagccgcagcatcgttctgcttcatcattcattcattcatcggttatcgtccgtcacgcgacgcatcatgaggaagttcgcctacttcaaactgtgccaggccgtgctcacttccgtttttctgtggcaaattctctcaacccaccaattctgtggcgaatttgacgagcctacggccttcttcaattccgctgtctcctcttcctctgctggcggccattgcgaccaacagttcacgctcatcggaatggactccaccactggcgaatacggtgccgtgccggacaagcagaagtggcacatgcaactgatggcgagcagcggcggcggacaaggccaaccaattgatgaacaacaacagcaacagaagaatcagatggaggaattttcgtcaaaattgccgactgttggacgtcactgcattccgattgcgttttctctcgtcaaccc

SEQ ID NO: 96079 - DNA, 608 bp, Heterodera glycines
cgtttctccgctcctcgtcaagtgctcaaatatttctataaacggacaaacgcattttgggacaaatcgatgctccacaaggagcgagtcgcatatgcaaagctccggctgaagctgtacggcgcgttggtgctttccatgtggtatatgtatgaattcgccactcctccgcctgacgtgcgctttgacatacggtggttcttcagcagctcatttgccaattatgtgcagacaaagggtgccggtggcttggacattgcggatgagaccatgtacaaacagttctcattttcgaagggcagattgttggagaatgcgctcgaaacgccggagggacaagcgatgggattgtccgaaaggtttcactcatgagagggacaagcaacgaagaagaagaggaggaggaggaaaagcgacgatcacagaagaatggcactttaaaagcaaaccgagaacagtcacacattctataggccactttcatttcattttgtccaatcctatttattaaatgaaataatatttctatttttttgtttgattgccatttctctttcttcggattgtttttcatttgtttcgtctgctgatgaatgccttttttgcta

SEQ ID NO: 96080 - DNA, 386 bp, Heterodera glycines
ttccgctcactttcaatttcaaaatgttctccgtccgtttcttcgctttccttctgctgctggccgtcctttgcttttccctcgtcgagtgcggtctcatcggcattggtgccactcccattgaagccgcttggtgcggcgtcatcggccaagagtccacccattgcccgggaggtgcccttcacggcggatttcccgccgtcggcggaacatacggatttggccgatagaaagcggcgcatttggatacggattcttttggactactgacaaatcgctgagagtgaaataaataagttgaaataattgaataaatttggatagaatatcaagcttttcactcaaaattgttcatttatttgtggtttcaattacttaatgatctt

SEQ ID NO: 96081 - DNA, 954 bp, Heterodera glycines
gcatttttcggcgttgtaatgtcaacggttgccacggtgatttgcatactcagcgtgccgctggcctaccaaaacttccagcagattggcaccaaaatgcagaatgagctcgagttttgcaagcagcgttcagggaacatactccgtgagctaacgcgtacgcaaacgcttgcccaagtggtcggcatcattggaaacgcacgtggcaacggcgcagccaaggccagaacggcaaggcacctcgtttacggcgaagcgggcgtctcgggttccgccgcgcaagccggcctctgctgcggctgtggcgtgtccccgcccggattgcccggacctcccggcccggtcggacagcccggatttgacggagtgccgggagcacctggacaaacagggccaaatggccaagccggtgcgagtggtggcggatcctttggcgcgggctgtggtgaatgtcagcctgcccaacctggtctgcctggcccgcccggacttcccggtccttccggaaacccgggacttcctggcccgaacggaggccaagggccgctgggaccgcctggtccacctgggcctgatggtcaacctggtgagtctggccagtctggccaacccggagcccccggcagaatcacagggtacggcccgacagtcgtcggacccccgggaccacccggacccaacgggtacccaggtgctcctggccaaccaggactgcccggctcgtttggacagcccggggggccgggacagcccggcgacgcgggaaagcccggcacgcccggaaaccccggagggaacggcggtccgggagttgccggcgaaattggaaatatgggcacatgcgaccactgcccaacgccacgcaccgccccgggctattaaacggaagaaaacagaacggacaaaggaaattcgacgcagaaaacttctattttccgtaggaccagacgaaat

SEQ ID NO: 96082 - DNA, 473 bp, Heterodera glycines
tggaatactatctgaacctggccaaacagcttgtgaatgcgaatgcgcacattctgtcgattaaagacatggccggtgtgctgaagcccgaagcggccaaacttctcatcactgcacttcgtgaccaacacccggatgttccgattcacgtgcacacacatgacacttctggtgcaggtgtggccagcatgatcgaatgtgcccgtgcgggtgcggacgcgatagacgcggctatcgactcgatgagcggaatgacttctcagccttcgatgggtgcaattgtggcttcgttgcagcggacaccgcactccaccggtttggaaatggactcgatttcgcgatacaacgcttattgggagacggcacgtcaattttaccaacccttcgaatgcacggtgacaatgaaaagtggcaactcggatgtgtacaaccacgccatccccgggggtcaatatacgaatctccaattccag

SEQ ID NO: 96083 - DNA, 635 bp, Heterodera glycines
catgtctgaccatttttgggacgaaaatgtcttcgatctgatcgttgaactagagaaggaaggccgccatgtacggcttgattggctgtcgtcaaattcagcgttggtcgaccgctttcaaacggacattgcgcgattgtccgaggaggaatattcgctctatgccgcctccagcagcaaacttcagcggatagcagcagccgaatgcgcgtacaaatacaaccggacggaggagttggataaactgtttgagaaggaccgcgactcggaggcgttgagggaaacaaatgtgaggcactttctgattaatcgcattctcgacgagttccggccgaacatccgtcgcctttctgccctgccaattgagcggacaattgacgcgttttgtttgaatcagccaaaggacattgaacagcacgtgttggatgtgtacgattttctgatggattgcccagaggcaccagcagcggcggaagcagcggcaccgagttaccaaggaggacaggagagcagcggaaccgcagagcaaccgcaggaagcggcagcgccagaggcaccggctgcggcagaagcagcggcaccgagttaccaaggaggacaggagagcagcggaaccgcagagcaaccgcaggaag

SEQ ID NO: 96084 - DNA, 580 bp, Heterodera glycines
taactcagttcaattctccaaccacacgcagtatcccaatgtgaagggccagcggctgaacgaacgcgacttggccgaattgttcgacggaattcggaacgccgatttgcctgccaaatattcgcacattcttaccggctattgcggcgacgcctctttcctccgtcaaattgcttcgatcgttcgcgagtgtcgtcagcacaacccaaaactgacttatgtttgtgacccggtgatgggcgacaatggcaaatatgtgagcagaattaggcatttttgaaaagcatttatgtcaaagtacaacggaattccgcgcgaactgtgctcaatttaccgtgacgaacttctgccattgtccgatgtgatcactccgaacgcattcgaactgaggacattgccatagccaacgaaagggactgtcttcgtgccatggaacatttccaccgagtcaaacggattcgcatcgttgtggtgacttcgggggtgcctgacgaaacgacaaaaaacaaatcgatgatgcattgctacgcatcggaagccattccatccgccgtcgacaccatccgagtgcgctattttc

SEQ ID NO: 96085 - DNA, 512 bp, Heterodera glycines
cttttaataggtaaatacaatgaaatattctttgctccgaccgtttgtgaatcgaatttttacgcccggcaaagagcagcagcaattggtgcaacgaaaccaaaatgaatttggaatggtcaaaacaaacgccgggcaatcggccattttattgcgatttgtcagttggataagcggcagggaacaaattgagcagcacttcagccgattcgggaagataaaggagacgctaatgttttatgacagagtgacgggaatgcaccgcggcttcgctgtcgtccatttcatctcaccacaaagtgcagctcaggccattcaacacaaaccgcatataattgacaacaaattgttggcggtcacttaccacacgccgcccgaaatccgacggaagacgaattagtgggaccgaataaacgaaacatttaaattgaaaattaataacggattaccaagcgagaagcacatgtgctacagacgttgttttatttaaacgaataaagaacaaacggcgg

SEQ ID NO: 96086 - DNA, 638 bp, Heterodera glycines
acgcacagcgacggcgaaccgccgaggattcgctgtcgttggcccatttgcgaaaacactccgcgcactctgtgtaatccatcggtgcttccctacaaagagtacgtctatcacattcggcaacagttcgagcgcagtagggaacggacatccgcgcagaatgcttactcagactttgccgcacaggaagcgatacgacggcacgcatttgccaatttgcgcaaagagattacggaagattcggagggtccggtgacgcgaagcattcgcctcacttcagcgctcattctgcgcaacatttgtcaccattccgtcgccggacgtcgcaaactccgcacgcatgagagtttcattagttggctgtcactctcacacatggaatcagctcgtacattggcacagtgtttgagtgaaatggcgcgacacgcgaacaatgaaacggaaccacaacgaaatgtcattaaaaggaaaaccagctgttcgtctggtgatctacaacagaatcagccaagctttgcgtcagaacaaatggatgacaatgacacggcctaacacaactttcatggatcatttcgtctattgttaattgcaagcgttccttctccgtcgcgaatttgagcaattcgaatttctaatct

SEQ ID NO: 96087 - DNA, 479 bp, Heterodera glycines
gtccaattaagcacaccatccacaaattttatccgagactgttttattgttttcggcaataactccgacgacaccttctccaaatacgcgaatatttgacgagatggacagacgaattaacaaaacagcgcggaacagaacgtgcagcatggtaacagtgacaacaaatggcaggcagcaaccgagaaagatagactatctgatcaagaagtttgatgcacttggatctggacgaccgccgatgccaacaagcgaaagtccgtcgaccagcgtcgattcccaattccttccggtcaccaaatctgcttcaacaaccatcgcgtcggcacttggatctggacgatcgccgatgccaacaagcgaaagtccgtcgaccagcgtcgattcccaattccttccggtcaccaaatctgcttcaacaaccatcgcgtcggcacttggatctggacgatcgccgatgccaacaagcgaaagtccgt

SEQ ID NO: 96088 - DNA, 472 bp, Heterodera glycines
gccaacggaacttcaatttttggacgaatcggttgccgatgaagaggcggttcttggcagtgaaattacgctacaccaacacaaaatggagaaggaagaggaaaccacttttgaagagcacgacgacatgacagctccgaaatcggtttttggttcttcttcatttggctgcaacaaaagggagcactgcaaaagtgatgacgaggattattgtcacagcgcttgtgaagaggggccgacagaggagacaaagaatcattccccgccagaagaaagcagcaaagagaaggagggtgaacaggcggaagacacgggaactgggatgaccgacattgttgaagcagaagcgcttactgaacctggcactccccttcggcagatggacgagacgactaattcccagagaaatgaggaagaaacgtgcccaattcgagaggaggaacagcagacaaagacagaagagaattcgacg

SEQ ID NO: 96089 - DNA, 647 bp, Heterodera glycines
agacattttactcaaactaaattcaaataaggcagttgtccttcggcggcccattgtcagcaaaaaagaagaaggaaaggaaaaatgaggacgaaaatgcacgtggttgtccttggaccgaagaaagtggggaagacttcacttttgaaaagtctgatcaatcagcacgacccaaagccaagcacttcctcgtccgatggccaactttacgttcccaccgtcgaagacactttccatgtccaattcggcgactttcgttccgttgaccaaatgccgcagcgctcacttctcattcttttccatgacactgctggcataacggactttggcagcattgagttgagaaaaccgtaccttcaggttgccgatgcctttctgctcgtttattccgttttggaccctttggctttaagtcaaatggaagcgttgaaaaaatatttggagagggaaaagaacggcacgagcaaagaacggaaggaagtaccaattgccgtggtcggaacaaattgcgaaatgtcgggcaaaaaagtgaacacggaaagtgcacttctctgggcgagtcgtgaaaaagtcaaactgttcgaagtgtccgcgaatgaccgaaaatcagtcgccgaaattgcgcagcacctcagcgaaagactcat

SEQ ID NO: 96090 - DNA, 626 bp, Heterodera glycines
cgggtgtccacctcccatcagttgcccgtgggccaatctcgtccatgtcgacagtcgatttcttcgtcaaactcaaataaacgggcggaaaacaatactttcaggtgcattctttttaaataagggttttttcaccagtcgaattagactaatttcactaacaaattaaaaaatgatattggacagacccaaaccaattggcggagttgcgagtcgctgtcggagtgagccgtaagctcaaaaataattcggtttttgttttgttccgtcagtgttgtccatgtttacaattagctgttgcttattattcgactttgcatttaaattcgcaatttcagccgaagcgacggaggacgcttttccatgagagggactcacaatcagccgaccaaaggacaaccgaaggcgagcgcagcgaaagccgtcgttcagcagcaaagccctgaaatggtggcatggctcagacggaaagagtacgacccgcggaaggcggcggcagaccaaagccaaagggaagcgcagcagagacagcagcagaactctttcatggcttgtcggtttttctccacctcggccaatgccaaaacgcccttcgcccgatggcgtcaaaatcgcaagagtcagca

SEQ ID NO: 96091 - DNA, 686 bp, Heterodera glycines
ctcgattttcctttactagctgtgattctgattttacagactttctttttctcgccatttcttcatggactccgaaaatgcgttgcaatcattcaaagaattcaccggctgcactgacgatgacagcgcacgtcggctgttgtccaaatgcgcatggaatttggagagagccattgactttttcttctcgggacgaagggaagagggggatggggaagtgatgtgggacgagcagcagccgatgacgagccaaggaacacgacgacgaatttcgcactttgctaacagtttatggacaacgccagcgattggagggaacgcggcgaatggaaaccgacggacggacgaaacttctcacaaccaattccgaaccgcccgaatggacgatgattcggtgcaaaccctcgacgacagtgacgtacaaatggtcgaagaatctgacagaaaagcggcgccaccaccaaaagcagtgaatgggtccgcttcttctgacggcgttcgcgcgccaattgcgcctgtccaaggcgttctaattgagcagtcattccgcgagacatatcaaaatcgagaacgcctttggaacccggtgttcgagcagtatcgccaagaccatcaacagccctcctcgtcatctgcggcggcttcattcttatcacgcagagcaaacggtgcaaataatcgcattg

SEQ ID NO: 96092 - DNA, 462 bp, Heterodera glycines
ctacatcatcggtgattcagaattggaactcgcccgagcctttcgcactccgtgccctttgtgcctcatcacaatctcagttcctgcgagtttgtatgcagtgttcagagatgaggcaaaatcgaattcacgcaactttgtttcgcacacaactcccccagcccagctccgttcatgctcaattttcgacgacgcccaaatgtttgtgccgattcatttgaccgatggccgagtcatttcactgccaatcgactcgcaatcgaccccctttgaattgtgcgaaatgttgtgccaacaaatttgtctcaaagatgcgtttggcttcggcctttttcttgccgttggtcgccgttttatccgttctttgggcgttggctccgaatgcgtgattgacgcaattgcatcgcttgagacgaaaagcgaaaaaaattggcgaattttctttaagaaagaattgtttag

SEQ ID NO: 96093 - DNA, 890 bp, Heterodera glycines
tttcattggctgaccgaccatttccacttccatttgctgtttcggcacttccttttcactcctttttgctgcaactcaccagtaatgagcagcagccatcgcgagaccggcagaagtccaagaagtgtgctgatgcgccagtacgaaatgctgctgcaaaactcgaacgacaacagcggattccgtgcctggttcgacaataacaatctcttcaaatggcgcattctaatcgacgggccgccgggaacgccttacgcgggatgcaaactcacggcactgctccatttcccggcttcgtactcaaatgatccaccgacaatgaccttcctcaccgacattcttcatccgaacattgaccagagtggcaaagtctgcatcagcattcttcatgcgccgggcattgatccgcttggccatgagcagccgtccgagcgttggaatcccaaccgttccgtggagtccattttggtgtcgatccaagtgctgctggcagagccgaatttcaacagtcctgccaatgtggatgctgccattttgttccgcaacgatccggcacaatacaggaaggaagtgcgacggcgcgtggagatggagatagcgaggacggcaccaatactaccgggagcgcaaccgccgccggaagagcaggggacgcaaccgccggaagaacaggggacgacgcaagcggcagaagaacagagggcgcaaccgccggaagaacaggggacgcaaccgccggaacagcaagggacgacgcaaccgctggaacagcaagtgacgacgcaagcggtggaagaacaggggacgcaacagccagcgacaccgccgcctgaagggccgcagcaacaaacggacgaatggtacatgtgatgtgatgtgatgccctctga

SEQ ID NO: 96094 - DNA, 633 bp, Heterodera glycines
ctcaatcacaaacaaaattctcggcggcaataaaaaggctgacaacacttatcaccaccaacagcaaaacaaatcgtcgtcagcagcaccgtttggcggcggtctcttgggcaaaatctcttcgacaatcgcttccgctgtcaattcgacgaatcaacagcattatccttcaactcagccccaacaaatgtcttccggcggttacaacaatcaatcgaattatccgggaggcgcccatccgcaacagtacggcaccggaaacactggcaacgctggtggatatccgcccgctgctccgccgtccgcgggtgcgtaccctccgcaacagtacggcggcattgctccaccgtacggcaccgctggttatccaccgcaatatcagccgacaccgtatccaacttccacaggcggttatgctccttcgtcgggtgcttccatcggatttaacattgacgctccttcggcgggcggcggaggttacccgccgtatcagcccaatttgggtggcggaggggcaccggtaccttcgccctacccccaacaaacggcgccgtatcagcaaccgccgtaccataccaccggcggtggtgccggggcctatccaacacaaacttttgggagtcaaccgcaaca

SEQ ID NO: 96095 - DNA, 436 bp, Heterodera glycines
ccaagtttgagttttctgagaaaatgttctatgaaagagcactcaccgaatggagagacaaaatattaaaggacagtggtaataaaaatcacgcttttgttcttcggaaagcattatgcaatctcaaattgttttcgctcgacgtcaatggcttttcagacctaagaaaaatccgaggaattggcgttgacattgcgacccgattgtcttcggcttggaaattcacatgcgctactcacttttgcacagaatcccctacaattggccaaataaagtctctgaaaagtggcgaggcttttgtgttaatcgagcaatcgtcaactgaaaacggtggacgagttcccttagtggcgggcgccaaacagcgaaaggcaattccaagtcaaattggccaacagcaaaagagtcaaacgaacggaaaacaaaaaggacacca

SEQ ID NO: 96096 - DNA, 646 bp, Heterodera glycines
agtttgagaggaaaaccgtctcaaaaaatggacttcgaagccaggatcaaagcttaccgcttcgtggcctactccacggtgtccttctccatcatttcgctgctgtccgtttgcttcactttgcctatgcttcaaaattacgtgtccaatgtcgctcagaatatggacagggaattgagtgcttgtcagggttctgcaaaggacatttggtcggaagtgaaccaactgaagagcatccccgtggtgggaggaaatcgtacggcgcgtcaagcggacggatacggaggaggaggcggcgcagtgtccggcggaggaggaggaggtggctcgtgcagtgaatgctgctcaggcggaggcccgggcccagcaggtcccccgggaccgcccggcaatcccggaaaccccggagcacccggatcaccaggacaacccgggaaatctgtttccgctccatgcgaacaagctaccccgcctccgtgcaaaccgtgccctggcggccaacccggccagcccggccctcccggaccgcccggccagcccggctcaccagggcagcccggaagtggtggcggaaaccccgagccaggacctcctggacctcccggaccacctggaaaccccggagggcccggccaacctggaggcc

SEQ ID NO: 96097 - DNA, 483 bp, Heterodera glycines
aaatgtcaaatcaatcaacttcttctgctgctgctgctgccggatcgacggcgccgccatcgccttcgaacgaagcttcttctccttcggccgctcaagcgtcaagtcagtcatcgtctgctgctggtgattcgtcagcctctcccaatggaccgcgtcttaagccgcgtaaagtgcccgtcaaccgcttcagggatgttcgtccggcactgcagctgcgactcagtcagttgaagcatccgttaatcaggaaactggagcaggacaccggcattgaccgtgagaggctcttttacatggctatggcatatttcgtgttcctgctcctgttcactcagtgtaagcttctgctctccactctcatcggctcagtctatcccgcctatcagagcattgtgactgtccatactcaggccaaaagcgaagagattcagtggctcacttattggtgtttgttctctctgttttctctgtgtgacattt

SEQ ID NO: 96098 - DNA, 475 bp, Heterodera glycines
tgaggtcaattcgctttcttttcctggatgattcctctttttcccctccggggtcctttctcttcttttccccgcactttccactcaaaatctccgcttcatcagacaaaaacttcgcttttggttggaccggctgttcgccttctgctcggtcattacgacatcaaaacgagcgtgctcagagcatcggggccaaagaaaaacattctcaaaagcgatgtgctgagtcacataaatgacaaaaaactgtctccgattaaagcattttcggctaagccaccatcaaaaatgtctcttgaaaacgaagtgatctccgcgtcatcacatccgatcattccgctaaaatcatcgggtcggtccgagccgactcatcgccatgtccatgtggacattcaattgtcggaaatgcgtcagaatcaaacaaaacaatttgtgcagtcaaggaattcaattccccatgcttatgcgtcggccc

SEQ ID NO: 96099 - DNA, 311 bp, Heterodera glycines
aagtaacgctggagggcagaactcgactcccgcagagagtgcaggaactcgtgatcgacattggcaatgccatgacaagcattcaacaaacttcgggttctacagatttactgattacttcgattcgaaatttcacttcttctgatggaataatggcaaattctgaacaaaatctcgtcaaaattcaaaatcaaatggaccgaattgagactcaaacgaatggcgctgagcaaaaccttaaaaatgtttcatcagtgaacaattttcttgatgctttggagcaaagtgcgtattgtacaaattttgacgac

SEQ ID NO: 96100 - DNA, 687 bp, Heterodera glycines
attaagaccacgtaattctgagtgggaattgttcgtcgcacatgcaacaaaatgaatgctttccgcttaatcgctgatctttcccacctttttgcaattcttattttgctgtggaagatatggaaaacgcgttcttgtgccggactcagcggaaagtctcaagtgctttttgctttggtgttcacctgccgttacttggacatccttcactttatctccatttacaacaccttaatgaaggttctgttcatcggttctctcttcgccacctgttatttcatgttcgtcaaattccgtgccacttacaataaagacgaggacactttccgcgtcgaacttctcgtcctcccgtgcattgtgctggcgctgtttgtcaacgccgatttcactgcgttggaagttttgtggaccttcagcatttacctcgaggctgtcgcgattttgccccaacttttcatgcttcaaaaacgcggcgaagcggagacaatcactgcccattatctgtttctgcttggcatttaccgcgctttatacattttcaattgggtctatcgctattacactgaggcgttctacgacccaattgtgatcgtttcgggcattgttcaaactgttctgtacgccgatttcttctatctttacgtcactcgagtagtcaaagatggagccaaattggaattgccgatc

SEQ ID NO: 96101 - DNA, 480 bp, Heterodera glycines
aaaagataaaaaatattaattaaattaattttattttattaaagtggccaataaaatggcattggcaaaacttaaaacatcagtttttgccatttttgttgtgctttttgtttcaattgacaagtgccgatgtacaaacattctgttcacctttttccatgacacgggaagccatttccaatcggtgtttccattgatgcaaaagctggcgagtcggggcaataatgtgtccgttttggacacagtttatgagcaggaccatagccttgaaatccatcactttcgggcgcttttgcccaaacaccataacgatgaaacatctaaacgtcactttgccaatgacatttggtcacgccgtctttccgccactgatttggccctttattttgggacatgtgacaaggaactcggaattttgatgcaaaatcacagccaaaaaattgttcagctgttcgacaccaattgggatgtcattgtgct

SEQ ID NO: 96102 - DNA, 476 bp, Heterodera glycines
cttgtctctttccaattcctcatttgacaaagtcaaagatcagatgggcaagatgaattcgaaattgataaaaatggaatcggaagttcgcaaatggaagaaccaagcggaggataacgcgagacgcgtgtcggcactgagcgatgaaaaagtcgaaatcgaacggaatctttcgttgaaggaccgtcagctcgtccaactgcaggaattatgccgagtgctgaaaagagagggagacaaaccgaaccgacagaacgaaaacggagaagtgacggaaagggacggggaattggaagcaggggcaattgactgatgaaggacagaaacggacgaatctttggaaatgttcggatggtgtcgttgattttggacggacaaatgggctaattcaaagtggcactaatcgacgctagctttaacttttttaaatttttctactctattgcttaattttgtgtatataaatgctttttagt

SEQ ID NO: 96103 - DNA, 685 bp, Heterodera glycines
agaaaactttgcaaaaaaaaatggccgacttcgaagggcgtgtcaaagcttaccgtttcgtggcttacacgacggtttctttctccatcatctcacttttgtcggtgtgcttgacactgccaatgctgaagagttacgtgtccaacgtgggcatgaaaatggactctgagctcagctcatgccagcacaatgccaaagacatttggtccgaagtcagtcagctgaagggaatgcctctgctggtcgccggaaaccgtactgcgcgtagcgcatacggtagctgccaagagtgttgctccggcggtgcccaaggccaacccggccaacccggacagcctggacgacccggaaaccccggagcgcccggctcaccaggacagcccggacaaaccccgcagacgccttgcgagcaagtgcacccgcaagcccgccgccaacggagcccgctcctgcaggcccacctggagaggctggtgcacctggacagcccggtcagcctggagcccctggacagcccggcgcggccggacagcccggcccgaagggacctcccggaggcccaggacagccaggcaatggcggagccccaggccagcccggccaacccggacagcctggaaaccctcggatagcaacggaatgtgtcccttatactgtgcacgggaccgaggatggctctttgagg

SEQ ID NO: 96104 - DNA, 478 bp, Heterodera glycines
taagttcgttttaatgccttccgctagagtttcttcggctgattcttctgccgtctctgtgtccaacaaaggcatttctcttggtctttcctcctctggcacttctccgagtaatgtcattgtttcctccgtgcctgtcaatagcggcacttttcgtggtctttcccccattggcaatgtttcttcgctcgttcgcgacgtcttcggccctttagcggccgttcgaaggcaaagtccgacggttcaagtcgccgcgggggcaggcggaggaataatcgcaggttacgtttttgggaagaccagcaaaatggttgccattctcctgggctcgaccgttctcttccttcagttcgcccaatgcaaaggctatctgcaaattcaaaacggaaaactccgagaggacttcgaggcggcacgcgacaaattgggcgaaatgatcgacggaatgggtgccattggcggcgaagcggtggtggga

SEQ ID NO: 96105 - DNA, 476 bp, Heterodera glycines
gttcggtgtctcctccccctcctccgtcttcaaatgaatgccctcctccgcttgtgccatgtcagtatgaatatttggaccacacggccgacgttcagctccacgcgtggggccaatcgctgggcgaagcgttggagcaactgacaattgcgctttacgggtatatgaccatcgaaattgaccgagttgagcccatttacacgatggacttctccgcttccggccacgacctttccgcattggtttataatttgttggacaattgcctctacagtttttgtgctgagccttttttcattggacggttcgccaaatttctgaatttgaaaaaaccatcgggaaacactggcgaagaattgtcggtgcaaattcgaatttggggcgaatcgttcgacccgcaaaagcatccgcagggcactgaaataaaagctattacttattcgaatatgcaaataatacggaaagaggaggaggag

SEQ ID NO: 96106 - DNA, 632 bp, Heterodera glycines
gctctaacaaatggatgtgctggttcggctttcacgtgacaaatggctctctcgtcgcggcgtggattttttctattggccggcatttttgccttttcaagtgtcctccaaatgcttgtttttcgtcacttttatattgaacacattttcaatttgatttcgcccattttgcttttgtgcggaagtgtgccgataattgttggagaaatgcgcgggcaaagaaccagcaaaatgtatcgaccatttctgatcactaccgccatttcttttgcaataacggcgtttcccgaacttgttggtaaagtgctacgttttatacgagccggctttgatactcattactttcttgatttgtggccttacactctggcccttatctcaatttggctttacccaattgtgtatcgggcgtacaaatttgttcaacaaaatgaggaacacaaaaacggtggaccgtatggacagaatgccaaagtgatcaatcaacagtatgccaaagtggtgccaatgccattgccaaatgccgaaatgattggataattgcattcttttatatggaatatggataaattagggcgatcacaagctgttttttatgcaactatggaacaaatcatggctcacaagttgtt

SEQ ID NO: 96107 - DNA, 475 bp, Heterodera glycines
atttaattttggtgaaaatgtttaaatttgcaaaaccgatgaccaccaccgccgctcggatgattgcgcgcaagtcgcgtttggaggtgatgccgatggccaagaagtacaccgagtcaggctaccagcgtgagctcacttaccggcgttccgactattcatttcccgcattctgcgagtccgatgtcacccacttcaagcgtggcgaagtgcaccacaaattgatgcagggcggcgcgtcggagggcggcttcacattgactgcgtatgtgctggttgctttgctggagaaccacgtgcagaacaaagtgacggaattggcacgaagctatttggtgtcacacctcgccgacttcaaagaggacccgtacgcgttgacgttgtgcacttatgtgctgcatttggcgaacagtccggagaagggtgacgtgctgaagatgttggaaggccttcaaacaaccggcaccacagatgg

SEQ ID NO: 96108 - DNA, 444 bp, Heterodera glycines
gtcagccctcctggcaatttcaatcaaagcttcttcctctccgcttgcttcttcattcatactcatcagctgtttctcttctctctctgctcttaaaaatgattggctcaactgctcggtgtgttgcgcttttgctgctcggcgccacaatggcacaagcattcctcacgacatttaacgttgcaccgaacgcctttcgaaaccgacgcggatgcggaggaggaggaggcggcggatgcggtggcgccccaccaagcgttggcggtccagtccaactcactctcggctgcggaggtgcgcctcagccgcagcaagcgccgccaccatctggtggatgcggtggtggaggatgcggtgggggaggatgcggtgctcctccaccaaatggtggcggtgcgatcaaactgacgctcggatgcgaaaggcctccgccccaagcacctg

SEQ ID NO: 96109 - DNA, 649 bp, Heterodera glycines
aattcgtgttaacaaatgatataatgaagcctctgaaaattgacgtggatttcccctcgaatagtcatcccacttcccaagaattaaaccaagattgtattcctttgtacgaaatgcttgaattcgaggaacttcaattcccaaactattacctttccgaacaattgggaaggggtgcccatgcgacagtgatgccgtgccatttccatgggaagccggcagcggccaaacttttcaatgccaacgtggacttcaaaacgatccaaaaggaggccaagctgttgcacgagtttcgccatgaaaacatcattgaattgtacgctcttttccacgggacaatgtccggattggtgctggaactgatggagggcggttctctgagtgaatgtgagtcaaattttggcatttcgaaacgcactgacaaatcactgtgccagcagtaattcaccagcgcaaaagcatcgtttatcaggtggcacaaaactatgcaaaaatgaccaattgttaacagaattgtcatgtgattaattggactttccaagtggccaaagcattggaatatttgcacaagcttagtttcatccatcgcgacgtcaaaccctccaagttttgttgtttcgaatttcgtctatggaagggtcacccattt

SEQ ID NO: 96110 - DNA, 541 bp, Heterodera glycines
cgtaggggaccgcctgaattgggaatagtttggaggaccattaacatccgttggtactgccacggtgttttcaaggcacttctctcttttgagtttgccaattactcccgtctgaacgaatccgaagtcgaccctttgctgctttcctgggatggtctgatgcgtttttttggagatttggacgtcctttcccgggttcgcttttgcgatgccatcgatgtcaaaaccctttccaatgcgttggcccatttgtttaattctctctccgaccccccggggcataaagatgccatttgcgttgtttctaatgtcaacgaccttttcactggcccctttcactataaattggtggaccgtcctttctatcgtgaacattttacgaggaatctcttcttccggactttggccacaatccccgctttgtttcgcgaatggcacggcactctcagcaaaacggaagcgaacacagtcaatgaatactcccaaaaatatgtccgaatcctgtccaaagtgcgtgagatcaaatgcacttatcggctgg

SEQ ID NO: 96111 - DNA, 643 bp, Heterodera glycines
tggaggagcagtcgcatcagttggcactgccacggcttttcaaggcacttctctcttttgagtttgccaattactcccgtctgaacgaatccgaagtcgaccctttgctgctttcctgggatgttctgatgcgtttttttggagatttggacgtcctttcccgggttcgcttttgcgatgccatcgatgtcaaaaccctttccaatgcgttggcccatttgtttaattctctctccgaccccccggggcataaagatgccatttgcgttgtttctaatgtcgacgagcttttcgctggcccttttcactataaattggtggaccgtcctttcgatcgtgaacattttacgagtaatctcttcttccggactttggccacgatccccgctttgtttcgcgaatggcacggcactctcagcaaaacggaagcgaacacagtcaatgaatacacccaaaaatatttgagtcatttgcttattcaacgtgaattgcgcagtttggaaaatatgaaacgtgggcggttagaggtccgaattctgtccaaagtgcgtgagatcgaatgcacttatcggctggaggagacgacaatgactttgacaatacttttgcctgaaaattatccgatcaaagcgccagaagtgga

SEQ ID NO: 96112 - DNA, 466 bp, Heterodera glycines
ccattccccggatgctttccgtctggttagacttggcgcccaaatgtgccatcgccgaggcgatcgcctcgggcaccggcacaactgttggcggtactgctcgcacttcggctagcaaaaggggaggcaaagctgcagcagcagcggcggctcccgccggtgttgcaacacaaccacacgacccgaacagagaaatgcgtgacgcgttcaaacggctggacagggcgtatttcttctcctcctactcgcaaatgatttcgcgcatcactcactcggacgccgccacatatgccctgttgaaggaaatgttgtccgaattgatcgtccactttccccaccggtgtttgtggctttctcagtccatcgtccgttccacgcgggtcgccgtccgttcaaagcgttgcctggagatttttgaacttgccaagaaaaaagcgcggagcaacaatgacaacaacgctgctgt

SEQ ID NO: 96113 - DNA, 408 bp, Heterodera glycines
caaatacggtgacaattctgaggaagcaccaagcgccccagcgtgtacttaagtcggacgcggctgttaatgcggcaaaaaagcgcggcgacgacgttgaaacgacgaagaaatatttcgcaggggtgaatcgtcagcacaaaacggacaaaaacaccgcggttttggacgcggagacggagcaattgcaccacgaaagggtttcgctcaaattgggcactgtgattcagcaggcgcggcaggccaaggaatggactcagaaggagttggcaacgcgtgccaatgagaaagtggaggtcattcgggagtacgaaaacggcaaagccgtgcccaaccaatcgatccttacgaagatggagcgttgccttggcgttaaactgcgcgggaaggaacttggccagccgcttg

SEQ ID NO: 96114 - DNA, 479 bp, Heterodera glycines
gcttcgccttgtttcctcccatttgccaactttttgccgtccgattccgagtttggcgaagacacctctttcggaatgcgtccggttttgcccggctctggccaagaatttgcattggctttgggcggcaacagaccccgggagcaattcaccagttttaattggggactcctttcatttgcagttttattatctttgcctttttacagtaatcattctcgcctacaatcgagaacaagtgttgttggtcagtgatacgatcgatacacttattaacaatttattgactgtttagtcatggttgttcaaagcatgacatttccttgggtaaaatttgtttttcactcatctaactttgaaacaagctgttccccaatttctgattcgcgattgactatcccattttcactgaagtcgtgccttttcaattgttttattatgtcaattaggggttcttccaacaaatgtggcaaaatgcc

SEQ ID NO: 96115 - DNA, 656 bp, Heterodera glycines
agaattcatttgaacacacacagtcatacgctagtaattacaaatggctgaagatgaggtagatgatcttcttgaagaagcattcaaaaatgttgacgaggcagagaaaaatgggacaaagatggatgatgttatcaagaaaaaggcgaaggaagttggaatcaaaatgaatgacagtgaaggcaaacgtaaacgtagcagaagcggaagcagggagagaaagcgcagacgaagtcgcagtcgcgagaagaagaagagggattcgtcgcgagagcgaaggcggcgttctccgtcagagaacagcaaaagaaaacgtcggtctagatcttgacgtctgatcatattctcctttgtttgttgatgaagacgaagaacggcgtggaacgtgcgttaaagcagaaactcattcctctcatattccacaacctttcttttctttcgttcataaattcgttcgcgccatgccttcattaccctcccataaatttattaatttgctttccaggcacacagacacattgatttaatttttaagttctcgtgatcgtcgccgctctcgttctaggtctcgcgatcggcgtcgttctccaatctcacgtcggcgctcccgttcccgatcacctcttgagaaacgtcgttcgcctgccccgcgtcgt

SEQ ID NO: 96116 - DNA, 1105 bp, Heterodera glycines
caagtttgaggctaaagttttcatttgacttccccacataaatactgacaaaaacaaaacgcccccgcattctttgtctaaccgactcaacgttgagacatggcctctgttgatgagaatgagcagcttgtgcaggaaattgtcgggaatgttctgtcggaatcagcaaaagaccaccagcaagaggagggaacggaacaccaattgatggacgaagtcgtcaagatggacagcaccgatgccgaggtggaggaccatggagggattggacatgaagtggcaatttcggtcagtgacgtcaagcaggaagggtacgcagtggaaagtccggtgggagaggaagaggagaaagaaacggagggacaaaacgacggcgcaatgcgacagattgccgacaaagttgggggaactttcactggacgaagacaaaacagcgaacaccgacgccgtcgtggaaccgccgatggccacggaagagaaggcggcggacgttggcaacgacaaaccgtcgggagagaatttgaatgaggaaaacaacgaaagcaaaggctatcaatcgccagtgtcggaggaggagcaccccattcagcacgtcgacgcaaaacaaccgactgttgacgaaggacagacccatgctgctgctgctgactctctgccgccgtctgaaccgaccaccgattcttcagcggaaaacgatggcaacaacgaaattgtctctcccactgcgctcgagccacaattggtgcccacttctgatgaggaggagcagaagccaaagaatgccgtcgaagctggggacgatggtgccgccaaagacaacactttgagcagcggcggcgccacggcttccgacgaaacggccgctgtcgcggcgttcagtgccggcactcctccgccggttccggcggttggccagcagcctcaacagcaaacggagcaccaacttagccaacatcagcagcaggcggaactgtgcggagcgaagacggcggtggcggcggagtccaccgcccgcgacagtgccgaggacgaaacggatgcttcttcgtctgctcgtcaatctgtcccggccaaaggcggcactgacggaaaggcgcacggcggt

SEQ ID NO: 96117 - DNA, 428 bp, Heterodera glycines
  unsure (1)..(428): unsure at all n locations
gcgacccgaatccggacagtgcgctggagatggacatcgcgattatctaccgcaacgaccgcgagcagtacaaccgaaatgcccgtgaatggacgcagaagcacgcgatgaaatgagacgacaaacgaccgatggatgggagaggatgcagaagacaaccgccgaagaggaaggaggaggaggatacattcaactgaccctattcccatatatgatcccaactgtacagattgtattattgtatctcactgtatgtacagtatttgtcgcccggttatcgtttaagcgaccataattgtctgttgttggttgatcaccattatcaatgtgttgtatctctgtgttatcatttcaaatgatttgtgattaattgttggcctaatgtgtgtaaataatgtgaagaatccaaagatttgtttgtgaaanan

SEQ ID NO: 96118 - DNA, 712 bp, Heterodera glycines
ttctaagcatttgcgcaatttcccttttggctgtccttttgctgcgcgtcccttgaggcgatactcagcccatggactgcaggtgcacagggacaacgagcggaacaatccgaacacgcctttccaatttacggaagccaatttggccaaaattacggtgctgttgaacaatttcccggagggacataaaggagctgctctcattcccgtgttggacttggcccagcggcagcacgggtggctgcccatttccgcaatgcacgaagtggcacgtgttttggaaatgcctcgaatgcgcgtctacgaagtggccaccttttacacaatgttcaacagggaccccgtgggcaaatactttctccaggtgtgcggcactacgccgtgcatgttacgcggcgcagaagcaatcatcgaggcaattgagaagaaattgggcatcaaaaagggagggacaacggcggacggactcttttcgctgcaggaggtcgaatgtctcggggcttgtgttaacgctccgatggtgcagatcaatgacgattactacgaagacctgacccctcgggacattgaagagataatcgacgagttcaaggcgggcaagcgacctttgcccgggccaaggagcggccgtttagccgccgaacccctcgccaaacaaacgacgctgacggagacaccgccggggcccggctttgggcttcagcagggattg

SEQ ID NO: 96119 - DNA, 475 bp, Heterodera glycines
gctatgactaacaatttggacgagacaaatcctttggttgaacaggcattgaacgtgatcaaaatattacacgaactttctcgctcaattagcaacttcgaccaaattattggtgttgaagtcacttttccgactcttcctgaagaatcatttcatagtacaaaattgtcgcaaaaactttgccaagaactgactgatccattagtggtttctgcaaaggcgttgcctaattggtgcaactatttggtacacaatttcccatgtcttttttcgatggacatacgaacaagttttatgaacacgacagcttttgggacctcacgggcaattgcgtatttacaaagtcgacgcgatcacttacttgaccaaaatcgttctgctacttcttcagccgcttccaacatggcaggccttcgaagagaggaccattaccctgagtacagaataggacgagttaaacatgaacggataaaag

SEQ ID NO: 96120 - DNA, 476 bp, Heterodera glycines
ctttttttcgatccattaatttttctttattaaatgttggcacggatgaagaaattgttgagctcgggcgaccatgccgatgtcaattttttgatcgggaatgaagacagcaaagagattttgttggcgcacaaagcaattctgtcggtggcgtccgatgtgttcgcggcaatgtttcgtttttgacgccacaaatgcgacgagggccaccgttggaaaaccttttttgcggcctgtcgagatcaccgacgtggagcccagcgcgttcaaagtgttgctgaacttcatttattgggacgacctaagcgaacgtaatggcgacaacgcaattgctttactttacgcagccaaaaaatacaaaatccccgagttggtcaaagcgtgtgttgaattccccgtttctgagctgcgtgacattttctctgcactcgtacgaacccgtattcttgaagaggaggaatttgctgctcgatgtt

SEQ ID NO: 96121 - DNA, 420 bp, Heterodera glycines
gtgacacgctcagggacaacgatgactaccaattgctgatcccgggaagcgatggtcagccgggcaagaacatccccacgcaaacatcagcccatttgcggaaacgacttttttctggcgttcgccgtttggaggcccattcatcgctgccctactatgccagtggctcttccgatggttctgttttcctatgggaatggggcgttgaacagcctgtgttcgtcgcccgtgttgctggccaattcgcaaaagtggctaaattggcattcgctcagaacggcgcccgttttgcggctgtcgatggggatgggctgctgtccatttggcaggcacaacctggtgttccggcaaagaagccttatttcattcaaaagtgtcacaccaaatttgcatcggacgtcaaattcctcggacaaacca

SEQ ID NO: 96122 - DNA, 1140 bp, Heterodera glycines
gttttaatttggtctaaatgccggacggaaaggcgcctcatttcccccaacagcccgtggccaggcaaaatgacgacggctcgcttgagcttgaatgttttctggaggccaacccggtcccggaaatcaaatggttttatgaaaacaatgaactgaaaccaactaaacgattttcattccgactggacaacagagggtccgaggccttttcggccattctgcaaataaaagatttggcggacagtgacaccggtgcctatcgctgtgccattgtgaatccgttcggcaagggcaatgccaacttcaatttgaaacttactgggttcagttcgccaacattcattgaaaaaccgcagatttcttcacgtgacgacggccgggtgatgatcatggagttcaaggctaaatccattctgaaaccgacttttgtgtggcaaaaaggggacgaaattgtggccgagtcggaccgttacaaaatcattctgaaggagacggggaaccacgagtattacgcggcattggaaattgtggagccaaaaaaggaaaaggacgcgggacaatttgtgtgtacggctaaaaatgagtcgggaaaactgacagcaacattctcagtgaaatttgaagtcccacaaggtgctcccactttcacacgcaagccgcagattttgcaaaaaacatcagactctggcgacccggccattgtgttcgacatcggatttcaggctgaccaaaacccggaagtgatttggctgaacccgaagggcaagaaaatgaaggagtccagcagaatcaagttcgggctgacgccggacggcggcgccaacacttacaccgctcaattggagttgaagaattataaggcaaaggacagcgggacgtacacgtgcaacatcaaaaatgacgcaggagaggcgaatgtggagctgacactgaacatcgaggacgacgaggtcaagcaataagccagaacagaggagcgcaaactctaagcagtgtttaaaatgggccattggacgatgctggcgacgacgaaagtcaagcctaaggagtaaatgggaaaatggagaattttgttgaacgatgccgagaaaaaatttcttgaaaaaatctgtttttatcatgaatccaacctaaggcatt

SEQ ID NO: 96123 - DNA, 656 bp, Heterodera glycines
cgcattttaatttcctaaaataacaaatttctcctgctaattcctataataaatcatggattctccgccaacatccacctcaaaattaatgcaaatcccattgctttcggccaaacggcgaaaagaagtgctcaattttcaatggcctttcccgaaacatcccggcttgctttaccgacttggttcaaatgccgtaattttagctgtgttcagtttggcaaagcttgttttttgctttaataaaattctcgttcaacctgaacaaaagaagctcgttttggacttgctcaatgatcggaatcgtccgttggtcaccatcagcaatcataggtgcgtcgtcgatgaccccctcatttggtcaatgttcacatttcgcgagtttttgtccaatatttcccgatttcgttatattctcactgcccacgacatttgtttcaccaaaaaatctcacattttttttttctcacttggccggtgtgtccccgttgttcgtggtgctggcgttttccaggagggagttgatcactgtgtggatatgctcaactccaatggttgggttcacgtctttccggagggacgagtgacaacgggaaagtgtgcggattaagtggggcattggacccattaatttccgaaatcgaacaaacccgccaatt

SEQ ID NO: 96124 - DNA, 464 bp, Heterodera glycines
gttttttaattcttaccaatggctcctccaaaattctcagacctcggaaagtctgcaaaggatttgttcagcaaaggctatgcccatgggttcatgaaattagatgtcacttctgacgttgctcccaccgtccaatttaagacttccgcagcgcatgatctcaattcccaaaagttggatgggaaccttgaagtcaaatacaaaattcttgaacatggtttgaccatcaccgagaaatggaagacggacaaccaactgacgaacgtgctcgaattgaaggacaaggttctgcgaggactcaaactgacggtggagacggcattcaagccgcacgtggaaggaagtcgccatgccattgccaaggcggactgggcaaatgatgcgttccatgtcaacggggatttgactttgtttggtggcccactgttcaccggatcgtttggtgctaaaatgagcaacgattg

SEQ ID NO: 96125 - DNA, 467 bp, Heterodera glycines
caaacttctcatcactgcacttcgtgaccaacacccggatgttccgattcacgtgcacacacatgacacttctggtgcaggtgtggccagcatgatcgaatgtgcccgtgcgggtgccgacccgatagacgcggctatcgactcgatgaacggaatgacttctcagccttcgatgggtgcaatttggggtttcgttggaacgggaaccggactttcaccgggttgggaaaatgaccccgttttccccaatacaacgctttattggggaaccggcccctacatttttcccaacccctccaaatgcccccggaacaataaaaaaggggggaactccgaatgtgaaaaaaacaccaaacccccgcggggggaaatttaaaaaatttcattttccgggtttttttctcggggggggggaaaaaaattttcaaggggggaaaaaaattatccccgcggggaatttttctttg

SEQ ID NO: 96126 - DNA, 477 bp, Heterodera glycines
ctttgatctcgggagaacagagtccaagatggacacgagaagatttgttacggtattcggaaccaaaacttgggtgagaactgaccacagtcacacgattccaataataacccattcttcaacagttacactcgcgactcagtcggttttctgaacttcgtcgaagtgctcatgggtttcaattcggcggagcgtaaggccttccttcagtttacgaccgggtctttttctctttccttttttcgcatttttgggtgtttttaggtgctcttctttgcctcccggtggcctcgccaacctccaccctcggtcggtcttttcacttccctttgtaaatgcggaaatctgtttttcagtctaactgtcgtacgcaaagtcggttctggagatgggtcttatccggtacgatttttcgctctcatagtcagtgtaaatttcacattcagtccgtcaacacgtgtgtgcattacttgaaac

SEQ ID NO: 96127 - DNA, 650 bp, Heterodera glycines
gttccctttaaaatccaaatctttcaaccaaatctcttttcgtcacaatgctttctccattcacctacgatccgttcaatcgccgttcgttgtggcctatgaccactattgttggcaacgtcctttctccattccgccaattggagcgcgaactcgaccacttcttcgacgggatgcagcccatgcttcgtgaccatgttgctcagttgaacgtctcgaacaagggcgacttcacttacaaggtcgatgtcagcggcttccgccccgaggagatcaacgtggaggtggttggcaatgagtttattgtcaatggggagcaccgcgagcagaacgacagcgagttcgtccaccgtcagttcttgcgccgtgtgctcattccggagggcatccaaaaggagagcatcaagtgcgagctggacggcggtcgtttgctcatcagcggaaccaaaacggctggcaaaggcggacgtaccattccaattgaaatgaagaaggcggccgtggaacagcagaaagaggaggagaagaagcagtaggaaaaaggacggcggaagtggagacggaccgatcggtcgaatgatccattgacatcgaactgatcttttatacacttatgcaaagttatctataaattatttctcctccaaaaa

SEQ ID NO: 96128 - DNA, 669 bp, Heterodera glycines
caagtttgagcatttaaattccaatcttccaaccaattattctcttttcgtcaaaatgctttctcccttctcctacgacccgttctatcgccgttcgttgtggcctatggccactcatgttggcaacgtcctttcgcccttccgccagttggagcgcgaactcgaccacttcttcgaggggatgcagcccatgcttcgtgaccatgtcgctcagctgaacgtcacggacaagggcgacctcacttacaaagtcgatgtcagcggcttccgccccgaggaaatcaacgtggaggtgattggtaatgagatcatcgtcaacggggaacaccgcgagcagaacgacagcgaatcggtccaccgtcagttctcgcgccgtgtgctcatcccggagggcatccaaaaggagagcatcaagtgcgagctggacggcggccgtttgttcatcagcggaatgaaaacggctgacaaaggcggacgaaccattcccattgaaatgaagaagaaggcggccgtggaccagcagaaggaggaggagaagcagcagtagaaaaggacggcggaagtgaagacggactgactgtcggtcgaccgaatgatccattgacattgatctttttattttgatacttttgcaaagtgatctataaattatttttccttcaaaaaaaa

SEQ ID NO: 96129 - DNA, 652 bp, Heterodera glycines
cttcccactagtcttttaattacgggttctccaaaatggtaaaaacattgtggattgtcagacacgccgaaagagaagacaacataaactcgaattggcaaaaaaatgcgaaccctcaaaaattgaaatcggataacagtccattatcgtcgagaggcataaaacaggccacagaattggcagaaaggttttcgaatgtccaaatcgatcatatttttgcgtctccttttgagcggactgtgcaaacagcgacttttcttatctcacagaggaaaattccgatcaaagttgagcccggacttgcagaggctctttacctttgcgaaagtccgcctggctttgaggaatcggctgaactccgtaggcggtttcctctcgtcgactccgaatatcgctcaatttacgaaaaaccaatgcccagggaaggctttggagatgagtcatgcatttaacgaatacgccaaactcttgaagagattctgaggagatacaacgaagcaacctccatcgtttttgtctcgcatggctcgcccattggtcggttttccttcaaaaaatccttttttaaaccagttaaaaatcctcaaatttttaaatttttctcgtggtcctgtcttaccgacgccacaatatttcagatttttaaaatttc

SEQ ID NO: 96130 - DNA, 715 bp, Heterodera glycines
gggagacggactcctccgcatcgtctatgtccagtcacaccgaaacgatgaaaagcagcagcaacggctccgattggcctttctgctccgatcggatgaaaatgatgcagaagccggccaaactgaacctgaacgaggcgggccccgcccctccgagcccgtgctcagtgaagacaccgcttgagggcgtatcgacggaggacactttgcaaagactgaggccgaaggaggaccaagcggaacaaagccccacggggacactcgcgacacggacaccgaaggactttttcttcataaaagtgctcggcgaggggtcattttcgacggtgtattttgcgaaagaagtgaccacgggggacgaatatgcgataaaagtgctgctgaaaagcgaaatccgacgggaggcaaaagtgcgctatgttctccgcgagaaggacattatggccgcgctcacttacgtccacgggggtcacccttttgtcattcgcctttattgcacctttcaagacaacgaccgactttactttgccttggcatatgccaaacatggcgagctgttggattggctgcgccggctcggctcattcgacgaagctggcacccttttctacgcttccgaaaccttttgtgctttggaatttctgcaccggtgcaaagggatccatcgcgatttgaagccggaagacattttggtgggcgccgattggcacattat

SEQ ID NO: 96131 - DNA, 720 bp, Heterodera glycines
cttaaaatgcttcacggatggcgagtttttgcctcatgtagcaaatcggttttgaaatcgccttccttacaatcgggtggctatggtttgtcgcgaagactcaagagcgatgaagttcgtggtccagttatcggaattgacctgggtacaacgaattcgtgtgttgctgttatggaggggaaacaggctaaggttatcgaaaatgcagagggctctcgtaccactccatcaattgttgcgtttaccaaagataatgaacgactcgttggtgcaccagcgcgaagacaggcagttacaaacagtgagaacactttgtacgcgacgaaacgactcattggccgccgctttgatgaccctgaagtgcagaaggacataaaagttgtgccgtacaaaattgtgaaggcgtctaatggcgatgcttggcttgaagctcaaggaaagttgtattcgccttctcagatcggcgcttttgttttgatgaagatgaaggagacggctgaaagttttttgggcacttccgttgcgaattctgtcgtcacagtcccggcgtatttcaatgactcacaaagacaggcaacgaaagatgctggaaaaattgctggactgcatgttcttcgcgtgataaatgaaccgactgcagctgccttggcttatggtcttgataagggggaagacaaagtcattgtcgtttatgacctccgaggcgggacgttcgatatt

SEQ ID NO: 96132 - DNA, 808 bp, Heterodera glycines
tttcctttctatccttaattttgaaaatttgaattgattgaaaataatcgtgtccattcattcccgcttttcccattaaaatgtcccaatttggcccggcattcgctgtcaatgccaacaatccgtacgctcacttcaaatgctgctgtgcaacatttaatatcaaagaccatgcccagttttgcggtgtgctcagtttcgcgctgttcctctgcctcgtgctcatttccatgatgcttttcgggtcgctttctctgttttacattttcgttggtgtcgtcgtttacattcttttgatgaaaactctctttggcgtcgtcaacaaattgtcccttctcttttacatctttttcgaggccattcaaattggcttttacttggctttgatgctttacataattgtaccgttgctttttcttgaaattccccgtcgcaactgtcggaatgttgagatcaacagtgaaatttgcgacgaacccagaaatcgctccgaagattacgtggaattgcttttgtttgtctctctcttggcctcaatcaaactgcactttgccagagtgtttgcccatttctacagatatttgacttggaatgagcagtgttcggtgcatcgagctcaatacataaacggacgaggcattcacatcaccatggatcagccccaattcgctgcttcgttttccccttattacggatgggacactcacaccgtaaagggatgcgacagaaggggacgacagaatgagacaaacaatcctaatcaattgcccataacggaactgccgccgacatacgcacaggtgatcgg

SEQ ID NO: 96133 - DNA, 582 bp, Heterodera glycines
gaaaaagccattaaattaaaaatccttccctaatttagtgttttctgtattaatttaatggttttcttactcttactgttgtacatctttccactttatttcttggtgccttttggtgctgctcattgtcatgacactctctcctattacgaagattttgatccgagaatgtcagatttttgctggcttccgcctggacatgatgattgtgtcgaagcgagctgcttatttgaaactgcgggaaaaagttggacaaaagtgtcaaagggttgcactttcaacggcactagggaatgcgctgagcttgaacagaaatgcttaaccgatggtggcaaacttttggtagactgctcagtttgcaattccacctcgtattgtaacgacaaaattccaaacgaaattgttgtgtgtttgaatggaactatgaatgatggcgagaaaaaggacgaagcattcaccgaaattaggtgtgaagatgcgcaatgcttctcagtgcgttgcattgggacggacaattcgacgcttttccacacaaaaggatgtgttaacatggacaaattgtgggatgttaaactgccactt

SEQ ID NO: 96134 - DNA, 608 bp, Heterodera glycines
cgcattttgtccattttgcaggaggcccaaaccgattgcactgacacagagtgttccacgagcactggcggcgaccccacgggcactgccgggtccaacgttctgctgattgccatggcctggggactgtttgccatgcttatgtttttcatgcggcctgcttcgatgcgttccggcggaaacgatcgcgaaaatggccaaatcgcgggcaaaccgtcgtcagcagcgaacggacacaacaacgatgatggcaatggcccaccgcccggcgacgttttctgaatacagcgaaaggaacggaggagacgaagacgcaaacatggaattttttgaccagcgaatgccttttccgtcgacgatcactccgtccgtccttcgatttgtcctccatcactttccctccctttttctgtcgctttgcctttcctttcgtttcgctgtctcccaaaaaggctgatgaatggcatttttcaactttgagctccgtctcaaaattggattgtttgtctttttgccggtgcttctcccccccccccctttctcccacatttctttctccgaatttcgtgcaaatgttttattccaaaaagaaaaatgattcttcgatt

SEQ ID NO: 96135 - DNA, 482 bp, Heterodera glycines
gttatatttaaacaaagaaacggttaagctaccagcagtaataatacctactaagtcagttgttttctgtcaccaatgctggttagtgcgcctctcatccaacaacagcaacagcagcaagtgttccaacaacaacgcccttccacttccgcttcttccgccgatgctgttttgcttccgcatgccacggaagcttctgcaccaactccctatcagcagcaacaaacggaggatcagctcgaattgccgacctccgtaccctccgctgccgactcccagcgccaacaccgcgccacccaacaaccgcagagattcttcaaatccggattgggtatcagaataatcgacaatgatttgccggagggaccgggcagaaggcttcgcaaaaatgtggccaatgttcggaaacacatagactacatcgcaaacgcactcaatcacatggaggcacgcctttggcagtctccgcaccgtcgccaatt

SEQ ID NO: 96136 - DNA, 474 bp, Heterodera glycines
gactttttgggcgggtgattttagggcgatcgaatcgatggtaagacagtcgaatgggtgacggagaagaaatttggcgggacggttaaatttgatgccgagattgaggcgggcattttcaggtttgaccagtgtgaagaccatcattgtggggttggcacgcaacaaaagcggaatctaacggacaaatggacaaaatgcacaatttgtcatccatcgcaaaagcacctgtgcccctggcattatcctttgggaacagccattttcacgaagacgcaaatccacggccgaagtccatccagcaatcctaacaaacaaagttttgaaaatggtaaatttaagaaaaaaagacggggaacaatgtaatgataaattaatggatatatgaaaagtaattatgattcagcaatgcaaaatgagtagagtcacaaatgcgattgaattaataaagttcactaaaaccgaactaatctt

SEQ ID NO: 96137 - DNA, 485 bp, Heterodera glycines
caaaagaaagaattattttaacacaacaaaaccactaacaattttgtgctgcttcttctcgcccttttctcagtgcccaacttaaacttcttccatccgcaaatggcaccgctttgtttccaagtgaacgaatattacgcgcagatttcggagttggtgcccggcctgtacatttgcggggtgaccggactgacgccggccaacatgaaggccttccgcatcgagttgatcgtgaatgccaccagggaggtgccgaacctgaagagtcttggccatatccagcggatgaagctgtgggtggaggacacgacggatgaggaccttttcccgcactttgacatcgtggcagatcagatccatgccgtcatccaagaccgtggtgccgttctggtgcactgcgtcgccggcgtttcccgatccgccgccatctgcttggcctatctgctcaagtatcggactcggtctctgagagccgcctaccattt

SEQ ID NO: 96138 - DNA, 475 bp, Heterodera glycines
cgggaaaagggggcgaagtgtttctgagcagagagagacacgtccactgcttggaaagagcagtgactcatttggaggagtcggaatctgcgcttgccctgtggaatgacccggcgatggccgccctctccttgcgtctctgtttgagtgcggtcggagagattgcgggccgagtggtgcatgagcaagtgctggacagtatcttcagtcagttttgcattgggaagtgagccaactcaaaacggaccaccgatcgctgcctttttttatttgttacgacgcgccgcaatcattcgcttttcctttcctcgcattgttttctcattgtcagctcatttttccccaaattgtccccggttaaacttttgcttcgacaatcgacggacgctttcttctcacaatcagataagacgttgccattttcttccgactcatccattttaaaggcctacggtcatttccagcggaggaataa

SEQ ID NO: 96139 - DNA, 391 bp, Heterodera glycines
agcaaaaatgaacccacttggacgagtccagatggactcagcagcgcggaagcgcttgatcgccgacgatgaagaggcgcgatcacgtcaagcctgcgaacgaacatgggcgcctgggcgtttgtgcagccgcgcttcctctccttcctgaagcatgaggaccggcgcttccttatcttcctgaagcgtaagccccggggcctcacttacgcgggccgtgcgccgagcgcgtcgaccgccgccggcaacgaacacacgctcgagtgcgaaaatatgaagatgatggaggccattctgaagaagccgatcaacaatgaggacgaataattgctgggtgattatgaatgtgattattggatggtttcctgattataatggtcctttaggattt

SEQ ID NO: 96140 - DNA, 474 bp, Heterodera glycines
gcaatgatggcagcagctgccgcagcaggggcgggcgggcggatgccggcgacgtccacagccgcctcaattggtgcgattccgacaccaccggcgggcattgtgccaccgcctccgctccccgccggaataccgtcgcctgcgtcgggaggtgccattccgatgccaccgcaagcggcattcgccgcttaccaggataaaagcatctccggtggaaagtatggcaccagggacgagccctctacttctgccgcgtcgtcgtcaacaatggtcaaaacattgggtgccaagacgcgcattgtgtgccaagatgaacagacatcgctggaagagatgatggcccaacgcattgtgccgacctacacacgtgggctgatgccatttgtgcgttagcggagccgaagggtcgcaacaacgaaggcggaaaatgtctgtctgtctgtcactgagtgtttccccacgggggcttttcgt

SEQ ID NO: 96141 - DNA, 717 bp, Heterodera glycines
gcggtggagaaagcggccgagcggggcggcgtttaccccgaggttttgtttcgagttgcccaccattggtacgatgacctgtacttggcccatttggagaacacccagcagcagcaggcgacaacgacggcgcttccgcccccggcccatccccagccgacccaacgcattgccccgcagcagtgcgtcgtccgtctgatgatgccctccccgctgcaccactcccaccagtcgcagcagcacttcttccccgtccattctgccgccgcttcgacttctgctgccgttgttttttccccttccgttcccccgccgccgacgcccccgcagcaatttgttgggcccaacgttgtcatccatcctcagcagcacaacctcagcaccggcaacaacttcatacagtacagccaccatctgcagcttacgcccacagccgtcccgctgttccacggccaaacggctgccgtctcaatggcaccaatgttttaaacggtcaggcgccatcggtttcatcctgttgttttctctcgcttccccctcctcaactacaagcagtacagccaccaacagttgtggatcataaacaaacatctcagcctcacctgcagcagtctgttgcccaatttggttcgaccattggctaccctcaccatcatcatgtcactgctcaccagccaccgctttccacgccacctcccccactgatgctgatggcat

SEQ ID NO: 96142 - DNA, 474 bp, Heterodera glycines
accagcggcttctgccctcccccgcggcggcatttgtcccctctccgaatggcactgtctctgtgccatctttgccctcctctccaacaacaagaacaacaacaacagcgatgatcagtgtgccggccatcgcaacagtcactgcaacttctttggcttcttcaagggtcccctcttcaagcagtccttcgcccgtggcaattcatccgacaatttccaccaaagcggcgacttcgtccgccccaatcattttgctacccaacaaaaggagcaaagaggggcaccaatcgcagaagcaaacaatggccaaagaaatggcgacagattttgccgctgaaagcaaaggggggagagaaagcgaaattcgaagggcacccgcgagacaaaacgcagaggacgaatggacgaaggccaacgagttggacgagaagggcattccgccgacacagcgaacggcgccgaaattgagcacga

SEQ ID NO: 96143 - DNA, 340 bp, Heterodera glycines
gtttcgattgttccaattaatttgacaatgtctccccatttgcttcatctttttctcattgttttgctcattttggccctttcgtttgtccttttcggcggaacggacgcaaaagaattgtttaagcgaaaaatgcctcaaatgagtcaaatggggccgatgggaccaatgggcggcggcggtggttatggatacggaaaatgaataaaagaaaggacaaacggacggaatgcgcatttgagaaaggaacgaaaagagaaaaagcattcattcattaaccatgttaatgtgaactaaatataatcggattggaccttattaaatctaaattggtataaaa

SEQ ID NO: 96144 - DNA, 476 bp, Heterodera glycines
tgagaatgaaagggccgccatgctaacatccaacgaaaggctgtcggtgccgctgccccaaaagagagactccgtcgaggcggtccaaatgccactcgtcacccaaggggtcgaaatcgaacggtcggtgcattcggagggccaacgaacggacactccgacggaatgccccgttcagttttgacaaacagtcatttgctcacaaacggcgtaacaccttctcaaatcgtccattcctctcaacgctcgaactgttggccagcagacagaccattgacaaaccctcgtgcacttccaactccaatttggcgttggaagtgagcaaagcgggcattgccgacctgaacaggccactttcccggatggacatcttttattccggttccactgtcactttgacaagccgcatccggcgaagagaagcgacgatcacctcgacaaatgccgaggcaggcggagagctcaccgcttcagcc

SEQ ID NO: 96145 - DNA, 481 bp, Heterodera glycines
aaaaaaagcatggccaaattcctttctggcattatgttttgcgcattgttggcactgctggacaccaccagtgcatggaagcgcgagtttttgcgcatgccgaaaagcaatgaaatcggcacggcggacgacagcagcgaaagtggcaaaaatttgaaaagccaatcggaactgatcgcttcaatgctgccaaaaagaaaaactttgcaatgctactacggcgttgacatgttccgcaccaacaacggcactgaaggtggtgcctttgaggaggtcaaatgcgatgacgaagactatgaccgctgtttaattggcaaatgcaagggacaaaattttgtcgaggtccgcaaattctgtgccaccaaagatggatgtgccgcgtttggatgtgccgttgaggaggaacttgaatgcaaaacgtgctttggcgaactgtgcaacttgtaaaaatggatcgagaaattattttcggattttcaaa

SEQ ID NO: 96146 - DNA, 418 bp, Heterodera glycines
ttggttatctgaaccagctctgggacactgtttacatggacttgccaacccgggaattccgcgtggaagaagcctgcgaatttatgttcaatctcctacaggtgatcagaaaatcagaagagaaagtggtccgtaatattgtttctgacttggaaatccgccgagaagcagtgaccaatctttggaattttttggggttgccttctttcgacgagtcgcttttcccgcccaagtcgatcgcattgctgaaagtgcttgattcggaaaaaaaccgattggaagcgaaaagggaggaaattgtggggagccaagcgaggctgacgggaaaatacaaagcattgtgcgatagggtgggaacaacggcgcgacaaatcgaaggagtgcacgacagaattatgtccgaagatgagttggacaa

SEQ ID NO: 96147 - DNA, 406 bp, Heterodera glycines
caacagcaacaccgtcaccagcagcaacaccaacaacatcatctgaaagcagcggcatcggcaccgcatttggtggtgacggagacgacgagcagtgccagcaacacaaccacagtaccatcaattacagtaacatcaacaaccgcagaaacaataacaataccgccgccattatcagcatcatcaccaccaccaacaccacaattatctgttattaatagccatgatagtaccaaggatggaggaggaggaggaggaggagaaggtggtgggaatggcgatgcggacgatgaccaccgtattccaataccgtaacgcatgatggacgaatggctaccaccatatgccatttgtgtgtctattgtcgtcgttactactgttgttgattaaactgtaaaattggtat

SEQ ID NO: 96148 - DNA, 454 bp, Heterodera glycines
caagtttgagccgtaagcaatgagttcttttccgaaagcggtaaacatcaagattgagcacaacaattctttttcggaccacgattactgttacaaagaatctgcagttgaagaaatggacgaagaaaatcgttccttttttgtcgacgtggagaacgatgacgaatatgacgatgagtataatgcccgtggtcggaaacggaggagcgtcaaacagccggatttttttatgatcaacaacaaagccaacaattcgaataagaaaacgtcaaaggcgaggccgaggaaaagcgaaagcaaaagaggaaagagtggggagaaaaaagtcaaatacgaagtggaatacatatggggcaaacgcacggacaaattgcgtcctgataaggtggaatatcgcgtttattggaaggggtatccgattgagaagagcacttgggagcccgaagataatttg

SEQ ID NO: 96149 - DNA, 454 bp, Heterodera glycines
gtccttcggcggcccattgtcagcaaaaaagaagaaggaaaggaaaaatgaggacgaaaatgcacgtggttgtccttggaccgaagaaagtggggaagacttcacttttgaaaagtctgatcaatcagcacgacccaaagccaagcacttcctcgtccgatggccaactttacgttcccaccgtcgaagacactttccatgtccaattcggcgactttcgttccgttgaccaaatgccgcagcgctcacttctcattcttttccatgacactgctggcataacggactttggcagcattgagttgagaaaaccgtaccttcaggttgccgatgcctttctgctcgtttattccgttttggaccctttggctttaagtcaaatggaagcgttgaaaaaatatttggagagggaaaagaacggcacgagcaaagaacggaaggaagttgccctttc

SEQ ID NO: 96150 - DNA, 474 bp, Heterodera glycines
cggtgtttcaaacggtgctcgaggcattggaataccctcagataaaagtgattgccatcatcgccgaaggagttcctgaaaatcagacgcgaaaactgataaaagtggctcgacaaaagggggttactgtcattgggccagcaactgtcggggggataaaacccggatgtttcaaaattggcaacactggcggaatgatggataatattctcgcgtcgaaactctacagatcaggaagcgtcgcttatgtctcgcgttccggaggaatgtccaacgagctgaacaacatcatttcccacaacaccgacggagtgtttgagggtgttgccatcggtggggatcgctaccccggctccacttacactgaccacattcttcgttatcaagatgatccgagagtcaaaatgatggttcttcttggcgaagtgggaggcgaagaagagtacaaaatcgtccaggcgttaaaagaaaaac

SEQ ID NO: 96151 - DNA, 320 bp, Heterodera glycines
  unsure (1)..(320): unsure at all n locations
attcattcattcactcacggacaccaccaaactttgcccccccccccccctctctattgatttatataaataatgctgtgcgattcgttcattcatcgtccgtccattcttctccccctccaccacccacccgtccccattttggactggctttgcttgctttgttgagtgggttttgtcttggcaacacttttttttgttacaccctaattaccttcattaggatgaaaacacccccccccccttctgaatttcttttctttgtaatcgccgctatgccaaattgcaaaacatcagcaacaaataaagaatgaatttcn

SEQ ID NO: 96152 - DNA, 475 bp, Heterodera glycines
gtgcaattaagttttgttatattttattcgagaagactttaattaccattctccgatttgttttgactttttgcaattggacaatgtcttcggaacaagcattaaaagcaaaacaacttggcaacgaggcgtacaaacggaaggaatttgccactgctcacaaatattatgacgaagccatcaaatatgaaccaacgaacatcgtattttacagcaacaaagccgcagtttttttcgaggaaggaaaatacgacgaatgcatcgaaatgtgtggaaaagcggtggaagttggacgagagaatcgggcggactatgcgctggtggcaaaggcttacgctcgaatggcaaacagttacaaaatgaaggacgaccccaagaaggcactgcacttctacgaaaaggcattgtcggaacatcgcgacccggacattgtgaagaagcacaaggaattagcgaaggaagtcaaagagatgga

SEQ ID NO: 96153 - DNA, 180 bp, Heterodera glycines
ccccgcggtggcggccgcactacaactagtggatcccccgggctgcagtgaactcggcacgagggtgaggtcacccgcacccaggcctactccaaggtgtcgcacgacagccgtcacaagcgtcaggcaggcggttgctgtggctgcggagtgtcgcccccgggcccgcccggaccccct

SEQ ID NO: 96154 - DNA, 476 bp, Heterodera glycines
acggctataaaagccagctacagcaccaccacctgcaaaacagtttcctccgtcgccgtctccaccaccagcacagacgcgtccgacggagcggccagcaaagcgcgacggccgccttttcactggacaacggtgcgacggcacccgcggcgagcccattgcgatttgacgacaaagcaccgcccgcgcgcattaaccaagctgttttccggcagcaaagtctgctgaacgccgcttccgccgagctcagtccgtgcgtgcagccgcttcgccgcggcaattgtcaggaagcgagtctgcgctatttctacgacttggccctggaccagtgcagactgttctacttttcgggctgcgacggcaacgaaaacaacttcgccacgttggccgagtgcgaagtgcggtgcaaaattgggtttactcccaactcggtaccagcccaacaacaacagcagcaacaacaaaaaggcagcatt

SEQ ID NO: 96155 - DNA, 649 bp, Heterodera glycines
gtatctttcaaggccggaaaaggaaaaaagccacgaggagggggagaatgattttattcgttttgctgcgacatccatgcaaggatggcgaacccatcaggaggatgcgcataattgtatcctcagttttggagatgagtgctctttttttgcagtttatgatgggcacggcggttctgacgttagctcctacctgaagaaaaacttccccgacttcttgaaagagcacaatttgttgctccacaccattgacgaaggtctcagcgcggcattgcacaaattatttgtgaaatttgacgagactctgcgccacgacgatacggtcaaagcaatggtagagctgaagacagcactttcaacaacatcggaccaacaacagcaggcagaagagcaaaaggcaaacgaaggctgtgacccgggggagaaggagcgcaaggaacgtgagagtttgatcgatgcaaaaaaatagacgccgatttgcggcgagtagctgtggtacagctactattattgagccttttggctcaattttcggtgaattgggctcgacgatagccgagccaagaaaatcgccaggaacagccggacaaaaggggaggatgaaactcatcacaaacgtttgtcgttcggaccggaagttttgcgtttc

SEQ ID NO: 96156 - DNA, 767 bp, Heterodera glycines
aaacaaatttaaaaaacggtcgcgaagcgcccgcccaagcccaacaaaatttgaaaaaaaggcgtgaagcgcccgtctggccccaactaaatttaaaaaactggcgcgaagcgcccgtcctgaggccgcgaagcggccgaatgttcttaataaaattaaaaacgggcgcgaagcgaccgtcttgaggccgcgaagcggccgaatgttcttaacaaaattaaaaactggcgcgaagcgcccatttatgagtccgcgaaacggccgaatgttcttaataaaattaaaaacgggcgcgaagcgcccgttatgaggccacgaagcggccgaatgttcttaaaaaacgggcgcaaagcgcccgtcatgaggccgcgaagcggccgaatgtccccaaaaaaattaaaaaacgggcgcgaagcgcccgtcctgaggccgcgaagcggccgaatgtcccccaaaaaattaaaaaacgggcgcgaagcgcccgtcctgaggccgcgaagcggccgaacgtcccccaaaaaattaaaaaacgggcgcgaagcgcccgtactgaggccgcgaagcggccgaatatcccccaaaaaattaaaaacgggcgcgaagcgcccgtcctgaggccgcgaagcggccgaatatcccccaaaaaattaaaaacgggcgcgaagcgcccgtcctgaggctgcgatgaattgctaaattacatcaatttctagcgacgcggcgaagccgcgtccctgagcgcgaagcgctttccccacagcaacaga

SEQ ID NO: 96157 - DNA, 950 bp, Heterodera glycines
gcgataagaaagatttattttgatcggcaatggcggcgacatcaaagctgcaaaaaagtggacgaaagcggttgagatacgattcagaggagtcatctgatgatgatggcattggaggagatggggccactgttgcaatcattccgacgccgagcatcgatttggtcctgcaaaatttggcaacaaatgcactcgcttttacagcggcgcccgaaatggaggagaatgaagagcagggcgatgccattcaattgttttgcagtggttccagtgcagcggaagaggaacaccaccaccaccaacaacaaccaaatgggcaaaccgttagcagcggctgctcctccagcagtcgtccgtccactgataaggagggggaacaaaagttgcggagaatgcaagcgcaagcgcgtcgtcagcgtgtgagcaagtggaaaatcagtgagacggcgcaaaggaagaagcaaatgcagaaaagcaaaggcaacaaaggagtagggggaggaggagcacttgtatactctgtccgcagcagcagcactacagccaacaacaatagcatcagcaaaaaacccccgaacaaaaagaagcaaaatgtcgctgatcgaactgctcgcaaaaacaacatcggcggcgcgggcggtgaagaagcgccagcggttacaaaaacggccaaaaccttggctgaactgcttcaatactcaaacgtcgttgcagcaaatctggaaaataaactcacttcaccgacgacttccaagaatgatggtcctccgacggcggatggtttcacatttacagcagcagctcaggaagaatgtccgtcctcgtcatcgtccaaatcaattgccacgctcatcaccgaccggttcaggccaaacagaggcactttttaccgttatacaccagcgccagtggttacaccggcggtcgtgcacaaactcttactcaacgct

SEQ ID NO: 96158 - DNA, 361 bp, Heterodera glycines
ctggcggacagcgcgggaacaatgggccacctggacccccgggagcgccaggagcacccgggcagcccggcaccggaggaggacagccggaacccggagagcccggcgcacctggacccaatggccagcctggacaagccggagagcccggagcgcctggacggcccggacaacgcgaaaacccacggccaacggagacagcccctgcaggcccacacgggagaggctggtgcaccgggacagcccgggtcaggatgggagcccagggaaagataggcggggccgggtaggcagggcagaaaaggactgccgggaagcagcggacaggccaggaattggcgaaagcccagggccacccggg

SEQ ID NO: 96159 - DNA, 795 bp, Heterodera glycines
aagtcgttttcgggccgtatctaaaaaagttgggaaggcattgtttctcgttgccggtggcccactgattgagcatcacatttcgcagctttgcgaagagttggaaaacctccacgaaatttttattgttggattgtacccggccgaagaatttgggaagtttatgtctgatggggagaaaaagtatcgacgcgtgccaatccgatacattcaagagaactgtccgttgggcactgccggtggccttttgcagtacaaagacattctaatcgacagaaaacctccggatgcactctttgttctgaatgcggatgcttgcggagaatttcctttccttgaaatggtgcaggagttgaaccaaaagacggaggcgaaatgcttgattttgaccactgaggcgacacgggagcagtcggtcaactacggatcggtggtcattgattccgtcggtttggagtgttcgcgtggccgtgttcttcattatgtcgataaacccgcgactttcgtctccactcacatttcctgtggcgtttatttgctccgcggcaattcgttcgatgtcattttggaacaagcggaaaaaacagcctccgagcgtggcctaaacaccgactctccgacgatgcaattgtttcattcaaatcaactttggtttgaaaaggacatcttcccccaaatgacctccgatggcactctttttgcatggcatacaaaccgttggtggtcgcagacaaaaacagctggtgccgtcctttacgccaaccgccattatttgggcctttaccgcgcgcgatg

SEQ ID NO: 96160 - DNA, 656 bp, Heterodera glycines
gagatttcattttaaaaaatgtgttgtgatagcagctctaacaaatggatgtgctggttcggctttcacgtgacaaatggctctctcgtcgcggcgtggatttttttattggccggcatttttgccttttcaagtgtcctccaaatgcttgtttttcgtcacttttatattgaacacattttcaatttgatttcgcccattttgcttttgtgtggaagtgtgccgataattgttggagaaatgcgcgggcaaagaaccagcaaaatgtatcgaccatttctgatcactaccgtatgtttttggcaataaattctgatcactaccgtatgtttttggcaataatcattaccgccatttcttttgcaataacggcgtttcccgaacttgttggtaaagtgctacgttttatacgagccggctttgatactcattactttcttgatttgtggccttacactctggcccttatctcaatttggctttacccaattgtgtatcgggcgtacaaatttgttcaacaaaatgaggaacacaaaaacggtggaccgtatggacagaatgccaaagtgatcaatcaacagtatgccaaagtggtgccaatgccattgccaaatgccgaaatgattggataattgcattcttttatatggaatatg

SEQ ID NO: 96161 - DNA, 344 bp, Heterodera glycines
gaacaaatgcaaagcgtttcttccgctgctgctgctgatggccgttcattgagtacgaaagcgggcgcaagcggcgccaatggggaggaaatgggagaaacgccgaaggggcggagacggaaggggacaaaatgaagcgaaaggcaaacaatgaaaggcgaagaaacacatctaattaatgaacacggcgtccggaaactgagctgctgtaccataaaagatttgtgtgtggcgaagtggtctgtgagaaggtcaccaaagggggggtgggtcccaggttcgattcccagtgcatgctattgatgtatttcgatgattttaatgaataaataaaaggaaaagtg

SEQ ID NO: 96162 - DNA, 462 bp, Heterodera glycines
ccgtcctttcttctgtcgtaattggtgaaattcagcagcagcaatcgccggattcatttgtgccaacatcttttgggaggcgacggcattgttgggtgtgcaacgatgtttggatggacattttgcccctttttgaccatgcccaactcggcctcaaattggcactgatttcgccacgtttcgatgttttagtggacgcccatttcaatggcaaaagcgaattgacaatttggagacaaatcacaattcaaaggttcaaaggaccaaaagcgaaactgtctgaatggatcgatgacaaatgggtggcatttcctttgccggaccgtccgctgcccaacaaaattcgttttaggaaccttcggattgagaaccccgaccattctgtgctcgcatttctccgtgccaatcagcaaatttttgaaaaagccaccaatttatgtttgtctgtttcttcatgcttcc

SEQ ID NO: 96163 - DNA, 525 bp, Heterodera glycines
gtggatccccgggctgcggattcggcacgagattttcctgcatcgcccgtcgaaaaaagaaacgaattttccggcgcccttatgtcttctacaattagtgaaaatcagcagcaatcgtggggttcttttgtaaaaacatcttttggaacacgacggcattgttgggtgtgcaacgatgtttggatggacattttgcccctttttgaccatgcccaactcggcctcaaattggcactgatttcgccacgtttcgatgttttagtggacgcccatttcaatggcaaaagcgaattgacaatttggagacaaatcacaattcaaaggttcaaaggaccaaaagcgaaactgtctgaatggatcgatgacaaatgggtggcatttcctttgccggaccgtccgctgcccaacaaaattcgttttaggaaccttcggattgagaaccccgaccattctgtgctcgcatttctccgtgccaatcagcaaatttttgaaaaagccaccaatttatgtttgtctgtttcttca

SEQ ID NO: 96164 - DNA, 1316 bp, Heterodera glycines
atttattcaaatcgcttgggaagagtctgcacagagttaacggatacatttcaaacaagagcggttttgtggacgcgtggaaattggcgaaggaaaccttggaattatggactgaaatccaatcgtcgacacttcgaaatttaaatgatcttctgaaagaagtcgctcgttatcaagaagaattggctcggatgcgaaaacgtgccaaagacgcggacactttggaaacgatcaatttgatgctaacaacgaccacctgtctgcaaaaagcaagggacacgttcaaccagcgaagcactgaggtggtcagtctgaaacagagcaacaaagaatggacggctgccagcacaaaagaataccttcgagcacgcaacaaattgaacaaggctcacgaggagtacaagcagtacatggacaagtacagccaaatacgcgacactttcgaagaacgcgtcaaccaagccgcacgctctttccaagaacatgaccgactccatttgctacaaatgaaaagtttttttacgcaaatggcgaaatgtttggaaaatgcccacggcgcaaatgcacaagtgagcgcaactcttcgccagagagtcgagcagaacattaacgtggagcagatgatgttccgatttatcgaggagaagggcaccggcactgaaccgccacaaaaactccaatggacaaatgcggacgaacttccccccgaattggacgttgtctcgtgcgtccaatcccagtcttcctcctcaaattcgtctgccatcgtccctaacttttccggcaaccaattgcagtcgaatgcgaatcatttgctcggcctgaatgactcgtggctaaccgtcggcggagggaaaagtatcgccgcgggtggcggcgaatcggcaaacagtggcggaagctttgacggaggattcggggaaagtatgtgcagtttgggagtcaaaaggggcagtatcaacggatgttcggagcaaaataagtcggccggagagagcgattccgagaggcatttggagttgcctttctctgccaacccttcctcttctgttctgtccaatttctctgctcaaaatccatcgtcctcttatgttccccagcaaatctcttcttggcttggccgtcagaagttcagcggtcgtctgaagaaacatttctcaacttctcagtccaatttggccggtccaatggcaattgaaccattcgcagtcggagaaagtgatcagcagacaaaggacgaactcatcggatcagcttcgaatttttccaaaagttgcaatgatccatccatcaaaacgaattcttccgctggtctt

SEQ ID NO: 96165 - DNA, 645 bp, Heterodera glycines
agcaaagtgtcactctgaaatgactttggcattttattcgactaattaaatgatttctccccctccccccccccccaatttgcctgaaggcgaagcatttgaacgctcagtcgccgatagcccgggaaatcctccgcccacaatctctgctgcacttcaattgctccatttgaatgttcattagcaaaaagtgtcaaaatgaagcgtcccggtcttaaattgcttcgcaatcatccgaacagcccaatccccggcaaaaaactgcctgaagcagtcgagcacccgcagggtttgttcatagagacagccccggcgatggtttgtctcgaagctggcgtagcaaaactcgggctcgggagttacgtgaatggtcacgtattcgtcaccagccgggaccccattcataccttgaggcaattaccacggaaaaatttagtgtggccccggtatagcaattattaatgttaaccagtggctttttaaattggcaaattaatgaaaaatgtaagaaacaattgttcgttgttttgcgaatgtactgactgtatccgaccggctcgaacagttcgtcttggacgatggtcccccgaggtaacagtgacagaatgccggatcgctgataatgggagacggagaaagtgatga

SEQ ID NO: 96166 - DNA, 640 bp, Heterodera glycines
gtttgagctatacacccgcccccgccgcctccggcgcggcgccaccggtgcctggggatgatgatgaagtggaagaggaatgagcccgcatttgagcggccgctcgaagaatggcgggagcgccgcaaccaacacgcgcaaaacacaattcacccgcctccggcgccaccgcaggaggaggaggaggagcactgggcccaggcatggcctgaggaggaggaggtggcaaagattagcaacgaggaaatggacgatgaagagggaaaattggcgcctgaatctgaattggactatgacgaactaaaccgaggggatttctacctaatcggaggtgtccatgacccgatcaatcttcgttttgaggctgcgatttgcgcgagatgatgcggaacgtgtggcgccgcattgacccttcgaaacgtgccatgttcggcggtggccgctcggccggggtgccttcgcacggcggaggagcgcgtggcgggcgcggcggtggaaacttggccgaaaaatgaccaacgggaaaggacggtttaatttatctgatacatggcatttatattgagcctgcaattgtttcgttgctttatcctttttgaattgattgtctgtttttgatttttaaaaactcagatttttt

SEQ ID NO: 96167 - DNA, 484 bp, Heterodera glycines
gccacatataatccgaccccttattactgtatttacctaaatctgtattaatgtttaactttttattacctatcctactttaataagtttgttaacggacaatgcaatgtgcctacaggttcaatgtggcaacgttaaattgctggcttttaccacacccttggccaatcggaagcaaacacaaacaattccgtttgcaaaaattaatcgacgaactgaaaaattcgcgttttgacgtcattgctttgcaagaagtatggagcgaaaagatttttcttcaaatcgcccatgaactcaatggattttttccccattcacattatttccacagcggatttacgggtagcggcacatgtgttatcagcaagcatcccatagtttcaactttactccataggtattccctgaatggctttcctcatcacgtccaccggggtgactggtttggcggaaaaattgttggaatggttgaaataatggtgga

SEQ ID NO: 96168 - DNA, 1058 bp, Heterodera glycines
attacgaggaagacgatgaactgcttacaccgacaaagcgacttcgcgaattgcggctgaattctgacgaaaaatgtgcgatgtccgattcaatcccacgggctgttgagctgtttatggagaagaaacgagcaaggatttcaaaattcctgtacacgtacaacggcaacttgcaattgaatttgccacaattgcacgcatttgcatgctcaacgggcggactgattgatgacgaatttagagaaagaatttggccaattctcgcaaaaaatctcccacaagcaaaacgatgtaaagatacgcaatgggacgccctccgctcggaggaatacaatgaccaaacaaatcattcgagcgacgaattgcaacaacaacagcaaacccttttcctatcagattccgactttgaatctgcactttccacgttcaccccgtccatttcgggctgtgatgatcaattgatggatgcggaggacgacgccgagggggacgacgaccaaagaatggccccccaaaacgcaacggtcttcgacttctctcctgaccagctgcgtgcccacaaggaatggaatcaggtcgaattggacgtggcacggacattggcacggtttccaccgaacattgacgaggacgaaagggcatgtctgcagaacgagttgaccccacttattgtgaggatattgtgcgaaaatgaagacttccgttactatcaaggctttcacgacgtgtgtctgacttttctgttggttctcggcgctgattcggccctccaagttatgcgggacatttgtgcccgaggcgccttccacaattatttgtgctgttcgctcgaagagagtgcaatgcgcgagttgcaggacctgtacgtgttgctgttcctgcatgaccaagaagtggagaagcggctgagaagcgccgagttgggcactctgtttgcgctcagttggcccctcacttggttttcacatgcactccaaaattactcccaggtggtcctgttcttccaccttttcctctcttctcatccgctgatgccaatttacgggagtggccgcgtt

SEQ ID NO: 96169 - DNA, 454 bp, Heterodera glycines
atcagtacatttcccaagtgtacgctcaagcccaggccgcttcgcaggcggcggttgccaattcgatgccgtcgctctccgactccccgccaaacatcgatcctgaaaagggctttcaattatccgcaggcgtgggccactcaaaacattcctcaacccccaatggaagagttcgggacgtcgatgaattggccgaggaggtgcccggtgaatccgatgtgagtgacgaggaggacgcagaatcgcctcttccttctgtccatgctcaaatgggcttattctgtcacacaaatccggaagtggcgcccgcttcgatgtggacctcgaagaatgtgcaggaatttaaagacaacatcaagaaagagggcaccgagggagttctgaaaattggtcatggcgaaactgtcacagttcgtgtcccgacgcacccagagggcaattctttagtctggga

SEQ ID NO: 96170 - DNA, 487 bp, Heterodera glycines
gtccaacggctcacccattcacaataaaaatgccgttttgtccgttggtccccatggtccgatgctaatgcaagacgtcgtttatttggacgaaattgcgcacttcgatcgcgagcgcattccggaacgcgttgttcatgccaaaggcgccggagcacacggctacttcgaggtgacaagcaaagacatggccgagcactgcaaggccgccatgttcagcgagatcggaaaacggacgccgcttttcttccgtttttcgcgtgtccgtcggtggagataaaggtggagaatcggggagcgcggacaccgcgcgcgacccacgcggttttgccatcaaattttacacggaggagggcaattgggaatttggttgcaaacaacacaccgattttcttcatccgcgacccttttctctttccaaatttcattcattcgcaaaagcggaaccccgccacccatctcaaagacccggaaatgatgtgggact

SEQ ID NO: 96171 - DNA, 476 bp, Heterodera glycines
gttcagcgagatcggaaaacggacgccgcttttcatccgtttttcgcgtgtccgtcggtggagataaaggtggagaatcggggagcgcggacaccgcgcgcgacccacgcggttttgccatcaaattttacacggaggagggcaattgggaatttggttgcaaacaacacaccggcaagtcaaaattttcttcatccgcgacccttttctctttccaaatttcattcattcgcaaaagcggaaccccgccacccatctcaaagacccggaaatgatgtgggacttttggactcttcgacccgaatcactacaccaagtgatgtttctgttttcggatcgtggaattccggacggatttcgctttatgaatgggtacggtagtcacacatttaaacttgtaaacaaaaccggcgaagcagtctattgcaaatttcacattaaaacgcggcagggcattaagaatttgtcccctcaaa

SEQ ID NO: 96172 - DNA, 853 bp, Heterodera glycines
cgcagttcagtctttttcctcctctccttctgctcatttctcctaattcttctcaaacgtcaaaatgctttctgaaattccgcttccccaccaaaaaggcatcgtcgaccctcgtcttccctgcaaaattcaaattgtcggccgtgccaatgacgtcgcgaaacgtttcgaagtgaatcttttgtcacaaacaggcgaacaccttctccatttcaacccgcgcttcgatgaacattgcgtggtgcgaagcagcacaaaagacggccaatggcaagcggaagaaaggggagggaccaatcccttcgtggccgggcagcctttctcgctcgatctgctggttgagcaaggcctaattgagtgttctgtgaatggcttccaattctgtgaatttgccgcgcgggatgacttctcccaattggggcgctgtttccgttggcggtgacattcagctgaactctttggaagtgtccaccgccgagggtcccgcgattgcccatgaaggcggcgataaggggccgcgcgaagctgacgaggaaaatgcgcaagaacagccgcccattgtgatgccggcccatcccgaaccgcaaccggtgccagccgaaccgactccccagcagccgcagcctccaccggcccaggggccgctgtcggtgccttaccaagctccgctccatgcgttgcttcagactaaccgaatgcgcgtcgtcggtgtcccccgcccgggggcacagcgcttcacagtgaatttcaaaacgcacgacggagagacacttttccatttcaatgctcgctttgatcaaaactgtgtggtgcgcaacgccagcgtgaacagacaatacgcgccggaggggga

SEQ ID NO: 96173 - DNA, 944 bp, Heterodera glycines
aaaagaagaaaaggggggaggaggagaaaaagcggacaatggacgctgaaaagagcgcattaaacgaaacagtcccaaccgaaagtaccgccaatttgactacaatggaacaaacggtccctaaagtaaaggaagtgaaaccgaggaggtcgctgttggcccaggcatcccaacaacggcctccgttgccacgcgcatctgcgcaaagttcggccagtgcccctacgcaggttgctctcccacggagccattctcgctcccgaatcactccgtctgctcgtccggtgctcagttctcgcgaaaacacttccattgcactgaaaggaaccgcaccaatgtctgggatgacccgtcgttcaatgaccacgaaaagtcagtcggttgaacacgtcgcagtcgcacaaaaacatttgtccggcattggccgaaacatcgcaaacggaaggacgaaagagtcgaaaagtgcgaatgcatccgacagacagcgaaaggaagtcgaagacgaactgaacaggacgaagcaaatgctgaaacagaccacaaaaacattggatgtgttcgctgtggtggcatcacattttgacagaaaattggacaatgccaacaccgaatcggctgttctgatggctcaaaagggcgacgaggcggcgcaacaccaaagggccatcgccgagctggactgcaactggaaaaagcgacttcagcgggcgaaggaggaccatcgagtggaattcgatgaattacgcgcaaaaatttcttctgaacaagcggaaaacatcacgaagatccaactacagcatcaaaaaaccgtgaacgaattggaaaaacatgtacagaaactcggcaaaaaactggcggaacaagaagaaaaacaccgaagggaattgggcgagtcggcgagtcaatcgacaaatagacttcacaaagaattggagagtcggaat

SEQ ID NO: 96174 - DNA, 670 bp, Heterodera glycines
tgataatcccccctcactttcacttaaatttattggcgaaatgtccactgccactgacgttcagcacaagagcatctacgactttaaggccaacgacatcgacggtcacgagatcagttttgacaaataccggggcaaagttctgctggtggtcaatgtggcgtccaattgcggcaccaccgagttcaactacagccaactgaagcagctgtacgacaagtataagggcaaaggcttcgcggttgccgccttcccgtgcaatcagttcggaggacaggaaccgggcaatgccaacgaaatcaaagactttgtgcacaaaaagtacaactttgagccggaccttttcgagaaaatcgacgtcaatggatccaacgagcatccgttgtacggctttctgaagaaagagcagcacggcacactcatcgacgccatcaaatggaacttcaccaagtttttggtcgaccgaaatggcaatgttgtgcagcgttactcgcccaacacagagccaagggacatcgaagcggacattgagaagttggtggctgccgcagcctaatcgcaaaaaccatttgaaagaaaacgaaatacgacgatcgacgagaccaaaaattaaatgatgttcatttaagcaaatttctaaatttactttggaataaaaaaattatgattt

SEQ ID NO: 96175 - DNA, 462 bp, Heterodera glycines
  unsure (1)..(462): unsure at all n locations
caaagtaggacaaccacaacatctacaacggacaaaacagcagcaggaatttgtcaccttccgttacacttggccagtgcgaataacggaacgactgatcggtgccggtgaatctgccattttgaatgtcagcccggcattttgcactgccttcaatggtgtccaattcacttggcttttgcgcatttgcgaggaggaaatattgcctgcggactanatcgactaaagtgagggcgacatttcgatggactcgtcgtatttcgcatcgggcggcgatgacgacgaattggagatggtgcagcaacaacagcagcaaaggaaagtgaacatcaccctctactacaaggaggggccggcacgcgacgttaagctgagcgggggaaacatttccattctaaactcggagggcattctcttcgacaatatgccattgcgcaacttggagtacacaaagggcggcgg

SEQ ID NO: 96176 - DNA, 319 bp, Heterodera glycines
taatcgatgaatttcctaaaaaatgccctgttataaattgccaaaattttcaacaacaaaaaaaatggcatccaatttgaatactgtaatttaatcaacgcgggttaccgtaccaatgcgcggggcgcatgggtcggaactctttcgagcagcacacggtggctgggttactgtatcgtcgtcattatggttgttgaaggtgttcagttgggcaccaattcgtgaacaaatgccatctatttgcatcaattatatataatacaaagatatttttaattttgaacattttttgaataagtttgagaggtgaaaatttgtg

SEQ ID NO: 96177 - DNA, 540 bp, Heterodera glycines
ggagctccccgcggtggcggccgcaatcgaacaagtggatcccccgggctgagtaactcaacacgagggccttatacaaacatcaaattcttaaaaaatgtcaacaatcggagtacatgaaatattcaaactgtcgcaaaaagaccatcagcctcccgaaaaaaggagcaaactcagcgatggatcgacacaaattgtgccgtcggttgcgacagcaaaaaatggaggcgacattttggaagcattagaaaagtcggaagacacttcagaactcaacgaaattgacgaagcgtcggtgaagcggatttgttttctgttggagcgaaaacaggggaaaaatgcggaattgcgcataaaatacgcggaagagcctccgaaatttatggagtcggaaattgaattgaacaacgcaattcaggaaatgcacgtaattgcagcggagccccaattttacgatgtgctcgtggaacaggggtcggtccaactccttctgcaactgttgtcccacgaaaacaccgacataatagctgcagtttgcaa

SEQ ID NO: 96178 - DNA, 476 bp, Heterodera glycines
gttttaggtgtttggagtgccaattttacattttaccgatcagtctatgcccaatttgtcacttttggacaaacttatttttacttcatcctgtttttccaacctcatttgtgcaccaaattgacaacatttgagcaatgaatgttcagcaacagcagccggtcacctcggcataccctcagcagggcaattttgcggaggagaagcagctgcatcccaatcacaatgtgtataggaaaatggaactactgatcagtctgatgctgaatgttgatgatggcgtgccgatcaagacggtcaaatcgtttctttcaaaattgccaaggattccgtcggtgttcacgggccaagacttggtcggttggctgctccaaaatgtggacattgccgaccttggcgacgcgttgcatttggcccatttgctcgcctcccatggctatgtgtttcagattgacgaccacgtgttgacggtgaaa

SEQ ID NO: 96179 - DNA, 475 bp, Heterodera glycines
gtttggagtgccaattttacattttaccgatcagtctatgcccaatttgtcacttttggacaaacttatttttacttcatcctgtttttccaacctcatttgtgcaccaaattgacaacatttgagcaatgaatgttcagcaacagcagccggtcacctcggcataccctcagcagggcaattttgcggaggagaagcagctgcatcccaatcacaatgtgtataggaaaatggaacgactgatcagtctgatgctgaatgttgatgatggcgtgccgatcaagacggtcaaatcgtttctttcaaagattccgtcggtgttcacgggccaagacttggtcggttggctgctccaaaatgtggacattgccgaccttggcgacgcgttgcatttggcccatttgctcgcctcccatggctatgtgtttcagattgacgaccacgtgttgacggtgaaaaatgacaacacttacta

SEQ ID NO: 96180 - DNA, 1530 bp, Heterodera glycines
gcggacaatccgaaccttcgcatcaacgaacccgacccaatgctggtgcttatttatttgcccaacccaccaacgaatacattctctaaattaaacatttttcaggtgacttgtgcgcatcgtaagtttttactgtcacaaattcaataaaatgcaaaaatgaacttcaaaagtccaccaaattgtgtcccctccccatactgaagtgtccgaactcagctgtcctcgggcatgcccacccgtccctctccttataagtaatacatttgtacaatttcccttcccccaggcaacaatcgtttttatttgtttaccaatgtcgaaccgtacgcggaagaagcggatggtgtgttttgttatgcaaaaacagtcattaaaaatcgtttttgtctttttaagggtccactcatagcagagacgtgtacaacgaaaagccgctaaaggaggacatgatcaccgcaatagaagtgagttagggagacgagccaattgtgggaaataatttaatttatttttattactgcaggaagaagcaccccaatcgaagctgtgcaacaagtaattcctaattaaagtgccaaaagcgttcgctcttttagggcaattgtttacacaacatatggcgacattcacattgagtgggttttgtgcttccccatccattcatttctccatttttattttcaaattttatgtatttaagactattcccggacaaaacgccaaggacggtggaaaatttctgtacacacggtaattctcgacaggcatttctctgatagatttattaatgtaattgtttacttttggtattgtttcagcacgacggggttattataacggacacgcctttcacagagtgatcaagtcgttcatgatccaagtcagtgagacgcgagacagagcatttctgactgaattcgctttagacgggcgatccgacgggccgtggcaccggcggacagtccatttggggcggtgattttgaggacgaatttcacccggcactacgacatgacaaagcattcagtcagtctccgcactttttctgtctgtgcttttacaccttcgtttcctgtcttttcaggagtttcgatggcaaatgccgggccaaacactaacggttcccaatttttcatcacaatttgcccggccgaatggctcgacggaaagaacacaatttttggccaagttgtggaggtgattttgtgaatttggatgagtgcgtttcacttttatttgctgcagggattcaacgtggtacaaaagatcaaccaagtgcccgtctataaaaaggtatttcctaattgtaagcgaattttaatttaaaatttaaaatttttagagtgggagaccccgagaagagatttcaatcatttccatttctctgaagagtgtttagcttatataaattcattgctttacaataatgaacgaatgaatgctctcattttgttgggccaatccgaaattatgtttttacttttaaattccaccaaaaataaataaaagtgccacagaatggatgtg

SEQ ID NO: 96181 - DNA, 560 bp, Heterodera glycines
tggagctccccgcggtggcggccgcttctacaactagtggatcccccgggctgcaggaattcggcacgagggtgcaaggggtgaacggacgaatccgtcaacaaagaatgtccgatacaatcaacagcttaggcgctatctgcaaatgagaagggagctgacagatagaccaaccaaagtggagttgaccaagggattgagtgttttgttgaagcgagatgggggtgctgatgaggacgacgaagtcgtcaacactcagccacggcctcccgctccaccaccacctccaccaccacctcatcactcatctcaactttttttaccgtcgccctcccagccttcccgatcagcaatcttcctcatctgacgatagtcatccgcctcgtccaccacgtcctcagagaacaaagaaaaaccatcaatcttctctgaaacatggtcgtttgaaccaatggcagcaaaggcgtcgtgacttacaacaacaacaaccggtagtacgtgatctcctcgctgaagcagcagctgctccgttacctgaaagtgacgatgacgatgaacaa

SEQ ID NO: 96182 - DNA, 486 bp, Heterodera glycines
tgagggtttagatttattgttaatattgttgtaaatattccctttttgggaattaataaaaataaataaataattcaaaatgtccgctagcaacagtcgaaaagcattcgtgcccttttcaaatgcactccgacgacgaaagctgctctttggctttggggttggcactgtcatcggcgccggcttttactacatggacaaaaacaacgaaaggcgcttcaaacgggacaaagacgtttatttcgtgtccaatgcgcatgcggccaccgttgacaccaaagcggcgctgaacaaacgcccgtccggctcacttccgacccgcgcggagctgttgaaaggaatgcgtgacgaggaattcgacatccttgtgattggtggcggagcgacgggcgcgggggtggcattggacgcgcaaacgcgaggtctgaaaaccgcgctggtcgagttggacgacttctcttcgggcacaagttcgcgctccaccaa

SEQ ID NO: 96183 - DNA, 718 bp, Heterodera glycines
ttcagtaatttttccaaaatattaatttaattctcatctattggacaatgagaggcgaggctaaggacccaaaaggcgaagcaacggcagaagcggtttcagtggagaagcaacaggaaatccttcttatgaacaaattggcttctactggcaaactgccgccaaaatctgctagcaattttctccagaaaaagcttcaacaaagaaaatttttcgattccggtgactacaacatgaacaagaacaagcctattccaccgccgataggccagaatttgactgctgccaacactcccaaactggccgttccgattgaaactgaacccgagaaaaaaatggaagaatcagctccgattattgtatcgcaattgctcccaatgatgcgtcccttggccggctcaatttcgggttgttcgatggatggcggcgaatctgacgatgagggcggacagcttcagattcctcgacctgacacagtgccgcagcgcaaatcgtccattttacatccgtcagcacatagcaaattgagtcctcaaccgcacattcaccacgaacacactgacgagtcgttgaccttcccccagtcgtaaggagtgaaccgaaggcgaaaggagcgcaaatcgaaatggtgatcttccaacagcaattatagctgagatcggctttttgtttgatgtaaaatttacttggacttttgaggaatgacttttttgggcaa

SEQ ID NO: 96184 - DNA, 233 bp, Heterodera glycines
cgataataaaataaattaaaatttaaatatctaaaaattaaaaaaaaactaaataagaaatttcgttttgcaagcgataataaaaaatagagaatttactaatgcacaaattccattaaatattagcaaaagaatgtaatttaaaatttggtttttacgtcaattttgtattttctacagttttttacaggtgaaaaagaaaatcatcgccttcaaaaaggtgaggaggcgtt

SEQ ID NO: 96185 - DNA, 652 bp, Heterodera glycines
cagagacatcatcgaattctgcaacttcctgctttaagccaaacaggaaccagtcagcggatatttccaatttgccaaattatctacaacaactccaactcggtcctggcggtagttcgaccacgagaagaaccgggcgtttcgtggaggaaaggcggcttcgtcatgttaagcaacagcccagctatagctttgaggtttccggcacttggggtcagcgcttctcgagttgccaatttctggacgtgtcggaggatggacgaactttgattggatgctggacttcagagcaaaacaatcttttcgaggggcactgttctcgtgtgctatccttcggcgtcactgttgacccaaacacagccaaaaaagacactcagcgaatggcactcgccgaagatgttggggacatggcatcactgttggactccaatgggaaataccgctgcaacacctatggattgtgctttgagccaatagacaatgagatttgcttgggctcttccaaccgaattctcattgacatggtgcttgccccggctgaccgtgacgtcacttgccttctctttgccactgctcgttctttttaccaggaacaacaacattccgtcggatcttgtccaaaaattgtaaccaaatgcacggttaacttgcg

SEQ ID NO: 96186 - DNA, 550 bp, Heterodera glycines
ggagctccccgcggtggcggccgctttccaatagtggatcccccgggctgcattcccttgttgcgagcgaacaacgcaaatgtgcgaccgcaactgcaaggagtggacaacgccaaagactgtttgacaccgtcgacaacaggcaataatcaaccgacacgagaacagccaaaactgatggacattgacgaaaggattgggatggacgacgaagacaacgacgacggggacagattcggagaagcagcagaggtattgggtggaggagacaacgctaaccgagttggtggtgagagagtcgtgggtaacagactgcggaaacggcgctccgtttcctgtgagccgacagcgaacagtccggccaaaatggcaccgcatcagccagccgatgaccaatccgctggttgtctgctgcagcgcacccaaagtgtcaatgccttcgctgttccctctgctcatcaacaaaatgccgtcgtcccaattgcctcttcctcgcgtatttcgtcgagaatgccctcctccgtctccatttgctcatatgccaattctg

SEQ ID NO: 96187 - DNA, 482 bp, Heterodera glycines
acttccttctgcctcttccttctcccataatcattttccttcttcctcttcctcaacttccatgccaaaatttcctgttccatttcttgccaattctctcaaaatttcttcacccgtttgtgctgatgtgactccaaccgaaaagaaagcaacgacaatcagagaagttcggacacaaaagcagcaaatcaaaaaggaagaaaaaagcgaagcacaaatagcgcaggaaaaggaaagagaaagggtcaaaagagagaaggagagggagaagaggaggacaaagctgtccgacgcattttctgctctccgttcatccattccgactttggactacaaaacgcccttttccgataaaatggactgtgtaaaacggcttcttccttttggactttattccgagactgaactgtccgatgatttcctacaaaaatttgatggtgaattgcaaaggcattccgaatttttgtgcgaacggatggatt

SEQ ID NO: 96188 - DNA, 508 bp, Heterodera glycines
aaacaacgttccgattcattgctgttgcccaacgatccgaattcttatttagccgtccttaaccaagtcacttggagcgattttattgaacgcattgtgcctactggaactgtgtcaaatgttcatttgaaagtttctcgtgggcctgaaagaagaatttccaaaaaagcactggtcacagttatgccgggtgcgcggtggccggatggaaaaatgttgccaaggatgttttttgtaaatgtgcccgacattggtcgagtggaacaagaaatcaggaaagcggaagtggatgctgggcttgcccctgaacattggagcaacatccaatggatgcaaccggggccaatgtcattgattataccttctctggtcatttttgctttatttgtccttccattggttttccttggtcgaatgatgactggctcaaaaatgggcaacttctccgaatcgatctcttccatgatggggcatcgtcttcgaatttatgacccggcattaaaggatg

SEQ ID NO: 96189 - DNA, 568 bp, Heterodera glycines
atcttgagagcgttgtttgaaaccaaatattaaatatgtcatctctttccgaggaggtcaagaaagttaagcaggccgctaacattcctcctccggcagtttgtaacagatttgtcgaagggttttcaagcgtttatgtgttcgaaactcgaccatcttcacatggcggtgcttttgcattccgttacgatgttgaaatggtgcagctcactagaaacaaaagtttgacttcgggcggtggcgacgatgggaaaaatggattgctccgcggcgtttgttttgaattgatcaagttcgtgcacgactcgacgcagggatttggacaagcggcacaatttgtttacgacaaccgtaaaatcttattcacgaacaagcgaatcgaacaatttgtattggaaattgacacggaaaaagtccaaggaatcgttcgcgatttcctgcgtgggtcttcggtcaaaattgagatcaaaccctgtcagactgataaacatgagctggatctcaacgacgtcttttcttccatctcgcgccgtcctgatgagcagtctgacagatctttgcgcacttt

SEQ ID NO: 96190 - DNA, 481 bp, Heterodera glycines
gaagtaagaagcacttctctgtacagcttgcactcctgcaaaatgatgttcatctgcaggtccgactcaatgttccctttttggcgcagctcatagcaaagtgaaaatatccttcaaaatgttaatcatcggttttgttagcataaataatgattgaccgaccaattaattggcatccaatattttgggaattcgcttttcacattttccattaggtccaattctggtagcttaattaatttgcattcgaatcggatgattccattttgatcaatgtttgtcgttcgactgacttggatcagttcggagtcaaccagtgactccatgtttggaaaacgctttcgcacttggatggaaatgtcgcggaggacgagcacttgggtcaaacacaaataccttttaaattgcaaggagtttaaaaatatattattgttagctttattgcccctggctcacccattcatttgctgcctaattacct

SEQ ID NO: 96191 - DNA, 1107 bp, Heterodera glycines
gtttgagatatctttcacacttacaaataataaccataagatctaattaaagcggggggcgtgtggtgtaaggatgtgtcatattgagacctatattttcatggattttgagacaacgggactttttgacgacggccacaacaacccgttgaccaaccccaatcggtccaatgagacggccagagaacgtgcccagaggctggacaacctcatcaagtcagatggaaatcgctttcctaaaatcacggaaatggcttatatgtcggtgccgcgggtgttgttccttgagggaacggagcaaatgtccgcgcgccatttatcatcgatgtcgcaagacggcgaagaaggcattgagccggtgcaggtcgttacgaatgtacacgtgcgacagctgaatccgcagcttaatgacaaggagcggttcaattacgaggaattgcaacggaaagtgccaagaatggcccggagtcgtccacctgcttcagactgttccaaaaccagcctgtctggttgcgcacaatggtctcaactttgacttccgaattctgtgccacgagttgcgcaagagcgacctgttccgtacccatccgatcccagaacaggtttatttcctcgacacgctttcctgcttttacgaactcgagaaggagtacaaccgcgagatagaattaacgatggaaaatgttgattggactctcgttttgtcccaattccaaccgaacagcgaaactgtcgttgcaactgccgagatagaggaaactgtacaacaaaatggcactgcttctgagggaacacaaaattccaatggtcacaaaagcaccaccgttcttcatcgattgttcgatcagaaatgttctcttacatcaaatgccaacggattgccaaattctcataagaaaataaatccaatcctacgtcattggagcttggctttgccgctgatcatgttcatgcgcaaaacgcattggtcgccggccaaacgccgctgcattgacgccaaattttttgagagcaacaatcgcggtgaatggaatttcaatggtaaccatgccaggcggttgttgtgcggacgtggcaatttcaaactggagaacatgttcaagaggt

SEQ ID NO: 96192 - DNA, 659 bp, Heterodera glycines
gtttgagcaacaaattgaaagcctaagtagctcatattccaaaattatggaagcgaatagagccggtcaaattgcgccaaatacaaaggctgaaaatcatgggaacgcacggactgaaattcgacagcctgcgaatacgacattcagaaaaggtcacagaagagcccattcgatgccatccaacgcacagaaagcggacaaaacaatggcaaacggaaaacaacaaacgatcggtgaaaagcaacccgaacacaaacttgcgtgtgatgcgacatcggcacattcgcctcaaaccgaatattcttaactcttcggctgcagcgaacgcttccaagaaaagacacccgcagccaaacttcgacacaatcgaagtgctcgaggaggagcacgagttcgaggtccaatgtcaagcttggtaaggcgaggctgacgaagtcatcacaaataaaggttccaatcaacgaggaggaaatgatgcgctttcccgggatggaggaaggctcacaaaagtcggataaaatcagcgtccacaggaggttttggcagctgaattgcaagggcgtccacttctccggccttcccacttggctacaagacaatgaattcctccacttcggacatcgacccccacttccgagttttggttcttgctttaatag

SEQ ID NO: 96193 - DNA, 1171 bp, Heterodera glycines
atttcgttgggtgtgcacatatcaagtcggagtacgtcgtattaccaattgaaacgcaacagcaagaaggaggcaacaaaccaccaaatgaatccaatccattggaagggaactcgcacgagggaattctgccaagaaatgtgagggcacgcggaatggaccgccaaagagagcaaaaaatggccaaggcccgagcggaaaaccgtcaaaaaatcgtaagaatttgtccatctgttctttttgagagcgaaggaaggaagtgcaaatatggagagaaatgcgacgcggagcactcgctgacaaaatattgggcgaagaaaccgccggacattggcgagttctggcacccaacgccaaacaccatctttctttggaaggtccgtcctgctttttgttcgaccaaatgggcaagtgctctttctcattgagctgctgtttcgcccgagcccatacgaatgagtcggatttgagccagaagagcaaagcggggcactcggaatggcagtccgttctcaacacgcacactttgcccattcagcaacagctcagaaaacgcacttacgacttttctcgttctgaacgtgctctgcatgaatcaccatcgggttgtatggaacgcgaagcaccgaagtgggacatgcgcactctccgcggcaaaaaatacttggcccctctgacgacggtgggcaacttgcccttccgccgtttgtgcgttgaattgggcgcggaagtcacttgtggtgaaatggcaattgccacgcatttgttgcagggtcttccttcagaactttctctgatgaaaagacatccgtcggaaaaaatctttggcgttcaattggcaggaggctaccccgattcacttggtaaagcagtccaactgatcaccgacaatttcaatgttgatttcatcgatttaaatttgggttgtccgctggacagtgtcaatgaaaagggtgcaggctgttcgttggcgaataaatccaacaaattggtttccgttttgcagtgcatgcaaaagagtgccacgggagtgcctgtgtccgtcaaaatgcgttacggagtgaaggaaggagaacggactgcgcattacaccatggggacaattgccgaacggagtccccctcagctgctgaccctccaccctcggtcacggggacagcgctacacaagg

SEQ ID NO: 96194 - DNA, 507 bp, Heterodera glycines
aaaccttaaagcactagccgattgaaataaatggacaaaaaagcaaagtcaaagacaaaaccttaaagcactagccgattgaaataaatggaaaaaaaagcaaagtcaaagacaaaaccttaaagcactagccgattgaaataaatggaaaaaaaagcaaagtcaaagacaaaataggaactttatacaaatttaaaaaagtaatattttgtatattgtatatgcatttaatcaaatttctactttctttataaatgttagctaattagtcagcgtctatttattttctgtaaaaatttgcctctttatttaaaattaaattaatataatttcatgaaataagacactaaatgtatagagaatgaattaacgtggtcgattggaataaatggaaaaaaaagcaaagtcaaagacaaaaccttaaagcactagccgattgaaataaatggaaaaaaaagcaaagccaaaacacaaaaccttaaagcactagccgattgaaataaatgg

SEQ ID NO: 96195 - DNA, 475 bp, Heterodera glycines
gagatttgttacacgttaaattgctgtctgtgatagcaattcaattttttccatatttgcaaatcaacaccaacatcacgacgagcgggacactgaacgaagggagtggcggtggtaccggcactgctgcccctggtcaaaataatacgaatggtgacatcaccggaggttcttctgctgccgctgctgttgccgggaacgtccatcggtgtcaatcgcccattatggaagcagaagttgccgaagacacgtccaacaaaatgttcccttctcatgagcaatcgcaacaactacagcagcaaccacaaggagtcaagaaggaaagtgttggttcttccaattcgacgacttcttccacacgggtcgcttccgttgtacatccaatagaaaccacgaaagattcgaaacccaagccatcggtcaaagacaacacaacgatcagtccacaggcgcttaattcaatgctaagcggctc

SEQ ID NO: 96196 - DNA, 382 bp, Heterodera glycines
aaagggcttaactgctaaaactaggcaattctagggaatttaaaatcgaacaaaaaaagttttggtgcattaatttgtcaacttttatggtcgtcttttttatggtcgtgtaaactgaaatagatcaaccctggaaagttactttatcaaaattaaaaccccccattatttagggttggcacatactttcaatttaggaatacaaatttttaagcgaggattcggtagttttttaacttaaggttgctgaggcaagatctctggattccgtttgcgtttctctaaaaaatcttgcacaaaatgcggaagatgaaagcgaggttggtatcaataattttgtactatttgtgctacagttttgatttcctattttatcccattc

SEQ ID NO: 96197 - DNA, 650 bp, Heterodera glycines
attgaattcaataccccttcaatttggctatcatgcaaatcttcgtcaaaactctcaccgggaagaccatcacccttgaggtcgaggcgagcgacaccatcgagaacgtgaaagcgaagatccaggacaaggagggcatcccgccggaccagcagcgccttatcttcgctgggaaacagctcgaggacggacggaccttggccgactacaacattcagaaggagtcgacgcttcatctcgtcttgcgccttcgtggagggatgcagatcttcgtcaagacgctcaccgggaagaccatcacccttgaggtcgaggcgagcgacaccatcgagaacgtgaaagcgaagatccaggacaaggagggcattccgccagaccagcagcgccttatcttcgctgggaaacagctcgaggacggacgcaccttggccgactacaacatccagaaggaatcgacacttcatctcgtcctgcgccttcgtggagggatgcagatcttcgtcaagacgctcaccgggaagaccatcacccttgaagtcgaggcgagtgacaccatcgagaacgtgaaagcgaagatccaggacaaggagggcatcccgccggaccagcagcgcctcatcttcgctgggaaacaactcgaggacggacgc

SEQ ID NO: 96198 - DNA, 1832 bp, Heterodera glycines
ctcgttccagtgacatgaccttccccgaaattaaactaggccttgactccattcgacaatttacaacgaagggctgggaaaattgttgggtcatagataccacccagggtgttttggagtcgctctacactgattcgcttggggaaggtttgaacaccgacaatgttgaccacgcgcagctggtggatgcacagtgtgatgctctgggtgtgttggatgcgccgaaaaacgcgtgccgccattttatttacactgcttgggtggggcactccggtgaggaccacacgcgccgattggaagaccagcgcagccacagttttgcccattgttgtacggatgcgcatgatgatagcgtgaaagcgcctggggttatactccgtgtttgagccacgctgcgcaattgccaaaaattgctttcgagttaagggttcaacatttattttaaaaacaacagtacaatttgaaattgaacacatctacaaaacaatggacaaaatttcaagagggaaaaaagttttatgatctccgcctccaaattcaacgacgcacggcaagttggggtggcgcaagcggatgccatgctttatgtaatagtgcatgcggacctttaattttttgttaccgacaaacaaaacaaataaaaataccgttatgccgaggtagcctcggtacgcgggggccgagtgggtgtccaggatggacaggtcattacagcggaccggaaaattgcgcacggacgggcgcaggtgggcggtgcgcagttggacggagcgcaaatgctccacaatgtcccgccgtttctctaagcttttgaaaagcacatgcagctcgtgagcgttgcatttgaaccgcttgcagagatggtccacgagcggaacggggcgacggcgttcggcacatgcacatttttttggagtgcctaaatttaaatttaaatatacgtttaaaacaaaagcaacttgttgctggcgtctcctcaccaattggagcgagcggctcgcgcttcatctcctcgtcaatcaggctgatccaactgggatcatccgcctcctcctcttgctttttcgttggctctttgttggcgtcctgtaaatccatttcgggataagcgttgtttatccaatcggtggcaagaattaaatccatttaaaatctgtgaaaataaaaaaaaaactataaataaaaagaaaattacataaaaaaaagtaaaatggacgccttccaacaatttaaaagggaggatggacaatttcgtcatccattcacaatgattgtgtctgggagcacaggaagtgggaagtcagagtggataatgcgtctgttgcgaaatgtggacaaaatgatctctacccctgttgaacgcgttatttatagctatggtgagttgaacacaaatgtgatgaatctgcagcgcgccggcaaagttgccaatgtgccagtcactgtacacagcggcgtcccacgcgcggaacaagtgcgggagtgtgccaaaaaagaaaaaaccttgctggtgctggatgatttggtggtgggtatgagtcaacaatatttagacgcactcttcacccgtggctcacacaattggggcgtcagcgtaattttggtgactcagcacctgttcaacaaagagctgcgtgtggcgcgcactaattcacactatttagtattaatgcgtaatcctgcgggggcgttgcagatacgcaccatcgccacccacctcttcccgtcaaggactgcccattttattgaggcctaccgggacgcatgcgcaaaaaattttggataccttctcgtggacatgcacccagagagtccggaagatatccgccttc

SEQ ID NO: 96199 - DNA, 413 bp, Heterodera glycines
ttgccatgccaaacgcattctgcaccgcgacctgaagccacagaatttgctcatttcgaagaatggggagctgaagttggccgacttcggcttggcacgggcgcagtcagttccgaccaaaagttacacggccgaagtggtcactctgtggtacagaccaccggatgttctgcttggttccacagactacagtacccacattgacatgtggggcgtgggttgcattctctttgaaatgttggcccggaagccaatgttcccgggaaacaaagtcgaggatcagctcgacctgatttacagaaaactcggcacccccacgccacaattgcacccgcggctttgcgctttgcccgccttcaattgccacccgcgccatttgcggcggcactcgcccagggcattggtttgcctgg

SEQ ID NO: 96200 - DNA, 71 bp, Heterodera glycines
gtttcaaatatcgtaagattgtttgatagggccagacaagagaaggcaactgttggtaccaattttgcggt

SEQ ID NO: 96201 - DNA, 132 bp, Heterodera glycines
aattttattccaaatttaaaaatcaataaaacgcttttttgaggcgcgctttttccaaaaaaaaactttttgtgaagagggggcaggcggcgccgccaggaaaatttttgaaaatactttaaacttaatatt

SEQ ID NO: 96202 - DNA, 280 bp, Heterodera glycines
aaagagaaaaacattcacaaaaatggtaataataaagcagcagtctgacccgttattattcggctgtaaatatgacatcatgtgcggcgtcgcgtcattcacaattaatatgtaaaagaacaattaatgcactagagagtgtgtgtcgtttgtgaatcgaaagagatggagagagaaagcgaaaagtgtccatttggtggtcaaaatgaaacaccaaagggtgaaggagtggcggagattgatcagttaagtacacacaataacaacggttatataatat

SEQ ID NO: 96203 - DNA, 481 bp, Heterodera glycines
ctctatagccttttttgggtccaagaattcgaatatcttttcggcaccttatcccgaccctgatcccaacccttttttccttgcatccatagcattttttggacccggaattcagtatttcgaaaattgacatcccgaccgtggtccaccaatctcccttttccccaacaaacattcttaacgcaacaaaatttggggctggctctccattgttcaactctcatcaaaaccaatgaattttgcttgggcctgacttgtcccgtcccaactgagtacacaagagagccaaaaaataaaacatttttcgtttgcccattttggcggattgaaaatgttcagtctccccgttctccgttcacaaacacagctccccccccccaatctcaaatttcgcgcatcaaccaatttcactctcggttagtttcacaaataaacaattctttgccaaccccgcgcctccggggacggcggacggggcggg

SEQ ID NO: 96204 - DNA, 462 bp, Heterodera glycines
catgtggattaaccctaattaagccaatgtctggccattcaaaaaacgacactttttaaaattccgcattttagggggcaatcaaaaattccacattcttttacatgacaatccaagaatccgttgaaggaaaattcaactggtcaaatggcgccgaatgctcaatttattagtaaattatacaccgaactaagtcaaaccagccaaaagattgtcgaacttaataccacataaattgactttcactgaaagcattttaaatgttaaaaaatatatcaagttcatccaattcgacaatccatggcatgagaattgggacaagaatgattgccaaatgatgaggaacaacaaaaagcatcattttcaaatttcatgcatattaagcggtgcgatagtggtcaggtgattgattttattcattcacattttgtagggatgacaagtgtttattcccgtgtttgt

SEQ ID NO: 96205 - DNA, 682 bp, Heterodera glycines
atttctttaaaaaaatacgacagttggttccatcgtattacaatttttttagaatggctgaggccagaaatattgctgccttaagcttcaccgtaacacacgatggcatttccgtctcttatgaccaggaagttctgcgggacatttggcacgcgttttcacgcagttataaaaaacgcatcgcaaaattcgagaatgatttcttcgctgggattttcccagccaatatccgttcgttggccattgtcattttccttgtggccgcattgaatgtttcattcggaaatgacaaaactccgttcaatcttgccgataagctcaattactacgtcttttccaatatcaccacgctcgacgttttgtcccgcactctctcaattgcctttgcgggttgcattttatggtttttgctcgtccaattctttcgtcttttgctcaaatggtttctcatgtacaaaggttggatgtacgaagcgcctcattctggccaaatttcacaaacgaccaaactttggttttacgttcttcacaaaattgccgcttatgagccgatgacgcactctttccaaggcgctttgcctcatctcccactgccgtcgttggcctccacgatggaaaggcacctccgttcgatgcggccaatcctttcggacagagactacgacgaactcgtagaactgag

SEQ ID NO: 96206 - DNA, 360 bp, Heterodera glycines
cagatagatccatgccaaactctctacatattgtgccaacaatatttcggcatggcttggcgtggtgatgccgtaccgtttttccggggcttcctcgtccgttttttgtttggccgtttttgtccacgggctcggcggttgtttccaactcggacggacagatgcgttccgttcggttctcgttgcagccgctttccgggcaaacttggcacttgtgaatagttaagggtggtgggcaaaatttttccaattctttaaagcattttttttcttccgtggcacatgcgttgagcacaaagttatcatcgcccttctctgatgagagataagaagcattaaaaatgccgccggcggatgttt

SEQ ID NO: 96207 - DNA, 789 bp, Heterodera glycines
gagagagaggcagtcacagcacaatacccctccggggacgaccaaaagcgttgagaacgcaatgaatagagaaaataatgagtgagatggagagaagagagagagagaaagggagaggagagagcgacagagcaaaaggaaaaggcagacaacacgacaaaggagaggagaaaaacggccatttgctgttgttacactgccgggggacgagccaaaccaagttcaaagtgccggtgcgcagcggtttgttttcgttcaatgctaatcagctaattgctcactaattaccccaaataacaaactgtcccctgatgccgacattcgccaacaaatgccttccgctcgaacttctgtacgaaattgtgcctttcatccctgccgaaaatgccgcccctaatgcgctctcgtcctgttcgctgctgcacaaacttttgctgccacgtgtcatcaaatggaaagagaaagcgatggacgaaagaataatcgagctatttgaccaatttaaagaagagatggagcagaaattaatgaacaaattggacgaaattaaagaagttttaagccttgaatttaaccaaaaattcgacgctttggagcaaaaattcgagcaaaaattcgacgctttggaggtgcgcgttggccgcctggagcgaggcactgccacaaacacaaatcaaggaaaaaaatcgctgaacgtccatgaaagattggacctcatctttgaaaaattggggataattcgtgtaaacaaatcgcgttcgcctgaaccttcctgcagcaacactttgc

SEQ ID NO: 96208 - DNA, 493 bp, Heterodera glycines
gaggaagtgaaaagcagttctttttgccatttcaagaacacatggtcaaagtcgaaaaacaaatttcctccgggacttcggatgacccattgagtttggttgattcgatcataaaggaccattttctcaacgatttgaagcacaaacagctcacccccgttcaggcatgtactctccgccacatgttggccaacttcgattgcgtcgtgcagtcgcccaccggcacaggcaaaactttagcttttatgcttccaacgctgcaaattttggtgcaaaagaaactgaccggcgcaggagagggaaaagaacagccgacgtctgtctccgattcgtgtcgcattttggcacttgtggtggcgccgggccgtgatttgattgtccaacttttccatcttttttcaccattgtgcaaaaagcttggccttagcactttgaaattgcacggggctggcggaaaacaaaagaaaaagagcccaaagaagcacatgaaggg

SEQ ID NO: 96209 - DNA, 479 bp, Heterodera glycines
aaaacctcacctcatttgaaaacgcctcatttttctccatgtttaaaattgttttattgtatcatatttattctgcttttatttattgtaaaccattgaagaataattgtgacggaatacatcattacaattttttgttgttgttgtttgctgtattaggatatattccttacaattcgttaattaatgcattttttaaattttgggttttaatttgtcaaatattcgattatttgttgtgcattttattcctatgggctgaaatgagttggctgcccaatgagaatcttttggatgtgttcgcttttttgtccgatgttcgcctcctccgttcggtttccttcgtttgccaccgcttttggcgtttgtctgagttggcacttttcaaatttcacccaatggtggccaaaagtgttcgcatcggttgggacccaaagaatgcttcgcactatttctttgttcaaagtgtaaaatgtgcc

SEQ ID NO: 96210 - DNA, 287 bp, Heterodera glycines
atttgcttctctcttcgtccatttctctgctctttcatccccatggtcctccgtacccccaatccgaactgctccaactccatttgcgcttgcaacggacgcaccgccgcgcgatgcgttgggcgcggcttaacactttcgaggcgggcgccggcttcaaatcgctgaaagattggggggggggggcacaattagggcgaggaaaaggtaatcaattaattagtctactaattaataacgggaaatggtaagacttctgctaacaaaatgagtgactgactcttggg

SEQ ID NO: 96211 - DNA, 377 bp, Heterodera glycines
aagctggagctccccgcggtggcggccgccctacaacagtggatcccccgggctgcaggtatcaaacacgaggcttgatgtccctgagaactccctcaaaagtcgcaccttcgaaatggccaacgaatgtggtcatatttctcttgaggaaaaagcaggttaagaaatgaaaatgaacactgtatagatatcatcgggatatacccgtatgaggtcagagaaaacacagggtccgcttcacgtattctttggacccccccccctccagtgctagccaacaccggaaggggctcggattagcgcaacccgtgcagcacctatggactttcgcgacctgtaggccaactcctaccaggctccccggaggttccgagtat

SEQ ID NO: 96212 - DNA, 633 bp, Heterodera glycines
tccaaaaaaaatttgaaaaaaataaatttcagataaaaatatatatttccgaaagattaataaattaaattttaaaaaaatgcaaaacctaggctttttaataataacgtacgttctatagaaacctaacagatattctcattttttaaaatacaagaatttagtggataacaaattattatatattattattttctttggttgctgtcgatggtcacagaaatggataaaattgctcattgcttgctggtctgctgtttattaataatttttttttcgattgtacggactatggagaaaatgaaaaatgtataaattaacatttgttgcattaatcatccatcaatagggatgcgatttttaggcaaatgcctaaaatttttgcgcacttaatacttacagttaagcacgaaaaacgcattttccgcttgatttggcgtgtctacgatgacttttataatgcctaactttgcctattttggattttttgtgcttaatgcctatttcgccatttttgacgaatttttcaggatttccggaaaattcgttaacaaaaatgcaataaaaatgaaaaatacaccccctaagaatcgacttgaaaattttttagaaaatacaaccccctaagaattg

SEQ ID NO: 96213 - DNA, 457 bp, Heterodera glycines
tcagctgattccttccaaatgccttctgagtacggcattgaaaccgactcagtgactcttcagcgttttgtgctaaacgaacagaagaaattcccggatgcaaccggcgacctgaccactcttctgaccagtctgttgaccgctgtcaaagcgatctcttcggctgtccgcaaggcgggattggcacaattgtacggagttgcgggaaatgtaaatgtgcaaggggaagacgtgaagaaattggatgtgctgagcaacgaagtgagtttcgaagggggggggcattcattcgtttgaaaagtcaaagagtggtaaattggcattactcattgtcagcttatgattaacatgttgaagtcgtcatacaccgtttccactttggtttctgaagagaacgaacaggtcattgaggtggaagtgagcggcacccaaggtcagaagaggagggaaatgcgag

SEQ ID NO: 96214 - DNA, 552 bp, Heterodera glycines
catcgctctccgatcggtcccgaccccctacattcccccgaacggctactctgcgcgcctcgcccatttcatccccttcccgtccccttcaccccgcagagttcgacgcaaatttcttgtcgccacgacattttttgcctatcaaatattcgcaataaatgcccatctatttaaaaaatattctattctattaaaatgttctgtattttgctatatattaagaatagccgtacatctaaaggagtcagtaattgaacaaatttctcaaatttcaagaaaggttcaggcagtcgccgtaaaaattgtctatataaaaacaatggcgatacgcatttctgcactaggtcctttttcaaaattgatgtgcttttattgaaaaacatgtttaacgggccacaaattaatagacaaattcaggcacattcttaaaaaattctgcttttaattagttcatttaatagattatgcttttgctttgtttttttaaattctacgcccgcgattatctgataggacaatgatatcaataaattttcttctgaagaagcgaag

SEQ ID NO: 96215 - DNA, 481 bp, Heterodera glycines
agcgaccgacggacagagagaaatgccctcccccgccacctttttgaactgttccgtggaaccgtcaatggcaaatgtcaatttgtggagaatgtttccgttcgaagttgccgtgctgatccgtccatatcgccgactgttcgccatttcgcgaagccattccatcgccgttttggccctttgcattacaaccgccgctttggaaccctcggggatcagcaactcgcgcgacaaaagggtcgaacccggcggaatgggggcgccgagcgcgagacagttcagctcatcgatcactaggggggagagtgggagatgatgggacaggcaatggcatccctttttcgttagataatcccgttccattccatcgcttcttaccaatggtcgggactaaaacagtgaattggtcggattggacgagccgctgaatatggcccaaatggtcgatgaaagtgtttgtgtcgggaactgagaaaagggg

SEQ ID NO: 96216 - DNA, 420 bp, Heterodera glycines
gtcaagcgatgcattgtgctgcaggaattaaaaaagtccaccgaagcaatggagcagaacaatgaacagatgccatcgcaaatacaactcgatttccatgtcttcacacttccctatgtcctaccacattacgcctgtttatcgttattcgacggagaaattcatcacggcgcaattgcaacctcaaaacaaagggcgaagatcagttgtgcagcagtgttatgtgaagtgttggtgaagatgggctgggcggatgtgaaaagggccaaaaagagaaaaaactccgacggagagaaggcattgaaaaagaaaaaacggaagggagaaaacggacagacggaagacgttgaggagggaaatgtccgtttgtctcatcagttccttttgacattgcatccaaatgaatcgcttgacccaaca

SEQ ID NO: 96217 - DNA, 173 bp, Heterodera glycines
atgacctttataatgcctatttttgcttctttcggggatttttatgcttaatgattaggcgcctattttgtgccaatttcgtcatttttggaacctattttcaggattttcggaagattttttttcttggtaaaaatttttggttaatcaattatctcaattatccttatacg

SEQ ID NO: 96218 - DNA, 377 bp, Heterodera glycines
  unsure (1)..(377): unsure at all n locations
gcttaaaagcattgtacagcatacttaaaagctaatataattttcgtatatttttcacaatttatttcaaaaagccaaaaaaaatgattcaattttgaaacgaaatagtgcacaaaagggagggatggttagacgaaaagaggaattttcagaaaagagcgcaccccatctgatattcccatttttccgttccacaactggccaaaggcgactatgctcattgacacgtagttgttcaataaggtacttggactttccacagtaaaatgtggtacaaaattttggaactgtcccgcctcacggcggggcttaaaagcattgtacagcataattaaaaccgaaaataattttcgtatatttttcacaatttatttcan

SEQ ID NO: 96219 - DNA, 637 bp, Heterodera glycines
gatatttgttcactgataatgcgagaacgaatgtgtgggaaatgtgcggccatatcgctaagcaaagtggtaaaactgaatgcgaactgctcatggatggttatttctaaaagaaaacaaggaaaaaaaaaattaaaatatacttttagaaaaaataaataaaatatacttttaaaggaatgcatttaaatcaaaaaacacactgttcgatttgtcaatcgctccatcatcgtactaacgcaaatttgtcaacgacctaaacgatattcagaagcaattcatggaagcacaaatgaccttaatgcatcggcaaggaaattgccaaacgtttcggcatacttaacaaggataattaacaagaagtcggccattgtcctaccttcccatgtgagtacagcacataaatgccagtgcaaagcaaagctgaacgaacgttgtgattgaaaggatggccgctgattcctgcagtcaatcccccgaggagctcattttgaagacgcgaaagcgaaagatcattttgattagcaaggcacagagcaacacaataacgattcgagaaggcaaagtcattacacattggagccatcaaaaataaatgattaattaaggaaaagcaagcaaataatatataatttgg

SEQ ID NO: 96220 - DNA, 654 bp, Heterodera glycines
atttgtttgcggaaattcacttgtctgtgaaacgcctgaccacgctcgtcagcttgcttatggaaccgatggtcgttcagagcgatttcgagcagttgctttagacgggactcaatttcagccaaatggcgttataagcggcggaggtgccgacttaaaggcaaaagcgaaaaaatgggatgaaaatgcaatcagaaagttgaaagaccgtcgaacggcgttgcaggaagagttgcaaaaactgcaccgaaccgggaaaagggagttggatgttgagatgaaacgggaacagatcacttccctggaggcacgtctacgcttcacacagcaagaattgaagaagagcgaaaacgaaacgctgcggcggttggagcaggacgcggaggtcgaaagtgcggagccggagacaatcgaagtaattaaagccgaacttacaatttagacgaaaaagcaacaacaataaacattcatttattataaaaatttaaacatttatttaaaattttgcacgaattgaaagccgtcgaattgaaattgaggagcgcaaaatcgaaatcgaacgcttggaacaaaacaagaatgcaattgctgacgaaatctttacagaattctgtgcaaaaataggcatcaaccacattcgtgagtatgaacagc

SEQ ID NO: 96221 - DNA, 588 bp, Heterodera glycines
cttctcttcctcctcctccgtctgcgttcctttctcacttggacacaaattgtttctgtttcttttgccaattttgttcgccgtccaacaattcgggatgacagaagccagcccattaatccaacaaaaagatgattccatccccatgccattggtgttcgaccggccatggcaaccaccgatttcgttggtgccaaaccctcccccagcctatttcgtgatccctgcaaatgtgccattggagcggcccatttacgatcaaaatgatagtgccattgaggacgaattggcggaggaagcgaaggcgaagcgagcgcaaacgttcgtccgattcggcaaaagggcacaaacatttgtgcggttcggaaagcgggcacaaacattcgttcgcttcggaagggatgcgcaaaggcagcaagaaatggcaaatgagcaggcgcagaaaaaggagtgaaagggacggcggcgaagtgggagaagcaaaagaataatcattttaagaaagaaaggatgtaaagtgacatgacccttttgatcagagaatgttgcacctttacccaaccgaattgataaaatgtaaatgaaaaa

SEQ ID NO: 96222 - DNA, 1729 bp, Heterodera glycines
cattcatcaagcgaatatggaacgagtgagagaggacgaatatgaaaaaattggtctgatggacattaaacgggaaataaaagccgaactcaatgaagcgattggtcgccaaacggaagatggcgaaacggagccaaaggcggagagagagcgcgagaggaaaagcgacagagagagggagcgcaagaagaagagcaagcggacttcgcgagaccgaagccggtcgaagtcgcgggaacgcaaacgatcacgcgaacgccgacgaagtcgctcgcggtcgaaggaacgccaccgcgagagagagcgaagccgagaaaaggaaaggggcgaaaagaggtcgaaagtgaagagcaacaaatattgggatgtgccacccgctggctacgaacacatgagcccgaaggagtacaaagaactccaagtagtggtcgtccattagaattgcgcaagggtgctgaatcgatggattttttagcatttaggtcttctgtacggtgctttccgaagcattttggcggaattttaacttttagcactcaatttggtcgtctcgtcgtttttcagatttaagatactccgccaaatgttaatcgatatgaaagtcttttaggttttaggggaaaacggtgtcctgctgcatttttggattcatcccaacccaatagcttatagggtgaccgagcacaatcacctcgcaacaaacgcagaatagcattcccactttcttgaattcaccacttttattttagctaccggcgccatccctcgggccaccctccaatcgtctgttccggtggtgggcccttcggtcacttgtcaggcgcgacggctttacgtcgggaacattccattcggttcaaatgaagacgcaatgctggacttttttaaccaacagatgcatttgtgtggtttggcacaggctccaggaaatccggtcattgcgtgtcagataaatttggacaaaaacttcgcgttcattgaattccgttctattgacgagacaacagctgggatggcatttgacggtataaattttatgggtcagcaattgaaaatacgacgacctcgcgactatgtggctccaaccactaattacgaactgcttggcagaatgccagtctctaacattgttgtggacagtcctttcaaattatacattgggggactccctaaccatttgaactcggaacaagtcaaagagctgctgagtgcgtttggacagctgaaggccttcaatttggtgatggacacaaccaccggaatgtcaaagggttacgccttttgcgaatatttggaccagtcgctcactgaccaagcagttgttggtctgaatggaatgcaactcggcgacagtcgtctattggttcagttagccgctgctggagcacgtcaatcggtcacccatccgagcactgcggttcaaatcgcggggattgacttgtccagaggagccggacccccaacggaagtgctttgtctgatgaatatggtaactgaggaggaattgcaacaggacgaagtttacgaagacataacggaagacattcgcgttgaatgcaacaaattcggaaatgttgtgagcatggaaatcccgaggcctgggtacgacgagcgtggtgttggaaaagtattcgttgaattccaatctaaagaagaatgccagaaagctcaggccgcattgactggacgcaaatttgatagccgagtagtggtcacgagttacttcgac

SEQ ID NO: 96223 - DNA, 636 bp, Heterodera glycines
gcggaagcagactgcccagcaatggcccgacttctccaaacgttgtcgtgcgctgataaagcaatggcagaaggtggcagagtacaggcccagctcctcctgcgaaggctcttccaatggcggcactcctcagcttgtctcgccggctttgaagcgcgggctgacaccacgggcgggggccgtgacgacgcccggcaaacgcacaacaccacatcaaccgcaacaacaactacgggtcacttccacagggctttgccctccagattctcgccaacatacgggtcgttcgtcttcaactttggcctcctccgtttcgccggtggagaatggcgtgccgacagcgagcggaagttacgcgccgctgccgtcgactgtcaaaaaagagtcgcctcgacagatcacagcaactgttcagcaacaacattccatacacaagtccgcctcagttggtgcctccctgagctgtctcggcggctcatcggctgcaaagcgaacagggccaatgcttaatggcattgccgaagatgggggaacagtcagcggaggagcgcacttggcctccagctctttctacgccgacgtgacgaaggatttgagagctgtacaaccgtcgctgacggcgccttccgcgccatt

SEQ ID NO: 96224 - DNA, 612 bp, Heterodera glycines
catacgggtcgttcgtcttcaactttggcctcctccgtttcgccggtggagaatggcgtgccgacagcgagcggaagttacgcgccgctgccgtcgactgtcaaaaaagagtcgcctcgacagatcacagcaactgttcagcaacaacattccatacacaagtccgcctcagttggtgcctccctgagctgtctcggcggctcatcggctgcaaagcgaacagggccaatgcttaatggcattgccgaagatgggggaacagtcagcggaggagcgcacttggcctccagctctttctacggtacccggccgtttctttagatggctctaacccccgcctcgttgtgttgtggtacagccgacgtgacgaaggatttgagagctgtacaaccgtcgctgacggcgccttccgcgccattggcctctaatccgccattgacgctgaagttgaagcgttctgccagtggagtgcaacgactgacctcctcgctgtcgccaccgtcggacaatggcattggtgcagcttcgacttcgtcgtcagcgccgcttgttgctcaacaacctcttcagcaactatcggtgcttgctgcgcgacaacaaaatgtgcaatcg

SEQ ID NO: 96225 - DNA, 460 bp, Heterodera glycines
aataagcaatttgatatctcagaaaaaagttatgagagtttcaaatttttatcaggttgtaactcaactccaaaactgctgttttctaccaaaatgcgaaaaactaatcattttttattgattctaaatgtccaaagagattttgtgtccttataaccaaaactattcgaatttgcaagttccatctttttcatgtgttagagacacgaaaatagtacgccaaaacgagagggagttgacccatagtgcgggcattgcgctgtgtcaatgtgtatataagcaagcgctgtaagcaaaagaaatcacttggcttcactttcttttttcctctttttttcttttttttaactgttctttgtctaaactcgcgttttataaagtcctgttttagcgtattcagaagtgccgcaaagaagtctttacgagcccaatttgccgaatcagaagtttggaaatggaa

SEQ ID NO: 96226 - DNA, 483 bp, Heterodera glycines
caaagccttgcctaggacttgagttataacgtgatgaacatttgaaactctcacaacttttttctgagatgtcaaattgcttagcattcacttagaaaaagattccccttttcaaaatctttttttagataccaaatttgttcagtttaattgggaatgaagcgagttatggcagatcaaaataaaaaatacaaaaaggcattttccagtgtaaattttgaattaacgcgcaaaaatttacgccaaatgcgctatttggcgttatgagcaattttgtctgacactggcgcgtacccatagtgctgtcgctctatctctcgccttctctctcgctctctccactttatcactgtcactcaatctctctttttctctctcactctctcccctttctctcacactgttcactttatcactcactatctctcgatctcttcattttatcactgtctctctatctttatccattctttctcatagaaa

SEQ ID NO: 96227 - DNA, 631 bp, Heterodera glycines
gtttgagaaattgccgatgaagaggaaggcatttgcactgacacagtgcagcaaaatcctctcgattgtctgcgatgcttttcccctatcaaatgccccgtccgtttgccttgtcagcactatttttgtcgtttgtgcatcgccgatgagaagtgttgtgtgatttgtggtcatccgattggctgttccgagttagtagaggacaaagtgctgaattacgtgttggaaagttcgagtgaggtcactgagacatgtgcaaattgcgaccagatttcgcaaccgatgttcttctgcgacacgtgccatcagcccctttgcagcgggtgtcgcgagacgacccacaaagccaaaatattctcgactcatcacatttttgagttggaggagcgcgggaggttgagaagtcgccccatctgtccacagcacaatgagccgttcattttattctgtctcgactcgaaatcgctgatgtgcatcgaatgcttcaattcgtcttcgttggaacgacgcggacatttcgtcaacatcgaactggcgcacaaaatttgctgaggaacttcgtgagcaaattgagttgaggaaacgattgacggacgaactttcgaagaacagcgagaatttgagagaggaa

SEQ ID NO: 96228 - DNA, 474 bp, Heterodera glycines
cgcacttttgacgaattccaaatggcctctcaaaagcaattacgtgagaaaaagtgttccgaagtcgaggacaaaacaaacgacggcacagaacgggaaatgacaaattccaccagcaatttttacaaattgaccaaaaccgattcgcaaagctctgtagaacagaatgttgcgaatttggagcgtaatttgtcatcgaatttggtggtcccttcgacgagtggccgatgtgccaatcggagagacgaggaggaaacttccaaccctaaaaatgcccaactttcggagcaaacaaagtgtacaccggaacagcacgaggaaaagacggacgaatgcccgccgaaagagtccaacgttcgactgaccaataaaatctgcaaaaggcgcatgaacaaagttgagaatgttgcccatttgaatggccgtgggggcattggggcgctcggttggcaggcgacgcttccgtcggcccgg

SEQ ID NO: 96229 - DNA, 695 bp, Heterodera glycines
tgtttgcggtacgggcctggttatccatgccaaactgaacaggtagatggatgccaaaaaaaaaaaacaatttgtgtaaaaaaaaaatattaagctaccaaatggtggaagtagtgctcgaaagtgcgctgattgccagttcgtcttcccaaacgatggctgctacaacttctttttggccaacaatcctccagctccaatggatgggcgtggacagcgtcaacgtcagccaatctgtcaatggcgccgggtgtgtcgtgcgtgtggacgtatcgcctacgtggccacacatcagtgcccacgtgaccaaccagccgacgatggaatctgtcggcgctgcaatgggccccacaccgtcgatgagccttgctacatccagcccattgacgacggctcagttcgacaacgtgcatcgattgctgttgacaacgacgacaactcagatgacaacggtgacgatgacggcgaagacgacgtattgccgcttcgactttgcttcttcgatgcagagacgtcgcaggacagcccgctccagcttaacaaccgattggtgcagaagcacgtcccgctgttgatcattgcagaagtcatctgtgaacgttgtcttcaggttggcatcagcgtcaacgatgggcttggaagaagagctcctggctgcgtctgcatgacaggaatggtgaggggtcaactgtttc

SEQ ID NO: 96230 - DNA, 805 bp, Heterodera glycines
gtttgaggaaagtgcttaattcgcaaagggataccaactgcttaggagatgccatcgtccagcgggtcggaaaagggtaatggacgcaatggcgttcgtggcgaggaagaagtgaagggaggaaaagaaattgctagcaagacacttaatattcaatcgaagcgtttttatttggacgtcaagcaaaatgatcgtggacgtttcgtcaaattggctgaggttgctatgaatggtcgaaagaatcgtttgttcatgtcaatgcgaatttgcaagaatattaaggaattgttggggaagtttgaggggcacgtgccagcgtcggaggaagtgaatgggaaagcggagaatgtgaccattcaatctgaatctatcgtgaccgagagacgtcgatattacatcgaccttcgcgaaaatcggcgtggttcctttttgcggattactcagctcgagacgcattccgggattcgcaactcagtggcattgccatttgaggggatcggccaattgcacgatgcactggactcaattctggaggaatatggcgaagggttcattgaggaggaagccgaacttccccattctcagatgattcgtactgatgggaaaagctttttttttgatcctggccacaattctcgcggggactttctgaaaatcaccgagttgaagtcattcatgggagtgcgcaattccgtcgtcctttcaatcagagcaattccgcaattcactcaagtcctctccaagctctacgatgactttcaggagctcagagccgtagaggaagtgaacgtgaacaatgtgctta

SEQ ID NO: 96231 - DNA, 871 bp, Heterodera glycines
  unsure (1)..(871): unsure at all n locations
ataaaaatgaaaaatttgaatacttttttcctgtgctaagcaacagacaatgagctatgatccttacctatctggaacaagttccaatgctcgtcgattgttgggcgcacccccatctctgtcacgtgatgttataacgaagtcattcgtaaaaatggactgcagtcatgaagcgtcacttggcacggaatgcagcggcgaagaaagcgaagcagcaaaaacagcggatgaaactgaaggagaattgaagccgtcacaacgcgacgaagaagaggaaaatgggacaacggggaaaaggcagcaaaagagacgaaagcgacgaattcgactcacagatattggaccgaaggcaaagaaaaaggccgaacgaagggaaaaaccaatggcggagaagaagaatgaagtgcaagatgagaccaatccaaccgaaactcattgtcagtcatctaaaatgtcgcctcctttacttgaaatcgaaaatgaactcggacaaaacccaccaaataaagtgaagccttctcctcactttttcacgccatttcaattactttgtgacaatttgatacggaaattcatggccaaagatcccgagaaatattttgcgcagccagtgacagagttggaagcgcctggatatcattcaatcgttgattatccgatgtcattttcaacaatcaatgacaaaatagataataatatgtacttgaatttggatcaattcaaatctgacatttgtctggtttctgacaacgcaatgctttacaataacacaggaagtgtttattttttggcagcgcaaaaattgaaagttttggcaaaatattattntttccgagaagtatcttttgttcctcgtctattcgttgccctt

SEQ ID NO: 96232 - DNA, 644 bp, Heterodera glycines
tttttgttagcgcttttttgaatgaattctcagcaattggatgatcttaattcttgccttaatcagctattacgaacaattaaggaggacacgagtgaattccctccgtctgaccttcttgatgagattaaacaatgcttggattttctcgccaactcgccaaaaatactcgcaaaacaacgagccgaatacatttccctttcctggcctgctgaccttcgcgtcgtgcttaacagactcttgcgcactttcaatatcccggaggaatatgtcaaattatgcttcgaactgagcaattgtgcggcacaaagtttgggcgccgattggctaaaatcgtcggataagcaattcctgcgtctgttggccagtctctccagttgtcgtcttcgcattttgttggataaacctgaggagattgacatggctcagctcatcgcctgtcatcagctccaggaatatttttgcggctgtgttgaggatgaacagagttggatgagcgacgatgatgccactttcgtttccaaatgctgtcaagaagcagcagccctttgtctgttcttacacagccgcttgtgcccatcaattgtccgacatcacttcgcgaatggatcttttctttgtcctttatcgtttcatttgtgctt

SEQ ID NO: 96233 - DNA, 540 bp, Heterodera glycines
tggagctccccgcggtggcggccgctctacaactagtggatcccccgggctgcaggtttaccttgccgttaatcggacaacccgaacaattgaattgaacgcgttaaaactgcgttttgatccgaataatttgatggcgtacgaattgaaaaggacggacaatttggcaactggggacgaggtggacagaacgccgaaagtgatcggaattcgggtggatgaagcgcgagaaaaggtgttcttcgacttggacggcgatttaaccctgggaaatcattacgccctgcggattccttattcgggcccaatcgcctccaaattgtccggcctttacctgaccacgtacacaacgctttccggagagcacaaatgtgcggcagtcactcaaatggagccgacggatgcacgcagaatggtgccctccttcgatgagcccgaattcaaagcgatctttcggctgagtgtcactcatccgaaagggtcgcgggcggtgagcaacgcgaaggaattgcgggagcagcagcaaacggaagagacgga

SEQ ID NO: 96234 - DNA, 312 bp, Heterodera glycines
agcaaaataagcaggttaattgaatttactatgatttaaattaggtgattgcaattacagacaattaaaactatttttatattttaaatccttaatttggtgcccaaacttcctcctcacattcatttataattttgcttacaataattcattaaataaatgtttagataatttatagttctttctgtacttattacatatgcttcttcattctttcacaaattctttctttctttatccactaatttccgtccattctcttttcacatggcgaagcagaagttgaagagaaaggctaaaacaatgtaatat

SEQ ID NO: 96235 - DNA, 661 bp, Heterodera glycines
caatgaattttgtcaagagaattgatttttattatgatgttacgacaatatcttcttggataatgttcgagcgtttaaatgtcacgcgaagactctgtccttccattgagtataacttccgacctgtgcattattcgagcttattaacttctgctggaagtttggtccctttctccacggcggcattgagaaaaaatttctttgaacagcagagagaattggcccgagtccatggcattacaattgggaccagacatggcgtaattgatgatttactcgcaaaattatcaaacacagtgctgccccaatgttttatgaatatggttgcgtcggaaagggggcacgaaagcctcattgaactttcaagaagcttttggcgcaaattatggatttcaaatgtacacctggaccatgaggagtttctcgagagtctcagacaattgaatattcaaattccacccgatgaaattattttcaataaccgatgggggaaattgatcgaacaatggcattgtgagcttctgaatcgacaggtggatgatttggttgaggacctttacatggaagttgatgaagccgaatatgaagccaaaaaacgcgagcaccgttcctttgttgaaaatgatggtagtcattattacgatgaggaggatgattctga

SEQ ID NO: 96236 - DNA, 477 bp, Heterodera glycines
cactttcgacatcaccgtgcaaaacaccgccagcaatttccttcgcaacaattacattttcataacggtcggcaaactcaactcggccgtcgaaacgattgaccaacaattcattgaagtccagaaatattccaagcaggacaaattgttggaaatgcttaaaactgatgccatttggaggccacgcccaaacgaagaccctttcttgaagccggccaagaaaacgctaattttcgtggaaacgaagcgaaattcggaccgtcttgcaattgctctgacacaagaaaaattctacaatacgcaaagtttgaacagtgatcggaccctcgaacaacgtcacttggccgtccgcaaattcatccagggccaatacgacattttggtgtccactgacgtggccgctcgtggtatcaacataccgaatgtcgaacacgtgattaactacgatttgcccgagaaagaaatcgacacttacat

SEQ ID NO: 96237 - DNA, 398 bp, Heterodera glycines
aaattattattcacctttgtcgcccttcttaacactgtatcgtggctatttatcctaataactcacttcaatctgaacttacgataatgtaattgattctatttgaaagagcatgaaattctacacctgaataactgctcagaattttaaaatctctttaattagaattttaaaaaattattattaaactttgtcgcccttttttggtcaataaagctgaattagttgaaaactgttcctcagcctctcatcatatcaatatactttattacaaggacaatttgaacgtgtacttgaagcaattttataatccccggccccatttataagaccgatttttaaatagatttctgcacctgaataactgatagaattttaatttctctttaataaaaatt

SEQ ID NO: 96238 - DNA, 910 bp, Heterodera glycines
tcaaatgtgccgactccaagcaactcatctgctcgctcgactctttctgcttcttgcgctttgcactgctctcgttagctctctcactgctgttgccccgccattcggccaattgtccgtttccggcaccaatttggtcggcgccaacggacaacccgtacagctgatcggcaactcactgttctggcaccaatggtacccgcagttttggaacgctgacacagtgaaggcactcaaatgcaattggaatgccaatgtcatccggggggccatgggcgtggacgagggcggctatctgagtgacgcgaacacggcttacaatctgatggtggcagtgatcgaagcggccatttccaatggcatttacgtgatcgtcgattggcatgcccacaattcacatccggacgaagcggtcaaattcttcacccgaattgctcaagcgtacggctcctaccctcacattttgtacgaggatttcaacgagccgctgagcgtttcgtggaccgatgtgctggtgccataccacaaaaaggtcattgctgccatccgagctattgacaagaaaaatgtgatcattctcggcactccaacatggtcccaagacgtggatgtggcatcacagaacccaatcaaagactaccaaaatctgatgtacactctccacttttacgcgtccagtcacttcacgaatgatcttggtgccaagctcaaaacagccgtgaacaacggtttgcctgtgttcgtcactgagtacggcacatgcgaagcgtcgggcaacggcaacttgaacactgactcgatgtccagctggtggactctgctggacagcttgaagatttcatacgccaactgggcaatctccgacaaaagtgaggcctgctcagcactgagccccggtacaactgctgcc

SEQ ID NO: 96239 - DNA, 480 bp, Heterodera glycines
attgatcagaccactccttcatagtttctccttctcttgctctctctcttcctttctccttctctttctctctctcttcctttctccctctctctctttctctccctctctttctctccctctgactttgcctttcactctctctcttttcctttatctactatcagtaagtctctctccctctccctttcttcctctctattacgctttaccattgcattctctctctctctcttactctctctccgacttctctttcgctctctgatttcctttcgcactcactttcttctcactctctgttaatctcccttttctctccatctctcttccttttttccttttactctctctctctctctttgtctctaattttactatttctgttttactttctctctttacctctctcctctctgtcagtctctatctatcactttgacttctcttttctccttctcttgtttttttttctagtat

SEQ ID NO: 96240 - DNA, 641 bp, Heterodera glycines
aaattacacaattcctaaattgcttatttgaaaatgcattccaaaacagcacttaattgcttgctcatttgggcattggcatttatcgttgttggctttgtccaagtgactgtgcagcagccgccgaacgaacagcagcgggaggaggacaaaggcatcttcgagaaaagcaaggacactctgtcgaacgcggcggaaggcacgaaggattggctggtgggggcgaaggactcggttgccgatacgttttcttctgcgaaggaaacggcgactgacaaagccacggaaactaaggacaaagcgtccgattacgccgaatcagcgcgcgaaaaagcgtcggaagggtacgaaggcgcgaagcagggggcacaagagcgatatgagagcgcaaaggaatacggaaaagagaagacggaacagttgaaggagggcgggagaaaagtggcgggagaggccgaccgaaagactgagatctaaataaaaagaaggcgcaaaaactgttgatggaatggaatgggggagtgatgcccgaagatggtgttaattggatgaaccaatgagaaattggactctatgagccctttctttgctcgtttctctcattcttgccctagtattttttatacggataaaatttcaat

SEQ ID NO: 96241 - DNA, 873 bp, Heterodera glycines
gaattgattcgtgagccaatgttcggaaattactatcagtttgatggcacttttctggaaagtgatgttcttgagccaacttctgtcacggctttggctaatgacagcaaagcgttgttggacgcccgggccaaactttgggatgaaaaattcggaaatgacaaatgcacattgcagaaaatcaaggaaatgggcatcgattcgttagtgaaaaaaatttttgattcgtctgtgagcgaagaagcgatggaagagaatgaaacggagcaaaaggcaaatggaaatgttaagttgcacgtcgaagtaaagcgaagcggcataaaaaacaaaaacggggcggagatttattgctcggacaattttccattggttatcgacagcagtggcctcttgaacagattcttggaggatgagccaatcataagacacgcgccggaccgaaaattcggtgtttggtgcgcgccgcgaaaatattcgatcgacggaattcaatggaaaattgtgcggattgatccggagagcaaaccaaagaaatcggtcccgaacggagttagcaaaatgaatgggttcagcaaagaatgtgtcagcaatggagggcagactgacgaatgcatttcgagttctccatcgaccgttccttcgcttccatcgacgactgttcgaaactccccgaaattggaggaggaggaggagaaagtggatgagaatgaactctttgagggactcatctgctcgcaaaatgaaacccatttcctcgtcttttcccctgggcgtcgttggttgggccgtttggacaaggcaaagtgtggcaaggacagtgcgtctattctcgggatgtggatccaattcaaaatcaagaataaagccggtatg

SEQ ID NO: 96242 - DNA, 475 bp, Heterodera glycines
atttatccaaaaaattctacaaaaatagctcctgatcaatcattgttgccagaaaaaaaagttaaaaaaatatgggctcaactgatcaaacgaaggcattgttttccacgctcatccaacggccaactctcactgatcagctgttgcagcgaccacccttcaaattcatccacgacattgtgcatgagacattacgtgtgaccggctttttggacggtctgttcacgagtgatgagcttgactcaacaaaagccggctcgtcgcgcgacaataaaatggcctttctacaaaagttaattgacgcgctgaacatggacggtcaccttgacgacgtgaagccagcaaaaattgtggccggcaaggaagcagaaatgaccaatttgttgctgcagtcatttgcctctgaggccacaatgtacgcgaagcaagacaacaacaagcagcagcagggggatgtagcggtgaagaaaagtgc

SEQ ID NO: 96243 - DNA, 678 bp, Heterodera glycines
tggccatacaccgggattatgaaagcccgttttccggctacatagaaatgcacgaacacacgtctgcgttttgttttaccatggttgagcgagatatgcgaattttttatgactcaggggcgggtactcctatgggtagatacacgttggtactacacggcatcgtacaggggaactatttgggaaatgattcgggattgggactccctatttttttcttctggttttactgggagggaaggagccagacaaaccgcaacggtttttttaggagtcgtctttttctggcaaaggtccaaatgctaaaggtcatggcattagcttggggaaaagaactgttgacttccccaattgaagtactactaaatgttttctttaatcgtatggacaggtctttaacgattaaaaatctatatgtcattattattacagagaattgcttggctcttggtcgttgctctatcgggtccctccaagtctctttgatatttctcgtcgaattgttgcagaaaaaatgatggaagaatttttaaaactgccatcacactttcgaattgctttttataataaatattaattgtgtaattttttttttgccttagttatagtcgaaatttatttttaattgtagaattttctaaaatttattttagtctcgaaaaatgcacagaaagacgc

SEQ ID NO: 96244 - DNA, 813 bp, Heterodera glycines
aaagctggagctccccgcggtggcggccgcattcgactagtggatcccccgggctgcattactcgagcacgagggagagaactagtctcgagttttttttttttttttttttttgacttcttttctgtttcttttcccttactttctcctttcctttccctctctctttgctcctcctttcttccctttctcccatttgtgcatcaatgaccatcgatgtttggtgctttctttctctttgtctgtgagtccatgcgttttcactataaaaggcaacttcatatattcgtttcatcattcttttcaacatttttcgtattgttttcgtcgtccgtttgttttccctttttctctctttttcattttcccttttcatttccattccaagaattccctccacctttttctccaatttcttaaatgatgtccaacgcaaccaaaaacattctcggcactccaacaatcgtcgacaatgttagtttcgaccccaaagtgagcgccaatttccttcacaaagccatcgaagagaagcgaaaggtgagaaaggaaatagtgcgggaaaagaagagagagagaaagagaaattcaggatgagattatccatttgctgtgcaccatttccaaccaacagcggcaagaattggcacgcgaattcaaacaattgttcggcgaagatttgtccgccaaactgaagaaggcactctctggcgactttgaggaactgattttggctttgttggaaccgccagctgtttacgatgcgcagcaaatgcaccgcgcgatgtccggcctcggcactcgcgaatcggttct

SEQ ID NO: 96245 - DNA, 840 bp, Heterodera glycines
taaaactgtaaaagaatgacggagaatcgccgcgcggcacgtgaaattcagcgacaacagcagaaacagcagtcgttgctgaagaaaattgatttttgctcgtccaatgtgttcgatttgttggaccgtcccacggttggcacttcgttggcaccgatcagtgccgtgtttgatgcgattgtcgatgcccatctctttggcaaaaatcggtacattgatcatactgtcgtggcctttctgcaccgcattcgtcgcctcttccgtcactcggccattgcccttaaaatggtcatttggccgcagtccgtccgcgcatggcacgtcatggcccagcaaatttggcccctggcggcgtccaatgtgtgccagctgagcgtggacagttatgtgttctcccgtctccgtgagttcgtttcgccgtccgtcctccgcgactgtgccaaccttcgccaaattgagtcggacggactgttccctgaaggcccacccgacgaccatccgcacgcgtcggatggccaagcgttggccaaatggctgcacacgccgcgcgcggacggcaggccgaaactgctaaatgtggaggcgatgacgggccaattccacgagcaaattgaacgactcaaagaaaataagcaagaggacggccgaaacaagtccaagacgccgaaaaataacttttattggtaagtttatccctcattttttgtgccattttaggcctttttgttcgcctcgtcgcccgtcagtttcgccatccgtttgtcgatgcatttgcccggtgcgtacgttccattcgccgtggacaatggccaaacgcaggaacggctgacattctgttgc

SEQ ID NO: 96246 - DNA, 480 bp, Heterodera glycines
gaatgacaacggtcggcattttgggcggctcccatcaatggttccccgcggaccaaccggcggaattgatctgtgccgcctctgtttcttcgctggttgaacgcgtcgagtggaagagggccggcggggacgcgttgccttcggatgccagcgacgaggaacaccgcggggtgctccgattcgacccgttcaaacctgctgatcacgcgggtgagtacgagtgcaacgcgtaccgtaacgaggaagtgatcgccaccagcaaagtggaagtgcaccccgagggcgacacgcggcccgaccttttgcacgtggacatttcaccgccgcaagtgcgcatggtgaacgcgggcgactcaattgtgttggactgtgtggtgcacggccgttctgcggatgagttcacttattcctggtcactcgcgcgtggcggagcactgatccgtgagttgggcaggcaaagtcagctgctggtcaagtcgg

SEQ ID NO: 96247 - DNA, 605 bp, Heterodera glycines
gtcaattgttgacgaaattcttttaattttgggaaagccaaatgcacatgaccaattgaagggtgctctttacgtgctgaccaatggcaaagagcagtcgcttctgctaagacaagattgggccgttctgttgcagctttggcccgcattgtgtttggttgacaattccgagaacaaacaaagcatcattcaactcactgatttggcccgtgatctcattgtttccaacttttcatcttttcaaattgaatattatcttcccgactccgttatgcctttggctgaacaactgttgtccgattaccccggcatttgtcataaaccggcgtggccattgcccgacaaacaaaaattgggagaatttcgggaaagggaagcggagatatgcggacgaaatcgcgaaaattttcttgccttggccgagaagctgctgacaatcgcaaaagacgagaatttgcactggcggcaggtcgactttgccgaaacgcttctctcattgctgcttcggaaggactgcgacttgccggagggtgttgtgctgcacttcttcaagctgctcacttctgacattataaacactcgcaaaattgccattggcttctgta

SEQ ID NO: 96248 - DNA, 875 bp, Heterodera glycines
gagaaacaccccttaaattattctaaaattacaattatttcttggtctaaactccaacaaaaatggaccggtccatcctcgtcccctacacttctcggttgatgtccgaaatttcgcccggtcaaacactgaacattcatggcaatgtgaacgcggatgcgcaccgtttcgaggtcaatttgttgagcaattgcgtcgaaattgatgcccacatgggctccgcgccgctgcacttcatcgtttgatttgacgaaggcaaagtcgtgctcaactcatttgctgccggagaatgggggaaggaagagcgccactcgaaccctttcaccaagggacagcccttcgacctgcgattccgcgtccacgaagatcgaatcgaaatattcgccaatcaaaaacaaatcaccgaattcaaacatcgaatcctttacaccaacgttgaccacattcaggtccgtggcgacgtcacattgagtggcgttcactggggcggtcgctacttcgaacttccattccaagcgaatttccacggcacttctctcaaaagcggccaacgtctttttgtctatggcattccgaagggcaatttcagcatcaatttgatcggtgccaacggggacacacttttccatttgaatccgcgttttagcgagaaaaagattgtccgcggctcccaaaaagacggcgtgtggggcgaggaagagcgcgagggcgccttcccactgaagaaggaacaggcggcggacatcgccgtgttcaacgagccgtactccctgcagattttcatccacggccaccattactgcgcatttgcacaccgggtggaggcgccgaacaccgactacaatttggtgcccgtcgaaggagaccatggactg

SEQ ID NO: 96249 - DNA, 666 bp, Heterodera glycines
gagatatctttcacacttacaaataataaccataataccgaattaaagcggggggcgtgtggtgtaaggatgtgtcatattgagacctatattttcatggattttgagacaacgggactttttgacgacggccacaacaacccgttgaccaaccccaatcggtccaatgagacggccagagaacgtgcccagaggctggacaacctcatcaagtcagatggaaatcgctttcctaaaatcacggaaatggcttatatgtcggtgccgcgggtgttgttccttgagggaacggagcaaatgtccgcgcgccatttgtcatcgatgtcgcaagacggcgaagaaagcattgagccggtgcaggtcgttacgaatgtacacgtgcgacagctgaatccgcagcttaatgacaaggagcggttcaagtacgaggaattgcaacggaaagtgccaagcgtgcttctcaaacaatccgatttgacatgcaaatgcactttcgctcaggaatggcccggagtcgtccacctgcttcagactgttccaaaaccagcctgtctggttgcgcacaatggtctcaactttgacttccgaattctgtgccacgagttgcgcaagagcgacctgttccgtacccatccgatcccagaacaggtttatttcctcgacacg

SEQ ID NO: 96250 - DNA, 619 bp, Heterodera glycines
gtttgagttgttgttttttattattacttttcttcattttgataatggcatccgcaaagtgtgccagggaagactgtggcaaaacggtgtaccctttggaggaattgaaatgcctggacaagctacaaaggctacgacaaaaagccatactgccaagcttattaccccaaaacggttccgtcggccgtggccgcaacgccggagatggaacaagcgaagcgaaacacggcctatcagagtcaggtgaaataccacgaggcgtatgagaagcaaatgaaaggcacgaagatggaagtggccgatgacccggaaacgatgcgacacaaagccaacatggtaaaccaatccttggcccattaccacggcgaactgcagaagaaagagaagcaggactcacagagggacaccactgcaggttcagccccgtctgttggttttgcggtgcacagttcgccctctttggattcgcttggctctgccatttccaccgcctcttccgtcgtccgtccgtccaacggcagcagcagcggaaatattggacacgttcagcagaacatccgccggaattcaccccaacagcaccaccaacagcagacgtactcctacgggcaactgttct

SEQ ID NO: 96251 - DNA, 527 bp, Heterodera glycines
tagactagtggatccccgggctgcaggaattcggcacgagggttcaacaatcacgccaaccacttcatgccgaatttttgcattcccccacctccgccaccacaacttcctcaacctttgaattcggctcgagttttctttccgccggttcctcatcaccatcatccggcttattaccttcaacctcaacatgcacatcctcatatgaaccctcagttcttcaatttaagcgttccgcctcctcaaattacgcaaaatatcagcagtttgatcgcagcaaatattaacaactatccaactcgtcatccgctcaatggcacacatcaaataaccacatcggaaaggttcagcaaaacgttccatactgggcatgcgaatggtttcacatcgaaaggcaatggagcgccgctcagcaggtcaagaaagcgatttcttgaacaaattaccaacgaagaagggtggatttaattttaattaaatacatgtttgaaagattcagcacctcgggagaacttcgaattgaattg

SEQ ID NO: 96252 - DNA, 564 bp, Heterodera glycines
ttgtttttgttgggtcggaagtgctgctgttcgacagttccatgctcagcgacagctaacggattcgggtcgattcaacggagaaggctttggacttcgatggcacggctttcctcttccgatgtgtataaacatgaccatttcctgcactttgaccatctgcacattgacaacattcactgtgccaggaagttggtcgtccatttgaggcccagcgagcgcacacttttgctgcaagcgctgaccgaattgaacgccgaggcgaagacggatggaaatggtcattcagaccatccgccttcgcctgctcagatgaagcagttgttcttcgtcaacacaatcccgttcgtcggcttcggtgtcctggacaacatgatcatgatcttggccggcgaatacattgatctttaccttggcactttgctgtgcatctccacaatggctgccgccgcgttgggcaacatcatttcggacgtggccggcgggggggtggcccattacgttgaacaattccccaggcatttgggctacaaacaccccgtgctccccccaaagcaattggag

SEQ ID NO: 96253 - DNA, 251 bp, Heterodera glycines
agaatgtagccagcagacggggacgaggaggaggaggaggacggacggggaaaaaaggggagaaatgagcgaggggaaagggagggaccgactgatcacaattaaggagggcttacaaaaaacaatcataatgcatacatacatagacatataatatttcctttttacaatacaacacattatgttaattgattcctttctagaagcagaagaagcagcggagggagacaagcagcggcaggtggtaaagc

SEQ ID NO: 96254 - DNA, 178 bp, Heterodera glycines
cccaattttggctttttggctaaaaaaaagtcctaaattaaaatgaaattgttaaaatcggaaaacgaatatttgaaattaaagaaatttcttataaattttagattattgtgaatgcgagtgccgatgaattttacaaacagccaatgttttatttcttggcacatttcaggttgac

SEQ ID NO: 96255 - DNA, 548 bp, Heterodera glycines
gtgaaacggttaatctttactcattcattccaaacgaagaatgggaagtgatgtccttcaaaattcaccgagtggtggagaaattcgtctgctgtgatgagccgtgggtccttttgcacgcttctttggtcgttcgacgaaagcccctctattacattgtgaatctcgttctgcccacttcggtgatcactttggtggcggtcaccggctttttcacgcccgcctccaccagcaatgaacgccgcgaaaagctcagtttgggcatcgattcgttattggcaatgtccattctgatgatgatggtcagcgaacaaatgccaaccacttccgaatatgtgccattgttcggtctcttctacctgtccatcattgtcattattttttctggcactttgatcaccgccctcgtcctcaatgttcaccttcagaagacctataatcgtccgattccgcctttgatcaccttcatctttttccataaaatcgccccttggcttggcatccgtccttcaacaattcttttggaactttggcaagaaactggagtg

SEQ ID NO: 96256 - DNA, 599 bp, Heterodera glycines
ctttttaaacttgacagacttgaaacccgtagaaaagttattgatcttaccactgcttttaaaataatcaactgtcatactcatttagaccctcaaaaactttacactttctcaaaaagattaagatttaattgtattagattaatatctaaacacaaaaccaacaaaaccgaaaactcatttattaatagaacaataaaacaatggaacaatcttgattctaaaattacggcatcatcttccatatgtagttttaaaaacaaagtcataaaatgggttaaagcccctaaatacaataaaaatatttacattgcatgagaaaaatatttttatttatatatttatttatcactatgtcgttgttgtgatctgactttattttcatgtgtgatctccatatattctccatttttgtattcaccgatcttcagagtaagtggctaatgcccttctgtagatattttattgactgaataaatacatctgaaaagtgcggatgaaattgaaatgtggtactgtacaagtacactacagtactcgcaatattgtgtaatgggaaataaaaattgtaaattatcaataatgccttacttgtccct

SEQ ID NO: 96257 - DNA, 481 bp, Heterodera glycines
gtgactcggtgccgaacgccggagggtattggtcaacgcctgcagcaaaagaagtgcggaaactcgtgccataattatgccggatttcaattttcctcccccactaattttggcacaaaaattactaaacgccgctccgagtgagtgctgcgcattgtggtgctggtcgatgctggacgggtgccgaaagtccgccaaatgtgccaaggacggagtcatgggcctgagttggtgcagcggtgagccgtccgacggacgcggcgacgaggagacactgttccgcgcgaaggaagggcgcgagcggcgccggaagtcgtccagcgttttctgagaacggaccgatcgaatgaaaatgagggcaatcattgtgagctgatcaaaagaagcgattgtcctacgtaaactgttcatgatcagaatacggaagcattctcgaatatatcaattggtctttgaattattatcaaaatgttgaacatta

SEQ ID NO: 96258 - DNA, 690 bp, Heterodera glycines
atgggtgtccaccgtcgctttgtcgtgggtggaggtgaacaagcagtacttgcacttgtagatgggcttcttcagatgcttctccagcaaatgcagcagacgacgcttcttactgatagtctgagatgggcaaaagtttaatttggaaaatgagtctcgggcgggggctttgaactcaaaagaatggatggaaacggaaatgccattttctcattccttggaaacgccccaatttttccccatcaaatggcaatttgtccccccccccctcactgtctctcacctgagcacatcctcggcactttgcccttctgctttcgtccgcaattgtaatgttggacaaccgttttggtctgcccgggaagcattggttgtgcaactccgagaattcggctctgtgcttctccacgttggcgatgggttccatgcccttaaatttcgtctgtccctttgtcttttttaccctttcgtctgtccgttcgcttgcctcgcattccttcagcgtgtgattgttgcgcatgtgtcgttgcacaagccgtgcctcggccgcgccgtactcgcacaatggacactggtgcagcgggatgttcaggtggtactccgcaatgtgccgcgatgtttgccgtacgtccaaaccgcagaggcggcaccggttgaagtcctccgtgacactggcgggcaggcgccgat

SEQ ID NO: 96259 - DNA, 484 bp, Heterodera glycines
caagtttgagatttcgatggatgccccggccgatgcccccggggtgcatttgtttggcactgtcgtccccaaagaagtgttcctcgcccaactcttttaccttctctacttcgcctcctttggctctctgtttccgcttttggccgtttactttaaacaactcggactgtccgctgcccaggccggcattttgttgggctcgcgtccattggtcgaattcgtcgccagccctttttgggggagtttcgccgaccgtttccgcaagggcaaactgttgctgctgtgctccctctgttcaatggtcgttttcactttggccgttggcttcgtccaaccgctcactccttattgcgttgtgctcgaccaaaactctaccggcggcgaatgcaaatttttggtgccggccagcgaaattgtcagaggaggcgcactcggatacatcaaaaaagttgccggcattggacggcgccggaggggcaaaacc

SEQ ID NO: 96260 - DNA, 550 bp, Heterodera glycines
ggagctccccgcggtggcggccgctttcgaactagtggatcccccgggctgctttacctcagcacgaggatttgaaatcactccgccgatcattcacaaaagctcaaaaataatcccccgtaaagcgaacacaaaatgagaatgacccaagacgcaaatttgagcactttttgtgcccttttcactttccttctgattgttgaaggaactttcggcatttttggcattggcagcagtgacaatgacacaacgacgacgacgacacagggagggggagggacatcgacgacgacggcaaaaccaaagggaggatggacggcacacgacgaaaaccattccgatgactcatcaattcgcggcaaagcgcgcgagaagcgacagcaaacgaaccaacagcaacagcagccgaacttggagtctttgcccgtatgtgctaccggacagtcgcccattgcgccaattccgcccgccggccccgtccttccgatcggcgccattccgcccaccgtcgtttgtctgaagtgccgcccgcccaacggcccattgtccg

SEQ ID NO: 96261 - DNA, 475 bp, Heterodera glycines
gtttctctagctccattccctagcatgaaaatggcaattcggagctttcttggccccgcttgctgttcaccaactggcgccgctgtattgctgctgatttctggcttggctaataccgtatcattggcctccattgccacgggcaacggggcacgccttggcatttttcgtccgacacgcagcatttcatatgacggacaacaggaggagacggaatatgaagtggagcccggctttgaaaagcgttcaatgacgcttggccgtctgtcatttcggcctggaaaacgttggtcctttcccgtctccggtgcttatgcacacgatcggcaaaacagacgctatgatttgttgctgctcagtgaaaaacagccgtcatatggtttggcaccgtctgaagtggaatacaatgtgccaattcaagccaagcccagtgtcgtccgtcacatcaattttcgtcttctgcccgagactggaa

SEQ ID NO: 96262 - DNA, 611 bp, Heterodera glycines
cacggattagggaaaatgcccatccgaagggattttaattagggcggcaacttcataagggagtcgaataggtttggttcaaaggactcccttcctatcgggttgggcttttgcggtaaaaccaggtttggggttggggcggctacttcaaagactgtactccttcataggcacgggatgggcgagcgatacccgcaaccttttgacagtctgtgcaattttatatagggtatatatttcactgataattaggtatttcatttcacatcagcactaatttaatgaattcatcatgtcattttgctaacttcttccgccaaaatttgaagggcaggcaaaatcttaaaaatttataattttaattgttaattagttcgtccttaattacttgtttggccaatttgtttatgcccttttccgggtacacaaactactcccggtcgcggcatctgaagaaaaaacaaaataatatattcaattattaattaaattaattaattacgcacataaaatttcatcaccgtgtgctcatagtcgtcagggtttacagatggaatctcataaatatcaagttggtcgagaattgaatgtaatattgtcggttgcgagct

SEQ ID NO: 96263 - DNA, 412 bp, Heterodera glycines
aacaattggcccacgccttggaaatttcttttctgccgccgtatccgcccaacggcattctcgaccaataccgtatccggtggactgtgcacggcaagttcaactaccgagagcagcgagtgcccgcctttgagttggagtgttccgactcgcgaatgcgtggccgcctctgctaccgaatcagcggattggagccggagcaggagtatgagattcaggcggcggcacacaccgaacgcggcgattggtcggattggtcggagccacttgtgaccaagacgacggagcaagacattccggtgctggaacacccgctggagttggaatttgccaagtcaacgagcattggcgtcagatggcgcgggttggaggaaaacctggccgagcacatcaccgggtacgcgttggagta

SEQ ID NO: 96264 - DNA, 227 bp, Heterodera glycines
agacaagtattaaaaagaaaagctaacaaagagctatgaaaaaagaaattttaaagctaagaaaagaaaaaaaaaagaaaagcatatgataaaaaaaaaacgaaaagcccagcaatgaaacgaaaagccatgaaaaagaaatttttaagctaagaaaagaaaagcgggcgaaaaagaaacgcaaacgaaaagccattaaaaagaaaataaattttaaagctaagaag

SEQ ID NO: 96265 - DNA, 469 bp, Heterodera glycines
acttttaaatccgaagtcgaacttttcgtaaaattatgtcttttttgcctatatgaattcgccaaccaatttcaataattttcattcaactactaaatgtgttccgcttgaaaatggctctgatagagagaagggttcgaccagtaacaacaatcacaagagaaggaaggataatgttaaaagtgagttgatagacaacgccatcggaagtccgaaatcgaacaaacgggcatttttttctgctgattgtgcactgaacccaacggcattggctgaaatgatgccgagttcgagattaagcatgggaatggccggccgtttgcgtgacatcgtggcgattttccctcaaaatgatttggcttctcctggaaaactgctctttcgggaacaaatgacaaattcggaccaaagggtattttctgccaagggacaagcggatgttccggggatgaacgccaaggaaataagc

SEQ ID NO: 96266 - DNA, 550 bp, Heterodera glycines
aaagctggagctcaccgcggtggcggccgctttcgaactagtggatcccccgggctgcatgacttcagcacgagggaggaattcaaacctggaagatgggaataatgatttaatacataaatcagcggatcattaaactgaaatgcttcttgacaacgcattaaaagcttcggctgtcaacagcggcggcgaaatgccaaaacggatgagttactcgtcggtggtgatggcacgttcttcctcttcatcctccgcttcttcttccatctcttcttcttcctccaccgctcctcctcctccccttccgaaatcctcttctgcttcttcttctttctcctcatatttgtcctgttcatcttcatcatcattagcagcgaatcgggaattcgtgccgaaaaacaaaggggaaccgaaaaaaatgccgaaacgacaccagcagcggtggaagcgttggcgaaccgtaacgtccgagtccgcgttcttctaccggtcgtccagctcctcactgctgtcgctggactcggccacttccaccaccaccagcagcagc

SEQ ID NO: 96267 - DNA, 480 bp, Heterodera glycines
ggaattcaaacctggaagatgggaataatgatttaatacataaatcaccggatcattaaactgaaatgcttctcgacaacgcattaaaagcttcggctgtcaacagcggcggcgaaatgccaaaacggatgagttactcgtcggtggtgatggcacgttcttcctcttcatcctccgcttcttcttccatctcttcttcttcctccaccgctcctcctcctcctcctccccttccgaaatcctcttctgcttcttcttctttctcctcatattcgtcctgttcatcttcatcatcattagcagcgaatcgggaattcgtgccgaaaaacaaaggggaaccgaaaaaaatgccgaaacgacaccagcagcggtggaagcgttggcgaaccgtaacgtccgagtccgtgttcttctaccggtcgtccagctcctcactgctgtcgctggactcggccacttccaccaccagcagcagcaatt

SEQ ID NO: 96268 - DNA, 265 bp, Heterodera glycines
gatattgttgccgactgttcagacaatgttgccactcgatatttgatcaatgatgcttgtgtgttgagtggaaaaccgttggtatatggaagtgcgcttggttgggagggccaatttactgtctacaacaatggaacggtttgaagcgaggaagcaccaaaatgttgagggcggggtggaaggcggatttaaaatatagtttctggcactttttttaaaaagattttctttaaaatttttctaaatcaaagaaaaatatataact

SEQ ID NO: 96269 - DNA, 182 bp, Heterodera glycines
aaattacaaaaatttccccggcggcgcctcttggcgccaccggatgcccctctccaacccccaattttttgaaaaaaacgcgccgcaaaaaaaggcagttttaaaaggcaaaaaagtcgtcgcttggttgcaaaaattggcctttttgatgaaaatctgttaacaaatcagaacgaaattac

SEQ ID NO: 96270 - DNA, 475 bp, Heterodera glycines
gtttgagagatttatttcccgcgaatatgcaaatgcgtgtcgaatggaatgaacagcaacggcgtcgactctaccgaattgcgctcaacttttttaacaaaacgccggaccttggcgttcagctgctgatcagttggggctttgtacggaacagtccccgggagttggcactgttgttcatggaacggcgcgggatcagcaaacaaatgatcggcgagtacctcggcacattgcgctcacaattccataccgccgtgctaaattgtttcatcgaacaaatttcaatgtacgacatggaaattgacattgcacttcggcaattgctcaaacacattcgacttccattggaagcgcaaaaaattgaccacattattcaggcctttgcacaacattacgttgcgtgcaaccggaacagactgtgcgcattggacacgccggactcgatgtacattttggcatttgctgtcatcatgct

SEQ ID NO: 96271 - DNA, 667 bp, Heterodera glycines
gctttcaaattttccgtcccaccaccacctccacttccgcttccgctgctgtctgtctatctgtgccggttgaccaccgtacccttccgcgatgagcaattcactgtaccgtagtccaagcactgccggaggtgctctctacaaatcgccctcaatgagtgccttcgccggcggcgctccgttcggcgccatgtccgtggctgacctgggcagtctgacccgtctggaggacaaaattcgcctgctgcaagaggacttggagtcggagcgcgagctgcgcaaccggattgagcgtgaacgtgccgacctcagcgtgcagctgatcgcgctcactgaccgtcttgatgatgccgagggcacaaccgaccaacaaatcgaagccaaccgcaagcgtgaagcggagctgcaaaagttgcgcaaactgttggaagagtcccagttggaggccgaagacgcgctgaacgtgctgcgcaagaagcacaacgatgcttgccttgactacaacgagcaaattgagggattgcaaaagaaaaatgcgaagattgatcgcgagcgtcagcgcctgcagcacgaagtgatcgaactgaccgccaccattgatcaggtgcagaaggaaaagcatgcagcggaaaaggctgcagaacgcttcgagggccaggccattgac

SEQ ID NO: 96272 - DNA, 462 bp, Heterodera glycines
gaagaggaagagagaatgagcagttcgcgcgccaacaaatttgccgttgcatttctcgatgatgagcaaactgacgagacgacagaagcaaatagtgaaacggaaaatgaggaaaatttgacgaatgaaagtaaacaaacgaaggcgaaaaatgagggaaaaaacaaaaatcgaaaaggcacgaaaaaacagaaacgaacaaaggcggagaaagcgaaggaatttgggacatcagaacaaatgccaatggcgacgaaaaagacaatgccaccaaacgaaacagcacagaaatctaatttggtggatgatccgttggaaaggcttttgaaggtcgacttgcgcagtttgaacccggacgatgaattgcgacgacttttgggccgaacatttggcgctgagcagcgccgacggggcggacaacaacagcagcagagacgaattggggcggcacaattgggcgga

SEQ ID NO: 96273 - DNA, 550 bp, Heterodera glycines
aagctggagctccccgcggtggcggccgcatcccaactagtggatcccccgggctgcatgacttcggcacgaggcaatcctcctgtttcccagcgtcgctggtatgagcaaaaaaaaaaagctaaatggattcaccaaaatgtatcgttccgtacttctcgagggttggaattccgtgctgaacgaatgttttctgccgttattcaatcagaaaatgaatatggccgagtcggccgacagcaaacagttcagacagttgcgcggccttttgttcggtcgattttcggagagtggccgttgcgatgtcattgttgctcaagcaaagagcgagaaccacttactctgacgacaataggtaaatgtgcgacatgaggcggagattatgcgtcaaattgagcgattggaggaggaaatcatccatctgagggccattcttcagacttagcgatattggaatatttttaaatattcattatatggatccactctttaaaatggtctctaaatggaaatgacaatccaaatatatttccgcttttgccaatttcct

SEQ ID NO: 96274 - DNA, 289 bp, Heterodera glycines
cccgttttagaatattatcgccaaatttttgtgattaaaaattaagtgcaattttggggaaatgctgtgccaaataggcaccgtggggaaaaatgcgaaattcttaatgcatatctttattctatttgagtccggcgatattagtcgcctgaccattcggccgatcaaaatctccgcgcatgcaatcacagtcaaatggtatgcgatcagtcgtggctgcatggaaaacattccaattcacaaatacttacttttctacacacttgccacggacgattacaattggaag

SEQ ID NO: 96275 - DNA, 564 bp, Heterodera glycines
tggagctccccgcggtggcggccgctctccaatagtggatcccccgggctgcaggtactcggcacgaggaggttttggtgtctgtgacccttcgccaactttgtacgatgtcacggtcacattatgacaagattatgttcccgccaatttctgcccatggaatgcttacattggacaggagtaagttcaccaagtctatccaaattcccttcgtctccgtccctgtcaaatgcatcgacagagtccgtttgctctccgccgttcgtgcggtttgtcttgagagaatgccccgcctaaaaccatggcatacaccgccaaattgcgacggatcagtcgaaaggcttttgctgtttgaccccgacaaattcggagaagaagcgacgaacgacttggctcagcaactttcccaaacgatggattcgtcgccagaattcggcaaaatggcatatacgatggaatacgaagattgggacttgagacggtgcattcagtcggttctgccggatggcttcgaattcagcggattcgaacagtgcggacacatcatccacttgaacctcagag

SEQ ID NO: 96276 - DNA, 253 bp, Heterodera glycines
catcttcattcctcctcccaccgtttttgcccttcttcccatccccatcatcatcatcaataaatgatgatgattgattgggttgtcacctcaacaacaaacagcaggtcggagttggaaaatgtgtgtcggtgatttgtttcggggttatgatatgttgtacagttgtcagtcggggggtctaatttttggtggagtttattaattgcacgactaattggcacacttggacggaatgtggtgattcaaattt

SEQ ID NO: 96277 - DNA, 437 bp, Heterodera glycines
agcaaaaagtgccaccaacagcagcgactgttcgcctcgcggcaaaaatgccaatttgaacagcaaagggacggcccctcccccgccacgccctctctttcgttgccctcagctttgtttgttactcatcctccgtttgtgccctccacgccgcccccttcggcaccgttcccttccggcttttcctcttccccggcaccgttcccatccggcttttcttcctcttcgccgtccacttcggcaccgttcccttccggcttttcctcctccccggcaccgttcccctccggcttttcttcctcttcgccctcctcatcggcactttttccctccagcttttcttccttttcgtccttgccaatgcctctgacttttcttgaccagcttcgactttattaccaacagctacagtccgttttagcttccgcatctcttca

SEQ ID NO: 96278 - DNA, 485 bp, Heterodera glycines
tacaatcctccatgacatggagaatgattatgccacgccaaaagaaccgccctatggagcagaatatgcaaaaagtaatcgtgcttcttgtaaaggatgcaagcagttgatttcgcaaggcgagttgcgtatggcggttcgtttcccttcaagatttttcgatggaatgcaggaaaattggcatcactttgagtgtttctggaaaaaagctcgtaaaaatgatatcaatgaagcctcaattcgtggaatggaatggcttaaatgggaggaccaagagaaaattcgggcgcgaattacggagctcaaagagtccgatgattctgcttacacacccaaagccgccgtaatgacaattgagcacgcgaaatcagggtcatcgaagtgttacaaatgcaaaaacagcattgcaaaaggggaccttcgtgtttcaagcaaagcgtccttctaccacctcgaatgttttcattcacttggaatttttcaaa

SEQ ID NO: 96279 - DNA, 1169 bp, Heterodera glycines
caatgtttgagctgatgcttcactgtctgtcaagtgcagtcgtcgatcgtcagcaaatggccgtccgatgtttgtccgaacttgtcaagaaaatgggcgagcgaattctggaaattgttttgcctttgctggaagaccggctgagacaaggcggcgtcaacgaccggcgtggtgttgcactcgcactgaacgaaatcatcggaaatgtccaccgggaaatcgtggagaaccacgcctcctccttcatcggctccattcgcatttgtctgtccgactccgacagttccgtccgcgacgcggcggggcaagcgtttgccgcttaccactctgctaccagctatctcgcggtcgagcaaattgtggccccaatgctggacacttacaacaaaactggcgagccgtttatactggacggactttgctctgtgatggctggacctaatgggcgtcagctgttccaaagtctgttgccaaagttggcacggtcgcctgtcaattcggcggcactttgtcggttggctctgagcaccgacgctatgaagagaaatttgaacaaagtcatggaggcaatgcttaacggggacatcaacacttcagttgatgagcatatccaaaattgcattccggtgcttctcactttggacgacgaggacgacatgcgggcgatgttttccttgctgttgaagttcgcatcgaagaaggaaagtgcggaggtggcgtcgctgttgctcaggacgtacattgacgagtgtgacggaatggaatattccgagtctcaactggacacgcttttctgtggtttggtcggcctttacaactcggacaaccccaacgttctgcaaaatgccatcgaatcgcttgtcgctttggtcaagcaaatcgacccatcttcttacatccaattgtccttgctgctgaagagggcaatcaaaggattggcgagtgacacgcgcgaattgtcgtcggacggttgttcccgcgggttatgcgtttccaccgggtggcagccgtttttggccattctgagagaggctcttctgatgggtggggtcgaaatcaaagaagtcgctgctaattgcctctcgcaactcatccctctgagcagtgaggcgggacttagaccccacgttgtgaacatggccggtccattattcagaattttgggggac

SEQ ID NO: 96280 - DNA, 394 bp, Heterodera glycines
ttctctctctctctcccattggaattattcattgagatgggtttttcaaaaactatcgctttcctttcgcttttggcacttttttgcgcaacaattgctgaagaaaatggggcgacagaaggcacagaagcggaggcgacgacagtgccaacactcaccgcagcggcggagggaggcaaagggggcgaagaggaagtgaccacggcgaagccgacggagacgagcgaaacggcacgggaggagggggaggagaagcacaaggcgaacgaggggaaagcgattgagggaagtggaaccagatcgttgttgcaaaaagtcacctgtatgttgttcggctttttcccatttcgcgccggctgtccgggcaaaaacgatataaaagcggagtcatcat

SEQ ID NO: 96281 - DNA, 514 bp, Heterodera glycines
atttactattaacaataatctcaaaaaatcaaaaatagtgggcctttttaaatggagttttttaaaatccaaaaattaaaggaaaattaaatgactttataacgtaaaaatattcaaatagaaagttataaatgctaaaatctttataagaaataatttataaatggatatatataaaagtgatcagaattgggttggatttccccaatttcagtcaaaatcccgataattgataaattaaaagcatcatttaatcttgatgaaaatgaatttatttctccgatttaatggccgctccgatgaattccgccaaaaacagctgaccatttgtgttgtttacattgttcacgtattcggtgttgctgctttcttcgttcaaatggtcccatttttcgttcacttcgtcacattttttgccgagtttaaagcgtcgcgaaactttcgcctcccatttcgcattcctttagaaagcaaattcaaattttgcccaaacattttgccaagaaaattgaat

SEQ ID NO: 96282 - DNA, 432 bp, Heterodera glycines
cttgtttctggcatgtttgggtttcgtttttgggaataaaaaattgtgaaaaattggtggaactccctaaaaatttgaatccatcaaattttgtattttaaaaatttggtacaaaacttatattacatcccaagtgttattgcgaatgaattttctcaaggaatattaaatttcttttctattacgcctttaattatgtatatgccttttcttttatgactaacacagacataaaattttatttatttttttatttgtgtcttttgccgtgcgaaaatttagtttttccaattaataaattaacattttttaatgaaagcatttattgaattgaaaataataaccctttttaatttatgtgaaaaaaagtctaagaaatttttaagcgttgtggagacttttttttctctgttcaccgcggtaaattttgtg

SEQ ID NO: 96283 - DNA, 475 bp, Heterodera glycines
  unsure (1)..(475): unsure at all n locations
gcgcatggtaaaagaaattaaattttaataaatcttaattaaaaattaaatgtttaatttttaaaacaggaattccacccatcatctacttggcgttcaacaaaactgttcgtcgtgatgtttacattatgcttgtccgtccgcttgccatggtgttaccgtgcattaccgtaccgcccgagctttccgcaacacaaaactttggctcaaattcacgcgtagccggggccggcacacgaattgtgtctatttctttaaccgtccaataactacaatgtggtggagccagaatttcgaagacaaaaaaattcacaaataattaatgcatttattaattggataattaatttgttgtaattgtctaatgtccagccgccgctataccaccacaaacatcattattacttttgtttatctatgtattataataacaaatgaatgttgacagcatatttgagtanaacaaggtcggaat

SEQ ID NO: 96284 - DNA, 802 bp, Heterodera glycines
caaaaagtgcggaagaaatcgcacgaaaaattggaaaaaaccgtcgaccctccggcgacgtcgtcgtcctttcgcttcattggggcggcaattggggctacgaaatatcgaagacggagagagactttgctcatcagctgatcgacagtgggacggtggacattttgtgcggtcactcatcacatcacccgaaagcgattgaggtgtataaagggaaattgattctttacggatgcggtgactttctcaatgactacgagggcatttcgggccataatgaattccatgacgagctcaccttgatgtacttcccagttgtcgatggcaaaaatggcataattattcggttagatgctgtgccaatgaaaataaacaaaatgcgcctgaaccgtgcaaatgccgaggattctttatggctttatcggacgatggcacgcgaatgtgccaaattcggtgtccgcgtacaacgcgatgagaagacaaatgttttatcatttctttggtgaaacgaaaggcaatcagtttcatttggatatgaatattctaattttatttaattaatttatttattttttacgactatttattaaacgatggaattattctatttattcaaaggcattatcatttcacccttttgtcatttttctccattataaatttacagcttttgccttttctaatgcccagaaatgtaacggtccaacaaattttggtaggcgaagtgaaaacggcgaacgatgctcaatttgtgagtgcgaattgttcagtcacctttggtggaagagaaaacgagcaacga

SEQ ID NO: 96285 - DNA, 482 bp, Heterodera glycines
gaatcattggccgacgatgggacaaagtcagggaatccctcagtctccgccggaggggccctcccaggaaaacaatggccgaactgcgcagccgaatggagccacggacgagggcattttccgtgtcaaagtgtccaattgcccaaacacttcgccacgcaatttgcgccagactttccaaatgcaacacaaccggcgccagtcgagaagcaaaagtttggaaccaaatgcggcactggacattcgaacaattggacacagaaaatcatcgcggttcgggacaaaaacggagttaaaaaagcggggtcaaaatcaaaacttatggaatccggaaaaagcggcaacacaaataattggacagcaattacagaatccacatactcagcctccaaccattcaattgcaaactgtttcaattcatctgaaacaattccgtaaccaaaatggcaaaaccgatctgctggaagacaacaaaaaagatg

SEQ ID NO: 96286 - DNA, 920 bp, Heterodera glycines
ggcaggacaagaaaagaatgaagttgatgcctcatgaaactcggaattggttatgttttgtcgaaaatatccttacataatactcataaaaaatacaaataattcaacccacctattctatgaccacattctgaaaaaaatcccagaaatacgaggaaagatatgcttggtcacaataaaataaaaaatggctagtatgtaaaaatttgcggtcacaaataaaataaaaaatggctaatatgtaaaattggcgtccagaaatttttagactaatccgaagcaaagcacgaatgaattaaagaggcgaaagaattcacagtatcgtttctaatagggaaatattgacagaatattcggctaaaaacgggtttgatcatttttagcgcatttttaggtatacatttgagacaattgggcaggacaagaaaagaatgaagttgatgcctcatgaaactcggaattggttatgttttgtcgaaaatattcttacataatactcataaaaaatacaaataattcaacccacctattctatgaccacattctgaaaaaaatcccagaaatacgaggaaagatatgcttggtcacaataaaataaaaaatggctagtatgtaaaaatttgcggtcacaaataaaataaaaaatggctaatatgtaaaattggcgtccagaaatttttagactaatccgaagcaaagcacgaatgaattaaagaggcgaaagaattcacagtatcgtttctaatagggaaatattgacaggatattcggctaaaaacgggtttgatcatttttagcgcatttttaggtatacagtatacatttgagacaattgggcatgacaagaaaagaatgaagttgatgcctcatgaaactcggaattggttatgtttagtcgaaaatatccttacataatactc

SEQ ID NO: 96287 - DNA, 551 bp, Heterodera glycines
  unsure (1)..(551): unsure at all n locations
aagctggagctccccgcggtggcggccgcccccgaactagtggatcccccngggctgcatttccttcggcacgaggcacaatatacctatatgttaattatgtcatttcggtcagcagcggcattagggcttaacttgcgtaaagcatccaaatttgtgttgttcggcgcattggccaccggtggcagtgtgttgctgtactcgttggagaatagcggtgcgcgtgcctacgactttgttgtgcacccgagccattttttttgggttcgtcgcggttaccaagtgtacaagcaagtgtgtgccgcatgccattccttgaaattcatccgttacaaccattttgtcgacaatttcatgacacgggatgaggcgaagacggaggctgccgagaaaaatgctttcacaagaagaaatttttcgaaatacacgaactgttgcccaaggattggatgcattgagggaagaaaatgaggccatcaagaacaaattgttggtagggatggacgtgttgacacctgatgaacgtcaactcatcgatgagaaggcgtcaa

SEQ ID NO: 96288 - DNA, 486 bp, Heterodera glycines
acggtggcagtgtgttgctgtactcgttggagaatagcggtgcgcgcgcctacgactttgttgtgcacccgagccatttgccatggtcccacggcggactgatggacgcaattgacatgcgatcggttcgtcgcggttaccaagtgtacaagcaagtgtgtgccgcatgccattccttgaaattcatccgttacaaccattttgtcgacaatttcatgacacgggatgaggcgaagacggaggctgtcgagaaaaatgctttcacaagaagaaatttttcgaaatacacgaactgttgcccaaggattggatgcattgagggaagaaaatgaggccatcaagaacaaattgttggtcgggatggacgtgttgacacctgatgaacgtcaactcatcgatgagaaggcgtcaattgtggaaaaaaatcttgaaaacatccaactcggactggaagaatcgcaggtgatgttggcattggcatcgcat

SEQ ID NO: 96289 - DNA, 150 bp, Heterodera glycines
gaatggcaatggcacggccaaattaaatttggcggtgccaaacgttggccgagtggcggcgagtgctttattgccgctttgggagttatttattttggacatgcgcttttgttggcattcacttcggttggcacttggcgatatatcaaa

SEQ ID NO: 96290 - DNA, 1289 bp, Heterodera glycines
agagaatggccattgaagcggaagaatttggtgagcagcatgagacggacgaagttgagcagcaggaaaatggaagtggaaattcggaagaggaggaggaagaggaggaggcaccgcaaatccgacggcagcagggccaaattcggatgatgaccagcagtggcgaggaaacagtgcaagcgaccgaagcggccgtgccgccccccgccgcccaacaggcgcctccgcagtcgccagccgcgaccgctgctgccccacaatctccggcgccaacacaaactgcagcaccggcatctccgggctcggccgccgctattccgcagtctccagcagcggccggagccgctgctgcagcacaacaggcggcgctggaggaagccaaacgacgccagcaagaggccatggaaaaagcgcgggcagaggcattgcgcctgcaggaagaggcgcgggccagggcggaagcggcacgccaacagcaccaacaggccgctgaacaagcccgtctccaggcggaacaacagctaaaagcgcagcaagaggcggccaaacgacaagcggaagaacgagcgcagcaactcaaagcgcaacaacagcaacaacaacaacagtctgtacaagttcaacagcaaaaacaacaacaaccgccaattagcccttccgccacggcacaacaacaaaaagcggcgccggctcccgccgctcaaccgccggccaaagcaccgcagcagccccaagcgccaaaagcagcggttgccccggcacagcaacaacaacagcccaaagcggctgcccctccaccgccaaaggccgccgcggccccgcaacagcccaaagcgactgccgtcgctgcgccgccgaagcccaccgcccctcccgcggtggcacctcaaaagcgcgcgccttcgcccgttgtgcgcgaagtgcaactgcccgaagcgccgacccaacccatcttacgacacgcagaatacacgccgaaattggtggacgcatctgtcaacaaactgccgccagggcaagagccggatgaggaacaattggaggcgagcgcagtgccccgaaatccgatcattgaggacaatgcgtggcaagtgcagcggcgtgtgcagcccgaatatcagccggtccaacccgccaaattaaatgcgactggcgactttttggtggagagtgaggcaaagaaatcgattgtgcccgaggcggtgggctattcgaagacaaaatggaacgaattcccagaagaggaagagaaagagcgccaatcggtgccgaaagtcaagcgcaggaat

SEQ ID NO: 96291 - DNA, 766 bp, Heterodera glycines
ggcaaatgcaacaaaaccaacagcatcagcagggcaataccatggaggatggaaatgacaatacggtagtggtggtgatgggacagcagggcgggactacggtagactgggacagcagggaggagcagcaacagcacttggacatggagacggcacgcacatcgcgcaccgaggacattatccattatccctcaatggacacgctaattgaccaaattctgttggcggacagcagcgaggagatgagacggaacgacgacgacgacgacgacgagttcaagcagtacaccaaccgcacatcggcagcagcagcagacggaagtgccgacgagtggacaaccgcgcggaatgggaacagcgacagatgcgaattggaagcggtcgtctcttgccatccgtccccgtgttcgtcgtcctccgcctcctcctccacttccggctgttccccaacgcgtaacattccgccgaccgctaccgtcttctccgccaccgtgcctctgccgcccgctgtgctgcccgttcggtgccgccaccgcgccctccacctttccgccagccgtgttcttcactggggccgccagtgatttgttcatgtcgtcgcaggactatgcacacgaatgcggcacagctgctgcggcgggtggcggcagcgattccgcggtcgccgctcgtcgtcagactgcgctggcggtgcccgcctggccgcgtccgctgggcgcactgcccgcgctcacccaatcgctgtttgatgcgtttgtggtcactt

SEQ ID NO: 96292 - DNA, 613 bp, Heterodera glycines
attgtccgccttttaaccatttaaaacaaagttttcccactttctaaaaacatactttccaattttctttcctattttttacagattgttgaccgtgttcgtgtccatcgccattcgttgtgtgctggtggtgctgctggtccttcttctttctgttgcccatcatcattttcatcgttatccatttccactccgccgcttgctcctaatcatcatcatcaacaaccgaaacaacattttcatcagcagcaacagcagcagttgtccttcatctcggccccgtgtgcgttgcattcttcgcatggcccttcaacgacaacggcaaatgccattccggcccagttgtttatgctctcaaaaaatggtcgcgaatgttccaaactccgtgagatggtctcttctctcggcgaacaattgaatgtgccgtcgacaacaaaaatttcttaaatttacctatgcttcaaattcgttaactgtctgttgatgatctgctgtttctctctcttatggaattttaaaaatttcttttttgtcttcttttttttctttattcactttgatcaaagtgctgctatgtcttttttattcgtcagttggtcaaatatttgtttca

SEQ ID NO: 96293 - DNA, 1149 bp, Heterodera glycines
cacagttgtacctcttcaatcacagttgtacctcttttaatcacagttgtaccttttctgatcactgttgcacctcttctaatcacttttgtacctcttcatcaaatttgtacctcttcaatctctgttgtacctcttctaatcacttttgtacctcttcatcaaatttgtacctcttcaatctctgttgtacctcttctaatcacttttgtacctcttctgatcactgttgtacctcttctaatcactgttgtacctcttctgatcacttttgtacctcttctaatcacttttgtacctcttctaatcacttttgtacctcttctaatcacttttgtacctcttctaatcactgttttacctttcttaatcaagttgcacctcttctaatcacagttgtacctcttctgatcactgttgtacctcttctgatcactgttgtacctcttctaatcacttttgtacctcttctaatcacttttgtacctcttctaatcacttttgtacctcttctaatcacagttgtacctcttctaatcacagttgtacctcttcatcaaaattgcagaatttctggaaaaattcgaattttcagaaaaaaattcataactcggttctgaaaagatagtctggaaaaataaaatactacaaaaatccgcagttttttgctctattatataaattttatttggcatttttatcacttttttaagaatttttataaaaataaaagtgattttgagattcgggaccaaaggggggtgcacatggtttttgagtgaaaaaattttttcgacaaaaatcttccaaaaacatgtcattaggggttatttgggccgctgatcacgaatacgtgatcagattttacttttgacatcgataagacatcagaatccctgtgtgattggggattctgaggcatcattttgagggggggggggggggcaggttcgaatccggacggtgtaacattatttttttgtgcattttaacgggcgcgaagcgcccgtcttgaggccgcgaagcgtcccaatgtcctcaacaaaattaaaaaacgggcgcgaagcgcccgtcctgaggccgcgaagcggctgaatattctctacaaaattaaaaaacgggcgcgaagcggccgaatgttctcaaaaa

SEQ ID NO: 96294 - DNA, 475 bp, Heterodera glycines
gtccaattaagcacactggctttcatacattaagcatgctcgtaattagatagacgttcatatacaatagttgagttggttaccttcacgcacatgctgcaatcaattgttccacctcgtttccatggagtggttctgtgtcgggtgtggcttgactttgtcggggacgctgagcaaccgaaggaaagggaccaacttccacccataaccatatgtaaaacaaaactagccactgaaggacggcgaatctcaaacgaagggggcgcaatactcacaatcaacttgtggccaacaaccgatgggatgttgaaggggaccggaataccctcgctcacttctctcataactcggaagagcatcgaatttcatttcaattttccatttcttacctaatatggttgtccattgcgagagtcgtctgcttgacttatgctggccagtctgcactcattttggaaataggtttaaggcgttt

SEQ ID NO: 96295 - DNA, 716 bp, Heterodera glycines
aaagctggagctccccgcggtggcggccgcttatcaatagtggatcccccgggctgcagtctctcggcacgagggaacaacgccagcgggacgagctgagagagcagttcctgaacagcgaaaagcgcaaccagattctccagagcgagaaggaggagttgatgcaccaggccgaacaggcggagagggcacgccgtgcggcggaggccgatttgatcgaactgcgcgaagcagtcaacgacctgtcgaaccaagtgaacagtctgaacggatacaagcgcaaattggagggcgaacttcaagcattgcacgcggaattggacgaaacactgacggaactgaagaacgcggacgaactgagcaaaaaggcatcggcggacgcggcacgacttgcggaggaacttcgccaagaacaggaacactcgcaacacgtggacagactacggaaggggctggaactccaaatcaaggagatgcaagtccgcttggacgaggcggaggcggcggcactcaaaggcggcaaaaaaatcatcgccaagttagaggaacggatccgagccttggagcaggaattggatggcgagcagcgccgtcaccaagaaacagacaaaaactaccgcaaggctgagcggcgtgtcaaagagcttgatttccaggtggaagaagacaaaaagaacacggaacgtctgacggatctgatcgacaaattgcagggc

SEQ ID NO: 96296 - DNA, 583 bp, Heterodera glycines
aattagtgatgtacatccgagagttagaatctccagatgagcactccctggttttattcaatccgcttcgttcttgctttcgtcctactagagatgaattgttttcggcaattgcctgtcagcgacgctctatcgttcgtctgaacactgaaagggcccgatttgtgcgtcagaacggggctttgctacggatgatcgtgcgattgacaggtggcatcccgccaaattttaatcatgctcattttgctgctgctgcacagccggtggtcaatgtgactgcggttattgccaatgccaatcccaatggacagaattataaccgccttcagcgtttgcatgcggaattatcggagaccattgaccgttttacggaggaaaattcccttttgggatatatgaacgatcaattgacggaacaacttgaacctctgacagaagtgcctccgaatgcgaattttaatctggatgatgttgtgtttcatccgcccctcgaccaacagcacgaagtgcctccgaacccgaattttaatccggctttgcttgagtttgatgatgttgggcttcagccggccctcgaccagca

SEQ ID NO: 96297 - DNA, 472 bp, Heterodera glycines
acctgaacaacgtggactatgctggactccgctcggacaacagcgaagttcggcgcaaacagttggacaacatcgcagtggccgcgttggaatttcagccgaagggcaacacactcgagaccacggaagtaaaaactgaagttccctttctgattcgaggcgacctccgcgagtatcagctcgtcggactcgattggctagtcactctgtacgagaaaaatctgaacggaattttggcggacgaaatgggccttgggaagacaattcaaaccattgctctgctcgcccatttggcttgtgaccgtgccgtctggggtcctcatctgatcatcgtgccaacctctgtcattttgaattgggaaatggagctgaaaaagtggtgccccgcattgaaagtgctgacatatttcggtacagcaaaggaaagagccgagaaacgaaagggctggtccaaaagcaatgctttccacgt

SEQ ID NO: 96298 - DNA, 636 bp, Heterodera glycines
caagtttgagatttattcgtttcgtttttgacctgtatttccatcacaatcaactgaaaaacggcaatggatgattcggttggttttcttagcataataaatcttgcatttgggtggtcttccaccccttacgacagtaaaattagtctgttccgttcgtttacagttatcctctcgacggctcccttccgacttctccttctaaaaatttcatccaatcttctgtataattttttctatttccgtatgcttaacagctgtaaattcccaaaaatcatcctccaagtttgtgggaggggaattcaaaaattgatatggatgttgaaactgaaacacagggtagaacattttggccgacgaccaaatgggaaggaaactcccagccgaacttttgttcgaaattgttctttgtgttcgaagagaacatgcccacgcgagcatttgcctctcgtcccttgttttatgcaaattaatgctacctcgtgcttcattatggcggaaaatttgggtttcagtatgattttggatgtttccgctttttttttttaattttcgttgttgctgtttggacttgtctttttatttttgcactaacaccattttctgagctcgtgagctttcttcaattctattatt

SEQ ID NO: 96299 - DNA, 801 bp, Heterodera glycines
gtcctagagagttaattggttcattaataaacaacaaaaatcgactaatttggcagttttcttccttttcttcaattttatttaataaaagccgcaaaaaacaactcaattttcttcatttaaattttttaaggagtacttctgcttcatcttcgtgcgtcgagtcttttcccgaatggcggcatcaaaatatgtccaacgaatttagtccgtcaaattggccaattcttccgacgactgttcagcccgactcggagcagtttaaacagaacgaagccgaaatggcagaatcgataagcgaattcaaaaatgtggtcgatgcggtgatcgatggccaaatggtggaaaaaacagtgatcgaacggcacaaaaacaaaggcaaattgttggccatagaacgcattgaacagctcatcgaccagggcggttcctttctcgaactcagccaattgacggcttacaaagtgtacggccaagagaaagtgccggcgggcgggcgttgtcgccggcattggcccaatctgtggccgattgtgtgtcattgtggcaaacgacgcgaccgtaaaaggtggcacttattatccgattacggtgaagaagcatttgcgggcccaggaaattgcccttgaaaattgtttgccctgcgtttacctcgtcgactcgggcggtgccaatctgtcgcgccaagcggagattttcgcggacaaagacaatttcggccgaatctttttcaaccaggcacaaatgtccgccaaaggcattccgcagattgccgttgtgatgggttcgtgtacggctggc

SEQ ID NO: 96300 - DNA, 420 bp, Heterodera glycines
gttgttgtgcttcgttggacggagtgttcgcttttgctatggcggacaaaaagttcctttatttgggcagagatccaatcggcgttcgccccctcttttatggcttcgctggtcaagctttgctaattggttccgaggttaaaagtattgagaaactctgcagaagggtcaactttttccccccgggcttttgcgcacaaattccgctgggctcaacattctcaacagataatcagcaaatcgcatttcaacaattctttcaaatcccttcaattgtcaattattccatcagtgcttttgatgcaaaagcaattatccgcaaattgttggttgaggcggtcgaaaagaggctaatggacaatcgccaatttggctttatgctctccggggggttggactcgtcgctaatcgccgcgttgg

SEQ ID NO: 96301 - DNA, 499 bp, Heterodera glycines
gaacgtttatttttgaaaatgggccgacggaggaaaacggcgcctgcccttttgcgcaacaaacggacgcgaattgacgaggacgaaatggacgaagaagaagaaggggcatggaatgggcatggccaccaaaatatgggacttcgaccgagaaagcagatccaacggacaatcagtgcccagtgggccccgcgtctgcgcgaaaggcaccaaaatggacagaacacaacggaggaccaattggcggacatggaattggaggacgtggacatggatgaggacgaaatcgtcaaaacattgaatatggtgttcaccaacctcgacctctcccaattgcccgctttgtctcccggcgccggactttatgcaatggccaattatgcaattgaagagaaatccatcccgaaaagaaaggcggcggagaagaaggttcccgaggatgtgttggagcccactttcctctccctggagcaagccatgcaaagagatcagaatttca

SEQ ID NO: 96302 - DNA, 477 bp, Heterodera glycines
gcgtattaaaaaaaatttgctccttccaaaagtgttttcttaatcgtttttaaagcatgtttctgatgaattttaagaaaaataatttttaaaaaatggcatttttaatttcataaaaaaaattatgaatccgtgtacaattggcagcatttttcacatgttcttcaaaatgttaacaattcgtcaaaatatagccaattttttcaccgcaaatcattttttaaatttaattttccatttaaacaaaaattattatcatgaattgaccacaaaacacagtccacttgtccatatagatcggaatttttggatgataaatgagctaacaaaaaagggttgataattttctaataaattttgacatttttttatatataattaattaaatttgttcgttaattattttaaagcaattcagatttatcatattttgcaattgctctatgcgcattaactgtgttttgccctttctctggt

SEQ ID NO: 96303 - DNA, 1778 bp, Heterodera glycines
aaaggttacgttcttatgcccagagaatggccatttttataattaatgacatccgaatccaccaattttttaggccatttgaattggtgttgtcaacgtggcagcaaccaacggctgtggctgtggtccctggtgacaaccacgatggcaatggtctgctccatgccgcgtcgcttggcatttggggtgtccacgaccggcagctgaactggcgcaactttgcacgatgtgctgaaattcgggagccgaaaacatgccatctaccggcgttggcgctggcacgagtccaagaacaatttcgcatcgggcttggtgctgtcggaggaggaatggcgccgggaatggactaaagtgtacgagtcgttggagtgtgtgcatgtgtttgcgctcgcgcacattttgcaccggcccatcattgtgtgttggtggacaccattctgcgcaatgcgaaggccgaagaatgggcaccgattccgtttggcggcaacgcccgcccaaacagtgccatcgctcggagagttcagcactgagcactggtgtgcaggccagcgtccactttggagcacattcgatggtcggtgcgcaaaagtcgtgcacttctgtcgccaaactgttgtggctgctcaaaattgcctccgcttgcccttccgaaaagctgatgaatgccgtggatgagctgctgttccgctacgtggacaccattcagccggcgaattgctttttttggttgaacgaactgatcactgatgtgcaacagcggaggggcaacgcgatggccgagattctaaagcgagtcggtctcctgcagccgcaagaagtgttctgcgcattgtgcatcgaacttgggccaagccatgttggccgttacattgaacaatacataaacaaactacaactactagtacttgcttcttcgggtgcaaatgcttctgctgctgccgtttctcaccatccttgcatggcaattgcaacacaacaatcatcatcatccgctggagccctaattagcggtgaaaaccgacttttcgatgtgttggatgcctttctggagcgccatttaacgcaaatttgcgtgctgagccaaatgttggacgaacttgacaatttcagcattcgtccagccgagatcacattggacaaattccgtcactttctctccatctgccattttgatcagttcaccaaaatagccgatttgacgaacacagcatctgatcctcagctgctgaagagtctcggtgaatggctgtaatctcccgaaattgtgatggccgctaatgctaacactgacgaacggaatttgatgcgtggcgtccgtcctgcgcaaatgggtcgtccaaatcagtgcccatttgcgacaaacgttgggaaaaggcccaaaacggctagtcgattcgagtgcttttctggaccaattcaagaacaaattggcctcaatcaacatattcgatggacattttaacattgattttgccttattttaacactcaaattgcgcaattgtgccactctttgacgaggttgtgcgtgccgactcggtgtttcgtctgttccatgtccgttcattaacactgcacggagttttgtccaacacgtgctgttcaccggctccaactgtcgtcttttccgctgttgcccatcggcctttcatcgcgtcaacaaaatgccaattcggattattcggcgcacaattttgctctgttcaccgccattctgagcgacatgatcaatgccagccaggtgtagtgcggacgccgttggcactgactgtgatgaga

SEQ ID NO: 96304 - DNA, 477 bp, Heterodera glycines
gccactttttgggcaagcttttcatcgtccacgtggcttatcagttcgccttctgcttcttccactttggccattctttcgtcgcccatccgaagggattgtctgaactcttcgaacttcgtccttagttgttcgcactgctccaagtcgttgccacattcttcgatgttcgtcgtttgcttctgttgctccatccattcctccaattccgctccgtccgccaaaaacgaacgcactgccaataccgacccggcaccccgtgccgcttccttggccatgccctccaatgcttttgcttggttctccacccgttccattcgctcggctacgctttcatgcccccttttggccagctgttcgccccgctgtctcagttcgccgaatgcctttctccacggcactatctcattttgcaaagtgtttgcgcatgccaacattttcttggccccctccgacgtcccaaggctctctctgcac

SEQ ID NO: 96305 - DNA, 317 bp, Heterodera glycines
ggaaaggattaattgattgaatcgaattgaacatttttgatgcgcagtgaagggtgaatgaattcatcaatcacttcgttcgccattaatcagactgccaccgatttcgacctttcccttccccttttaccacatcgtcaattttcgtcctttgcctttaaacgtcggtagcaactttgactcacaacaatcagccgttgaattagcatttcctggattttgaatttgttttggagagtattcgtcgaacagaacgcggcggtattcatgttcattaaacaaacaacaaacatctgatcgctccttcgccaaattgc

SEQ ID NO: 96306 - DNA, 730 bp, Heterodera glycines
cgaaatcgttatcggagatcccccgggctgctttactcagaacgaggtgacgacggacgaggaggggagggaagtcactctcgaagtacaaccgacagcgacgaggactcagctgtcggagcatcagaccaacgtcaaaaaggcagaaatgcgacttggacagctaaacaaaacgttgtcgaaaaagcggagtgaactgcagcaaacttcgcggcattccctttctcaaaacgacaccaaaagggagttggaagttggcatcgaacagcttgaacaaaagttacgcgccctttactttgatccgcagttggaccaccagcttgagcaggagcgtgttcaattggccagagaaagagggcaatgtgcgcaagaattggaccggtttgaggccagaaatttcaaactgcgctttgactatacaatgccttacaacggattcgaccggaacaaagtgaagggcgtcgttgctaaactgtttaaaatgaacgaacaaagatatgccacggcattggaagtcgttgcgggtggtcggttgtttcacgttgtgatcgacaaagtgaagaccggcgaggatttgcttaaggcggggctgccccgtcgggtgacaatgcttccgctggacaaaatcagtgcaaatgttctcgaccagcggctaattgggcaggcaaaacgaatggtgggcgaggagaacgtgttcttccccggagagctgatcgaatacgaacgggaa

SEQ ID NO: 96307 - DNA, 676 bp, Heterodera glycines
aattcgattttatctttgggttcatatttctcggctatctaaatggcaatgctgaatgcgtccttcgataaattcaatatttctaattcggataaaatccgaacccagcggctcatatcaatgagtgaaagttgcgaagagtggaaaacatgcaccaagcgagaaacatatgcacttctcgaccaggagctgaacaaactgttgaccacgtcaccccccgagaaaatggagtattggaaatatttaactcgatggatttatggatctttttgctcgtttcttgcgcgccaaaaccaccgtcgaatggtccaaaattgagccgttgcccgaaggggcaataacgccgtattcgaagcttgaacaaacaccgcgggaccgtgtccgtgaactactcaatgggttggttgtggtgaagctgaacggcggactcggcacttcaatgggctgcaaagggcccaagtcgatcatttccgttcgcaatgagctgaccttcttggacttgaccctgcagcagattcagagtttgaatcgtgaattcgaagtcaacgtgcccttgggtactgatgaattcatttcaacaccgaccgactacactaagaagctgcctcaagacagaccccacatgtttaaggtagagggggcacttctttttgcccaagtcgagataccccctgta

SEQ ID NO: 96308 - DNA, 1220 bp, Heterodera glycines
gtccgtccttcgactttacccaaccgatgaagtcgaatacggcgaacagacaaaaacggagcctttgagtgccacaatgttcgaagctctgagccgacactttctcggcattgattttcgcgagagaaatgccggacatcgaattgacgaacacatgcgcgacgaagggttcaatgtgaaggcgtacatcgacggacattccggactgatctttgggggcaatcgatggaattgcggcacgtggatggacaaaatgggcagctcagaacgcgcgggcaatcgcggagagccggcgactccgcgggacggcgcggccgtggaactgcagggactcgccctttgtgtcgcccggggactcgaccgcctctgtcgcgacggggcattcccttataacggaatgaaaggagaatcgtcgtcctttttgtcgtggtctgattgggctgcaaaaatccaacattcattcgaacaacactttttcgtcgaccacaattgccagtcggagttcgttcatcgccgtcccatcgtcaaagattctttcggcgcttccctcgccttcgctgactttcaacttcgtcccaatttttgcattgctttgaatgcctctccggacattctcccccctgaaaaagcatgggccgctttggaaattgcaggcgaagttttggcgaaaaatgctccgtacggaatttgtactttggacccaaaagattgggcttacaacggcaattacgacaacgacgatgatgggacgaacagaatcagtgccaagggatggaattaccaccagggaccggaatggctttgggttgccgcgtgttacatgagtgccaagttgaaagtggcctcgctgctgttgcacaagagtggtgactcatccgcttggctgtccgccgtgggcgaaattcgacagcgattattcgccctcgagcaatgcttgaaccgaagcgactgggcctcgcttcccgagctgactattcgcgcgggggcattctgcgcccattcgtgccctgcccaggcgtggtcggtcgggtgtgtgatggaaacgctggacactttggaagcaatggaaaaagaaggaatgaatttggaaggacgaaaaagcgatcgaagggcaaatgacaaacagaagaagcactgatctgacagatcacttcactttcaacacttacttaggcattgttagcactgtgaacttattgcgagccgttaatcttcggcta

SEQ ID NO: 96309 - DNA, 257 bp, Heterodera glycines
taaaaaattatcccgggggtggagtcgagttgctcatagaatcatagaaaattcatttttctaaattgccgaaaaaataattgaaaactgatcaaatcgctgttgtaatttttaggtttgcggtgcctacgaattttcctttgttgtacacaccgacagattctgtcaggcgagccggccagggatgtcctgttacgcgttcagcagctctacgccaaaatgagcagcgcacaacggaaaaaacgaattcttcttag

SEQ ID NO: 96310 - DNA, 773 bp, Heterodera glycines
cctcttcttcgtccgcttccgcttcgtcctcttcgtccggcttgaactcatcggcatctccttcttcggacctgttccccaccgtccgctggggtcgtgccaacgcactcaccgctctgtctgccagtctgccgatttgtgcccccgcggctgtgccctcttcctcctcatctctctgctcggtctcctctccctcgtcctcctcttcctcgtactgcaactcctccttcaatttcttgcgcatattcaccgccgcctttcgcaggggccgccccgtctccgtccgctcgacttccctctccactaatgtctcctcgtcttcgtcgtcttcctcttctaaagaactcgcttttggcccccattttctgtggtgcgtttggcttttgggtgcctttgacttttttctgctcgaaggcccagcttcgcagtcagtgtcactcagttgcaactcattttcatcatcgctactgctcgacatttgtctaattttcatttttggccggttattaggcgggaaaagtaacctcttccgtttttttgctcgttcgattcgctttccgacaatccctttcttttttgctgaaggcgtgtaatcgctgtccgagtcgtcgttgataaattcgtcgtcacttcttcggcgtccctggaagccaattccccttaaaaatgttttggtacttttttgtggctctttgccaaatcacctcgcagatcgcctttccgagggcagatactcgtcctccgatggttctgggtcctcttcattttcatct

SEQ ID NO: 96311 - DNA, 232 bp, Heterodera glycines
taacccattttgaaaaaacatttgtattccattaggtgcggatgtgccaaatctccagtaattttgacggattcccgccctcccctttaacgtacgaccgaaaaattgaaaagtttacactcttgcgctgaaacggcgtgcgcccgccacttcgctggcacgggatttgaagtggtcaagcaaaaggtcggcatctttgcgcagcatttggcccgactcactgaagttctgg

SEQ ID NO: 96312 - DNA, 536 bp, Heterodera glycines
  unsure (1)..(536): unsure at all n locations
attttaattttattttttaatttaattttcaatcaattcaaatatttttattaaaaattcccgaccatcgtcggccacgagggtgccggcgttgacgagtcggtgggccccggcgtgcaaagtgtccgtgcctgtgaccacgtcattccgctgccgttgtgccaatgccgcgagtgcgacgtttgcgcagacccaacgtcgaatctttgccgaaaatttctttatttgtgagggaattgatatggcgtgtcttttattattggaaatggttgacaaaaacgaccaaaaaatcacagactttttttntggggggtggcaccacccgtttttcgtgccgtggacagcccatttaccatttcgtcggttgcagcacgttcagtgagtacacagtgacgccggaaattgcggttgccaagattgatccgtcgttgcccctggacagaatggcactgctcggctgcggtgtcaccaccggttacggtagtccgatcaaagggtgtcccatccgcgccggcagtacggtgggcgtgtgggga

SEQ ID NO: 96313 - DNA, 491 bp, Heterodera glycines
cttcggagtttggcaaatatcgtcctttgccatccgacagaaaatgttcccgcaaaggctgcgccagcgacccgcccccggccactcattgtcagcccggacattcttctgaaaatgggactgtccaaccgacgaaaacgagcagtttgatcagctcaaagaatggatgcgctgaggcggaggaggagcaatgcctttttgtggaacattttggcccaattccccaatacagcgaaacggacgaaaaagagaatttgcggctgcggaaattgcacgaagtcgcattagaaatttatcagaaacaacgcgcttatgttatgaaattgcaactgattgggctcaattatccgaggcatttgaatgactgtgaaaaaagaatgaacaaaaaattgctccattccaaacacgtcatcagacgaatcgcggatcactttcagactattttaaatgttcatcttacgtttttgcataatttttatgacaaaattctt

SEQ ID NO: 96314 - DNA, 392 bp, Heterodera glycines
cgaaatggtgagaccggctgcagcgagcacaaaggcccccaccaatcccgcgaatacatgtgaatggtttgtggaagtagtcgagacttccttggaaagctcgtgaaatttcgtcgtcattccgctaaactttccatcaaagtcgctacggaccctcttttcaagggtgagcaagtcctaaacggagtttgttcgattgagttaaacatttaaaacaactttccaatcgacgacaccaacagtcgaatagtggcgaaaagagtcgcttcttaaataatatttgggtgaattgcaaacactttcgtcatttggaccaaccgagagagattggcctgcagagttgcgcccgattgacccgtcacccacagaaggcgaacacccacttcaaaggg

SEQ ID NO: 96315 - DNA, 540 bp, Heterodera glycines
  unsure (1)..(540): unsure at all n locations
agctggagctccccgcggtggcggccgctttacaactagtggatcccccgggctgcattctctacatcgccttgtatacattcccatgtatgtaancagctaaaatatatcatgaagtgccagataaatccgcatgatgagtctacggcctgagaaaaaaatggtgtaagtaaaaatcgtaactacgctcaaaaagcttctcaaccaattttagcgcatccaattccttctacaatcgcctttatacatcccattatgaacgctaaaattatcagagtgccgaaaatcgcatgtgatctaagcctagaaaaaaatggtgtaagtaaaaatcgtaattttgctcaaaaagcttctcaaacaattttagcgcatccaattccttctacaatcgcctttatgcatcccattatgaacgctaaaattatcagagtgccgaaaatcgcatgtgatctacgcctaagaaaaaaaaaactcgagggggggcccggtacccaattcgccctatagtgagtcgtattacaattcactggccgtcgnttt

SEQ ID NO: 96316 - DNA, 652 bp, Heterodera glycines
gtccaatgtatcccaagcaatcattcaattccggactgctcgacagcttcgtcttccgttccgttttcactctccacaaataggggctgctcaatgagtgaaaataattttcggtcatttgccgtacaatgtgccaaaaattcgtcgcaatgccgtccttcgtccaccatcacttaacgcttctgtgcctcttcctcggcgccctttgcgccttcggtgccgtcccttcgctgtgccaacttttgggcgcccctggcggatgttccccaatcgccgttctcagcgcggcgcaacagccaaacggcggcggcgccgcggcacagtttcagcagccctttgggccggcttttggctgcccgctgaatccgctgggtgcttttgggcgcccatttcccccaccgccgccgcccccaccgccgggcatcggaggccaatttccatcgatgcaaggccagaccgtgaatcttagcccaaatttcatgggcggaggccaacagcagcagcaaaatggggggaatgccttcggcacaatgggcggcggcggcaattgcaattgtggcacgtgttgtcagcagcagcaggagacgaacggcaacagcaacaacaacaattttattggcatgccaacagccaacgaatttaccggcttcaa

SEQ ID NO: 96317 - DNA, 480 bp, Heterodera glycines
ctttggcagcacattccagggtggtcgcggacccatttttgcatactttgaccatccgacacgaggatggaaacacttacgaagttaatttgttggaagaacaagcagctgatcctgaagccgcggcctacatttcgtttgtcagggatggggaatttccagctgatttggatgagaaagaaaaataattatttgctgtaggcactgccaattacaaattaatttcgggaattctttattttgaggacaagggttccccccccaagaatttatgtaccaatttcattacgtgggctcattttcgaatcgtttcactcctctctattgggagacggtcatttaaattacagaaaaacaattgccaaatgtaaaaaatatttttgtggaaccaagaaagtatgaccttagaaaaaggacgagaacttggaaagatttagtaaattattgaaacttatttgattactttcaatttttattttt

SEQ ID NO: 96318 - DNA, 626 bp, Heterodera glycines
cggggcggcgctctaaactagtggatcccccgggctgcaggaattcggcacgagggttctttcaagggacaattggctatggtcatcgatcaatcgctgctttgattggttaattaattcaaaaaataaattgttttctgtctgtttgatgaatttcttcggtcgaaagggcaaaaagggccccgtcgttgggaaggagggcaaagagaagggggagagaccgtcacatcgtcggctgcgcgttttgggcgtccctttggcccaggcgctgcgcaacgacccaagccacgacggagtgccggtgcccgcggtggtgcgcgagtgcctcgacttcatttcgctctatggccttcaggtggagggcgttttccgcgtgtcgtccccaaagtcgcggctcgacgaattggaacggatggcgaacgaaggcaggacagacgaaattgtgttccaagatgcgcacgaagcagcgggccttttgaaacgctttttacgccaattgccggagaatgttttaaccactcaactcaaaggacgattcgaaaacgaagcgaatgtttgccgatgcgtcgccctctgtcgctgttctgcggtcattaaactcagagaattgcttctccaattgcccc

SEQ ID NO: 96319 - DNA, 481 bp, Heterodera glycines
ctaaaacagaaaacatctgcgaatacaattttcataacattttgtcaggtcactgatggattttgaaaatgttggcacttccgtcgctgctccatttttggcaccattgagcggaatcgttgtcacatttaccggattgagcaaagaaaaacggcaagagttaattggtttgctgcacgaaatgggagcgcaaagtatggcggcgatgaattgcaaagtcactcatttgatcgctgagagatgcgaccccgaatctgagaaatacaaggcaacttttccagaaacaaacggcgccgttttgagttgccttgcaaccacagctatttagttcgctttaaggaagctcggcgcaggaaattgccggtgttgttgccttcatgggtttttgctgccaattccatggaccgccgtttaaaggacactttaaatgtcatcacttcagagaaacaccttgacactcataaaactccactttttgctg

SEQ ID NO: 96320 - DNA, 605 bp, Heterodera glycines
ctcttcaacttcggcatgatcagtccctgttcttcttcctccattcactggccattgaattggcgtcccttcgctttgtttgtcgtcctttttggctttttcactgcaaatagtcaaatgtttgtgtccgcttctgatgacaaacgaaacagcttcggcagagatttccttcccttcggcaaaagaattgccaactccgaagaaaactttcaacgcgattttatggcatttggaaaacgttcgccaaatgaggccttccaacgcgaatttatggccttcggaaagcgaggggcaccgtctgatcacttccaaagggattttatggcattcgggaaaagagtcccggacggatttcagagggaattcatgacatttggaaaaaggagcagtgacattggcaggggaggatcattcgacagggaattcatggcatttgggagaagaaagtgaagccgaaagggagagacggcgcgagagaaaaggacggcacgcactgatctaaggatgggattgatctgatcgacagaaaacagcaaaataaacagattcaaatcaaaatattttctgagacgaaaagcggataaaagtgaggatgttgataaaag

SEQ ID NO: 96321 - DNA, 481 bp, Heterodera glycines
gaatgctgtaccgtccgtcgtcgtgttgccgcactgatcgttcaaattggatgatcgcctccgtgtcggcgtcttgtgttgggtcgtcgcgaattccgatcgcttcaaccgaccaaaactgttcgattgctttgaccgatggcatttgatcccgctcgtcctccccacatggggggatcgcgaataccgacgaatcgggagtaactcccgtcgtggtctgaaactgctccccgcaaatcacagtgccgaagacggtgtcgatcagataagtcccctccgccgtcttccgaaatccttgtacgaagtcccaaaatcgccgtattccgatcagcagctgcggttgcactgtgtcggtcgccgagcagtgttgcccgggagtacctcccgggattacgaattcggtcctgattggagtgcaaatcgttggcacctcagaaagctcaatactttcccattctccgtccagccgtttgagcttcac

SEQ ID NO: 96322 - DNA, 216 bp, Heterodera glycines
cacactttttccaattattacctttatgttttataaatttagtcatattcaaacctagtggttcctccccgaccctatctatctgagaaaaagtcggggatgggggaggatattcttcgaaaaaatgccggcgatggctggggaaatttaaaaaaaacgtcggggagcaataccactgttggcgtctaaatttctttaaaaattgaaaaaattatt

SEQ ID NO: 96323 - DNA, 223 bp, Heterodera glycines
atggaagggaaaagcagaagcgggcggaggagagactgtgagggattatgggagaagcaatcgctgctcgacccccccccccccttcgtcttgtacataaactgtccgtcgttgcccacgtctatctgctgcgcaaataataaaatgcttactccccccttcccccggcgcatttgcccattcgattccatcgataaaatattgagaaattctaattaaaaat

SEQ ID NO: 96324 - DNA, 635 bp, Heterodera glycines
gtttagattaaaggatgagaagtgggcaaggggctaaagaaccagacaaaatttaatggtcacaaatcgattggccggcggaaggctttgggagaacgacgacggctgacgcacctttttgagggggaggcacagacagaaggaaatgtgagagacatgcacactctatgaatccactcgacggcgcgctgtcagaaatgggattgtgcgagaaaagaaagaagctcaaaacgatcggcagatggttttcatttatttgggcagtgattgggagaaaaacgatctcaacaaaagaaaagtcagggcttgggaaatctcgcgaaaattggctcaaagcattgaaagcgacggagggctgacgactaattacaaacaaacaaacaattaattagcataattaagtctctgctgaaaagtcaaagccattttggtcttttgttgcgttcgctttcgtttcttcgtcctcgaaacgctcattgcggcatcgcattttgaagaacatgctctcggaccattgcttcgtagtcggcactgttctgatgaaatgctgccttgaaacaaaataattgataaatttgacagattaaacaacagatgaacttacagctgcatcctgattggccgcactgtcatag

SEQ ID NO: 96325 - DNA, 166 bp, Heterodera glycines
caaataaaatttaaatctctttctaaagggtcttgaaccaatggttgtgccatcgaactgtccagaagatttgccccgaacaatgcaagtggacccatttgttaagcaaacggcacgccaaaaggcgaccgatgttgcacagcgaatgattgatgaaaaagtaaat

SEQ ID NO: 96326 - DNA, 466 bp, Heterodera glycines
attcaatacaaaataaattccaaaccaaacaccaacttttccctgctgatggctgaccaccagcacaatgacatcgaactggcggaggacgcctccgccactgaacaaggcaccaaacagaacgtgtcggttgcggtcaaatggttcttccacggaaactggcgacgttttcaatgctccgagtggacttacagcgcacttcaggctgaaattcgcaccattgagcccaacttcagtggccaatttttttatagagacgccgatggagatgcaattgttttcacaacggatgccgaaatgcgtgtgatgctcgaccactttcagaagaaaatgaacaaagacacagtgacactcgaaacgatgggaggcgaaggaactgttaagaccggagttgtcaaaacgggttgcccttacatcaacaaaatcggcaaaatgcgtgacgtcactaatggcaatggggacaagt

SEQ ID NO: 96327 - DNA, 462 bp, Heterodera glycines
tacacagtgccacgcaagattcagtcgcttacctttccgttgatcaaagctggtaggtcataacattattcgacggatgcgaattgaaacaaatttaggacacgacttgaagggtcatgcagagacggggagtggcaaaagtgcagccttcctgcttccgatcatcgatgccgtcatgaaacttaaaaaaggtggccattacaaatcgcggcgctgctgtccgtttgcccttatcgtggaaccaactcgtgagctgaccgttcaggtgtacgaccaggcgaggaaattggcagaaggttagtgctcatttcatgaattaaaccaggcaggctttactgttttctttgaagagtgtgatgtgtctgtgtctcgcgcctacggaatgtttctgcgtcatgttaaccttcgtcaaatttctacggatggttgtgatattttggttggcactccgggacgtctttg

SEQ ID NO: 96328 - DNA, 521 bp, Heterodera glycines
ggcgcctctcggcaccgccggacccccttctttcccaagagttttttggaataaacacgccgcaaaaaagtgatgtgaaaagtaaatctgaattcaaataatattcgatcatttagtccaaaatgattaattctttgaaataagtgaagaaaatttgtttgaaaattttcattaatttaatttagctttaacttttggattttattaaataaaaaacaaaataaaatttaattttgtataattttctcttggaataaattaaatttgaatttttttaatttttaaaatttcccggttggtcccggtcccgaacaaaaatcgaggtcccggtcccggcttctcaggtcccggcaagtcccggtcccggttttgcccaaaattcccggtcccgctgcactctagttgaaagcattagagaagcttaataacttttaatgatcagttgccaaaagtaattggacctataaagaataaagatgttttttgttgcgctaattgtacataattttaacttaaacaga

SEQ ID NO: 96329 - DNA, 604 bp, Heterodera glycines
tgtgcttttaacagataaaaatgttttcaacatttttatgcctaaaaatttcgaccccccaaaaattgaattggcaaattctcatatttctcgggctccaaaccgagacaaatattctcaaaactaagttcgagtcttgactattcccttcgtgttttggccaaaatttggtcccgaatttttgggccaaaatttcaattctcgaattttctgggtttgggccaatcgcatctctcgctgctcaagaaccgggccttaattcttgaggcccccgagtttctgccatagtgaattgccaaattaaattctaaattcctggaccatgcccatggcggtatgtgactgcgtgacggcaccgtcggcccatcggcataactgtgccggtgccgcgcgtgcggtgtggacacaaaggaggacggtgccgtgccaacgcccgctgaaaattctgccggtgccaacgctccaaacacttcggcgtccatgcgcagcaacatttcgttgagcacctgtgagaaaaaataaaatacagtattccctaaaataaaacccccttgggctttatttttcaacccctctcaaaaggggaggggctttatttcatgga

SEQ ID NO: 96330 - DNA, 972 bp, Heterodera glycines
aatatgcccaaaagcaaaatccaatcagcgagcattctggcagaacagcaaaaaagtgtcttttcctgtcagccgacaatccccgccgccgatgagtcggatgatctgtccaactcctcccatttgaattgttgtcagccgatcagcgaaattgaacaacatcagataaacgacttacgccaaattttggaaacacagcttctgaagcaagaggtggacgaagcttatcttctcagatggctgaggtcaaaggaaggcaaatttgacgaggcggccgatggcattcggaaggatttggtgttccgaaaagcatggggactggacaaaattgtaaattgggaagcgccggaaattttggaaaaatactgcggctacggcttcctctctgaccacgacggcaatcccattctgatgtctctgctcggaaatactgacgtagaagggatgttgcgatctgtccaatcgaaggattacatcaaattttcgctcgcggcaattgagaaaggcatcacattgtgcagggaacgcgccctgcagacgggccgacccttcgagcagatgatgctcgtgttcgacttggaccacatttcttcggcccactactcctccaagcagttcgcctcctccttcaccaccctcgtcctcctcttccaggagcattttcccctcgttctgcgaaaaatcctcgtaattcgagcacccgaaatggggagaattgcgttcaattcgatgacgccctttctgtcaaatgccatcaaatcgatgatcgaaatgccttctgaggaggggtggcagtccgccttaagcaaatacgtgaatttggatgcttggcctgtccattggggcggtcggatgatggaccctaacggagacccaaagtgcccctccaaaatccgctacggcctcggccccgtccccgactcgtttttcgtcgacccttcccaagcaatgcccgactatgacccgttgacc

SEQ ID NO: 96331 - DNA, 641 bp, Heterodera glycines
cgtctcggccgagtcgcctctcagcgacggttcctcttctcccaatggccctacgccgacgtgccgcgcttcgatggtcgactcaaaagcaattcgaaaggcgcactgtcaggtgtgcaatttggacatttgttcaaccgcacgacagcgacacgtttatatggtccatctgaagaagaaagatttgttcaaatgcccccactgcgaatacacaaattcgaattccgtgtgggaagtgcaaaagcacagccgcgtgcagcacggcaaagacgcgcgaccgatcagtcaggaggagaagcacaagttggaaattcagatgtggagccaactttgtttccccgaatggaaacagaaacggaaaattgagcacggcgactcgacggaagaggagacagcgctgaaacggcgcagagagggcgaaggcggcgctgaagtggacgacttgttggagggatttggcgaactgttggggcacattttgcagcagcaaaacgaagcgaaaaacaacggacaaatagcggaggaggagggagaagaggaggacgaacagcagcaggaaagcggaacaacggaggagcagacggaggaggacgaatggcgggacaacgcgtcaccaagtgacaaagcgccgacaacggcgg

SEQ ID NO: 96332 - DNA, 485 bp, Heterodera glycines
aatcgagcccgaactcgaagtgctcggctgtcggtggtcacccagaccaaccgaagcagcgacgtgaactgccgaccgaattgtccgaattttcaatttttgatcacccgagaagtctgactgagtgaaaagccaggccttcagtgctcgcacgccagcgtccttcattagtccgtcggaagtcactctcatattgtcaaaggagttgccgaatcggaaaagttcgtgaattgatcgcccttttttcgtcacccagacgggaatgaaggggtttaggctcatcattggtccaagacgtgcgaccagttcttcgtattcgtcgtgcttgtcatggacataaggcgggcatgtccagaagaacttcacgtgtgcaaaacgacggcacagattcgcgatcatttcgtactgttccatcatcatttcgacagtctctcctctcagaagagagtcgcgtccggcaatgatcagagctgccttcactttgc

SEQ ID NO: 96333 - DNA, 309 bp, Heterodera glycines
atatttttttataaatttcagtaaaactcgcaattgcactgtcctttttcagttgaatagaaaaagacatatgggagaaggaacagacagacagcagaaggacaacaaacagaaaatgagcaattagtgataaaagggaaatgataaaatataaaaaaatatgggaaatgataaaatgggaatttgacggaggacagagaaagaaaggcgttattttgcagcagcaaaaggaaaagtgaggacaaaaacgaattcgcaattggaagagtcaaaacatttgggaggagcaaaaagagacaaacattcaat

SEQ ID NO: 96334 - DNA, 298 bp, Heterodera glycines
tgatggttggtggtttgtgaactaattttttgatcaattaaactgaaaaaaaaatatatatatatatatagataatttaacttagtttattgcctgggcctaaattgatggagcaattccttgcttagcttatgagtaattcaaatatttttaaaaaattattcaaaaatttttataccgaccaggtggtggtgccctcctgagccttgccactttcaatttcttcaacaacagtaggggtgtggtagaagctgttcagatatgattttatgccgtaaaatttgccaccagctccttt

SEQ ID NO: 96335 - DNA, 551 bp, Heterodera glycines
aaagctggagctccccgcggtggcggccgcttacgaactagtggatcccccgggctgcaggtcctcggcacgaggattccccactttgtttttacattttgtgatcagctcacatgcattttgctgacctgtccctaagtgaacgggaaaaagcgctgagtgttcgctatttgcaggagcgtgatgcgatgtttgagcgtttttcggagtggacggagcaggaccagacggacttctgcaaacaccttctgcagcgcatgtgtcaccaccaacacggccaaattgaccaatttttgggcccaatgcttcagcgggacttcattgcgttgttaccaaccggtttggcggagaatgtgcttcatttgttggacgccaagtcgttgtgcgcctcggagtttgtcagccgccggtggagtcgtgtcattgtcaacggattgctgtggcgcaagcacatcgagcgccaagtgcgcaacgacgcgctgtgggccggcctcgccatccgacggggatggaagaagtacttcttttgctccaaggaccaggcgacacgc

SEQ ID NO: 96336 - DNA, 286 bp, Heterodera glycines
aaataataaaataataataattaattaattaaacatttttataataatttaactaataaatattatttaattataaccctcgttcctttttcctttaaaatcaaaaattgggaaaattccgttaattgatttgtttattaggccttattgcagcactcttccccttcttcattgatttgtttattttgttcatcttaaggggtcctgtaattaatttggtttagttaaaataattatgcaaaaaaataaataaataaaaaattgggctcataaattaaatttagat

SEQ ID NO: 96337 - DNA, 636 bp, Heterodera glycines
tgcactgacacagtgcagcaaaatcctctccattgtctgcgatgcttttcccctatcaaatgccccgtccgtttgccttgtcagcactatttttgtcgtttgtgcatcgccgatgagaagtgttgtgtgatttgtggtcatccgattggctgttccgagttagtagaggacaaagtgctgaattacgtgttggaaagttcgagtgaggtcactgagacatgtgcaaatttttatcagatttcgcaaccgatgttcttctgcgacacgtgccatcagcccctttgcagcgggtgtcgcgagacgacccacaaagccaaaatattctcgactcatcacatttttgagttggaggagcgcgggaggttgagaagtcgccccatctgtccacagcacaatgagccgttcattttattctgtctcgactcgaaatcgctgatgtgcatcgaatgcttcaattcgtcttcgttggaacgacgcggacatttcgtcaacatcgaactggcgcacaaaatttgctgtgataaattggagaaaaatgcgttgaatttgcgcatttttcaggaggaacttcgtgagcaaattgagttgaggaaacgattgacggacgaactttcgaagaacagcgagaatttgaga

SEQ ID NO: 96338 - DNA, 876 bp, Heterodera glycines
attatgagccacccaatttggcaaatcggtcttttaaaacgcattaaagaagattcagtcgattgcttggagtgtaagcaaaaaaacgttattaatttttcatcttcatcattttttggtttaaaaatatatttgtatacttttttatactttgaaagacttttttattaatacagaatttttgaaaattcctaaaatccgcactcctgcgcaggatcctgcagattttaaatgcatgatttgcaggattaatcctgccggatcctgtcctgtaaaaaattttgaattccaatcctgcaacgggatccgcaaatttgaaatttccggtctctaactattaccccatttttttaatctttttgaaaaaaataagcgaattttttttaaatgactaataaataataaagagcttcaaatggccctatttgctaatgtttttaccacaaaatatcttccaaaagaagtgacacttttggtttttcgccgttcaaactctgaatttttttgcgttcgtcgttcgccaacgatttttgagcagacccgccagcaacactcgaactcttcgcgacggaatgaccaaatccaacaaatcttagaccaatttgacaagatgcaattgccctctcaaaatgagcctttggcgacttcgcaacagcaaattgtgcaattgtcggagagactcatccaattggcactgacggcgacaaatttggtgtgcaatttgttgcaaaaaaacggagcagcagcgacggatcaatttaaaggacaaacaaaaatgccgacggtggcgactattgagccgaaaaatacgaaaagagacggaagagcggcagaaaatgagaagggatggacttggatttgtgagaagtgtcgcaa

SEQ ID NO: 96339 - DNA, 644 bp, Heterodera glycines
gtgcaaaatccacctccttatatacaaaattcgggtgcaaaaattcatgcagcaaaaaaaagtgtataaaaggcgacggttttcttcacttttcaccagtgccagccagccttcaactcaacgcaacatcaacaccagtgcgcgccaagctcgtctacacatttcgtcgcgacaactcatcacttcatcatgagcgacatgagcgcctacatgggatccggccccgccgagcctgcaccgtcgtccggcgccgcggaagcctcttcatcgtcaggagtcgcgagcgcctacatgggatccggccccgccgagcctgcaccgtcgtccggcgccgcggaagcctctccatcgtcaggagtcgcgagcgcctacatgggagcctcgcccgcgtacgagccgccagcggttggtttaagggagacacaggagcaaacgcatcactaatattttgtttttgcagccggagaagtccccggatcagagcgcctacatgtgagaagatgcaacaacgaccggcggatggatggacgaaacctgaagagcgagcgacctgtcagaagatgcaaagataaagaagatgtctcataatcgtgatctgtatttattgatgtattgtacatttgtatgcatatatcattttgctg

SEQ ID NO: 96340 - DNA, 625 bp, Heterodera glycines
agaagataaaaaagcggctaacaacacttgcagcagcaacaacaataatagtctatcggatgtcaaacagaatgatgacgtctcatcgcttgactcacttggcgtttttctaaaccgttttcgtcaaatggacacaaaaaagttgcaacaattggcttcaaatccgacggtggtggcgcaatccaacggaccaaacgaaggcaccgcaaaagacacaaacaatgataacacttcgatcacatcaactcgggagaaaatgctcgaagtcgtttatgggaataagctaatgggaaaggagaagcagccgaaatttatgtgttttgttgtggatgcgcaggaaagaaaaattaggataatgagcagagaggagcagaaaaaacaggagagttccgccatcattttggaagaccttacggatgaccaattttctcggtttggcaaatccgtcaaggacaaagaggctgataactccgacgcattcgtccattgtgaaaaatgttctctgttctacgaattctgttgccttgatcatccgctttatcagtgcaaagatcgggtgccttcgtcttctcccacagaaattgaggacagagcggcggccactcttcctgcctttctttttatt

SEQ ID NO: 96341 - DNA, 422 bp, Heterodera glycines
tcattattatgtaattttaaacattaagttaccaattcaaatattgttgatcatcaataaacatattatcatcacgaattaaaggtttaggaaaattttgccctaaataaattatatcattgtccttcactttcacaagttcaagtgggtagaaacgttcattgccattcttgtgtttttcgatcacgcaaggattgcttgaatagcgaagacaaatgcggtgccgtacataaaaatgctggtcgacggtcacattcttgaaaccattgtaagccatttgcttacgggcactttctcttgtaattccaccgtactcaaaatctttgtattcatctagttgatttttgtatgttgtctgtagagtttttcctttgacgtatttttctactttttgtatctcatccgggtgatttaagcggtcg

SEQ ID NO: 96342 - DNA, 1195 bp, Heterodera glycines
caatcggacttccatctttatgatgctttttctcggcatcgaacggtacgtcgctgtgctcttcccaatttggtaatcaattagataattgactaattattatcaattttaagtgaaaaaaaattctcaggtcaaggagtcgcaaccaacgcaaatatgctttttggacttgcatattttctgtgcttctccatgcaccgttcagtatttaccaatgcttatctgttgggttcaacgcaccggaaaggcgccgatttatttttatttaatattttaattttaattttagattacttttgtgctcctcaattgatgttgtggcgggaggtggaaacaattttatcatcacaattttgaacaacggagtgatgggcggcacaataattgtgtacactttgttgtggttgaaaattaaatttgcgtcttctccaaatggtaaggcaaaggcaaaggtcgaaaattgagtgtcaccaaattacagtattccgagggaatttggtgcgctttagagctctaggtgaaaaaaatatttatgaaacaaaaaaatcgattttttcaagtgtccgtttggggtactcaaacaattatggggagcaaaaatccaacgcagaattaaagtacaggctatagggaagctattccggaaggattcggtctccccataaatctgggcgcatcggttcggggggactgccccgaaaacaaaaaaatcgattttttcaagtgtccgtttggggtactcaaacaattatggggagcaaaaatccaacgcagaattaaagtacaggctatagggaagctactcccgaaggattcggtctccccataaatctgggcgcatcggttcggggggactgccccgaaaacaaaaaaatcgattttttcaagtgtccgtttggggtactcaaacaattatggggagcaaaaatccaacgcagaattaaagtacaggctatagggaagctattccggaaggattcggtctccccataaatctgggcgcatcggttcggggggactgccccgaaaacaaaaaaatcgattttttcaagtgtccgtttggggtactcaaacatttatggggagcaaaaatccaacgcagaattaaagtacaggctatagggaagctactcccgaaggattcggtctccccataaatctgggcgcatcggttcggggggactgccccgaaaac

SEQ ID NO: 96343 - DNA, 394 bp, Heterodera glycines
gttgataagagccaactgaggccggacgatcgggaccatttcagcgccgctgatcggtcattttaatctactttataatatatattttggatggtccatgtatagtaaattgtaataaaaatgatatcttataggcaggcatacgataactggcagacaatcgtggtgaaaataaataaattaaaaaatgaaatggagtaatcagatcgaaacgacaattgcacaaattcggcccaattggcacaacaataaaaataaaaataaaaattaaaatgtaaaatagtaaatagtaaattaaaattaaaaaaattaaaattgaaattgaaaatgaaatgaaagacgaacattattcaattgaattgaattgatgatgatgtgttggcgcgatcgtggt

SEQ ID NO: 96344 - DNA, 172 bp, Heterodera glycines
acaccattgcccaagaaagtgcaattttaagatatcatttgataaaaggatgtgggctttgactaacaaataagttaaaaagttaatggtctatgaaaaattgagattgtcactgattggacgcctaaagtgaattacaaaaaaaattaaattaataatccgccgaatggat

SEQ ID NO: 96345 - DNA, 562 bp, Heterodera glycines
gttgcacttgaggcaagtggcgtccttgaatgtgcagtcggagcgccaatggtcggatttgccacatgatccgcatggatgcgtcggttgaccacgcgttggctttccgcttgaatttgcaccttgtgcgaatggcgtttgtggcaattggtgggttaaccagcgaaagggcgctctccttgacaagctgaattgcccgaagttcctcctcaattttcttgagcgaaatgtcggtgccgttcttctgcgagtcatccaacattttcaatgccttttgtcgcaaatcatgatgttcatcattgagcgcgatgaccaaaataatgcacttgagctgctcctttgtcagactcaggtcggcattttcacatgatgcgttgatctgcgcaattagtgatgagatgtcttgcccttgttgctgtcgaattttaaaacattcgaagcgacggacgaacagcgaacgtgtctcggcaaaaagctgtttgagctgtgaagtgatgtcattccaattcacttggtccggttgggttgggctgatcgtgtccctgatatttgctgtactcct

SEQ ID NO: 96346 - DNA, 411 bp, Heterodera glycines
attttgatttagatttgttaaaaagtccaattatcactgcattcttatgattcttgcttcttcgtcaaagcgattagcttgtcaattcctcatccgaaaagtgcctcattttgctgtgacttcctcgagaaaagagtccaattggtctgaagttcttgatgaagcggtccccgccagaaaatcataccgcgattttcagacactcaacggaaaccaacgcgatgctttggccgcatcactcgacgatagtaagtcaatggtcaccgttttgggctcaccgggcaccggaaaaacgctgttggtgacggaattggtgcattcgatgtgcacaaaaaaacaacgcgtgttggtcatttgtggctctcgagagcttttgtacagcaccgtgtgccgatacttccgaagggctaa

SEQ ID NO: 96347 - DNA, 677 bp, Heterodera glycines
gtttgagaagtgcttggctttgcttgccatcattcctgtcatctccccatgcttttcccctctttcggcatgctcagcagtgccatccaccaaaatcagcaccgccgttccgtccattctgttcgctatcattcgccgctgctttcatggccgaagcttttcctcatttccatcgcaacaattccccttctccttttgtcgtgcattgacttcgtaagtgccgtttcggacgacggcgcgccttttctgtccgaccaacagaaacgtggcggtgcgcgcgccttcaatctctttgcttctgctgctttcccaccgccgaatgagaagagaagcggcggacgtgcctttggaggtggcattcagacaattaacgacgatttcgatgctaatttggctggagaactgaagcgtgccggtgcccggttatttcggatgagtgacctttcatctgacggggacagtttcgtgccggaagggacaaaacgcggtggtgccaggcccttttacggcggcggatacattgacggagcgtggaaaagagcgggtggacgatatttcttgcgtcaatttgacgatgtgccgtttggcggcggatggatggccaaacgtggcggcggtcgctcatttttcgaaggcaccaaaggcccttttaattctgcaaattattgggctccaca

SEQ ID NO: 96348 - DNA, 476 bp, Heterodera glycines
acagcatcattgttgacctgctccatggacagcacaaatcgacgctcacctgcaatgtgtgcagcaaaatcagcatcaagttcgagccgttctgcttcctgtccgtgccggtgccgaccaaggagcacaaggcccaatcgacgatcgtttttatgcgggccgagaaatgggcaaagtttcacgtcacacacaccagcaaaacgacggctggccagctgaagcaaatgctgcgtgaagagttgcagttgccttccaacacacagatgatcatttattcgacttacagtaaccgaatattgaaggacgacagcacattgtcctccacctacatgtacaattacagtatgaaactgtatgcctacgctgtggagccgggccccgtcattttggtggaaaatctgttcatggccacctctccgccgttgttctttccacgtcccaccaaactgacgcgtcgtgcgctgcttgccgaactg

SEQ ID NO: 96349 - DNA, 486 bp, Heterodera glycines
cttctcctcctgcccaatgaaacggccaaaaagagacaattcccgtacaaaatcggcctccgtcgtcgacagtttctccttcaacggtcaacgtttgtcctgctccaactcgtcctcttcacctccgccgtttcattcggacgaagcagcgaacgatcgccaacaccgaagggcatcggcacaacagcagaagaagataacgaacaatgggacggcggatgtgatgaaaaaaatgccgaaaatgaacggcacaacgagcagaggatggacaagggagacggacagcagaagtaacgacaacaacaacaacgaggacgacgaaacggacaatgggacaacgacggaagaacaacagaccgggacggggacatacacaggcatgcgcgactcggccacttcgtcgtcgtcggcatgctctgcttcatcgacgcttcgtcgaccgttcgaccatcccaccaacctctttttgtgccaacaagcgctgaa

SEQ ID NO: 96350 - DNA, 799 bp, Heterodera glycines
cgagcttcagctcgaatctgaagaccgatataaccgatttccattctcgcaaaaggaattcattgaagattgtccggcagaacgactttacgtccgaatccttcccgaaatgactgaatatgtaattgccctgctcaaagtcattctcgcttcgttgccttcctccaaagcgaaaatcgatgctgtcacaattctatccgatgtgctgacacccgaaactgacacaaatgagtaaataaagagccatttattcccttttgggacccttactccgattccctaattatttagagtcctttctaattcgatcagtttggaccttgccagtttttcacacacaaatgtattggaagaaactgtccgagtcgcaattgacataaatcgacacaaagaactgatcatcaaatcggcttcgtctcttctcattcttttgctgaaacacttacgtttgaaccacacactccaatttgaaaacttggcccgttatctcgtcttggccaattgtcttccgctggtgcttaagtttcttgaccagaatatttgtcgatacttccaagcaaagcacgagttggccccgttcaactatcctcagtgtgcactgttttttgtgaggaatggatatgtttgtcctccattaactgcggaaaatgtcgacggttgcggtggttccagcgactcgccttcatattttctgtggcgcaatggcttttcctccatcaatttgcttcgtgtgattaacaaactcacaaagggaaaacagtcccgtacccaaatgttggtcgtttacaagtgggccccg

SEQ ID NO: 96351 - DNA, 430 bp, Heterodera glycines
ggcaaaagcctcgaaacctatcaaaaaaaaatccgttaattttatgatttaccacttttttaaattgccttatcaattggctttgctgctgttgctaatgtctcctcctcccccttcttcagcttttgctcattttcttctccgctgattgcttccaaaaagccgctgctgctgctgctactgctataacttgtgttgcttgtgctgcttttgctcatttgggacaatttcgaattagaatgagcacaacaatcaatcagcaaaggctaaattgacacgcatttatgtctgttcgatgggcttccgtggtgaatgagggataaaacatttgaaaatgccttggttgaaacatcgggattttctgatttcccaaaattttagggcattttaattacatccccagaggaatgcgctcttataggaaaaaaaa

SEQ ID NO: 96352 - DNA, 504 bp, Heterodera glycines
tggaactccccgcggtggcggccgctttccaatagtggatcccccgggctgcaggaactcggcacgaggctagtaaaattcattctcacaaatcaatcaaattgttgccccattttgtcactctccatgattcacattgccatcccttcccatcgaacattggccgaccatgaagatccgtacaacaaatttacggtttacgatatccacgtgaatggcgccttccatgccagtgtgcggtacaatttgctgtactcattgcacgaaaagctgatcgacctgttcggctttcggttgaatgcgcccgattttccccccaaaaaattgtggaaattggacgcaaaagcgttgaacgagcgccgggaagggctggccaaatatttgcaaggagttgtcgcgaaccccgatgtgtcgaggcaccccgtcatggagcgtgtttttctcgattttcaagtgaagtccttttctgctgcggtaagccgaatgacaaaattggaaattttt

SEQ ID NO: 96353 - DNA, 481 bp, Heterodera glycines
ccgacctctagtaaaattcattctcacaaatcaatcaaattgttgccccattttgtcactctccatgattcacattgccatcccttcccatcgaacattggccgaccatgaagatccgtacaacaaatttacggtttacgatatccacgtgaatggcgccttccatgccagtgtgcggtacaatttgctgtactcattgcacgaaaagctgatcgacctgttcggctttcggttgaatgcgcccgattttccccccaaaaaattgtggaaattggacgcaaaagcgttgaacgagcgccgggaagggctggccaaatatttgcaaggagttgtcgcgaaccccgatgtgtcgaggcaccccgtcatggagcgtgtttttctcgattttcaagtggtatcccccacattttcaagaagtccttttctgctgcggtaagccgaatgacaaaattggaaatttttctgcccgatggacggccgg

SEQ ID NO: 96354 - DNA, 459 bp, Heterodera glycines
gccgatcatcgattgagtgctcttagattctgtctttcctttcctaagttttcctttgcttgtttttttccatttcattagatagtctttcttttcattcaaactgcgtccattgtgaatgttttccaatggataaaagggtggatctgtcattgatgagcttatgtgtcaattgcttaatgatagtaatttataatatgaaaccctttcttaacagggccaatgctttttagtttataattgcctcggccttaattatgttcgcggtttgtctccctatgcacgaaaagtgtgccgcagtggaggcagtccgccaattggtttgcctctcctcagtgccaaattcaattggccattcggctcttggccaaactcagtctcttcctccttttggcattccgcggctccattgttttggccgatgcctttcctttggctgtttttcagctccatcttctg

SEQ ID NO: 96355 - DNA, 494 bp, Heterodera glycines
aaacgacgaaggcaacgtgcgtccctaccttttcttttccactttttcttgttcttaggcggaggaaaaggagcaaacggtgatttatgacgaagttaatcagctgtcgaagaacggcaattgcgtgggaattctctccgattgttttttgcccattggcggtgatctccgcacttttctttggtgtcggatgcaacgccaaccatctctattccgagggtggctctttccccgtcctttcctccgatttttcgccgcccattccaaatgatccgccgacttttggttccccagccgaccttcttgacaatgaattgcagcagcccaaccaacagtaccaaactgagtttgccccttccatggaacaaatggtcgacgaacaaaggcgcaatcggctggccaaaattattgaacaaatgagggataatggacagtttagccagcaggaaattgccgatgggcccggactctttttggaagaaggagaagcgaat

SEQ ID NO: 96356 - DNA, 606 bp, Heterodera glycines
ctccctcgcgccttcccatttttgcccccctttgccgcccgagccaacaagtggtgccgttagcaaacaaagatgtcttcagctcgatgccggatggctttggggcccgcgctgttccgacttcggcaacatgtcactacggccgaaaatttgctggacgagcccgtgatcaatgccgagacgaccgaaaaccttgaacaggaacgggggcacatcacccgtatcctgtctaggtatggaggtcgagctggacgcgtgggctgccatcatgaacggactgcaaggcccagcgagagaggcggaggaagcgcttttcactgcctttattcgagatgaccggcacttgacggaatggttggaagatgcgcgagaaatgctggctcacatagcagcagaactcgcagatgagcccaaccagccaatcgcggcgggaggacagcaaccagctgttgctgtgaatccacccgtgccagccgtgccattcgtcaacaatgccgcatttctcggcggtgccaatgttcaacagccagctgctgttgccaaccatgccaatcagccaccattggtgccaaataatgcccaaatcgtgccaaacccgcgttttgg

SEQ ID NO: 96357 - DNA, 651 bp, Heterodera glycines
gatttttccccacatttaaggcagatgctgaacatcccactgatgctgctgttgtggacaacttcgagacgcgcgctcgccgcttcttcgacctgatcaacgacggcaacatccaacacttgtgacagatcgcaaacggaaattggtagagagacgaaaatttgaaaaattccataattttacccatcatttttctcccacagccgcatttgccatcggacaacgaacttcttcttctgctgctgcttccccggttcaattacatcacagaaagcaagcaaaggacacgcaccaacaacctgcgcaccctctgtcagtgcatggcacccgcattttgttgtgtttgagtctctgaatcgcatccctttcccctctttcagcactgatgatggcaccggcaacttcttcctgagcgcatatgccatgtcagcgcaaaaaatcgccagcgattcggagtggaagaaaacggtgggtttttgggggatttggccggaaattttttatttttaaaattaattcatttatttttcagcccatcggacaaactggccttttcaacatggaaaacacgtgcttcatgaacgccactcttcagccactgttccatacgcccggattttctcaactgttccaagaaaagagcgcgcagcg

SEQ ID NO: 96358 - DNA, 461 bp, Heterodera glycines
gtgattggtaattagtaatgtacccctctcattattatcaaattaattgtttaccaaaacaaacatattgtactagtatatacacacacccattgtctgccaacctgggcgggcgtccgcgcgagcgcatgcccggataaatgtacttgacaatcacacgcgcgcgcccggtgccacggccgccgcgcatgccgcgcgggggccgattggtggaggacagcccgggcacattggtacgcttcggcatcaccttgatctgacggcccaggaacagcgagtcgttcaacgaggtggacgtgttcaccgcgtccacgtccgcgaattggatgtacgcgaaactggaggaaatgtggcaaacatatgaaaatgtgttagcaaaaggactataattagtaatgtacccctctcattattataatcagtcccgcccgcccccttccgcttttcttccccgaaaattt

SEQ ID NO: 96359 - DNA, 270 bp, Heterodera glycines
gcacgttggccataatttataagggtcgagggtcgataaaatttggtatatttttatgtatgaacttggaatttcgaaacaaaaatttattgtttcactgaggcaaacgaaaaaaaaggcaaaaaaaaaaatcggtttgtaaatataaaaatgaaatattgtgtgtgaaaagatagaatcaacaaatgacggatcgaaaatttcttttataaagattttgacaaaaatgaccatggtcatgaccatagctatgagagtgggaagagaagc

SEQ ID NO: 96360 - DNA, 629 bp, Heterodera glycines
aaaggcgtcactgctcactatcattgccatcgacaaccgcactttgccagcacataacagccatcaaaaaattccattgccaattgaatgtattgacaaaattgaactgcattacacgcttatcattgtggttgaaggatcaaataatattattcataagctttcctaaatatcattattatttatacagttgtgggtttttgggtaggaaaagcagtttttcattttttacgagatttgttaaattattgtgtaacacccccaaagtgtatgatgaccaagacgtacgttggagttcagtgagaatgagtgtgtggtggtgtctctgttcgttatggtctccgtccccatttatgtgcatcaaagaactcgcaagtttttgttcaaaaaaataccgaaatacaacaacgggaaaggaatcaaaatttcaaatttttctcacctaccgcgcgttatttgcgcaaaatacgaaattttcagccccaaatgaatggtcaacaccaaaaatggtcatggtatctctcatatggtagtgttcttctgtttggtgctcaccattggttgttggccttcaaatggtggatggacaccatttggatttgtacatttggggggtcttgggctcaaaa

SEQ ID NO: 96361 - DNA, 340 bp, Heterodera glycines
agaaaccgctgatcagagccgagaacggtggaatggaaatcacccgccaaccgctggaccaacgtcggcatcatttcggaaagccaatgggccatggattgggcatttcgccaccaatttggcggataatcacttcaaaattgattttaacattggcgcaaaattgtcgagaatttcggaaagatgccaatgactcattccattttctgtcccccacacactcactacggttgcaagtcgtgccggtgccggtagagacgaatggtcgggtaactgtgcacgtattcaccgtcgcaaatgtccgggaacgcttcgcagtcgacggagccaaaagacaccc

SEQ ID NO: 96362 - DNA, 280 bp, Heterodera glycines
aaaaatatgtgcaaaaacaggggcgaagcgcaaaaaatgccaaaacagggacaccctgtagaaaaaagcagtaaaacataagaatctaagaatctgggtcccacaaaattatttataatcaaaaacaaattaattttatttcttttaagcataatgagcaacaaagatttttggagcaccagaattttcccctgacagcatgtgctcgaactcccgtttttaggagagtaagagaggtagttaatccgtgtttaatcaattatgaaattcaaaaataaac

SEQ ID NO: 96363 - DNA, 477 bp, Heterodera glycines
gagaagagagcaaacagccccaactttgtccttccccttcatctgctgatcttatcttctccaatcgctttcccattcctttgccgaaagtaattttaacaaataaaaaagaccggcaacagaaagagacgcctttcgtccatttgttcgcctctcactgagtctctcttcgactttactccccaaatggtcgttgctgatttggccgtcttccaattggaccttttttggacaattatattgggctttcttatcgcatttgttttggcttttgcaattggagccaatgacacggcaaattcctttggcacgagtgtcggctcccgcgtgctcaccctccaacaagcgtatttactcgcctccattttcgaaacgatgggcgctgcccttttggggtatcaagtgacggacacaatgcgcaagggagtgattgaccttaacatttacgagggacgcgagaaggaactgatgttggga

SEQ ID NO: 96364 - DNA, 168 bp, Heterodera glycines
aagagagcgaacagccccaactttatccttccccttcatctgctgatcttatcttctccaatgctttcccattcctttgccgaagtaattttaacaaataaaaaagaccggcaacagaaagagacgcctttcgtccatttgttcgcctctcactgagtctgtctctct

SEQ ID NO: 96365 - DNA, 357 bp, Heterodera glycines
cacgacagtaccagtattacagtccccatgattcgggagagcattcacaattgagtgtgatgcttcgaaaaaggctattggagcagttctccttcaggaaaatggtcctgttgcttacatttcaagagcattaaatcggcacgaaacaaattacccttcaattgaaagggaggcgttggcattagtttatgcagttaaggaattctcgccatatatcgttgggtctggggttacaaaagtaataacggattgtagtgccttaacaggcatgatgaaagcgaaggagctaaaagggagacttgagaaatatcaagtaactctccaaagtttcgaattagaaattatttatcggcctgg

SEQ ID NO: 96366 - DNA, 612 bp, Heterodera glycines
ctacaactagtggatcccccgggctgcaggtttccggcacgagggcgctgaggaggcaatttccaaatacaacggcgaatggcaaattgggtcgcccactgatgaaattttggccaatgattatggactcattgtacggactaaggctcgacaccacgccatttctgcgcgacttcgaaagcctttcaaattcgatgggagtccattggtcgtccaatacgaagtgaaatatgaacagggtcaagaatgtggcggtggttatttgaaactgttgcgggacgacgcctcaaaggatttgaagcagttcaacgacaaaacaccctatgtgatcatgttcggaccagacaagtgcggtatgacaagcaaagttcacctgattctgaagcacaaaaacccgaagaacggaacaatcagtgaacaccatgctaaacagccgagcaaatcgctcagtaattactttgaggacaaaaagaaccatctgtacactcttgtgatccgacccgacaacgcgttcagcgtgtctgttgaccacacggagataatgagcggcaatttgctgacggatctcgaaccatcggttgtgccacctaagcaaatcccggacccggaaga

SEQ ID NO: 96367 - DNA, 222 bp, Heterodera glycines
gttttaaattttgaaaaacaaatatttatttctcagatattcatttagagaaaatttatttatttaataaagcgaaaatgaatgattggataaaatggcagaaggatggacggacgaaccgacaaaaaacgatggaattgaaatgattcattcatttgctggcgatcactaaaaaagagttggactgaaaagccaaaagcaccacaaatattatgtgaaagc

SEQ ID NO: 96368 - DNA, 345 bp, Heterodera glycines
cttcgtttcggcttcatttgtttccgtatgctttttgttttgtttttttgccatcactttttgcttaaaatatttttcaccatggcatttcccattgctttttccatttttggcattttttcagtgcttttcggtaataaaaatgatgggcccaaactgcgcgtgaagcgcagtagcagcgtcgccagcagcgcaagtgccgccggtgccatcgctggcggtgccaatgccaattcgaatgccaacaatgcgtttgcatcattttatgccgatgatgacaataccgttttgtgttgtgtgtgccctgcgccgatgacattaggcgatttgaagaaaagttcgtcg

SEQ ID NO: 96369 - DNA, 465 bp, Heterodera glycines
ggggatttaatgttgtttaaacgctaattgatttggaagattaatgtgatttatggcattttttaaaccaatttttcattcggttcgatgacatcactcaaaattttaaaaaaaatgaaaagaaattttttcttaaatattattctgtagcctctaagtgttctcaattaacgattgaaagattgtttattttgattgctaaagtcaaaagttatggtcaattattttttgattttgaagattaaatccgccgccgatgaattaatttatttgagggattaattaggtaattaaatgccaaattttggtcagccaaagaaaataggcacaattaaaatttttataaaaacattttaaaatagaattgatcagccatttttaaatatgtgcattattaacatgcaaataaaatttggtggattttagagcatattttttgaaaaaatatttataaattaattttgc

SEQ ID NO: 96370 - DNA, 354 bp, Heterodera glycines
  unsure (1)..(354): unsure at all n locations
gaagattttaatttttgcaatatgagtaccaatacgcacaatatatttgcatatatcatttgattatttttattattaatttttttaatagaaattttacttaatatttatataaatatattttttgttcttgaattaattaaaattagtcttttgccgcggtaacgaagaaatgataaaatgctctccaaaataaatttttaacaacacttcaaaaataaatgcattatggtatcttcatatatantttttatttcctatcaaaaaaagggtctgtatcagggatgggccaaattgaaaaataaaaagcgaaatgcgaaaagcgaaatttgcgaaactgaaaaatgcgaaatg

SEQ ID NO: 96371 - DNA, 547 bp, Heterodera glycines
atggccatcgttgaaaatatcggattttctacttctaacagctccgcagtcagttccttgtcttttctgcttagaacttattttgagcaattgtgtcgcgactcgcttaactcggccattaattctggtcgtgcagaagttggcttggattttgtttcttatgttttcggagccaatggaattaatataactgaacttcatgattatatccagcaagttcaaccatatgcggctgatgagcatcctttgtttcccgtcactgaaccattaaatgtgccgccgccttcctctgaaattgcggacacatccgagcgaaaaaatggcgagagagaatcagcagggaatgacggggctgaagttgacgaggaagggaatagggagcaaaacaacaaacactccttgaactcattcaactcgaggtccaatgttcgaaatgcaatttctcaaaagatttttccaaattttgtcggtgcgtttgccccgaatctcggcttttccgtccgaaaggtcgaacttccgacggagaatgtctctgtggaccaacatt

SEQ ID NO: 96372 - DNA, 745 bp, Heterodera glycines
gtcaatgaagagaaagaggaacaagagagggaggaggaggaagaagaggagggagcagcggaaaatggcgatgaaaatagaagaagcgaagcgaacgaattggactcggcctttcccgcaatgatttccaatcttttcggcactcatccgttgcgcaccgaaataaaaaagaaaaggccgtcgcagcgtcgggggaatgccgaggaagagacatttcactttattattgactgtcacggcaaattcgacgcgaaagacacgcgaaattttaattcatcgctggtggaggaggtcagcagacacccggcactgttcgacttcacaagggacgagtacaaatcgaccgaggcacgcaatagacattgggcagaagtggcggaagaaatgcagcaaagtgtggaatttgttcgtacgcgatggaaaacgttgagagaccgtttcaaaaaagaggtgcgaagacagcaccaatgtgtggagggtccgatttggcaacattatgacaaaatgctttatctgttgccgtttattagggacaaagacgattctaccgaagtcggaacaacagtatcaaatggaagtgtcggaattcgttcgaaaaacggcgcgaggagggcggaggggccgacggacaataccgacagggggacgacgctttggcatggcgagcgggaacagaagcgacggacgaacaacgggaatttgctgcacccgtcaccaattaattcgtgcaccgccgccattttgg

SEQ ID NO: 96373 - DNA, 550 bp, Heterodera glycines
aaaataattgctttgattattaacatgaaatatccggaaaatttaattgagtattggttatccaattttcacattaatatttaattgtccaactttgaattttttgcaatttaatccactgaactttttagcagttttaattttttttttttcatctcaaaataagcataatgaaatacctaacaccaaacatatttttgattgttttttaataatgcattcctctaaatttgatcaatcacaattttttgttttgcttttcgttatttaattttattataaacacttttatagggaaaccaacggaaattctctcacttccatattttatgcttaaatgcgatttggacccatttcgttccgaggccaattccatgtctcgaattcttagttcatgaaccgtgagcatgtctcttaaccgattttctgatcggtctaaattttggtcaaatctcggctatgccaattttgacattccaaaatttggcgatggcgatcaggccctaccttcttcaaataattatttggccacagatttgtacaatggcgc

SEQ ID NO: 96374 - DNA, 478 bp, Heterodera glycines
gtcacagagtctgcgcgttccattcaaattcctccccttttggcttttttcgccgcttaatccctccaaatcggtcgcttttccgtgaacacttttcgccagctgccgcttctttgcgcacaatgaaatcagattgaagaagctttgaacagataaaaagggctgtagcaaaaggatgaataaaatgggtccgacaagcgaaaacgacggaccgaagaagcaaaagaagggagggagacggagggacggaatgccaaagccaacgccaaagccaaaaggcatggcagcagcatcaacggcacttcgccaactgtcaccactgcacaaagtactgctcgtcgttgtcgcactgctccaatggacaacgacggggggaagggccgctctgcttcaaggttgcgactttagcgaagatttgtgcaccgatggcgaagtctgtttgccggacgggctgttcggccagtgctattcggacgat

SEQ ID NO: 96375 - DNA, 165 bp, Heterodera glycines
attaatttgaatcaccactcaccgcaaaactaatgaaattgtgaaatctacggcttatatttttattaaaaatgcgatcaccacttctccaattaaattctcagtgcctttcttttgagaaataattcgaaatattcccgaacttttacaagattctgcaaaaat

SEQ ID NO: 96376 - DNA, 461 bp, Heterodera glycines
aaatccgaaaaatcacgcgaccgttctgaatccagcctaaatccccaaaaaccccacatactccggcgtgctgcccttcatggacttgatgagttcgatgagtgggtttttgtccgtcgatttgttcaacagctcgcccccgtggtcgaacagcgttttcatgtacaatgggctgaccgccagcagcgcgaccattgacggcgtttcgcccgcattgttcagcgaattgatcaacgccctgcccgcctcctgttcaagcagtgtctccaacatttgggtggacacccgggcagcatagtgaagctgaaaatgggaaaaatatgggaaatttgtttgaaaaaagcaataaaatattgaggatgtgctgccattcccaccgatgttaccaaatttaaaaagtaaatcgcaaaaattcgattttacaaaaaaacgaaaaaattttctatataaaaatattaaat

SEQ ID NO: 96377 - DNA, 497 bp, Heterodera glycines
cttacaagccaattcgtgtttccgacatgcccattcaattatgcgaacatggccgtgtcatgcccggcccgtttattcggggtgaaataaaggcggtgaacacttcggctgcccgacgcctgatcagggtaattgtcgagtgattgggtattttacacaacgccttttaaggaatttaatgtgaacacgactttgtacacggggtaagtgcatatgagatgacgacataatattaaatttaaatgcccattttataaagagctaacatctgtgtcaactgctgctcaagacttcgtgatcaccaagaaactaggcgaaggggacggacagaggcgattttatactaccccgaaggcgctactttgtttatcaaattggtttctaattattctttttccctttacttttccttgatttttcagaatggggatgagaatgatgggaacacaacaaagggcaagaaaaccaccactggaccatccgcggcagtgacgcgt

SEQ ID NO: 96378 - DNA, 161 bp, Heterodera glycines
aatacaaacagaaattaaaaacagaaattaaaaattttccaagaaaattaaggttttttagggtccggtggtgccgataaaagccgccgaaaaagttttgatgatttagtgcaattaattacccaaaattgtacaaaaactgctatttttgaaaaaagatt

SEQ ID NO: 96379 - DNA, 474 bp, Heterodera glycines
attaagtggtacaaaatgagtattattgacattgacgctgaacaaaataaccattcttttgctgttgattctcagtccaacaattattttttggtcggccgcggcggtgacaaatcgattttactcaacgaaacgagcggcaattcgtatgctttcagtaatgtgcccacattgccgtccgtccattaccttttcaaaaacaacaaaatccactttaacggcatcttctcctatgaaatccacgagttcttccaatgttccattgacaacgctcgcacattgtactccattcgcgacttgaaagagttcgccaaagcctgcggcggtggcactgaattaataccattttttggctacgctttgcgcatcgttgtcgaggcgcccatcgaattggggacggacacaaaaacggaggaggacgatggccaacagcagaaacaatggggcgagtgcgcaacttttgggagtggaaag

SEQ ID NO: 96380 - DNA, 482 bp, Heterodera glycines
tggccaccgtttggagcaaattcgcttctcagctcagttcttggctgtcggaaatgccttcggaaaagcgaaggggtcgcgccgagacgaggccaaacggtggggacggagttgcgggggtgcgcaattcgcggtcacttagcgcactcagccgacggcacaatttggtcagaacgtcaaaaagctcggagaatttgcaccgaatcagcctattgtcgacagcgacgacaattggcaatggacaacagagacaaaagccatttttggcacaattcggactcaatgggccaaatgcccattccgaggaggggtcggtgccgtgccaaaacagccgaaagggatcggtcgaaggccaccaaagtccattaacaccggcaaggacgaagacgaggcgatttccattttttggcaaagaaaacgaaacgacggcagcgccggggggagagggcgaaagcggatattcaagcggaagttcgtcgaga

SEQ ID NO: 96381 - DNA, 668 bp, Heterodera glycines
aaattagtcaaaatacatgtcagattcgtgattagcgacctttaaaaccccggataacaacacaaaaaaattttgcaaaacaaaaggatcccccctttttaaaaaattttcaaaaacgaggcaaatggagcgtgaccgtattctcttccaacgccaacgctttcccaccgtcgcctcaattcaccatcagccggcgacttcgtccgcctccggcgttttggtgccaattccgacgacggacggcgccgccgctgtgcccggcagcgccggaggctatcagaggcgatattcgacacatcgagaacagcagctgcagcagaggaacagaagggacagcaaattcagcaggcgtttggccgtttacacttcaccgccagaagacagtgctgccggggccatttcacttcggccgctgaacactacaataatcagcagttcgcccagaacggggagcagcagtgacgccgaattggacacggacgaaattgccaatgcggcggcgacaacggagcgacgacggcgactgcagcagcgacaaaggcggcgactgtcggcggacgacggcgagtcgcaagtgatcgccgcgagtccatcacggcggcaattgcttacacaaccgctgacgaacccggacgcgggactaatcccccaaattgacaagccaatgt

SEQ ID NO: 96382 - DNA, 476 bp, Heterodera glycines
ccaagcgtatgaagtgagtggacagaggggcagaaccatttatcttgttttcacattccatcggtttttcaatcattaaaatttcacagatggaacagccggacatcgaattggagctgcacttgcacgggctgggcatctccctggtcaacaacttgaaaagcgttgaagtcctttacatggtcattgattcattcactagtacatatttaattcaatatcaaaatttaggccatgtctgcatttttacagaagaaaagtgacgaagagtcgctcaaaatggccaccggtttctggtgtcaatatcgtcagaccactcatcagcagacgcttcacgtgaaattgcacaatttccaaatggacaaccaattgccagcctccaccttcccctcattactcgccatggtaccacagccgaaatatatggttaaaaatggttgtttatttaaaagtttttggcataaatgttacaagtt

SEQ ID NO: 96383 - DNA, 585 bp, Heterodera glycines
ctcgacttgagcatcaacagcacggtcattctgcgtgacgaatggcttctgctcggtgcccaggagggactgttcgccactccgatgagtccgcaacagttgcgcgcccctttccgaattgcgggcgtcagctgcgtctattggatggagctgttgcccgagttcgacatgctcctcgccatttgtggttccgcccgccaattggccgtcatccatctccaacaaatccaccgcgcattctttgttgcacaacagccgacggtgtcctgcacaaacattgccaacatcgaacaatgccatattgcggttgttagcaactcggaacatcaccgcgacaaacggtccttcccctccccatcactcttcgttccctcttcccttatccattgtctgtttccatttcagtttcgtttacattgccacaatcgacgaaattgtcgtgctccaatacgtcgccaaattgggcttcttttctcccgtcgctcaaatcaaaacggaggagccgtgcacttgcatttgctccgcttcggttggtttcgttttcggggccgacaattttcattttgcgcgatttgatgacaattt

SEQ ID NO: 96384 - DNA, 519 bp, Heterodera glycines
tgcacttctcgctttgcatcggcccacccttcccgaacgtgacccttgacaaaaaacggagtatttttcggatgccaaacggatcatcgattacgtgttggtctacgaggagaaggaaatgacgaacagcaactacaacaacaattgcgatgacaacaaacaacgcgataattcacgatcatcccccaacggcacgcacaaaaacagttgtttctctgctccgtctgagtgcccatttcttagccggtcttcatgcattggaacggctctgacaactttccatggatgccaatgccatcggcggaggggcgaaagacaacgcaaagggcggagagacggcagacgccgagctgcctctgcgcagtgcttccctcgaaaaattggatctttcatccaatgccttgcgcagagtgccgaccaaattggtggcccattaattgcattccctcaaaattttgagtttggcggcgatttcaatcgaacggatggaaccgaaattaatggccaatttcagcgcat

SEQ ID NO: 96385 - DNA, 555 bp, Heterodera glycines
aagctggagctccccgcggtggcggccgcaatcgatatagtggatcccccgggctgcatttacttagcacgagggtttgaggttaacattaatgagcttaatttatcatggattttacgggaggaaatacgccaaatttgtttgaggtgcttctgcgaaatttttgttccgagtcgtcttcaattcaagaaaaggctgtttcctcaattccttcaattgagcaaagatttgctgaggttgaaacaaatgaatttaaagcagcgttcggtgaattgtcgggtgggacgcttcgtttggttgccgatgatcgtccatcaacttcttcagaggccaatgatcaacagtataagccgattgaaattgtaattggtgatgacgctgagattgttcaacagccctcttcaagttcttctctgatcagttcccatcccgagactgtccaagatgcgaaggtttacgcgaggatacgcgaacttagggaggcggggctgtggagcgcgacgcgactgccaaagtgcgaagacccgccgagacggaaattgcactgggattatt

SEQ ID NO: 96386 - DNA, 730 bp, Heterodera glycines
ggagctccccgcggtggcggccgctcttcaactagtggatcccccgggctgcaggaatccggcacgaggatgacacattcggacaatctttggctgatgatggcaaaagtccgacgatgaatagcgattttatttttgttggtgtgttaagtgcgcaggtaaattgatttaaaaaaacaattcctgttgagttaatccatcgattataccctttttttacgtttttttgataaagcatttgcttctccccgtccccacagcgttttctcgacacgcgtgcatttcaaatttggcgcagttgggcgcgccgagtgcctggccgcgtgctgttctttgtcgccgacggcactgtgctcagtgcgcgagtgcgtgcggcgcgcatgccagtggttgtgttgcgtggcgtcgatgacgcgtaccctccgcagaaaaaagcgtttgcaatgctccgctggatgttcgacaatcagctctccaacttccattggtttctgcgcgccgatgacgacctttacgtacgcaccgatcagttaaagcagtttttgatcggcatggaccctgacagagcacatttcatcggccaggccgggctcggcaattccctggagtatggccaactgtcgttgggtgcccaggacaattactgcatgggcggcccgggtgttttgttgtcacgtgaaacattacggcaacttggcccccacttggaaaactgtttacgccacttggt

SEQ ID NO: 96387 - DNA, 697 bp, Heterodera glycines
gtttagagccaaaaaattctttactctattaaataaactcacttattttgccatggaattaatcagaggcgtgaccgacagaatgtctgcaatgtgtttctaaagtcatgcaaaagcgtgcggctgtctgtgtgcttgttggtgatgaagacccgaatgtgaaagggaagattaacttcatccaggagaaggatgactctccggtgaccatccagggtgagatcactggcctttcgcccggaaaacacggtttccacgtccacgctttcggtgacctgtccagcgggtgtatgtctgctgggccccacttcaatccgacgaacaaaacccatggtggaccgtgaggatgagacacgccatgtgggcgatctcggcaacgtgttggccgggcaggacggagtggcaaaactcgatttcacggacaaagtgatttcactggtcggtccgcacaacatcatcggccgcgcgcttgtcgtgcacaagctcgaggacgacttgggccgtggtgaaggactcaagaagccggagagcatggagactggcaatgcgggtccccgtttggcgtgcggagtgatcggaattgctcagtgatgggggaatgacgaccataagcggaagagagatctgattattgacctatctcattttgtcgatacgacagttattcaatttgtaagacatgtttaaacattcaaat

SEQ ID NO: 96388 - DNA, 549 bp, Heterodera glycines
aaagctggagctccccgcggtggcggccgcttttcaactagtggatcccccgggctgcagtttccggaacgagggagcaatgatcatcaaagaatatcggctcgttttacctatgaccgtcgatgagtatcaaatcggtcaactgttttccgtggccgaagcatcgcgacaggagacgggcggcggagaaggtgttcaggtgttgcgcaacgaaccttttgaaggggagagtctgttcaatggccagttctcttccggacaatatacgcataaaatttaccatttcgattcaaaagtgccgtctcttctgagagcgattatgccaaagggttcgatgtcggtccatgaacacgcgtggaatgcgtatccgtactgtaaaaccgagctgaccaacccggacttcatgaaggacagctttttcattcggattgaaactattcatctgaacgaccgcggcaccactgaaaacgcgctctgtctgacgacggatatgctaagtaaacgcgaagtcgtgcgcattgacatcgcgaacgacaaagagtttataaa

SEQ ID NO: 96389 - DNA, 341 bp, Heterodera glycines
tgagtatcaaattggccaactgttttccgtggccgaggcatcgcgacaggagacgggcggcggagaaggtgttcaggtgttgcgcaacgaaccttttgaaggtgagagtctgttcaatggccagttctcttccggacaatatacgcataaaatttaccatttcgattcaaaagtgccgtttcttctgagggcgattatgccaaagggttcgatgtcggtccatgaacacgcgtggaatgcgtatccgtactgcaaaaccgagctgaccaacccggacttcatgaaggatagctttttcattcggattgaaactattcatctgaacgaccgcggcaccactg

SEQ ID NO: 96390 - DNA, 479 bp, Heterodera glycines
agatggacaaagatgtcaaaccggaggacccatcggtttctttcggttttttgtccgaggaagcgcgggaagcgatgctcaaaaattgcctcagcggtgcagtcgactgcaaagcgcagcccttcggaatgattcaaaagcggacgatggttttacagcacgaaatggacttcatgagaaaagtgcgaccgtaccaatcaggcgaaatggtacaaaagagagtggaaatggtgcagaaactgaagcaaaagatgctcgaagtggcaggccttgacgaacacgttcaacccgtaaacgacggcaccttccaacacgatgtgctgcttacagagaaacaatctgaagaactgatcaaagcattaaacaacgtgccgaaaccggcgaaaaagcttcaccggtacgggtacgggcaccgcttcaagcgtgcctcgctgtttttggagcagttcgcggcacaaaaatggccaattggacagcca

SEQ ID NO: 96391 - DNA, 474 bp, Heterodera glycines
gaaggctttgttgatgaacatcatcagcagcagcacattagcactagtgttcatgccaatatgcaggaagacggagctgaagttttgcaccacgaggacacttcgccaacccacaaaaaccacgagacagcgacgggcggagagaagggcggaggccaaggccaacaacacggggacggctcttttggggacataatggtctaccaggcgattcacaccattgaatttgcgctcggctgcatctcgcacacggcttcctatctccgtctttgggccctgtccttggcacatgcgcaattgtccgacgtcctttggtcaatggtgctccgcaatggattcgtccaaagcggttacctcggcgccgtcatcacttatctgatcttcattgtgttcggcacactcactctgtccatcctcgtgcttatggaaggactgtccgcctttttgcacgcgcttcgtctccattgggtcgag

SEQ ID NO: 96392 - DNA, 525 bp, Heterodera glycines
ctcatccgcttttcctcctcctcaacttttcttctctcactgctccaaattcacttccaaatttcctcttccaaaatgcgttgctcccttttgctgccccttctctttgttctcctcccacttttggcaaattcgtgcatctctcctccaaagaaagagtgttgctgccagccttgttgccagcagccccaatgtcgccaccagcgcagcagaataataacagtaacaatcagccccagcagcagcagcagcaggaatcagccgctgagaagcttgtcacttcattcatgcgatacattggtcaacgtcccggtcaagatgggcatgccttggtgcaagagtttgtccaacagtctgctattcctgtccaattccgttcattggttgctgaacagcttaatcatattgtggcagctgcgcgcgcgaatgtgtaaatttggagagagagagagacccacagagaaagagtgcctcgctgatctttttttgcgttattttattcattgattatcatttgaattaaat

SEQ ID NO: 96393 - DNA, 636 bp, Heterodera glycines
aaagaaaaaggccaattggacggagaaaagtgggacagagcgggcaccatcatggactttttggcatccctcttgactcagtccaaaagtgcgtttatttcctcacaaaatgccgagtcgtggggtttcgtctccgactacatttggaccgtccaacaggcccatttccccactcatttgctgccctccatcgtttcccccggcactttcattggccgcacttcgcttcccttcgcccatttgccaaaaggtgtcccagtgactgtgcccctgggcgaccttcaagcgtcgcttttgccctttctcagtgctggagtggcagctcttcacattggcaccgcttcgcaaatagcctttgttagccagcgattagcagaagaaatgtccccaaaagtggtgcttcccaattccatccgtcgcgaccctttctttgacgacgactttttgctggtcgccccttcacttaacggtggcaatgtttttacgggcctttttcaacaaattgcttcttggtccgccgatttgttcggctttccttccgatttctctcctttgtccttttctgctgccttttctctgctcgaccgaatatttaattcaccaaattcgcagccaaatgacggcgaagtgccgccg

SEQ ID NO: 96394 - DNA, 599 bp, Heterodera glycines
tttttgtgtgtaaataaacactaattacctaattaatattttattaattaataatgcaacaattttcaatttgatcatcgactggctgtacatatatccttctatgtcagatcatccacgtgaagagaaacgaatttttgagaaaatttttatctgcaatgacattttgttggattcattgcccttttgtgggcacgcaaaaatcggtttggaatttgcggttgtctcctatagatttgatgtagtggtggacactcatcttaaacgaagaaaatggaagcttggaagtttgagaattgaacgttccagcacgaatgacggagcggaaattgtcaaatgtaacagtgacaagacagttaaacggttgccaattccattaaagccgcttcctcccaatttgatcggtttcaagcggattgccgtttatcacatcaaccgaaaagtgatcgcttttctccaccgcattcaacgccttttcgcaacagatatcacgttggaattggccatattttttagacaacgccaaagttgggatgttgtgacctacgggatttggcccgcgctgaatgccgccgggattgttaaaatccgtttccata

SEQ ID NO: 96395 - DNA, 586 bp, Heterodera glycines
cagcttatcagaataactttcccataataacacatcgccaatttggacattcctcatcagcagcatcatttttgttgagaaggattgctgtgcttgttctgctactgcttccccataatgacggatccccaaggctgcccgggccgccaatcttcgaggccatttcccattatccaagcatttgttacttgcctccagaatccggcatgtgcccgccggcgacaaatcggacaacggacactgatcacatcaaagtggcggctgctacagtagacgattcgcgcgctaccgtaggcgaggggcttgcggagggtgacgacgacgcttcgcaactgcgacacgcgtcaacaccgttgctgacgcgctactattttgacgcggtcaccgctcaatgttatccgtttggtgcgcagacatgtggcggcaacgaaaatcgcttcgaaacgaaggagaaatgcttgacgaagtgtcgcattggcaccgattgatcttttcaaatttttatgtgattcaaattttgttccatcattgcctcgtttatttgacattttggcattcttcagactataaaaaccgggttggcaaa

SEQ ID NO: 96396 - DNA, 482 bp, Heterodera glycines
gtagtgacctcagcattggatgatctgcagaggaaagcgcgtcttttggaaaatgaaatcgatgctcaacttatttctctgaacaagttcaatccttcagacgctctttcgtcttactcttacaactcaaatcagacaaagggtcaaggcaaacgggcggtgttcgattcgttaacaactgacattgaaaataaactctcaaaattgagcgaaataaacgatgcgatgcgcgattgctttgagaatgatatggccgagttcagcaaaacttccgtccaacacattgtgcgacgacaccgcgacattctcagggattacagcacggaattcactcggacaacttcgaacatcggaaaccaactgcacagagaagaattaatggccatcgaatcggagtcatcggtgaataatcggtgcaaaccgacggactatttactaaaggaacacgaaagcataagcagctgtgatcggcttttgaatga

SEQ ID NO: 96397 - DNA, 461 bp, Heterodera glycines
ttttcaaagaaattggaaaatgcgaaacatccgatgattgtcgtcggagcacaagcatttcaaggcgaaaactcctcgtccctccttcaaaaacttcatcaattggccgaaaaactccgttcaacttcacagacgaaacaaaacaccaagggcaacggacagccgaaagtgctcaatttgcttcatgagttcgctggccacgtggctgcgtttgaccttggcttccgtcccttcaatgaattaaattcggaagtgaagagatccatcaaattgctttatctgctcggttctgatgaaaaaccaatttcgaggaaagaattccacccggatgttttcgtcatttaccaaggtcaccacggagacaatggcgcagaagtggctgaccttgttctgccggggggagcgtacactgaaaaagaagcgacttgggtgaacatggaaggccgtgcccagaggggtta

SEQ ID NO: 96398 - DNA, 482 bp, Heterodera glycines
ggaaaaataaaattaatttggcctacagttgctgaagagctacaaactagtgctgaacgtcgtcgccttcagcgcgaccgcgagcagcggacaaaagcgcgcatggcgggcataaatcgaaccagcacaactcccgacgagaacagcaaaccaatggagttgacggacaaaggcaaaacacccaaactgaagcaacagacactcagccgattctttgggacaatgacaaaaaacagtgctccaactcccgttccaccgatgggtcaacaacaattgcaaaattacaccaatcctaagcagaagcagccaaggaaacgcagcagtcccggctcattgtccacttcaagctcttcgtcaatcatcgcaatcagctcaacttctcctaccgctgttcctgattcagtttcaccacctttccgtcctctggagacaactgggcctactaacagcaaagccactaaattgcataatgctgaagaaat

SEQ ID NO: 96399 - DNA, 638 bp, Heterodera glycines
attaatattttaattcaactttgacttttcattcaagaatgtcaaacattgcctttataagaattcaaaaagaatgcaaagaaatcattttatgtaaagagttacaagaaaatggtgtaacaattgaacctgtaaatgagacgctttttgaaatcattggaaagatacgaggtccaccagatagcccatacgaaaacggaatatttattttggacgttaaaattccacaagaatatcctttccaacctcctaagactggtgctatatgtttggatattctcaaggaccaatgggcggcatctatgactctccgaacagtgcttctcagtgtgcaatcgttgttactttcaccggagccaaaagatccacaggatgcaattgttgcgaaacaatgcttaagtgaccctgcattattcagatccactgcaaaatattgggcacaacattatgcaaacgctccgggggaaatagacagaaataaggcaaaatgtgtgtccacattacaggagatgggagcaagtaaggacgccagtatatccgctttaagctgctataattggaaccttgcaaaagctaccgaatttctctttacataatttattgtttaataacatcattttgaataaatgacgccttac

SEQ ID NO: 96400 - DNA, 466 bp, Heterodera glycines
cgcagaaggacattttgaaaatggccgccgatcgcgccgctttcattgaccaaagccaatcccttaacattcacatagcgcagccgaactatgctaaactgagctccatgcacttttacgcctggtcattgggacttaaaaccgggatgtattacctgcgcactcgtccggctgtcgatgctgttcagttcactgtggacaaaatggcccttcggggaacaattgccaaggacgaatctgtcgaaatcgacgttttgaaagacaaggaaaacatttctgccaattcggagttgcgcttgccgtccaaacgcaaatacaatgaacaattggaggagagcgatgggtgtttgatgtgttccggttgatggattgtttttccatttatttgattgtatttttgggcattttttttatttggctttaaccattggttttcgttaacatatgataaattgatattttgctt

SEQ ID NO: 96401 - DNA, 475 bp, Heterodera glycines
aaaatggatcatgggccagcgatgaagcaaagtaccctcacttttacgaaccgattcgaaaaacagaaagtgtacggacgtgatggcactcttttctttgccccgtcagttggcactttttaaacgaacggaaacgattgtttgtgatggcactttcaaaatggcaccgcgaggcatttatcaaatttaccgagtatttggatttattgcacaaacgcattgtgttccattggcaacagctttgttacgtggaaaatcaagagtgctttatgatcaattttggacaagattgcggcaggaattggacaaaattcccggcattttaatgatttcccaagcgaattttgactacgaatctgcgtcagtgaatgcattttgcgatgtttttccaactgtcagaccaaaaatgtgcgcgtttcatgtgaagcaagcgataaatcgccgaattcaatcaatgggatttatgcaattgtac

SEQ ID NO: 96402 - DNA, 474 bp, Heterodera glycines
gcataacattgattttccttgatattcttccatcatttgggctgagacaatgatggaaatgacaattctcgggaatcggattagcattaccgcggacggcgccaaagtgtcgccatttggcagcaaaatggacatgggggactattatgttgaaaataacaagctgagaaaaacacggggattgggctgggtaatggccgcactttttgtggtcgccgacatggcaggcggaggcattgtggcattgccaacggcggtggtccgatgccagttcttttccggttatgctgggccaatgttgggaaatattattgcgccgtttcccggtttaccgtactcactgtcgaaaaccgtacgctgaaattggccttaaggccctcgggccaaaaattaggtgactgccatacagtttcaaaaatacagtatcaaattgtatctaaacattgtctgtatttgccaccatttccagaacta

SEQ ID NO: 96403 - DNA, 479 bp, Heterodera glycines
cggagggaaaagagaagcatcggcaaaaggacgacgaaaaatttgggcaaaaagaggcgaaaggatgaagcagtaacagcaccgccggtcactggcgttgtgctgccgtcctccaccaccgcagcggctgatgtgccaccgccgccgtgcccttcggaaaccgcaaatggccaaggcccgtcaacgacgacggcaaatgccaaatcaaccaccaccacagccagcaacagcaacgagcatcaggagaaggaggaggccactgcgatgttgctgaagatgcaacttggcacgccggtgccgatgagtcacaacgtttgcgctgacaagcccgactacgcggtggagaagcccgcgctggagaagtggtccattggtattcaagcgttccaacaccaaccgcccgcctcctccaccggcttcttcaaacggatgcacaaaattgtgaaaagtgtgcgcaaaaatggccccgcaggcgttga

SEQ ID NO: 96404 - DNA, 426 bp, Heterodera glycines
ctgacatctacggcttcatcaacaatatctcagatcgtatatcacgacgcgtacgtcgcaagcgcccaacggagtctggggtttctggtgtcagcggcgcaccgccggagactcggaaggacgacaaggcgaagggcggcggctgctccaaaaagtgtcgcttgcatcatcgtgtgcagtattctcacgctcattgtgctcgtcatcggtggactcgtcctgcccgctgtcctgactgccttgaaacattcaaaaatgctcctctgttgagcctcttcgtgggcaaaaagaatgggggcgtggatggtgaggagaaagaaaccgaatgataagcgactctggtgtcctattgtgtggctatattgttcaataatctgtatctgatcttattgtacgcacacttatgtgtgggataaagaaaccgac

SEQ ID NO: 96405 - DNA, 504 bp, Heterodera glycines
gtctttggcactctctcccctttcgttttttctcaaaaccgctgaatttgccaatgccaaatggccaattcttcactttcgcgtccctttggcctttgcctttgttcattgcttctcttcatttgcgcatttcctccaattagtacacaacgtgtcaacgtaacgctgttcaccgagtcccaatgccccttctgcacgcgactgcttcgagaacagatttggcaattccattcccgattccccggcattatgaatctgcaggtgattcccttcggcaaaggcaactgcgaattcacgcgcgaccggcggatcatttgcaaatgtatgcacgggcccaccgaatgcgacctgaaccgactgcagaactgtgccatatcgtatttcccacgacggcatattggcttggtgacgtgcattcaaggactgaagaatttggacgaagcctaccggcggtgtctgtcgcggctttcgccccgcacgcaattccgactaaagcaatgcgcg

SEQ ID NO: 96406 - DNA, 376 bp, Heterodera glycines
  unsure (1)..(376): unsure at all n locations
gcaagaaactcacattgttctcggcattgcctcgctgtgctctctgctggcgattatcgccaccgtagtcactctggcatcgctttactccggagatgaaccaactggacaaccaaagtgcgcgacggcgttgaaagctttccgggtaaacaccgacctggtttggaattgccctaatgggacgtccaaaaatcctgggaccccccggaaaagggccggggaaacccccattaatccctttttttgggggcaaagttaaatttccccggaatttgcatttgggccccccaaaaaggaaaaaatggccccttggccacctgtgggccccggggacaccttgggaaccccaaaaaangggggagggaagaattccccc

SEQ ID NO: 96407 - DNA, 670 bp, Heterodera glycines
gtccatttaagaacccactttccaataaatcacaatggctttcattggatacggcgctcttacggccgcgctgagtggcatcattttgtacgcaaatttgcccacccgtctgaccattggcgccattgtgccgaccgttgaatttttggccgagacccaactgaaaaagttggaacccggccaagctgtggctggaccacaaattaaggctagcgatctgttcaatgccggccatcctctgcttgtgatggctgtccgtcgacctggctgcgctttttgccgaaagcaggcgagcgcgttgtgcagcgcggcgagcacacattttgcggacaaaggcgtgcgtgtggttggcgtagtgcatgagcagcacggcgtggaccaattccgcccatttctgccctgcgcggacgcaatttatctggatgaggaaaaacgctttttcggcccttcacagcgttggcttccgctttggatgggctttttgcgtctgtccacctatgtgaactattacaaagcgtggaaggctggctttgccggcaacaccgagggagaaggccgactgttaaggggtgtttacctggtgaatggcgataacatgctttttgcacatttggaaaaacaatggggcgacgaggtcaaaatggacaaattggtggacgcagtttcaaag

SEQ ID NO: 96408 - DNA, 653 bp, Heterodera glycines
ctgatttggccgtcttccaattggaccttttttggacaattatattggctttcttatcgcatttgttttggcttttgcaattggagccaatggcacggcaaattccttcggcacgagtgtcggctcccgcgtgctcaccctccaacaagcgtatttactcgcctccattttcgaaacgatgggcgctgcccttttgggctcaattggcggaatttggacatgaatttggaagaattctgaggacaatgcacgacgccaatctcatccacggggacctgaccacggccaatgtgctcgtcctgactcaacggggaccagtcgaattggcactgattgactttgggttggcccaattctcatcaaagccgggggacaaagcggtggatttgtatgtgctggagagggcaattcggagtgcgcacattggcatgggcaaaatgatggatgccattttggacgcatacaaaacagaagggggcggaggggacgaggacggaacgaatgccaaaccggtgctgctcaaattggacgaagttcggcgcaggggcgcaagagagacatgatcgggtagtggagacggcgagaaaaagagggggcgatggacttttagaaaagaagacggcgagaggaagagagggacgaaattgaccatt

SEQ ID NO: 96409 - DNA, 504 bp, Heterodera glycines
atatttatataataattatctcgattactgaaacgatacactgataaatttccatacataatttagcttttagttcgtaaaatgctccgttatgtctgcctttttccaaggaggtcgtttcatttcagcacatttttgcccaaggattactacaaaatattgggcctatccaagacggccaaggagtcggatatcaaaaaagcatattacgagatggcaaaaaaataccaccctgacgtcaacaaagcgaagggcgccagtgaaaaattccaggaactctctgaagcgtatgaggttcttggggacccgaaacgacgcgctgaatatgaccgttttggggccggcggtccgcagcccggcgcggcctctggcagccccggaggcccacaaagtgcccgcgactttggctgggagttccactcgggcaaatcggcggagcaagtgttccgtgacattttccgcgacttcgacccgttcggcaatgccggcgcgtttggctccggc

SEQ ID NO: 96410 - DNA, 626 bp, Heterodera glycines
aagtccattcaattctcaatgcgcaggacggagtggaaggccggggcgactgtgcccatggaaagtgcggagaacacctttacgtgcccgtccctctgaacactctgatcaaaaaaccgagcacggacgaactgcggccaagcaaagtgacattacacgaactgtgccgtgagggcgatttgttcatcgcggcacgtggaggcgcggggggacacggaaacgcattttacgtgtcgaatttggtgagaaagccgttgaaagcggaggagggcggacaaggcgaagagatgagctacgacatcgaaatgcgcatcatggccaccgccggtttggttggcattccaaatgtgggcaagtcgtaagccttctcttccgccttaattggtcactgtccatctcttcattattacaattagcacacttttgcgtgcgatttcgagggcaaagcctaaagttgccgcttatccgttcacaactctcagcccaagcgttggaatggttcagtacggcgacttcttccaattggcagttgccgacattcccggattggtgcaaggcgcacatcgcaacgagggactcggcttcagtttcctccggcacattgtgcgctgcgaatgtgtgctctt

SEQ ID NO: 96411 - DNA, 550 bp, Heterodera glycines
aaagctggagctccccgcggtggcggtcgcttcagaactagtggatcccccgggctgcatgacttcagcacgaggttctcattcaaaagtgcatttcggcagaataaaaaaccttgaaaatgttggggatgatgaactgtcaaacggagaattacgagttctacgcatcgccgccctcctcgtcggctccccaatttcgtagccatcagcaaccggatgatgagctgttcaacaaccgcaaacagaagaagccacagattacttacacagattgtcgccgtttaattgacggcaaaatgggagaagcatcgcggcaagagccgacaaaactgtggaaccgcgtcattgtggacaatttgactgcgcgacggttgagacgcgagcaaagcaataggaaagaggaggaaaaagcgacggaagaaagagacgaacggcacaaagatgaggaggagggggaggaggaagaaaagcagagggaaggagaggaaaagcagggagaggaaatggaagaagcaatgggcacgagtcggaaacaaagtgagaaaagaga

SEQ ID NO: 96412 - DNA, 427 bp, Heterodera glycines
gacacaacggaaaggacggagcccccgggagggacgcgcagtccatcccagcacctcttgaagagccatgcatcatttgcccgcccgggcccgccggtccccaaggacccgccggaccgaaaggacccccgggaccgaagggaagcccaggagagccgcccaaagacggagtaccgggagagcagggaatgcagggtcagcccggtcctgtcggacgcccaggccgcgaggggccgcgtggagcccccggacagcccggacgactcattcccgtccctggaccgcaaggaccgcctgggccttctggacctcccggagaacaaggaccgaagggtcagcccgggcccgacggacaatctttcgaaggtcctcccggaccccctggagatgctggtcgacctggtcgagaagggcgtcccggaggaac

SEQ ID NO: 96413 - DNA, 476 bp, Heterodera glycines
agctctaattcgattcaaagttttgcaaaatcctaatttacccaatttacattaatttctcattttcttacgaatgaccgaagaatctgtaatcctcagtttttcctgtctaaatttgccacttgaatgttctgatggctgccgattggtaattacagcgcgatcggataatgacgcaaattttgttgagattggccaaacagaaacacggaatggcattaacccgaaattcgaggcacgggtttcgttgcttctgcggttggacaaatgccaacagttgcgcattgttttgtactccgtcgatgttcagtctggtcttctgcggacactgctcgccgacgcgcatgttttgctgctggcattgctttgtgccggttctaagccggtcgctgtgccgctggcacttcactaactacaaaaagccccacaccaacagtcgttggtgctggccgaagccgtgcagcaggaggaggcga

SEQ ID NO: 96414 - DNA, 842 bp, Heterodera glycines
ttcaacttttctcgtcctttgcccctttcgctatgctttccctcaatggcactttccctcctcagtctcttaaacccttggctttggcatttgttctcgatggcgggattggttcccaattggaggagcttggctatcccatcaataactcggtgatttggagtggggaagcaataatcgatgcgcccgaccttttggccaaatgtcataaaaagtttatcgatgccggggcggacataatcgagacgaacagttaccacgtcagcattcagaaactcatggaaagccggggcttttcgctgggacaggccgagtccatcctccacaaatccgtgctgattgcccgtgaggcaattgctgcttcgggtcgtccggtggccctcgtcggtgccgtcggtccttacgccacctatttgagggatgcctcggaatacaccggtgcttacgtgaaaaagcccgacttccaagagcagaccatcatcgactattatctcctccaatgccgtcctctgattgccgcaggagtgaccacgctgaacttcgagaccattccgtcggtgaaagaagtcgaatgtgtggccaaagtgatggaccaattggacgacactgtgcaggcgtgggtttgctgttcatgtcaggacgggaaaaggacgcgcagcggcgacgcatttgcggacgcagtgaaaatagcaaatggacacccaaagattgtagcgatcggtatcaattgcactgcgcccgatcatatcactgaattgctaacagaggcgaaaaaagcgaacaattcaaaggcattggtggtttacccctacagtgggcaagtgtacaacgcggaaacccgc

SEQ ID NO: 96415 - DNA, 609 bp, Heterodera glycines
ttcagcagctgaatgtaaattgcataaatacgacataacataatgacgggtgtttgtgagttatcggaaaaacattccaaagttcggttacatttgccgctggaattgcattgtgagctgctttctgcgcttccctttgaacatgccgctcgtctgcttttactttctaaagcaattgccaaaaattgcaattctctcgtgcaaaaacaaaaaaaagggtggaaggtcttttccaaaaattgtatcgacaaaattatgaaagtttatcacccgctcgtctctccaacactgaaaagcattgaagaggaacatcattcacttgagcattcggaagcgcaccagcaagacacatatcttaataagcgtattcaagattctcgtgccgaactttcctttttcgttggtgccaatttggtgcggcgtttggcaaaatatgaaacggcaggccaagtgatgaccgaactgttgaacagcgtcgttaacatgcaccaattcattgaaaactttaagaagcgaatgaaagaaatggacgagcgattcaacgaagtcaaaaggcttgccgaccgaataaagtccgatttcctaccgcgcgacattccgtcccaaatg

SEQ ID NO: 96416 - DNA, 415 bp, Heterodera glycines
  unsure (1)..(415): unsure at all n locations
gccattttatggactttgagtttggcggaggatccggcggaggcgactcgattgttcacaaaatttgtcccggcgtcgagcgaaaagtgttcgaaggctgatttcaatcgcaaagccatgcctactggtagaaagccccacacccaacagaaaggggccaaaattaaaggaaaacggcgctgtctttctgtctatcgctcatcccacttaataatttctcacaggtgcaacttcaccggcctcttcaacttctcaatgaactgcttcaaaaacccgagtgaatactcattacagagggatttgcagtgggtcagagtggactaacgaatgaagatgatgatgacgatgatgatcattgtgtctcaaagacattgtactaatgtaatttgtctatacaataaacgagaatattcnn

SEQ ID NO: 96417 - DNA, 927 bp, Heterodera glycines
ccgttctctccgtgctgctccaccacactcgccatcacttgtccaccgtcaccattctgttcattttcaacattctcttctcaaatgtcctttttttggcctcctttttgtgtttgtattcggacattgccttggacacaaaatacactcgcccaatcgcaaattccaacgaagaagctgaggaagactcagccgacgcatcggccgaagacgaagacacaacgacgccgcaacttttcatagccgaaatactgcaaatccatctgtacaagccgtccgaattcctcaagaatctgatccaggaaacgcttctttcgttggctcagaatggctcactgctcggactcaccaatttgcttgtgcttgttttggtggtcatcaatcgttcgatgagtggcaaaggcattcgcatttcacgtgccaaagtgattgctgtgttcgccggcgtttggctgttcctcgtcgtcagtcacgtgcttttctccgcacttcagtacttcgctgtctcgcagctgcacgaactgttggagttgaccagcagcaaccccagccaatttgcatgtcgacgaagtgccactttcatggtgtacaatgaaatcggagagcgctgcgatcggttggccgtttaccaagagttgggccactttctgctcagaggtcacactctgttcaccgttgtgctgctgtccatttctttggtcattttcgtaatcactgtgtattgccatcgccgcgtccaaaggcaacaccattttctgaatgaaaatgcgacaaatggcaaaaatgccggcggaaggagcgacggggggacggacagtgaggcgggcggaagcactgtgaggagaagacgtgactcgagcccattccgccggcgtgaaacgctcttccaaactctcgtcctttcgctcattgctttcttcctgtcgc

SEQ ID NO: 96418 - DNA, 345 bp, Heterodera glycines
ggaaaaattatgcgacgaattcattgaaaacggacgcaaattaacgcgggaatatttgagaaaaagtgccaaagaagaaagtgccgaaatgttcgaagtgttcgaatttgtgccgattgatcatcatggcaatttcgactattctctaatggccaatttgtctttgccccgaacttcgatcgattcgtccgccggcggggcattttcaccaaataataatccttcaatatcgaacatcgccatcaactttttggccgattaccgtccctttgcctacggtgtcccaattacgcgtgattcgccgtcggccaccgtgatttcacgatgcaaatcgccattctgtaa

SEQ ID NO: 96419 - DNA, 596 bp, Heterodera glycines
gtttgagcaaaatcacttctgatgtctttaaataattcaaatttgttggggaaacggaaggtggcgttgaacgagcgcagaaaaatttacatccaacgcgactacagccaagcattagttgtgaaattcagcacagactttcctgaagagctcgaacattacattgacagggatatttggctgaattttgtcactgatctcaaccaaatttacgcggaggcggagaaactgacggcgattgcttacctcgagaacattctcggcctggtgacatgccatctttccatgctgtgcttcaaatcattgtggaagcggaagttggaggaagcgcgggcacttttatacgaaaccaaccaacagaactttgtcaggaacggagtctacgtttgcaaccccttggagaaggggttcagagtgatcgaagtcgttctgctcgatgagccgattcctctgcctgctgttcaagacgaaaagaatgagaaaaattccgttcccaagccaattgtattgcagccgaggcaatgagggagggagcaaatccatttctatttaacaatttgccgattcatttcacaaataaatacttaattcactta

SEQ ID NO: 96420 - DNA, 623 bp, Heterodera glycines
tgctaaaggcggacggaaaatacgaattggacacaatggcgaaagggtcgctgaacgaaacgaaagacaccgaattcgaagcgcacaacgactgttttgactttgggctgaatccggcggcgcaagactctgttcatatcaatcggctggccatgaactattggcagaagcaaggcgcaattgacgtgtggatgaagttttttgaacgggcgcccaaccgagcggagatggaaaaatttttcttctcgcagttggacaatcctttgctgggcaaagccttcaaattggccatcatcggtgaatggttggccgccaacagtttggaccagggaagttacacgccgaccaactcggaattgttggagttttgggtgtcaaagagagcgcccgaccgattgttggcatgcgagcacggcgtggtcgactacgaaattgagggctccaaagtgaaaacgaatgttttgttcgaagcggcaacgaccgcaggaaatttgccgaacattttcaaggacaaaaagtgtgccacgtttgaaaagttgcaggaggaacggttcaaacaggaagtgcacgagttcaagcagcgcgggagcggcggaggcattatcggcagcattggcaacttt

SEQ ID NO: 96421 - DNA, 991 bp, Heterodera glycines
gccgtcgatctacggcataacggatgagacgtatcaactcatttttccccttattatgcgcaaagttatggaggttttccaaccgagtgccgttgttttgcagtgcggcgccgattctcttaacggagaccgactcggcccattcaatttgacgctgaagggacatggaaaatgcgtgaaatttttccgtgattgcaatttgccgttgatgttattaggcggcggcgggtacactcctcggaatgttgctcgatgttggacgtatgagacgtcgttggccgtggacattgacatatccgacgaacttccttacaacgattattttgaatattttgctccaaattatcgcctccatatcgacgcctctaatgaaaccaatcacaacacagaagagtatttaaggacggttcagaatagcgttttggagaatctcagcaatttgtctcatgttccaagcgttcaaatgcaaccaattcctcgcgatggcatgcaaatcgatgagtcagtggagcacgacagagcaaacccggacaggagacttccagccgaagtcagtgaccacatgacagcacatcctggagaattctacgaaggtgaaaatgaaggtgaagaccgcaggaacaggcaagaatacaagcggagaggagggaatacgacgggcgaaccgagcgattcgagggaggacaagcaggacaattcgaagcggatcaaaattgaaaaacaaccgaaggcagagcagcaagaagacggcgaactgcttgaggaagatgcaaacaccaactgacgatcagcaggaggaggaaaagcccttttaagcatcaattcgacttattttctcgtctgcgctttgaatttgtcgtccaccgtttcttattgtttcgacaatattattactcataccttttcacagcttatcaatagcgtacctccttcaaattccgaatcctcttacccgtttaaattgcttgggataaaaaaatccgattcaaaa

SEQ ID NO: 96422 - DNA, 638 bp, Heterodera glycines
tggacattgttctgtgcagcgcggcattgctttacgttgtgcccattttggagctgaacgacgcggacattcagcgatcgatggatgtaaatgcgatgggcaccattaatacaattcgcgtctttttgcccgaaatggaagcccggggcaaagggcacattgtcgcgatgggctcaatcgcctcacattttggcgaagtgttccaaatggcgtacagtccaacaaaatttgcggtgcgtggcgccatggaatgccttcgggtggagctgagggaacgcgggctggaggacattctctgcacgaccatttacccattttatgttcgcactccgatggtcacttcaaagggactccgtccggtggcacgttggttgccctttctgacggttgaagagtgtgccaaaagtgtcgtggacgcaattttgaaggagaaagtgaacgcgtgcattccgtggtggcttaactcttttgtggcgcttaatggcattttcggcatcaatatgaacaatgtatcgagggattttctcgacattcatttcgaaccttcgaattatgaggacgggcaaaaaagcttcggaagaattcgaaattcgggtgaaatcggacgaaaacggcgccaaaaaaggggacaatacaaa

SEQ ID NO: 96423 - DNA, 812 bp, Heterodera glycines
caataatccaggaaaaaaatatggatttccatataattacacgccctaaacatttcaatgatttttaaatatgtacatagatgctaatgcctcaacggcagctgcgtttggttagcaaaagtttgctgtttgtccatggggcgggtgccaaacaatttttgcaaggattgacaaccaaagacatggactccctcaacaatgttccgttggtttattcctttctgctcaatgttaggggacgcattttggcggattttttcatttatcgtggcaacaacggcggaaatgccgaggcttttgtccttgaaactgaaaagtcacaggccgaactgcttgaaaaaacactgaagctgtatcggctacgcaaacagatcggaattgagccactattggacaaaactgtgcttttccgtttcgatgctgaaggggaaacgacgcaaaaacaaaaggcaactatccctgaaaattcgtccaattggatggtcgacccgcgagtgcccggctttggcttcagagctattcgaaagattgaaaatgagacagcacatgatgacgaggcgtcttcctctgcgtatttgcgtcatcgattggcttggggattggccgaaggaacagaaatggtcgaccaaattccgctgaatatgaacggggacattaccgggggaatcagcttcgagaagggttgttacattggccaggagctcgttgcccgcacgcatttcactggcattgtcagaaggcggctgatgcccttccgaccaatcgatgacaaaaatggacgcccagatttccctagacggatttctgctggg

SEQ ID NO: 96424 - DNA, 120 bp, Heterodera glycines
cgcattggaaatgatcgaggaccttagaggagctttccaacaaatgcttgtggccaacgattggatggactcggacacgcgcgaatttgctatggaaaaggcacagcaaatgatcaattt

SEQ ID NO: 96425 - DNA, 476 bp, Heterodera glycines
ggcaaatactcactcaacaagcacagtttgaagaagcaagaaaacaatacttggaaggaacgcgtcggagtcctcatagtattgcaatttggcttctgctgattcgcttggaagattcgcgtggtcggcacattaaagcgcggtcccaattggacattgcgaagaccaaaaattccaaatgtgaccaattgtggctggaagggatccgtatggaattgcgcgccgggcaaaaggaacttgcacagtcaatgcttgcacgggctctccaggagtgcgaacattcaggtcgtttatgggctgaagccattttcatggaacagcgacacgcgagaaaaacgaaaatagtagatgctttgaagaaatgcgagcacgacccgaatgtactgctggctggttccaagcttgtctgggcagaaaggaagactaagaaggcgcggagttggttccaacgaaccgtgaaggtcgatcccgacttt

SEQ ID NO: 96426 - DNA, 552 bp, Heterodera glycines
acgaagttgtgctgaaggtgggccccgagcagttcactgtctccaagcactttctgatgtccgtgtcgcccgtcttccacaaaatgttctccgtcgacatgttggagaaggctcagggcgaagtgagcctggaggaaaccaacggggaggagttcggcgcgtttctggacgcaatctcgcccaaaatggcatcgccaaatcctgccaatgtgatgggaatgctcaaattggccgaccgtttccaagtcgatgcgttgcgcaaccgatgcgaggcgcatctgatcaattgcgtggagatcagtctgatcgaacggcttttgtgtgcggacaatgtaccgattggaaaagctaaagaatttcattctgaaaagtctgaacggcgtcggaatgcgcgagttttacgaggagaatcaggcggcactgaatttgctgagcaaagatttgctcatccaactgacagttcgcatctgttccagttcgaaaatcgatcggtcggcactgtgccataattgcacgaaaaatttgaatgaatgaaacgtaaaaccgaaggga

SEQ ID NO: 96427 - DNA, 392 bp, Heterodera glycines
gtccaaagaacgtagtggcaaaagggttctgtcaatccaaagtcacgtcgtttccggctttgtcggcaataaatgcgccgtttttcctttacagctgcacgggttcgaagtggacgccattaactcagttcaattctccaaccacacgcagtatcccaatgtgaagggccagcggctgaacgaacgcgacttggccgaattgttcgacggaattcggaacgccgatttgcctgccaaatattcgcacattcttaccggctattgcggcgacgcctctttcctccgtcaaattgcttcgatcgttcgcgagtgtcgtcagcacaacccaaaactgacttatgtttgtgacccggtgatgggcgacaatggcaaatattacaacggaattccgc

SEQ ID NO: 96428 - DNA, 621 bp, Heterodera glycines
catgattacgccagctctaataccactcctatagggaaagctggacgcctgccgtaccggtccggaattcccgggtcgacatcatcatcatcatcatggccgctattaccactcactataggggacaatttcgccttttcttcaaaaaagccttattgtactccggattactaatttatggaaaacgatcaacaacaatctccggaagaccaagtttcagcggaagcggcaatcaatttgttggccgttaccaccactcaccagcacatttttgggggcagaaatggtgcactttttgtggaaatacggcgaattgcggagcaacaactggaacacgcgttggcaccagtcgatgttgctggcggaaaatgggagctgtttgtgaaggacggcgaactgcgcatgtacagccgcgagttggaagtggagaatggcattgcggttgacccgttgaaagcgcttcatgtcattgatggtgtgtcggctcacgaattcatcgacctgttctttcgacctgaactcaaaaaggaatgggatgatactcttgaactgggtaaagttgtggagactctttcgccgcacactgccgtcatccatcaaatccatcgccgggtttggcct

SEQ ID NO: 96429 - DNA, 549 bp, Heterodera glycines
aaagctggagctccccgcggtggcggccgctctgcaacagtggatcccccgggctgcaggtatcggcacgagagaaaagaaaatttgcctgacaatggaactcgaaatatttaaagacgcctgtggacaaacagcacttaaattggttggccgccacccgatcaccgtcaccgcttctgctgttccggaccttccaacgttcgaaacaattcgtgttagttttttcgatggttttgtcgccgcgtttttcaccgaacgaaagaagcaattgtcccgcaatcgtattgaactggccattttctctcaaccgactgatgagtcgaagaatgccttcaaatctttgtggtctcttttcaattcgcaaattggcgcaatcacttctgtttgcaatgcttctgccgctgaccgtcgtaacgccaaaaacacgagcatctacgacctggacccgtatttcgacaccgttcccgactggcttgtggctccgaccttgcgtcgtgttgatggagtttttggcttagagaccatttacaagtggattcacaatgacga

SEQ ID NO: 96430 - DNA, 480 bp, Heterodera glycines
atcactccctcatagtccttccggctcgatcttcgtccgcctttcccactttgactgactctccgcccacagaccgtccgtcgtctgtccgtcgcttagccaatggactcccagcagtgtcccatgaaagagacggatgagcaccgtcagatgcgccgtatcgctttcgttgcggtcgttgtttcgacggttgctgtgattgcttccgtcgttactttgccaatgctttacaattacgtccagtccttccaaagtcatctgatggttgagacggattactgcaaagcccgtgctcgtgacatgtggctggagatgaccgccctccaaattggcaagggacatgtgaaccgcatcaaaaggggctggttgttcggccaatgggtgcccgagagcggcgccgatgcttacgctgcgggaggtgggccatccggcggtgctccgtcgggaggtgctccgtcttctgcttcggcacccgtcggg

SEQ ID NO: 96431 - DNA, 476 bp, Heterodera glycines
caaaaatgctttcttcttccgcctgctgtactctgttggccgccctcatttcggcggcgtttttcgccatggcaaacgcacaaacggtgaagcagtgcctgtgctccgaaattcagccctgttccgaaaagtacatgaacacatggaagacatgtatgcagcagtgtaagggccatttttccagcgtgggcggcgacgtggaaaaattgggccactgtttggacagcaaccaggcactgctccagtcgaccatcagatgcacccaatcgcatggggacgagtcgtaagtttgacgagtcgggcaaattaatgcaatgccatgggggctactgtagtcaaaattacggtcggcaattccattctaattagattattttatgccaatgacccgatttaattggaactctttgattaaccaattaacggggttggggaaatcattaaatgccattgggactactgtgatcaaaaatacg

SEQ ID NO: 96432 - DNA, 677 bp, Heterodera glycines
caagtgaccagagggcaagtgtgcaatggaggagcccaaagtcagcagaaccaatttcgaattacggaaaaacctccagcgcatcaggcgccccaatgcgcgtcccagggatgcttcaacgaaaacatttgctgccagctgtggggtttggctggcgaatgtcgccgtaatccgacatggatgaactgtttctgcaaagtcagctgtggaaaatgcataccacaagactatgtgttcggatcatgcactgactaccatccgcgatgttgggaatgggccgaggaaggcgaatgccgcaacaatgcatggatgtcggagaattgtaaacaaagctgtggcacatgtgtcagccaatatgaactcaaacagatgtgccgtcggggaggccgtggtaagcgtcagattagcatgctgttggaaggagctgctggttctccgcccggaggacattcagaagaccagaaagattcacttggaccgcccaaaactgctgcttcgggagcgaaagaatttatttcaggacaaaaataaatgccgtaaagtaacggaatgccaacataaaaaccacttaaatttgaattctgtttcccttctgacccaataccaaaatcaaataaatcaatcatcaaatgtttctatgtgttaaatatcgtttatgaataaataatttccgcata

SEQ ID NO: 96433 - DNA, 538 bp, Heterodera glycines
gaaaagactcaggaagctctttcaaagggtgactttcgcaccgcaattcaactgcagccaatgctcaaattcaacgggggcggccacatcaatcacagcatcttttggacagtgttggcaaaagatggcggcgagcccagcggcgatcttttgaagaccattgaacgcgacttcggttcggtgcagaaaatgcaagagaaagttagcacgaaagctgtcggagtgcaaggctccggttggagttgtcttggctacaacaaagagctgaagcgattgcaggtggccgcctgcatgaaccaagatccgctggaggagaccactggtctcattccactgttcggaatcgatgtgtgggagcatgcttattatttgcagtataagaatgtccgaccagactacataaaggcggtgtggacggtggtgaattggaagaacgtggaagagcgctttatgaacgcactgaacgaatagaacattttcagtcgattgtttccaaaataaacagcagattttgttgctagtaaagatgaatgacttt

SEQ ID NO: 96434 - DNA, 542 bp, Heterodera glycines
agctccccgcggtggcggccgctcttcactagtggatcccccgggctgcggttttccgcacgaggcagacccgcaatacgagtgcatcgaattggagaacatttctgaacgtatgcagcaactctcggaccgccgaattcagtttttgctctacatcgacaaaaaattcgtcaaatcacacgcaattttgaaactcaacgagaagaagtatggtctgctgactcaacatgtcacattcgaagtggccagcaaagctcgtgctatgactctgtcgaatgtgctgaataaaatgaacatgaagcttttcggcttcaattacatgcctatgttcccgcaagcgtctaagagcaaattcaacatggatggaggtgatgtgcttgtgattggcgttgataccagtcgtcctccaaaggcaacgccgttcgaaaagttcatgcttcgcaagaaaggggttgagggactcatttctgaggatccgctgattgttggcatttgcgcaaactacctgaaaaacccttacaaattctgcggagattattact

SEQ ID NO: 96435 - DNA, 712 bp, Heterodera glycines
gactagtggatccccgggctgcaggaattcggcacgaggcaagtcttttagggatggcgcaatcagctgaaaaaatagtttttgtgcttggggctgacggcgatgatgaaaatggcgacggaagtgagattaagccagtaaagaccttactccaagcccttcgactttcgcatggaacttcggaagtcgattttttgcgcgtttctgtgtcatcaaaagaaggacaaaagcaatgggaaaagccatctaaatcggcgatgaaaaaggcaatttcgcgtttggaagaagaacgacgtaaacgggaaaaagcaacaaattccgcggcagcgaaattaacggaagaggcaaagtcagtcgcagaacagcaacaagaaatggcacgagaaaaacgtttggaagaagcaaagaaaatgcaagttaaattggacgaatccttgcccgaagcgaagcgaaccaaaattcgcgaatgtccggcactgtgtggccagcgggtgaaagtgttcgcattcgtccatcggatgagacagcaaaggaaaaacttgatgttcctcgtccttcgcgatggctccggcttcctccagtgcgttctcaacggcactctctgtcaaaccttcgaagcgttgacactgactactgaaagttctgtttgcgtgtttggccaaatcaacaaattgcccattggaaaagttgcgcccggcggcatcgaattgac

SEQ ID NO: 96436 - DNA, 476 bp, Heterodera glycines
caacgattggaccaacaaattcccccctcccccaaaattatctgtccaaatcaaatcacttcctcgtcaatgtacaaatgcttctgcttgtgcttctcctaattttgcttttcccttccgaatctcttcaggctgccagttttatcactttgcattgtcaaggcaatggcttatacgtttcgggacgatggaatgaaaacggacagacggcggatttgccacttccatccgaactcacaatgcaacgattagctcgtctaattaagtgcttatttatctgttacattttctttgaaggttcgtgtcgagaaaaaacaaagatggcaccgtttctttcatcagcaattccaatcgaatgtttttgacagttttgccaaatgcatttggacgcattgttttggctcagcataatcaaccgactgatgggtccaccaaattcaaattaattccctacacggacggcacttacgcaatta

SEQ ID NO: 96437 - DNA, 632 bp, Heterodera glycines
cggagatgagccaaatgaacagcaaagtgcgcgacggagttgaggccttccgcgtcaacaccgactcggcctggactgacttgatggacgtgcaagtggtcgtgacgccgccgtcgaagccccgtgataaccccttcaactccatcttccgtgccaaacgtcaactgcccggacactgccagtgcgctggcctccaacagccaagctgtccccctggtccgcccggcccgtccggaccgcctggactttttggacagcctggaggcgcaggacagcccggacagcctggacagcctggccaacccgctcctccttgcccgccccagaacatcccctgcccacgctgccctgctggcccgcccggccgccccggaggacagggaccgcccggacagcaaggagcccctggacaacctggtacgcccgctcaaggtggaggacctggaacgcctggcgcgcccggaccccaaggacagcctggacagcccggacgccccggagccgctggccaacccggacagcctggagcgaacggagttgtctcacgcccaattcctggcccgaagggaccgcctggagcgcctggccaaaacggaaaccccggaagccaaggtcagccaggacagccagga

SEQ ID NO: 96438 - DNA, 322 bp, Heterodera glycines
  unsure (1)..(322): unsure at all n locations
ccatttgcttttgggggacactgacgactgtttcctacggcatttgtgccgcacttttcctctggcaattcttcactcggtttcgccacaatgtgcttttgtccgaacatacttccgctggtttctcatcggagggatgcgtccggttgggcttttccttttggcttttgataagcgcagttttggcacaattcgcctcttgcgttttgctattttgggcattaaaggggagatttaagcaaacgaatgaagaacaaaaatcgaaagagcaagacaccgttttcctttattaacgaaaaatataaaacagaaaaccgagtan

SEQ ID NO: 96439 - DNA, 476 bp, Heterodera glycines
aagcggccgctgaacgccactttctccgattggcttcagttattcctctccaaacggcgccctcggcacaaatgctattttaactttgcggcagcaacgggcgccaatcggagtcggacgatgcaccaaatgcaccaaagttgctacgcgggggtcgccgggcccaacggaggaccgctccgaccgtccgtctctctctccgttgtccacgagagcagtgcgctcggctcggacggcgaaagcatcgaagtgtcgccgtgtacgagcgatcagtcggcgggtggcggagacggaaatttgggggaggggcgacagacgacgaagacggaatacattccgaaggtcaaacttcgccaaaagccgaaccgacgctggagcgaacaagacatccaaaagcgactgtcacttcctccggacattcgtctgccccaaaatgtgatcgacaaattgaatagaacgccaactctggacaatcc

SEQ ID NO: 96440 - DNA, 632 bp, Heterodera glycines
caagtttgagtttcccaaatgcttttctccccgtccactgttctgctattgcttctgatcgtcctccctttctctctttctttcattttaatccctcaaaatgtccgccaaatttcccccgccctttcgtcgcgtcccttccgccgatttggccatttttctgtcattgccaaacgaaacccaattgttctcatccccggcgacgggggaagtcggctaaaggcgaatttgacgggcaaaccgtcggtggtccattacttttgccagcgacagaccaacgatttcttcgcgctttggctcgatttgcaacaatttggcccttttgtcatcgattgttgggccgacaatatgcgcctcaacttcaacagaacgagcggaagggcgcaggatttggagggagtgaaagtgcgggtgccccggctttggacacacgcgaaccgtggaatggattgactcctccaaacgggtcgccgagccggttacttcgcgcccatcgtcgcctccctcgccaaattgggctaccaacgcggcatcgatgtcatcggtgcaccgtacgactggcgaagagcgcccgaggaactccttcattattttgttaaattgcgttcactgattgagcaactttaccacgc

SEQ ID NO: 96441 - DNA, 762 bp, Heterodera glycines
atcaatgatcgcccttaccattgtcgctattgccccaaacgatttacgcaaaagagccatttggaccagcacgagcgaattcacaccggccttaagccgttcacgtgccaatattgtgggcgtcaatttcggcaacggtctcagcaattggggcacgaggcaacgcatatgaacagggaaaggcattccatgggcagcatggcgatgagtgccgccgttttgggcggcttagtgggcgcggccggcggatacggcgacgcggcgctgtgcggcacggcgagggagcggacgacgcatttggcactgaaacaaccgcagcagcaacagcaggagatggcacaagcggccgctgcacaactaacggcggacgaacagcggcggcagcaacaacagcaacagtcctcttcgcccacccgaccgttgggtttggggaggccaaccgtcgccggaggggtcggcggcaacggcacgcgccattttcaacgatcgcaacagcagcaaatgcatcagcagcagacgaacatggaccagtgttgtgccggggataacacttcgccaatggcacacgcgcagcagcaacaccaaatgaactccttcaacggattgctgagggcagttcagtccaacgatagtgccgcggtggacggactgctcggcctccgcggttccatggcaatgaaacaacagcagcagcagcacggccattccgggatggagctgaacgaacagctccaacttgtcagtgcacagctgatgaaccga

SEQ ID NO: 96442 - DNA, 444 bp, Heterodera glycines
ctccccacaaattacccaattctcattgacaaacctacgaaaaaatgcattctttcaagctttttgcatcgctctttcttgtactttgtgtggtttcacttgtcatctgccaggacaagccagcagcagcatgcaaaccgcccaaaagtgtgggaagaggcaacttggcactcacgcgatggtggtgggacggccgtagttgtaagcaattcatctacaaagggcagggcggcaacacaaacaatttcccatcaaagaagctttgtgaggacgtatgcaagccctaaatgaatgaatgatgaatgtgatgagtcggacggagaaagaatgtgctgcaacccaagaagagaattcaaagaaaaaaggagatggaaatgatttaaatttgtcaaaaaataaataaattcatagcggtagaaaatttttgataaataaatcattttt

SEQ ID NO: 96443 - DNA, 397 bp, Heterodera glycines
ttttgatgtaaaatttgtctccattagcattgctttcattcattttagtttctacaaaaatcaaagcacaaatcaagggcactgtgagagatggcaaagtctaagaaccacaccagtcataatcaaaacagaaaggaccaccgaaacggcattcacaagcctaaaaaggagcgttacatgtcgatgaagggagtggacccgaaattcttgcgcaatttgcgttttgccaagaaacacaacaagcggaatgtgaaagcgtcgaccgaatctgccaagtaaacggacgaagaaatggcgctggagggattcgataggctgatttgagaccaattgtcagacttttgttattattttctttcttatttttgttgagtaaaaagggcacgggaattccgtc

SEQ ID NO: 96444 - DNA, 480 bp, Heterodera glycines
cccattcatccgttgacaaagggataatgctaagcggcgtaaaaatgcgaaaattgccgacaaaccgagaaaagggtggcaatttcgtgctgagggcggaagtgttggaggcggcgataaaagaggacaaagccaacggactgacccctttcattttggtggtcaccgtcggcacgactaacacttgcgcggtggaatcgtgccgcgagttggggccgatatgcaacagagagggcatttggatgcacgtcgacgccgcttatgcaggcagttttttcatttgcgacgaattccgccatttgtcggacggtgttgaattggcagattcgttcaatttcaacgctcacaaagcattgatgatcaattttgattgttctccgatgtggtttaaaaacggagacgaagcaatcgcatttttcaacgtcgatccggtttaccttaagcacgaacatcaaagggatgcgtacgattttcggcatc

SEQ ID NO: 96445 - DNA, 480 bp, Heterodera glycines
ccaagtttgagtttagtcgtcgtctttggattggtgggacgccgctactgccgcccacggttggcggagtggggcgagagcagtagacaatcagggcttagccaccatcagcagcagaggggagtagcgaacgatctgcgcgcgcaagaagtttatgcgcagtagaatgacaatcgaaacacatcgaaaacggatcaggacagcggaaattccgctgctttttggtggccaaggaatgagacgccgtcggcaatagcagaaccaagcaaagaaaggtctgcaattgaaacaaaaagcgtgcagaaactgcacagagtgtgccacgacaaaaagcagcgaaagagtggacagactttccaagagtctgctggccaaagtgccgttgtgcgatctgatctgagcgctgcgtgctgtcagccgtgttaggcggatggacaacagaacagatgtggaagccactgatttctgactttttgatta

SEQ ID NO: 96446 - DNA, 554 bp, Heterodera glycines
ggaatttgccaagtgaagattattttcacagccgcaaatattatttttaagcatccattagcattagcaaatagagaagcttgttttcattaacataaaagaagatgtcaagcatcagcccggccaatcccaaaaaattctccataccctcagagaccaattgtgtggtctgtgtagacattgccacgggaaatcattattcagtcgcatcatgcaacggttgcaaaacatttttccgtcgtgccattgttaacaatcggtcgttcatttgcatggggaatggcaattgtccaattgacaaaggggttcgctgtgcgtgccgtgcctgtcgtttggagaaatgtttgcaggtcggaatggacccgaatgcgatacaatccgagagagaccgaatcggttacacgaagagaacacggcgagaaaaacttgtgggatttgacgaaggcattggccacgagaggggcgatctttgcgcggagtcttttgcttcgaacgatgccgatttggaggagtccgatgaagatgacgtcatttttcgcgataccgaaccaatc

SEQ ID NO: 96447 - DNA, 435 bp, Heterodera glycines
gttctgtaatgtctattcttcagaaactttctcctgtaaacatcgactctaaaggcgtttttaagtacattctcataaaggcttctgatggcgcaattgaaagatttttggttcgtggttatggtcgttgtaaatttcacgcggatattttggaggaagtgcaggcaagcgaaggagagaaggccattgaattttcttgtgttggcggaggccggataaaacatgagccggaagccaaacgtatcttcgtctacggatattcccaggggtttggccgtgctgaccatgcgaaatctgtcgaaatcctgagggaacgttatccaaactacacaatcgaatggtccaacgaaggatattagggcagtaaatctagtatacaatattgtaacgttttttgttttctatatttaaaaataaaattgggttctcggaaaa

SEQ ID NO: 96448 - DNA, 482 bp, Heterodera glycines
gtccaatcaatagcttaaaacgaaaaaatgtcttcaaatttgatgggttcgccaagctgctttttccatccaacagctgagcaggcagcggcagcagaagaagtggacaaatatgaagtgttcagttggcacggagatttgagcgaccaattggcagcacaatttttggtcactgatcagcagctgttgaaggaatgccgagaaaaacttgccaactccgaattgagagagacgaaattgctgagcaaaaacggggaattgaatgcagagaataaggctcttaaagcagagttggagaagcaaaagatgatgacggaacacagtcaaattaaggccaaagtggagaaaatggagcaggaaaatcagcagcaattggacaaaaaatacgtttcattcgatgtgttcaatgcattggtggagcgaatcaaacgtttggagaaccagcagctgaagcagaacaaagaggagggcaaaaaggtgac

SEQ ID NO: 96449 - DNA, 150 bp, Heterodera glycines
gtgcctatgctttcgagtttttcgaatttttagaaatcaattaaaattggtgcacttctgagcacacacccttcggagaatatcagtgaacaaaattttaagaaattcagaaatcgtaagtaattcaccagaatcaaaattttgaggctt

SEQ ID NO: 96450 - DNA, 485 bp, Heterodera glycines
ccgcctttcccccctcctctttttgtccgttctcacattctccgtccgttcacttcgaattctgcaaattgtgcccggtttcaccaattcccatgtgctgttcaattatcggttggcccaaacgctggcggacatgggacattcggtgactctgtggacgcaaatggaaatggcaatggtttttgctggcgacttgaaattgcccgagggggtcattgagcatcgtgtgcccatccatttccgtgaccgtctgaaggtggaggggctcaaagtgttccaggaaatgatctttgcccgtggcactccgtacgagctgtggtggaccggccgcgagtttcaggaaatgcgtctggaagcgtgtgaacaaatgctgaacgaagcggacgcattgcgccaaaaatgggccaaattcgacttggccattggccacttccacgacttatgccctgtgatgttggctgagcgagtcggcgtgaaaagggtgg

SEQ ID NO: 96451 - DNA, 833 bp, Heterodera glycines
aaaatatgcaatttacgccaaaatagatcgattttaatgcgtattttgaaaaaaaaattcaactttttgttcgaattcgggtccgggggtcggaattgagcaaaaccgagtccggattcgtaataggaaccctcgaaaacccccggaaactgattttaagcctaaaataaaaaagttaaattaggtacccccattcgttacgattgcccaataagcatttccaatggcattattttcgacatttgttacgacaggattgctgataagtcagataaaaggcatgaatgaataaattttttcccctcatcacctaaacgttccattggaaaggttcgtttgtgctcgaattccctcaacaaaaatgcttcgtcgtacatttttcggttcagcgcaaacagcgctggagcttctgcgcttcattttttaaagaaaatgacaaaaaaaagttacttttctaaattaaaatcacttttgaacagggaggaaacagaggacaggctcgacttttgctctaacaaataagggtcaaacccagtgttcgacaaaattggttaaaacttcaaaaaagtcattttgcgcgctaattcaaaaatatagatcagttacctttttggtagtgtttgtatcagggatgggccaaattgaaaaataaaaagcgaaaagcgaaatttgcgaaactgaaaaatgcgaaatgaaaaaaaagcgaaatgcgaaaagccaaaatatgcgaaaatgcgaaaagcgaaatttttttaaaaaattttaccaatacatgtaaataatttttttccatattcatacaaacgctttttttttgaacaaaagttacgatt

SEQ ID NO: 96452 - DNA, 473 bp, Heterodera glycines
gtaagtacatgtaatactgctcggtacagacaaagcgctgccctaaaagaaaaatggcaaaaattggacgaaaaaaaagaaaagaaaaaataaataaaattaccatcaatgatcaaagaagcacagcgaaaatggttgctgaagcaatacgcactggtgaagaagggcgcaattggtgagtagtcgaacataaacatcaccggcacgggtttaaacgcgaacttagggcatagtttgacgacaaaaccaacgaaatttgcatggttttaccgggccatcgctgtccaatgaactgtttgcgtcgtttgaagttgaaggtgacccccaaaaggccgaagatgaattttgagaccgacgatagaacattctttttgcaggaggcgacgcaaaaatggaattttgacgatttgcatgtaatggtaatgacgagtcattttcttcgaaatcattctgttcatttttcacaaatgatg

SEQ ID NO: 96453 - DNA, 910 bp, Heterodera glycines
atcatacctaacaagtaagagttgaaactttaaaagcttttttattgcacaaaaatcatggttgcttcttcattctctaataatggcaaaaatattttggaatcgccgttcaaactaacaggagaatgcaaattgctctattattgtacaaacgaattgggtcattttttgaaccaaacatcaaatgctttaatcggcaatcctctgagaatagttccgtttgatgggcttagctctccacaaaagcaagtctgtacaaatacatcaaattctttggaatttaattgtactgagcgatacatttcattgactaatggcactgctctttggatttacgatttacagaaagggagcacactacgagaactgcatgaccatgatgggaacatcagtggggtcgcctggcacagacaaagtccttggctcttggcaagtgtgggcgacgattgcacgttgcgcttgtgggatttacgttcgcatcctgctcaaattgcgattcgccgtgcgactaagccatacaggcgattggaattttcgcccgattgcaattacatcgcttgtgctggtgaacttgtttccatttatgatttatgcatggcccaaaatgttgtccatatgctttcgtgttcatcggtttttgatattaatcgtcttaatttgttttatattttcagtcgtcagctgtgcgtttcaacccttcagagtgccttttggctactgcggatgatgatcggacagttcgattttgggacgttgacacaggagaatgtgtcacacaaacgcccattttcaatgccaaaattggtcaaattcattttgaaccaaatggaaaatatttaattgcggtcacagagaaacaaatggcttcgattcgttgggaaccctttgaattggtttcgcagttcgacct

SEQ ID NO: 96454 - DNA, 476 bp, Heterodera glycines
aatcggttcaaggaggccagtcaacgggggagcaacgacgaggtggaaagatttttctcggacttgcgcaagacgccccacatgttcaacgcgtttttgaagctgaccaaaaaaggcgtctgtatatcaggcgatccgtttcctcatcaacatcaaccgcaaggaggtgctgcaacacaaccgcagcaacagcactttgtgcagccgcagtcgtccttctaccagccgacccaaccgcagcagaacggtggcaacattccatcgtcacagtttggcgggcccttccaacagcaaatgccgtcccacggcgccggaacggcgcaatggatgcaacccccgaaccaatcgcagcaacagtccgccgcctcccaacggaattcgtcctgacaaatgagcaataactgtttgatggatgaagcaaataaatgttttggcggatgtccaacgacgaaatgatctgattgtgagcagctgat

SEQ ID NO: 96455 - DNA, 486 bp, Heterodera glycines
caccgccggagcccaaccgcagcaagtggtacaacaacaccacaccaaacagcagcagcagcggttgtttcaacagcaacagcaaatcagaggcaaacaaaaataaaataaggaggagaagtccacgccaattggctcgactgggcaaaatcggcctgttttccattttttaccaaatgtccatgtaatttgagtttgatccgtaagtttagtgctgggccatcaagtgatgaacaataacgatatgcagctgctcatgaatcggttcaaggaggccagtcaacgggggagcaacgacgaggtggaaagatttttctcggacttgcgcaagacgccccacatgttcaacgcgtttttgaagctgaccaaaaaacagggcgtctgtatatccggcgatccgtttcctcatcaacatcaaccgcaaggaggtgctgcaacacaaccgcagcaacagcactttgtgcagccgcagtcgtccttctacca

SEQ ID NO: 96456 - DNA, 1005 bp, Heterodera glycines
gaccccttatcaaaaattttttgagtcatttctctgctaatgtttgttgcacttccaaactgttcttctcctcggaatcctttggccacttatccagattgcattgcttccttagacataaaccccgacagtcaaacttatggaaagctcatttctgtgcttgaaatgcccaatgagggtgacgaactgaacaatttgtgttgctgttcttccgatcgtttgattgtcacctcaattggcagtggtcggatttatgttgtggacacatccgacccaaaggaattgaaattggaaaagacaattgagccttcgacgctcacttcgcttggtgtcagttgtccgggcagagtttgctgtgcctccgattcagtgattgttggcacaatgggagacgatcggatggagaacaatggcaattttctgctgttggaccgtctcactttcgaaccaatcggattttgggcagagaaagaagggcaaaaaggcacaaaatttggcggaacagatttctgcattcaaaccaaacaaaatgttttgctgagcgtcgggtggggaacgccggccaaattccgcggcggacttcggccgagagacgtgacaaacggtcattacagcaacgaagtgaatgtttgggagtggcgccaacgccgactgatccaaaccatcgctttggagggcgactgcggatggatgccaatggccgtgcgctttttgcacaacgccgacaaatgccatgcttttgtgtgcactcttctcggctcggcaatttatcatttgtggagagaggagggcgaagaatccttccggcattgtttggccgctcatattccccctaagaaagtggacggttggcagtgtcccagtttcgtgccacaatttgttcaggatttgttggtttccatgaactgggccctgcccaaaatgcccgcgtttatttccgatttggtcatttcgtccgatgatcggtttttgttctcctcgaattggcttcatggcgatgttcgc

SEQ ID NO: 96457 - DNA, 164 bp, Heterodera glycines
aatacttcatcttcaacttctgctactgactcttcaccagacggagggaactatatcaaagaggaaatgctccagagagaggtcaaattattccagattatctcaaaaattctgactttatataagtcgactatgggcattactggataatcttggctccaccc

SEQ ID NO: 96458 - DNA, 644 bp, Heterodera glycines
cgccgcttaaacttcaacccgtacaaccgcccgttcaatatgcgcaacagcggcaccaaacgtcggcgagcagtacaacaacaacggcaccaccatttggtgaagcgatggaattttgcaataaatgctcgtacagatactcttgaaacatgcccagatgcctttcatcgtcgtgcaaccgatggcaatgactctgctcaatttgcctctcatcagcgtcatccaccgactcgcaaaaaagtttatctgaaatcttcgcgcctgccttttctcaaccaccgacaacaattggccaccgatgctccgcctttacaaaatggcctttcgtcaattgctgccgcggttctatcgtccattgaatctgtggcgaatgaacgcgactttatgtgcgaatggctgatgcagtcggagggggacgacgattggtcggacgaggagggcacagcagcggggccaattgagccgtgcgcgaggtgtgccgggggaatttgaccacgcacagcgacggcgaaccgccgaggattcgctgtcgttggcccatttgcgaaaacactccgcgcactctgtggtccatcacaactcatttgcaagacatccattgcactgaaaatgcgttggagtcggcgatgctcccacgggtggag

SEQ ID NO: 96459 - DNA, 473 bp, Heterodera glycines
cccatttcattcgcggccttttctcgccgttttgtgcccaaatcactttttgtgtttcccttctcaaattgccaacttacaacaaaatgccaatgccatcgtttccctctgcttcttctccgtgtacttcttcctcttcttcttcccgttccgtcgatgaacatccgttgcagtcgtcctcttcgtctccgttgtcatctcctttttctgccactatgccgtccacgccttttaaacagtcaactttcggcacttcctacaaatcgacgacaaaagggcaaaatgccaaaaaagaaatgccattggcaaaagataaaaaagcagtcggaggggcggacaaagagagacaattggatgaacagagcgaattttgcggaattttttgtccgcgttcgtttggccgtgccattggcaaattcctcgacttcgttatgggttccgcgcactcttccgccaacccttcgtcttccgtc

SEQ ID NO: 96460 - DNA, 996 bp, Heterodera glycines
gagaaaaattttcaaatctttccattttttgtaattaattttttatgacttaataactccgtgtttgttgttgttgtataaattaattagagcacttatgcagaatggaggcagattttcacgctccttggttttacgggtcactttcccgcgagaaaactgagaagtgcttacagtcatgcgcagatgggactttcctgatcagaaattcaacaaactatccgggcgatttcacactttgcgttgcttgcaatttgcgggtcgagcattacaggatttacatggtgaatgaccactttacgtgtgacaaagaggagctgttcgacacgctcactcagctcgtatcggtcgcactacaaaagggatgccgacggactgtgccatcgtttggtgtgcccttacatttccgaggaatgccaaaggcagcgaactcacatcgatttggtgttagttgaggagcgcaaaaaggagttcgagcaagcggcgctgttactctccgttgaccatcttcggcttggcactgtcattggacacggcgaattcggagacgttctttcgggcacataccgaggcagaaaagttgcagtgaaaacgctgaatatcggaatggtccaggatttgctggccgaagcgcgttttatgattggccttcaccatgaaaaattggtctttttggtcggcgttgtcattgaggacccgcgcgaaagtgaagtgtacatgctgaccgagttcatggccaatggcaatttggtggattttctccgttcccgcggccgtcaccacgtggaccgaccgcgacttgttcaatttgcgcaggacgtggcggaaggaatggcatttttggagtcgcgcaattttgtccacagagatttggccgcccgcaatgtgctgttggacgaccgattgggggcccacatcggggaccttcggactccctccattggccaatcagcccgcaaaaaaagtcgcggaaagggaaagtttcccgatcaatgg

SEQ ID NO: 96461 - DNA, 429 bp, Heterodera glycines
gctaaaccaacagagcttgaggagatttcgtctgatttgtccactgttcctacacaaatacatgtctccattcccgaaaatcttatgaattttgacggcactgaactaatcgaccttcccattgacaaatgcgtcattgtttaccattgtggaatttcttatggcattgaacctgaattgtggaaagcaaaaacaatggaaaaaattgatggggaccaaatcaaacaaactcaagaaatggacactaaacaattggaggattatgtcactgtttaccatcatggatggtacggtcgttttgaggatgaacaacaacaacaactaattgacgaagaggaggagcaaaaaagacaatttgacaaaagtgaaactgaccgaattgcattatcagtggagcagaaaaaagaacaattggctgccgttgaccac

SEQ ID NO: 96462 - DNA, 468 bp, Heterodera glycines
tagttcaaaaaccgtattttgcttttgccccctcactatacattaatgtcctccacaattgctcccgtttcttccgccgatggcaccgctgggagtgccgccgccgtcgccagcgctgggccctcctccgtcgagccgatgccgccggtggagcagctgatggagggcattgaggagaagtgcccgccctcgttggaccagcgactgaacgccatggacgaggtggacatgcgcatcgacgacctgctcaccgtggtggccgaagtgatggccggtctggacaaggacaagccgctgtcaaaggcgaagatggaggagctgtacaagaaatacgaactgaagctggacgaaattcagcggggcatcgccgaacagctcacttacatggaacaggtgtgcgtcggcgccgagcaccagggctcaacttaccattaccatcaggtggcccaactgagtgccgcacggctg

SEQ ID NO: 96463 - DNA, 268 bp, Heterodera glycines
atgcggctactgcaaattcacaaaacgcgcccatgacaaggccaagttcggcctctgggcccaccggctcactgtccaccattaccaatggttggccaatctcggctggcgacgttcgggtcgctttctgtacaagccgttgatgggccgcacgtgctgtccccagtacaccatcacgttggacgtgcacaaatttctcctctctcacacccaaaagcgcgtgctgcgcacaatgcgcgactttttgcgcacggaccaaaggccgaaa

SEQ ID NO: 96464 - DNA, 637 bp, Heterodera glycines
cgggccaaaccaagtttaaagcgccagtgcgacggttccgttcaatgctaatcagctaattgctcactaattaccccaaataacaaaactgtgcctgcttctcccaacaatggcccccaaatgccttccgctcgaacttttgttcgaaattgtgccttttatccctgccgaaaaagccgtcccgaatgcgctctcttcctgtcggctgctgcacaaactttttctgccacgtgtcatcaaatggaaagagcaactgctaaccgatttgatgagtttctcggcgatcgtcaacaatctctcggcgaaagtggacaatctatcgggcgtcatcaacaatcactcggtgaaactggacaatctatcgggcgtcgtcaacaatctatcgggcgtcgtcaacaatctatcgggcgtcctcaacaatctctcggggaaagtggacaatcactcggtgaaactggagacgattgagaaaaaaatggtagaaacgactggcaaggcgccaaacgaaacaaaagaagcagggaatggacacaaagcggtgatgggcgctttccaccaaaaaaatggcaccatccgaagggcccttaccaggaatacaaacgtcggaaaaggcgaatggtgaaaaggatttttgaaa

SEQ ID NO: 96465 - DNA, 269 bp, Heterodera glycines
acgagtcaaatatctggactcggacgcccccccccaccactttttcccttttttctagaaatttttaacaaaaaataaattgcattcaatttccttaaagacgatgaccaatggccggacggatggactgcggtgacaaaggatggacgtaagaaaatgaatttttattatatatattttttgcggggttacaatttttccccaaaaattcaaaatgctttcgcgttacttaatttcggataaaaatgttaaaaattttcgataaatcc

SEQ ID NO: 96466 - DNA, 489 bp, Heterodera glycines
  unsure (1)..(489): unsure at all n locations
ccaccacataacagccatcaaaaaattccattgccaattgaatgtattgacaaaattgaactgcattacacgcttatcattgtggttgaaggatcaaataatattattcataagctttcctaaatatcattattatttatacagttgtgggtttttgggtaggaaaagcagtttttcattttttacgagatttgttaaattaangtgctacacccccaaagtgtatgatgaccaagacgtactttgtagttcagtgagaatgagtgtgtggtggtgtctctgttcgttatggtctccgtccccatttatgtgcatcaaagaactcccccaaatgaatggtcaacaccaaaaatggtcatggtatctctcatatggtagtgttcttctgtttggtgctcaccattggttgttggccttcaaatggtggatggacaccatttggatttgtacatttgggtggtcttgggctcaaaaatgcggacctgctga

SEQ ID NO: 96467 - DNA, 196 bp, Heterodera glycines
gccgacaccacgacgtgagcccaatcagaagaatggacagcacgggacaagggacatcggcggcgagcggaacggaagaaaagatcgtgaaaattcgaaaactgttgctgcaggccgccgacttattgggagaaatggcagacgaattgttcccgtataagaaatagggggacagcaaaaggaatatcaaaataac

SEQ ID NO: 96468 - DNA, 540 bp, Heterodera glycines
ctggagctccccgcggtggcggccgcttttcatagtggatgcccgggctgcaggatttcggcacgaggccacaagtcaaaaaatgtttttccactcgccattaccacgaacaccggtgctccgacgttcgacgctcagtggcagcggccaagtcgaaattggggccgcacttcgtcaccaattggccgaagtgtttacgccgccatcaaacatttatcaggtagctccacaacgtgaacaatcagttgacgacagcggtggaccatctgctgcagaaacagtgccattaatagagcatcaacttttgatggcttatcaggaccagctgaacaacaacattgttcaacaacaaaatctgtatcagcagcaccagcacaattttgtggcaccgtccatcttggtgtcgtcgtcgtccatggagaaaagtgcgtcggcacaggacttggccggcacggccgcagcgctgatacgacggcaccgcagtgcgagcaaataaactaaaagatttttcctcaacacaccggaagctcagtgcgtaca

SEQ ID NO: 96469 - DNA, 120 bp, Heterodera glycines
ggttcgatgaaactttttaaaatataagcctaaactttttggcctgtttaaaaaggaattaaaaatttttaaaaattttattcatctcccttttgatagaaaaagcatcagagagcctta

SEQ ID NO: 96470 - DNA, 389 bp, Heterodera glycines
cgaacaaagcggccgttgagcgcactgagctgagaggatttgcgccactcgtcgattctttcgaagcgatttacgcccgaaattgttacatgcgtgtccgcgatgtttttgagcggccaattggcggtgtgccaggggcgaaagtcaaattggtcgaccgacaaacagatgacttctgctggacgttcaaatttcccggctctcaaacggaagtgataaatgtgagcagttacaattatttgggcttcgctcaaagcgacggcccatgcgcggaaatggcggcaaaagcagtggaaaaagggggactatcgacgtgtggcagtgcgcttgaagggggtcagtgctcaattcagtccgacttggagaaattggtggccaaatttcttggg

SEQ ID NO: 96471 - DNA, 540 bp, Heterodera glycines
tggacccccgggctgcaggattcggcacgaggaccattagtgggattggcgaatccgagcgccttttggtgtccctccggcgcatcgtttgcaacggcggacacttccacagagacaacgtagacatgcgcagttgaaacacagcgccagtgacgcattgaccatggactacggcttgggacgcatacgccgaagacggtccaattatggagcgatgtcaccgacgaagagtgtccaggaggtacaacccgtggcattgtcttggcacggtctcaccgctgtccatgccaaatcgggacggaaaattcttgacaatgtgtccggtatggccgacgcgggccaactcgtggcactgatgggcgccagcggggcgggtaaaacaacgctgctgaacacgttactcaaccgaaatctgaagagtctgagcgtggagggccaagtgctggtcaacggacattccctgggccggtccatcacttacgtcagcgggtacgtgcaacaggacgacttgttcatgggcacgctgacggtgaaggagca

SEQ ID NO: 96472 - DNA, 543 bp, Heterodera glycines
caattttcgcagaatgcttcgagaaatctattagctccgcaatttccttgctcaacgtctcaattttcaaacgtcgcacattatcacccttcttttaatccaacaattgcaagcaacatttacataaacccatctgttttcaatacttctcacgaccagtcctttgttctcatcaatcagttacaacacctttcctcaaaaagcagccaaaattggcatttgatggtcgatgatttcgttaaaaaaactatttcggttcctccacgcaattacccgaagaatcgttccccatcctccgattcttcctttcccgtttctcacccttcgacgcgatcgaacagtcgaaattcccgaaagacatcgccaccgacacgcaaaaggcgtttgaagcacaatatttcacaaggcaaaagaacgcaaagacagacgaaagaggcgcatttatcaaagcaaacgatggaatgtgcgaaggcaattggacttgacagtgactacctaaggaaaatcgaagaacaaaagaaactgagagaagaaattgcgcgc

SEQ ID NO: 96473 - DNA, 343 bp, Heterodera glycines
ctgtttattatgaattttgcttgttgctgtcatttttcaagagttgcacaacgttatttttcgagcagtcgtaaacaaacggaacaatatttggaacgacaggccaacgaccaatactcgaggcgggccagagaacactcataccgtgcaaggagtgcctttaaactcatgcaaatcaatgacaaaatgcacttcatcagaccgggtaccaataataattgtgagtcagcaaatgctcggctcaaacactcattgcaggactcgttgcgattgacgcgggtgcagcgcccggctcgtggtgccaagtgctcagcgagttgattttccctaacaatttcgcacc

SEQ ID NO: 96474 - DNA, 150 bp, Heterodera glycines
tctttattgataccacctccaagacttccctaacccaatttattttgactaaattttccaaaaacataaaattatcattttttggacaaaagctgttaaaacgcacttaaattttcaaaaaattttccccggctgcagctcagagcaaaa

SEQ ID NO: 96475 - DNA, 421 bp, Heterodera glycines
agtcttcgttgccggcagagagacgcaaacagtcggagacggaccgagggcggcaacagtcggccaaaagttcgccgacacgcgaaatggcgccatttttttccgttttttaccggggaatcagcggaatcagcagagtgaccaaatcgcagagtcgcagcgaccttttggaaaaggacggggaaagggaaggggacaaagccaaagcgaagacgacgcaaacgcatggggagagtcggaactgtacaaccgccgataaacctccgcatcccttgaccaaggcgaagggaaattgtgccaccgatgggcacggagtttgggacaaagccaacaaaaaaggcggaatccgatcaaagtcaaccgccgatttgcatgccgcgaaggcagcagcagcagcagaaggaaagaattggagggaaag

SEQ ID NO: 96476 - DNA, 480 bp, Heterodera glycines
cacgttcttaaagacccaacctattatcccgacgggataaaaacttctctgaagtgcgatggttcccgtcaaatccgccaaggaatatgaccgtcaacttgacgtagcagtgcttttttccgaatgtttgactagggctatcaaaatgggctacatcaccaaggaacaaattgatgattgtgacccgaacgtgatcatttctttgccaaggcttgccattgtttggggcctccttttttatcctggcggtgcccttaatgttaatgtgcccaaagaagacatatctgaaatgtttcggcatttccacaaagtgctcattcttgtccgtaaccttcttcaaactctcgaacccagtgaactttccaaactcgagcaaaaattggttggcgaacacgacggacttggcgaatcttgctcatcagtgcgtgccttggaacaacaaattgagcctttctcgggacgatcgttgaatcgtcatga

SEQ ID NO: 96477 - DNA, 684 bp, Heterodera glycines
gtgaaagtgacgccagtaataataacagttcgaaatggacggggaattaaaccaagggacagacccgaaaattgtgcacagagatgtcattgaaatgtttcctgagttggatctgacgcaaattgtctctgaatttggccatctttcgcctgagggcctcgccggcattgtcattgaccgaatggcactcattcctcggaagaaaaatggaacattgaagagaaaggcagacaatgagagcaatgacgaagttttgtcggaatactcggggggcagtgagacggcagaacaattgggcaaccttctcgtggacaaaatgcttggcgaaatgttacgatcgtgcaaagttgaattgcgaagcaaacgcgctgtggtcgattcgtccgcatggactggtgtcaaaacattgatgattgagcactttccaatggtccgtgccgacttcgtcaccaaaatggtgcgccattttgagggtgccattgtaccaactgcaatcgcttgtttctttgtggagaacagttttggggacaagttgcagaaaattgctccttcgtttaatcagtcattttggtacaaaatggcgattcccattcaatgccgaggccgtcgtctgaagcaggcttatgtttctgagcagttgcgtgagcacttcaaactgtacaacgaactgatgtgtcagtacca

SEQ ID NO: 96478 - DNA, 1073 bp, Heterodera glycines
atgctataatgaagcctctgaaaattgacgtggatttcccctcgaatagtcatcccacttcccaagaattaaaccaagattgtattcctttgtacgaaatgcttgaattcgaggaacttcaattcccaaactattacctttccgaacaattgggaaggggtgcccatgcgacagtgatgccgtgccatttccatgggaagccggcagcggccaaacttttcaatgccaacgtggacttcaaaacgatccaaaaggaggccaagctgttgcacgagtttcgccatgaaaacatcatcgaattgtacgctcttttccacgggacaatgtccggattggtgctggaactgatggagggcggttctctgagtgaattaattcaccagcgcaaaagcatcgtttatcagaattgtcatgtgattaattggactttccaagtggccaaagcattggaatatttgcacaagcttagtttcatccatcgcgacgtcaaaccctccaatatgttgctgtctcttgattatgtcgtcctgaaactttgcgacttcggcacaatcgctaagcatcggacggacatgacgagcacttgtggcacggccgcatggatggcacccgaagtgttcagaggggagagttacgactttcggtgtgacgttttctctcttgggagtctgtctctgagaaatgctcgcgccaagtccgccattcgccgacgctcccgaactaaattccttggccgtgttgtgggaggtggccgagagcggactccgcccgccgccaattgaaggagtagccgagccgttgcagcagctgatggtcagatgctgggccgacgagcctaacgatcggccgccgattgacgaagtaaaagagatgttggaagcacttttaaagcaattgcctcacggcgcattgtctccgttcgtcggtcgccttttgacgggtcgtccgtcccccgtagacttttctccccaagcacggaccaatgattgaattgtgcaatcttacaatattgtttcttttttatatgtttctgcttttatattattgtttttctttttaattttcaaatttgt

SEQ ID NO: 96479 - DNA, 623 bp, Heterodera glycines
gttgagcgaatcgaatgaacgcctccaaatccatctgaaggagcgaatgcaggcgcaaattgacaagaacaaactgatgcagcggcttgaccaggccaagaaaatatttgatcagacggaacgtttcaaagagcggttgctgcgtgagaatgacgaccttcgcaacgacccgggcaaagtgcaaacgctgggcgagcaggaatggaagcgcattcagcaggcgaacgtgttggccagcatccaacaggctttttccacctcttcttcaatgctcaatgtgaacgaggcaccgccgcctgcgctggaccaatcgacgactgatcccctggacgcaataaacaacgaaattcggatgatccaagagcaaaaacagcaggcggaacgcgtcgctgcggaacaaagccaagaatggccaccgaacggcaccgtttacgagtacggcaacaacaacaacgcgagcaacggcggatactcaccacggcaacaacatgatcagcagaagaagcagaagatgcgatctcataaataattcatgcacatgctgtttttaaacttacttaattgatgctccaaatatgtattgattgtgtttaaattgaacaaaacataaacaaatgcaccac

SEQ ID NO: 96480 - DNA, 610 bp, Heterodera glycines
gcggtgggcgagaagtatgtggcacacagctgctgaatctgtcggggtgtcgactgaccaattcgtcatttatgcgatccttcaaagccccgagcacaatgaccgggcgaacgtaattaactgttcgcagttctaccgtaacgtatgaatgaattggctcatctgcgatagtgccgccaaaaagagtggaaatgtgcgaaagggcgacgtgctgctgcgcgtgaacgaagtcgacctgcaaaattccacccacgcgcaagcggcacaaaccctcaaggccatccccaattactccgaagttcaattagtgctccaacatctgccccaggagtatcagagattcgaggagaaactggaacgtgcccgtgccgaaatggcccaactccagcaaaatccacaacagccgccctatttgccacccgatgcgatgccccctccgcagcagataatgccaatgcccatccgacaggacttttacgtgagagccctcttcgacaacgacccctcccgcggggatgcggtgctgccgcaccgttccctcgcctttcggtacggggacattttgcatgtgaccagtgtgggggacgacgactggtggactgcgcgaagg

SEQ ID NO: 96481 - DNA, 638 bp, Heterodera glycines
gtttgagacaacattattttttaaaaaaatatccatccaacttaaaatggcttctccttcacaaggccgaggtatgtcgaccatcttttacagtctggctgtgtgctatttcgggcttttgtttctcggcgctggccacgctttgatgctggggtcaaagaccaccgaatgtattgcattttgctccaggcaaacatcaccggaatcgtacagtacactgacgagacaaatgtgagccgttcatcaaatttcactgtgccaaatggcgggtctaccaaaattgcctacccgggctcggccaaattgcccagccattgtggccaacaccaacagcaaatgaccatcgaatttgtgccggatggcttcaaccacaccgagttggaagctgacaatacttggtatctgacgctccaattcaaccgcaccggcacaaaggaacagggcacgtttttgctggccaattacacactcgatgtccgtttcttcaacgtgcaaaatgcttcatcccattacaatggcacttatttgtacgcgaaggcgcccagctttaagccggaatggagcgcaacagtgcaaaacggacagccaaatatccttacctgctcaaagaatgggcttcatttggatgaaaagtcgtc

SEQ ID NO: 96482 - DNA, 447 bp, Heterodera glycines
  unsure (1)..(447): unsure at all n locations
caaccttgagcttcccttcgtcacaaatttaactttcgtttcgtttccttttccaaaatgaattggtgcgccgttttgtgctttttgcttctcatcgaagtcgcctttgtgccaattgtgaacagtgcgccacttgagcgggaaaaacggctgactgccagccaattgggcaaaggcgccgtcgtcggtgccggcgtcggcttagtcggcgccgcactttacgccggcggcaaaaagttttggaacaaccgaaaagcaaatgctgcggcagccgacgcaggcggagccgacgcggccaatttaaaaacaaagggccgaaaatgaaaggatgccaaagaaagacagaaaacggagagaattttaaatgaaatttatgaaaggacagataaaattttaaaggtgcaaaagttgagaatgttttaaaataagaaataaaaaaatanaaag

SEQ ID NO: 96483 - DNA, 478 bp, Heterodera glycines
acatacaatacatcattatgcttttacttgcctccctccgtggtccgtgtcgtcgtcctcgcgttctcaaaacgctgcgctctcttaaagtccctcacttttccacaatgaaccgtgactatgtcattgaaactgtgaatttcacttccgaacgtgactctgtgttcaaattcttgcaagaagtgtttttggtcaacgagccgatcacccgcgtcatcggttgcaccccctcggacacctcaccaatattcgacgacatttgtgagaagtgttctaaatttgatttgtcatttgcggccaaaaacaacgatgggaaaatactgggagttctgttgaatgcgcccttcaaattggaaaatattcacgaaagctacagagacattggtcgcatgccgaacaaaaaggaattcggagaagagattcgcaatggcccttttccatctcaaaatgccaatcgaatccacgccattctcacttt

SEQ ID NO: 96484 - DNA, 813 bp, Heterodera glycines
cccctccctccgctgccattcgccgcctttcgtccgtttgccgtgccgagtgaatgttcgtcctccgatgtttctgttcctccctccgtcactcccttcccgcctttgtcttcccttccttttcctccttttttacgcctatttcggcgacggatttcgtcggagatggcgcgacgattcattcataaaccgaacattcaaaccgaggcgatacaaattgacactgtccattcgcaatcacaatgtgacggatgtgcgtttcttccgactgattggagttgataacacagccgacttttacgtggccccgggcgacactttcaccaacacttacaccgttaacagaaaaggcgcctgggttttgtttgttgaatttcccggaaatcgatacgcaaaatcccagcggaaaatgatctcacgcgactctttcccccaatggatgatggaagtttatctgttcccacctgacaatgtcggcttctctgaatggtacaaaatacggaggacgaagaaacggaagcgaacgcaacgaaagcccaaaatgacttagacttttcagcagagacacttaattatgctaattaattgtttgtttgtttgtaattagtcgtcagccctccgtcgctttcaatgctttgagccaatctttcgcgagatttcccaagccctgacttttcttttgttgagaccgtttttcttccaatcactgcccaaataaatgaaagccatccgccgatcgttttgagcttctttcttttcttgtcttttcgatgcttaaaatttaatcccatttctcaaatgatttctttgtaa

SEQ ID NO: 96485 - DNA, 453 bp, Heterodera glycines
  unsure (1)..(453): unsure at all n locations
attaagggctgcatgcaattaagaattacgtccttttcgatgccatcgttatctcttaaacaagcatggtaataaatcacacctggcccatgttgtaattccgtgccattttcaattggcttaatgttcaattggcgcattggctttctgatcaccctgctcatgctcatcactaattgcaattcatccgtctgatcatctagcgcttcttgaacagttccattttgttgtccaaactgatcatcgcgcttcttctgttcatcaacattccgttctttttgaagtttggcactttgttcaattgcattttcctgttgttgttctacaagtactgctccattttcttgccttttgctttgattttcatgccgttcttcatttgtcacattttcaccactttttgtcccattattttgttggatttcttgaataaattggcccatttggaaaann

SEQ ID NO: 96486 - DNA, 173 bp, Heterodera glycines
ctgggctttgacggaattgaccgggaccgagctgccccgtaaaagcccccaggctcgtccgctcaatattaaaaactgcgtttgctcttgcctctggtgctagaaacgaaataaattccaagacggaagagattgtttttcattcattaataattgggagcaacacacacccg

SEQ ID NO: 96487 - DNA, 193 bp, Heterodera glycines
gtttttctctccgataatgtgactttccattggatgtgcataaatcaataagcaaaacattaaaaaccattccttttaatgttgtacaataaatacccactttttgccttctttttcaatctctggactttcctttcgtatttgctttttattgtgttttaatttttgtttaataataataaacaattttatt

SEQ ID NO: 96488 - DNA, 886 bp, Heterodera glycines
atttggtccgaagtcagtcagctgaagggaatgcctctgctggtcgccggaaaccgtactgcgcgtagcgcatacggtagctgccaagagtgttgctccggcggtgcccaaggccaacccggacaaaccccgcagacgccttgcgagcaagtgcacccgcctccatgcaccccgtgccctggcggtcagcccggtaacaatggcccacctggacccccgggagcgccaggagcacccggccagcccggcaccggaggaggacagccgcaacccggagagcccggcccacctggacccaatggccagcccggacaacccggacagcccggagcgcctggacagcccggacaacccgcaagcccaccgccaacggagcccgctcctgcaggcccacctggagaggctggtgcacctggacagcccggtcagcctggagcccctggacagcccggcgcggccggacagcccggcccgaagggacctcccggaggcccaggacagccaggcaatggcggagccccaggccagcccggccaacccggacagcctggaaaccccggagagcgcggaatctgtcccaaatactgtgccgtggacggcggagtgttcttcgaggacggcacacgaagacgttaagaaaagcgattctgatcagtggaagaagaaaaagcagaaaaacagcagcgattgccctcccctcccccggtgcccttctccgtccccatttcccactgcctttctttcccttcctttttttattttgtttagcttttccaattctcccaaattccctcccccccccccccctctgaatttcttttctttgtaatcgccgctatgccaagttgcaaaacatcagcaacaaataaagaataaatttcacatg

SEQ ID NO: 96489 - DNA, 476 bp, Heterodera glycines
gcaatgcaactcaatggataagagcggaactcgaaaactcctggccactggaaataattcggcatgtcaagatcgggataaagaatccagtcaccgacccatattcgtacaattataccgcaaatctgatcgatgacattgtttcgccacgtgggcctttcggttacgtctcccaaattttggtcacgaatgacttcgacagaatcgaaaatttctggcagaggtgccctgcgagttattgcgcggtcgtaaaaggttacaaagggatcaatttttcattgtttcggcacaaagtggggcatttgacaagggcccacaaggcagagcgatggtttgaaagaaaccgtgacaaaatgtacgacatcatccttaaaaatgacaaaacatccgatcttggcactttgatgcgagcgattgaaatggaaattggccctgtgacttcgccagatttgttccactcctatgtaattgcccac

SEQ ID NO: 96490 - DNA, 482 bp, Heterodera glycines
gtctctttgtcgtgtgatgagcgggactctgagaattggtgatcagcttaatgtcctccgacattcggcgtcctccgaagatgtttggcattctgtgaaaattggcactctttttcttttgatgggccgtgaactgctccccgtagagtgtgttcctgctgggcggatttgcggcgtcgaagtatccgacgggcgttggataggcggacaaacgctttgctcgagggctctggccgtcactgaagtgccgcggatgagttggcatcaaaagttcgccgaaccactcgtccgcgtgacggtaaggccgacaaatgccggaatggccgaaatggaggaattgcgaagtgcactgcgacaattatccgtgttggactcagcagtgcgcgttatcgagcaggaagacggagatttggcgatgcttacggctggcgaagtgcatttgcagaagtgtttggaggatttgaaattactcggccaaaccg

SEQ ID NO: 96491 - DNA, 483 bp, Heterodera glycines
gttgttgttcatttggtccattgtttattttattctaattatttccataaagtgcatttcccccctaattgatttgttcagtgaattaaatgtcttccgccgtttcgtcttccccagcagtgctcactcggttggattggctcaaactgtacaaagcgttgcaaagggcgggttcagagttccctcaatacaattaccgtcacttcgcacgtcgtcgaatccgcgactatttcgagcagtacagcaagcagacgatgaccagggagaagctgtccgaagtttaccaggaaggtcagtccgccctcggcacaatccaaaggcaaagtcgaatctcttctctgtacccgactcgtccgcttgtcattgagacgattgatgaaaaaaaggagggcgccgtcctttgatataatgtcgtgacatattatttttgttgaccgttcttaattctatcgtgcgcctttttgaaataaaatatatgaataa

SEQ ID NO: 96492 - DNA, 630 bp, Heterodera glycines
gtccaataaaggtatcattaatttttccaaatgcgttctgcaagggttaatcaacgccagcaaattgaagaattggcccaaaattcggcacttctgcaggacatgacaattctgccacacaactacaactttgagataccgaagacgatttggaaaatccggacaattgatgccaaaattgtcgctttgcaatttcccgagggcctcacaatgttcgcctgcgtaatcgtcgacattctcgagaagcacaccggcgccgagttcatcattctcggcgacgtcacttatggagcctgttgtgtcgacgatttcactgcgcgtgcgctcggctgtcagctgttggttcactacgggcacagctgtttggtgccaattcaggacactgttggcatccatctgctgtacgtgttcgtcaacattgacatgggcacggcccatttgctggacacactgcggcacaattttttgcccaccgccggcgatggcatggaaaaagtgccgaaattggcattggtcagcaccgtccaatttgtggcgacacttcagattgtcaagcgtgagttggccaaggacggtttcgacattgtcatcccgcagtgcagtccgatgagtacgggcgaactgctcggc

SEQ ID NO: 96493 - DNA, 512 bp, Heterodera glycines
ccgtcattatcatagcaccaagatgtgtacagcaaaaaatttgctggcggagatatattttttaattttttaatccgtcccttccaaaatagaaaaatcccagaagaaattacacacatgtgtgctttgattttttggttttattttacagtaatacaattttcattttttgttaattttttaaaattttaattccctaattatttaatacgctaattaagtcgccctgctttaatgagcacgaatgttgcgcgaaatgggcagccgacggacagtgcgaatcgaacagcgaatacatgagccaattttgcaaagccagctgcaaaaaatgccaatattcgtacaacatgcaagaggaatgtgctgatcgtcataaaaattgcaaagctttgtcctaccaaatgaaatgcgattcaagctggatggctgaaaactgtcgaaaatattgcaacaaatgcaatgtaaaacgtatgcaaacatgcgctggcggttccccggggggagaaaaacgt

SEQ ID NO: 96494 - DNA, 487 bp, Heterodera glycines
caagtttgagggcaattaaataattattttaataaaatggcacctcctccacccccgccaaaaagcaaatcgtcaattgaggaggatcaaactcagcagcacgagttggcggcatcgcccgaatgggcacaaaacgatgtggagcaccccgtagtgaaagtgttcggcttccaaccgaatcgattgggccgggaatggccaccgaacccacaacagcccgaagacacacagctggggcaggccaacaaacacaaaacgttgggggacattgactggatgacaagtcctgctgaagcaacgccagtgcgagaacaaattccactcagaggtaaacttaatgctcaatggcctccgccagaaaaagaataccgcgtcgaagtgttgttgccggagggggtcaaacagtgatccgctgctaaaagtgatcggaaaatagcacagatttataaaaaataaaatatggaataaacactcgaaactttgaaaa

SEQ ID NO: 96495 - DNA, 610 bp, Heterodera glycines
cctcgtgccggagctaaaagcctaaatttattctcgctaaacaaaatgtcgatgtcaaaatcgtcctacacctacaatcggaagacatttgaagatgcggaattccctattttgtgtgagacatgcctcggcccgaacccgtacctacgcatgagcaaagacacacatggaggcgaatgcaaaatttgtgagcgtccattcacaacatttcgttggatgccgggcagaggggcgcgctacaaaaagaccgagatttgtcagacatgtgccaagttgaagaatgtgtgccagacttgtctgttagacttggaatacggccttcccgtccaagtgcgtgacacggcactccaagtcaaggagaccgtcccaaaagtgggggccaatcgcgactatttcatccagaatgttgaccgtgctttggaacaaacggatggcacagtgccgtacggcgagttggcgaaactgaccgatgcgggcaccaacgaaatgttgcgcaagctggcccgaaatcagccatactacaaccgaaatttgccacacatttgctcattctttgtgaagggcgaatgcacccgtggtgaagagtgtccgtacagacatgaaaagccca

SEQ ID NO: 96496 - DNA, 465 bp, Heterodera glycines
tggtgatggcagctgtgatcatttccatgggcttcagtgtggacattccggcacacgtctcctaccatttccacatcgcaaaatggacagaagatgggcaacgacagcggacaattgaggaacgaattcgaatgtcattcgcttctgtcggctttcccgctgtacaagcatcaacatgtacaaacatttgcattctttgtctactcgtcgtccctgtctatccggcacaagtttttgtgcgaatcctttgcacatgcatcacactttgtacaatccattcactgtgccttcttccggcgttgttcaatttgttgggcactttggaagcatttctaagctcaaaatttgcataaaaatattctcatcacatttttttataaataaatatttctatttaattaaatttgtcaatattttatttttttgttattttttgagcttttttaaggaataaagaatttgaat

SEQ ID NO: 96497 - DNA, 652 bp, Heterodera glycines
agtcttttcacaatgtacagcaacataagcagcagtggatgggttagcagtgaccacccgcaacagcaaattggcaacttttattcgtatgatgcggacccgactttaagccccaacggtggtggatacaatgcttattttgactatccaaatcagcaacccgccgcttcttcatccaattctaattttgtcccacttggctctggtcgccctttcccgcacacaatcagtcagcacgcacaactcagtttctctgacaattcgaatgcaaattttgttccgcttggctcgggtcattttctaccagaacgagatggtgatgtcgtttgctacgaagactcattcgaaatgcaaaaaataggacgaaagcgacgtcgagggaggaaatccggtcgccgtgctcgaatggacatttatggtgctggccaaccggcaactcatgattttggggaaattgtaaattacgacgattggcaacaatgggacaacggctggggaggacagcaacaattcgaacagaacgaagcggcgtcaaattatggccaatatggcattgaaccgagccaaaactacgaggactacgaaatttattacgacaattacgagacggaccaaacgaaggaactctggcaagaggaattggaacagcaaa

SEQ ID NO: 96498 - DNA, 475 bp, Heterodera glycines
cattaatggtcctacaaaaaaagaagaaatcgttttccggttttaaaatacagaattttgtttatgggctagattcacagataagttcgctggataagtatttgttgaactttaaagcaaagaaaaatggcggttcttgtctcctctcgggcagaacaaatactggaaagacgcttgttctcgaatcactaatccagaaacatttctctgatgatgattgtgatataaacatcagaagagttgacgggctttcgaagatgacaaaattatttgaaaagttagatcttgaagggccggtcttgattgttgtcgatcattttgaacttttcgcatataaacaacaacagaatttcctatacagcattttgaacggcagtcaaactcttccttggtttgtcgttctaattggcacaacggaaaacagcgttaatctattggagaaaagagtgaaatcaaggttctcagcgctaagagt

SEQ ID NO: 96499 - DNA, 540 bp, Heterodera glycines
ccatttaaaaaaaaatctgacaaaatgaatttttctccgatcactctgtttctgctctcttcacttgccattttctatgcagcggttgcattccgccaacaaacggtcgccgttcgcggccgtttaatgtgtggggataagccattgacggacacgaaagtgaagctgtggaataagaacaaaattggccgtgatgatcagctggcggacgtgaaaacggacgcgcagggaaatttcgcattggacggcggcgtcgggtccattttcggcatgaatgtgcacctgaaaagttgggcactccatttttgtaaatgcgaaattcgcgcgaatccctaacattttttgccagtttatcacgactgtgatcgtggcatccttccgtgccaacgcaaagttaacctcggcattccgggcgagtacgtcacgcggaccagcaccgttcagcgatggttagacgccggcacaatgaacatgcagctgaagtttcatgacgaatcaacttcatgcatcaactaatttaatgtttaagaggatgagatg

SEQ ID NO: 96500 - DNA, 475 bp, Heterodera glycines
gttttgcttctgaattttgccttcatattctttgcatttttgtcttcaatttatgccgaggaagaagatcccaaagttacgcataaagcatttttcgacatttcgattggtggcgtcaaaaagggacggattgtgattggtctctttggtgaagtcgtgcccaaaacggccaaaaactttttggaattggccaaaggcacccatggctacggttacaaagattcaaaattccatcgcgtaatccggaacttcatgatccaaggtggtgattttacgcgaggtgacggcactggtgggaagtccatttttgagggcaaatcatttgaggacgagaatttcaaactgcaccactatggcgccggatggcttagtatggccaatgcgggccccgacaccaacggatcccagtttttcattaccacggtccatactccatggttggatggacgccacgttgttttcggtaaagtgctcg

SEQ ID NO: 96501 - DNA, 150 bp, Heterodera glycines
cgattggtggcgtcaaaaaaaggacggattgtgattggtctctttggtgaagtcgtgcccaaaacggccaaaaactttttggaattggccaaaggcacccatggctacggttacaaagactcaaaattccatcgcgtaatccggaacttc

SEQ ID NO: 96502 - DNA, 244 bp, Heterodera glycines; identical to SEQ ID NO: 59554

SEQ ID NO: 96503 - DNA, 360 bp, Heterodera glycines
  unsure (1)..(360): unsure at all n locations
agctcgccgcggtggcggccgcnctagctcacctgaatcccccgggctgcaggtatcaaaacgaggctgaaacgcccggaccgcctggacccagcactgaaacaccaggaccccaatcaagcacatcaacaccatctgagggaccaggaactccgagcactgaaacacccggaccgcctggacccagcactgagacacccggaccgcctggacccagcactgaaacacccggaccgcctggacccagcactgaaacacctggaccgcctggacccagcactgaaacgcccggaccgcctggacccagcttttttttatctggaccgcctggacccagcactgaaacacctggacccgaat

SEQ ID NO: 96504 - DNA, 486 bp, Heterodera glycines
gaagtgattttggccgctgaaactgtgtacgactgcgtgcacagctgctaccagcagaactgttcacgggccgcgttcactcacttccctcgcagcgtttgtttgatgcattttggaggcgaagtgccattggaccaaaagtgcgcggaggtcgaccgactcggcacgacttgggatttctcgtcggtgcccgaagtggtggaaattaaatgcgtgaaatgtgccggaagaaaggagtccgtcgaaaaaagcactgacaatgagcaaaacatcgcaaaaagacacttttccaacgacgaaaatgcggtgggacagcaggagacgacggcacggcacattctcaacccccaggggctcactttgaaatgcgatggtcgcgtggaattcgtggcttcgcccgttgccaatttgcacccgctgaacatcaccaacgatgtgccagccgacacagcagccgattgtgcacgaaagtgttttgaggcgatt

SEQ ID NO: 96505 - DNA, 487 bp, Heterodera glycines
tggagctccccgcggtggcggccgctctaccaactagtggatcccccgggctgcaggaattcggcacgaggctcatttcgggtgcttaaatagcggcgcgtggggaaggtcgttgtcaaccgcagatactcattcccttcccacccatccatcgacgccgcacaaaatcatcgtccgctgcttggtgacatacgcgcgtccgacgggtgagaaaacacccaagaagtggcatcgtcttcgagtgcgtcggacccgacaacacaattaatcatttcatcactgaattctgtcagaaaaacaaatgaaggcacagtggaaaatgcgacgaaaaagacagacaacaaagaattgagcaccgacgaggatgagcagcaaaatgtggcgagcacttcgacgccggaggacggagaattttcaaaaatcagtcgtattcgaaagcgccgctacagtcaggcacgaatacagccgacgagagtgaaaaaagtaa

SEQ ID NO: 96506 - DNA, 510 bp, Heterodera glycines
gttgtcaagcgcagttactcattcccttcccacccatccatcgacgccgcacaaaatcatctgtccgctgcttggtgacatacgcgcgtccgacggcacccaagaagcggcatcgtcttcgagtgcgtcggacccgacaacacaattaatcatttcatcactgaattctgtcagaaaaacaaatgaaggcacagtggaaaatgcgacgaaaaagactgacaacaaagaattgagcaccgacgaggatgagcagcaaaatgtggcgagcacttcgacgccggaggacggagaattttcaaaaatcagtcgtattcgaaagcgccgctacagtcaggcacgaatacagccgacgagagtgaaaaaagtaatgcaaagtgacgaagacatcggcagaatggtggccagtgtgccggtggctatcggcagtgccatggaagtttttgcggagaaattgttgctcgcagcggccgaaagtgtccaacacagttcaaccaaaacgctctctccaat

SEQ ID NO: 96507 - DNA, 404 bp, Heterodera glycines
caatcacttagattaaaagaaaactcttagaataataagaattgggcaaaatgttaggcctcggatgggaatcgaacccactcgtgcaccctttccatgggcaagctctaccattgagctaccgaggcacatccgccctttcttttatggattatcaagcccgctttccacgttttaaccgcccagccagcttcttctttcagagctatcgaatgatactaagaatgtttaatttggatgcttctagaagaagttttgaagcgttaaagttgtcattctattttgtggtcatgtttatttttatgatcgtgtaaactgcaatagagccatttaattcaattaatcaagtgaatatcggcgcgactcgtgcggatcccttcgcgacggccaaattggacgcacga

SEQ ID NO: 96508 - DNA, 462 bp, Heterodera glycines
atttttacctcctcccctcaattgaaaaaagttttgatcacttataaccagatcgatactgatcacttcactgaaaactcagtgctttcgcctcagggaaaattgatcaatcactttgcccattcattcttcacattcggctgatcacaacggtgaaaagcgaacatttcccagcagattgtaatcattaaaaaacagctttataagcttcaaatgcctccccttcggaagcggtttaggaggaaaagccgtggctttgatgctcttcggatttatccacctctcgtgccttacctttatcctccctctttgcggcttagttagccttatcccctgtgttgtggcttaggttttatccccacttgtggcttagctttatcccgtccccctcctttatggcttacaattagctgtatcctccccgccccttcccactcatctccgtgtctaatgtccattaaa

SEQ ID NO: 96509 - DNA, 360 bp, Heterodera glycines
gactttgaattcgctgcttggcaaatgctttacctgctggtcaatccgcaaaaggtgtacaggaatttcatgtacagaaaaaaagccaaagatcaatgggcccgcgatgaccccgcctttctcctccttttggcactttctctgctcggctcgagtgttctgtttgcattagcgctcaatttgtccttttcttcgttctgcgcctttttcctttgggttgtgttcatcgattgcatcggaattggcattgccattgcaaccgcactttggttcatttcaaatcgctttttgcgtcggacgagggattgcgacgtggtcgagtgggcctattgcttcgatgtccatttgaatgcttttttc

SEQ ID NO: 96510 - DNA, 462 bp, Heterodera glycines
aattgttcgccattttaataagctgagtcattaatattcaaaatgttttttaaatgccattttaatgaaaaatggaatggttttcttgcgaaaaaaagtccaaacaaatgcattcatataattaaatcagtctttacaaaagcaaaaagctttaaattcaacaaaaactgaataaaatttgaaaaaattctacattttcttatgaaatgataggagcattttttcgagaatataattctcgcgagatcggacggccggctgaatcaataaattgcgcacaaatttattgcatgaatggggtgcgagttgaggagcattttggggatgggtgaatttggtgctgatgttaagtgaataaatacggaaaattgaacgatgaattattttattggtgaagtgtagggagaagaagtgcagcagctgtcggcggacggacttttttggaagttgtaacaattataa

SEQ ID NO: 96511 - DNA, 435 bp, Heterodera glycines
gtgttaaaaggctttaataaagcggagacataaagaaaggcccacaaaaagaaaggcgaattgaattttaattaaaaaaatattttatgtaattaaggtccgtgtaaattaattacactaattagaattactctaaataggccttgaaaattattttctgtgtcgttgttttatttatttatttttatattttaaattacttttattgcactttcccccattttattcacatacccaagtgttttccattcagtgtgtaagtgattcggccgccaactcggttaacaccacagccaacaatgtcaccgacatccaacgagggtgtgccatcaatggcactgctggcaccatcgcgggtgctgccagctgccgatgtgctctgcccactcgtgccagccgaaaataggtcgtcataattaagtgcttaaattttgc

SEQ ID NO: 96512 - DNA, 477 bp, Heterodera glycines
gacggtttcgctcaatgctaatcagctaattgttcactaattaccccaaataacaaaactgtctgcttctcccaacaatggccaccaaatgccttccgctcgaactgttgttcgaaattgtgcctttcatccctgccgaaaatgccgtcccgaatgtgctctcgtcctgtcagctgctgtacaactttttgctgccacgtgtcatcaaatggaaagagacaatgaaaaaaatgataaaagagcttcgagatgaagtgttcggaaagatcgacgagcttcgagatgaagtacgggaccgcttcgcacttatcgaggaccgcttgacacttgtcgaaggggaaatacacgcaatgaaaaaccaatttgaggggcacaccatcaatcaaagcgctggtcaaatggaaggaggaggggcaccgacgggcaatgaagaatatctgccgctgccgccacagatgccgcttcagtccggccact

SEQ ID NO: 96513 - DNA, 501 bp, Heterodera glycines
tggactctctttttaataatttattcaaataaaaatcaaagcgatggtgaccaatgctcagaataggcccaaagtgttcatcgttggggtcgggatgaccaaattctacaagcccaaatcgtcgggaaaagattaccccgagttggtgagagaggcagccaccgaggcgttggaggatgccggactcaaatacgatcaaatcgaacaggcgacggcttcgtatatgtacgggggctcgtgctgcggacaaagggcactgtacgaaatgggactgacgggcattccgattttcaatctgaacaatgcttgtgccagtggttcttccggcattttcctctgcaagcaaatcatcgaaagtggcaatgtcgatctgatgttggccgttgggtttgagaaaatgaatccgggcagtttggaggcgacgcagggaatggagggggacagggcactgccggtggacaaacacatccagctaatggccgacacttacggcttacaagc

SEQ ID NO: 96514 - DNA, 461 bp, Heterodera glycines
cttcgaaagctgtgttcaagtgttgaagatggaggagaaggtaaattcaatggaaaaaagcgaatggtcgaacgaatggaaggcactcacacaaatagagcccgaacagtacaatcgatacttatactttttacgcactttttcgaaaaccagaattcgctttacagcttttcccacggccctagtctctgggtcttgaatgaattttggaaaatgatgcaaaagacctagagttctgttaaaaaacaagaattttgtctggaattctgtccgggtcccaggaccgtcacaggatttcggctttgggaaatacggggtgatgacgaccttttttcccatttttatgcggcgcgctttttcaataattttttggggaatagtgggtttttgcatggacacacccattaagattgtcaatagcagcagcaaagaggttgtccgtcttgagtacgtgttgccgt

SEQ ID NO: 96515 - DNA, 354 bp, Heterodera glycines
atgacataagggtagaggctgaccacgtcaatgcacaaaatctcctccccttcggcacacacgtgatggagcttgaacggctccgtacgaccacccctcaacgcgtcgctgcgtgggtcaagcggacggggcacaaacacatgctcataccgccccctcagcgccgggtccctacgcagccgctccttccactcacaggcccacaccgtgtgcagctcacagccgtgttggtgctccagctcccacaaacgccgcaccgtccgctcgtacagatcctccgccgtccgaccggcggccaaccgttgttgccggttggggaagcactcaacacatcctagcaataaatttggatac

SEQ ID NO: 96516 - DNA, 683 bp, Heterodera glycines
ggcttttttgcttgccgaatgaggcttttgaaaattttcatctgcgagccctgggcatatatatacataattatttacacaatctgttgaatatcgttgttgtatgcataatatcgtccatctgattggtcagtcagttcggcactttcttctcaggccgtcttggtgtggctgccgccctccggtgtccacaattccatgttttccctcatcatgcgcaagttgagcgaggcgtcatcagccaatggtaccgtcaatgtggcaatctccgcctgggccaagtcaattgcctaaaaatccggggagaatttagccacattatacaatgaaagaaaaagcatgatgaaaatcatcaaattggtcccactttttgggccaatttgcgcgcctcgtccaccgattttaagatttcgaagttgaacacggagaagttgagtgcaaggccaagacgagtcggattgatcgctgcaattttggaggtggcgatgtccatggcttcttgcaaaagaacaaacttcgcgtgctttcccgacccactgaactcgtaagtttggggcgctgatttttggcagacaatacattcaacggtgacccgaacggcgtgatgccgaaacaccttgtgtggctcgactttgttcgtttggtgtgccaaaatagatgcgtttgtgcatatgtaatttgtc

SEQ ID NO: 96517 - DNA, 856 bp, Heterodera glycines
ctgtcgacgattccaaggtgtttaaagtggatgagttggattttttggccacaaacactgacagagccatccaaagaatccgttcttttcaacaaaaacatgcgccgttgctgatgaaacatggagcaaaattggacgcaattgtcactgatttggtgctgcaaccgatggaagaaaaaatggagacggccgaagccgaagttaggcatcaaacagaagatatagctgtggcctcctccacttgtgagcccgagctttcagtccatgcccaatttcttttgactgacacattaaacggtctgaaaagaacgcttgacgacatggcccaggagcacaagcatcccatccatcatctcatctcgcgttgtgggaaggctatcgacactcgcttcttctccgatttgagccgtttgttgaaaaatgaaaaggaaattgagacggactctgacaatttgcggcatgcaaatcgtcttattctcgaacatttgatgggacttggacggaccgaagtcgccgatgtcttcctccaggagtccgcaatgtcgtctttggaagtcccagacatagacaattttgaaaccttgagaaacatcatggactccttcaaacggcaagactatttgccaacaattcaatggatgaaagcgaatcgaggcgaagacaacgaccgacacgacttgctgtttcgccttcaatgccagcatgtcatccgattgttggaaacaaatggtaaaagacaagctttgggttatgtgaaggaaatgcaagacgaagagaaggaaaagtacaaagaagaattgaaacatttgatgttcgtcgtgatgacccacccgcagaagggcccccacgactattt

SEQ ID NO: 96518 - DNA, 483 bp, Heterodera glycines
taatgtttttactgttgagaataaccataataattttttctgtcttaatttcttggtttttggctccattctaattccgtagtgtggtgatttcaaatgaatttatataaataatatttagagtaatataaattttaattaaaattttaaaattaattattttaaaaatttatttaaaaatatgttttaaataattcatttgtgctctcgacattatttgatatttaattgcgaccgaatccagacctataataaaaaccgaagggccaagaatccaaagttgaacacgatagtgatttcggtcgcacgtatcaacaaaaatggttcttcaaaaataattcggatttccataatcatggacggcaaaacgatcaaattcattgccgacagtggatcagacatcaatattattgatgaaatcgcatacaaatgcatcggatccccgacgctaggaaaaagcgacgaagagggcatttttttcga

SEQ ID NO: 96519 - DNA, 518 bp, Heterodera glycines
acgaatttgattgagccgacccggcttagacgaattcgttgagccaaactggcttttacgaattcggagagccaacccggcttttgatgtctagcagtttctttgactgcttttagaatgtgccgactcggcttcaaaacaattcacagccaatcccggcttttcggtgaatttgttttgccgtctcggctttttgctttgtcctgaaaacaaaatttgatgttttttctcacccgaagatgtagagcaggtcctttgctgattgcgccaaattgttgtgtatttactacaacaataaaaatgtttggtttttaaccaaaacaaatgttgtcaaataataaataaattatttatttaacaaataaatatgggaggaggacagcagagaataaataataaaataaaataatgaaatggtggaatgaatgggagaatgcccggagtgagggaaaaggagacatatttatggggctggtcaaggggcggggagagagacaataagagagggagtgaaaggg

SEQ ID NO: 96520 - DNA, 479 bp, Heterodera glycines
caaaagtggaatggacgtatgggcggacattgcgaaagcggattttatggatgaacgattttcgagggttattacggctaataaggcgtacaacctcttccagaattccattgctgaacttgatgaacgttcgttccgggctcaggcggccattctcaacggactgttgacgcatcacttggatttcatccatggcaaatgtgtggatttgcgcaagattgggcttttgttggaccattttgaccgattagtcctccgttcggaatgtcttttggcccaaaatgcgaacatttcgttgctccgttgtctggtcaagtgctctttctattgtcgtttcgctgatttcttactctgttcttccatttaccaacaatccttcaacgaattccgactgcttgcgatggcaatgttttgctacggtttggcattgaaatgggcatgccataaatcggtcaaaggaagtgatggagcggatagcg

SEQ ID NO: 96521 - DNA, 475 bp, Heterodera glycines
gtcatcgaaaaacaaagcgaccctttgcctatctcacgcaacacttccgtcgcaattgtacttagctatgacctcatggtttccaaggccaaacaattgaaaagcaattccatttatgttgttgtttttgatgaatgtcatttgctgaaggagcagacaacgcagcggacaaaagtcgcatttgaactttcgaaaattgccaatcgcgtcattcttctcagcggcacaccggcgctgtcaaggcccagtgaattgttcacgcaagtccgaatgattgacccgaaaatatttcctagttgggtgaaatatgccgtgcgttactgcggaggaaaaaagggacgttttgggtttgaggcgaaaggaaggtgcgcactttgtctaaccccgacgaattaaaaactgtgatggataaaattatgataaggcgtttgaaaaaggatgtgctggacgatttgcccgagaagagacgtgaagt

SEQ ID NO: 96522 - DNA, 280 bp, Heterodera glycines
aatgaataaaaataaatcaaatgttaaaaattcacaggtgattaaaatatagtgtatatgtggcacagaaaatttcctactcagaactcattgcttttagtaaacccctgaattcctttgccttattaatttgcacctaaattcgcatttttggagctcaggttcgaatccaacataaaaataaatatattttaagtaatctataatgtaactaaatcatttaaaaagccattttttacactaaaaaatgtatgatagtttttctttagtagaaatgagc

SEQ ID NO: 96523 - DNA, 402 bp, Heterodera glycines
tgtgtgtgcgctaaataatatgttgttttttgtttttgttgttgctgctttatgacatacatattgagattaattaaaggaaaaagtcaaaattatcgattgatcgctgctatggttaataatcaataaattatcgatcgattgattggcgctcatctgtcagttcatgaacattgagtgcacaaactgttcaaaatcgagcgcattttcaatggtacggccggacgccgcgtccacgtagggcttcatgcgctgtttgcagtattgcgcttgttcctgggtcaaattcgcgaacagttcttccgcgaacacataggggcggtactctttgctgagtgcgcggaatgccatctcaatttcgtcactggaccgcacattctccgtctccttgttgatcatgaa

SEQ ID NO: 96524 - DNA, 292 bp, Heterodera glycines
acataaaattgtaaaaaagaaaaatatgcgcatacatttttccaaattgttgatgaggataaaattttcaaaatttttcttcaattacgttaaatttcagtgaaagccctctcaaaataaaccaaaatttaaattttgctatcattcaatgcccctaaatgttttctatttttctataaaatttatttcataaaattcgttactttgggaatatttgtgtcagtatttgaatgggacgcggaaaatgccatcgaataattcaagtgccattgaacgcagtaaaataagaaag

SEQ ID NO: 96525 - DNA, 479 bp, Heterodera glycines
caccggcgccgaaacgccagcgccgaaacgcgtgggtccccggtggaagcccctttttcgaaaattttttgagattttaaaaagccaaaaaataagttataaggttttaaaaatcgctctgatcatgaatttgactgttgacttaaatgataatgctctgagataacgatggggatgcggagttgctataaaagcgcgtgatggccaacacattcccatcattcgcttttacatatttttttgttgaattgccaacaacttcttctatcgtatggcttattcattgtctcttcaaccgtggccttcgtctgcttctgcttcttctgttttgtcagtgttcgtcttcgtcctgctcttcgcccgttgctgctcccaatcggcggatgccaacagcagtttttcattgcgcggctttgcctgtgcgaagaaagatgccgcagtgcacggcggcacgttcactgttgttggagagaagcggc

SEQ ID NO: 96526 - DNA, 483 bp, Heterodera glycines
tttctggcactgtttgcgccgattgcggtgcctcttgtccgagttgggcttcgctgaatcacggcgtgctgatctgctccgattgttgttttgtacatcgaaatttgggccgtcacttcagccaagtccgttcactgacaaaaggcgtttggcacgacaaacaattggctctgctccaattgctctgtcgtaatggcgccaacaatgtttgggagcattcgctgatcgattcgttggggggcgcaggtcgggcgaagaagaagcccgtctccaatgatccgataattcccaaaaaggaggcgtttattacggcgaaatatgcgcaattggcattcgccatcagaccggccaaggacgaattcaatgtggacgatttgaatcgccagctttggtcgtgtgttcgcactgcgcacgttgaaaccgcgttgaggcttttggcgcttggcgcgtgtccaaattacgcggacactgagaagggaaaca

SEQ ID NO: 96527 - DNA, 481 bp, Heterodera glycines
aattgtgcgaggccatgggaacgaatgttcatctgcggaggaagccgactgctgggaaattggaggccggaaaaggcgttggaaatggccagagaaacggaggacggcgaagagaatcagtcgcagcagaaaacgaacagcggaagaaatcagtcgtcttcgtccgtttggcgtgcttccattgagttgggccctgaggacagtcagcgtcttctgcgctttcgctttttcctcggcttccctctccaaatcgacccttctaattgccaatcgtccctttctttgctcgtcgttcgctgggaagcgaaaatgtccccgcgttgcattttgccatcgattgagtccaattctatgggcgaatgtaacaaaggagtgaccagcgaatttggcagttacggcggccgcgatcgattgataatggacgggtggctgcacggaagggaacaacgtcaaattttcttgcggatgttcggcaccgcac

SEQ ID NO: 96528 - DNA, 217 bp, Heterodera glycines
tataatttttgaagatgggcatttgtcaaagcattgaagaaaaagctatggaccttaaaacgaagcaaatagaccgagaacttattcaagagcatcttgacgcacaaaagattgtcaaactattattgcttggtgctggcgagtgcggtaaaagcacaatattgaagcaaatgcggttattttttaaataattgctttattgaagataaattaagtg

SEQ ID NO: 96529 - DNA, 170 bp, Heterodera glycines
aaagccaaattaaagtgaaatgcaataatgtaagaccaattgggtttcgtctgagcagctctgaaagctttttccgctccaaaaaataatcaagccaattggcggtcggttcgtgttgcagaaaattgagttgcacatccatcgaaatgattaacaagaattggatagat

SEQ ID NO: 96530 - DNA, 497 bp, Heterodera glycines
gtttgagaaatttttaaaactaaaaaattaaaaaaaaataatggaacaattggacagtacgctgaatgccgctaaaaatgagacggaacgattggctgaacagttgaaaaaaagtgcagaacaggcccaaaaagaagtgcgtgaacggacactgcaccaggacccgtatttgcgcttggtttaccaactccaaacagcccatctgatcgcattgggcattgaggtgctcactctgtacttgggatggcgcgacgtgaactttgtttggctgctgttgccgcttttgttttgcgctggcgcaatttggattgtctctcagcgatggtaccatcagatggacggacgttcggactttaacaaagtgctgagcgctgacaaaatgccagttcgtgcaaaggccgcttcatgtcttgttggcggctttgttctgtctctgcttgcccagtggaccgctccgacaatgggcagcacatcgatcggactgcttttcagtctct

SEQ ID NO: 96531 - DNA, 480 bp, Heterodera glycines
gcggtccaaatcttttacatttacatttgtgcagcaatcaccatcaaatttgtctaccaggaatcccgtcgctatttgtgtccaaatgtcaacagatgtgaacttggccccctgtgaactttcattcgctgttgaccaatttgatgacccattaacgcggcaagcaatcagcggtgcagtcgatcaagcgcggacattgtttgcacagcgacacacggctatcccgaacattgtcgacacccaccacattcttgtgtcgcgttctccgcatggctttacagaagggtcttcggtgtctgcgggttcatttgccgcctttttttcactcatgatcaaccgttgctttcgaatggacgacgtggccttttcgggacaaatcggactcgaaagacaagtgcagtatgtccagcaaaattgtggagaaagttgtaggcatgagtgacttcgggttacgcaaggtcatcgtgcctgacggtaatc

SEQ ID NO: 96532 - DNA, 459 bp, Heterodera glycines
caattgatgaaactataaaatttcccgtctttcattgctgcaatggatctcatcaggaatctttccaccaatcgtttggtcaaaaagcgccgaatgagccattaaaaaaacgcgattcttctgtagaacttctcaatgacaataattcatttttcaaaatacgcgattcttcggcagaatttcacaatgatgtaaagctgctcggagttggaggacagtctcatcaagggcctttccacgagtttatcgatgacgattttctattcgagaaggcggagcaacacccaccaattgtcgttgccaacccatcagcaccgaatggcccattcaaaatacgcgattcttcggcagaatttcacaatgatgtaaacctgctcggagttggaggacaaaaggatgtgttcagaaaattgaaggacgtgtttggcttttcctatttccgcttcaagcaaaagccgg

SEQ ID NO: 96533 - DNA, 542 bp, Heterodera glycines
gagctccccgcggtggcggccgctctccaactagtggatcccccgggctgcaggaattcggcacgaggcaattaagaaggaatttcgcgttgggactgctaatctttagtctcaccatttttttttcttcctccaatcattaataattcaaacaactgatcagttcctgatcaatcattgcttcaaaatgtccgacattgctggtgcttccagcagcgctttttctgccgatgcttcttcaacaaagaaaaagggcgattttttgtttctcgctgagttgggcgaaggctcctattcaaccgtttatttggcttcagagcgccaaaccagtcgaaaatttgcagtgaaaatgtgtctcaagaagaaaatcatcaaagaaaaaaaggtgcagcaaattttccgtgaacgtgacattctccgacttttgtccacgcccgcaaatgcgtgcccatttgttgtccatttgttttgcacatttcaagacgatgagtcgctgttttttgtgctttcctatgcgcccaaaaaagatcttatggcccggc

SEQ ID NO: 96534 - DNA, 844 bp, Heterodera glycines
taagcggaacagtataagggtaacaataacaattaaaagtgagaaagcgacatttctgaaaatttacgaaaagaatcgccatttttgactgccccaatttgtactctggccccttacccaaccttctccaattgtttttggtttttcataatttcccgctcatattcatcctccgctcgtctgttgcgcaaaacaaggcccaacaaattgtccaaataatgaatgagtttattacgtcgaaattgactttcaccgacgaaaggataaatcaaagcagtttggttttccaaaataagtttacaaacgattgtgttaaatgggaaatggtcgcgcagattcaaatggtccatccaaaagacagcctttggcacttcgttctccaaaagggttttaatttgagcaatcgcaacttcaaccatttccctgtccttcagatggaatacggaactgatcgcttcgatgtatttggttttaagtcggaaacacgggacgagcgcatccaagagaagagtcttatcaatgtgaaggtcaaaagggatttgttggccttgcgcgattccgagtttctgaaattcgtaaaatgcgagcagagcgagtttgacgagcgaaatgtccaattgctcagtggtaagtgacttcacatatttgacaacgttcaaaaagccttcaaacacatccgaggaatcttccgactcaaaatacattcgcatcgttctttgaattatgtcaaatttctccatgtcgaaggctctattaatttcttcatgggtttttttaattttccgaacactttcaaggaaagatatttttgtgtccaaaatctcttcagcggaaataagggcgc

SEQ ID NO: 96535 - DNA, 366 bp, Heterodera glycines
ggtaaaccgcccgcgcaaccaaacgcacctgtctgtactgctggtttctggcctcggttgtggtccattccagcagcgggtcatgcgcaaaagcgtgcagaacggtgcggagcatgcgactctcggcccgcattacctgttgggagtgggaagcgtgtgcatcaattagacaatgattaacggatgaatccatccatccatgttcccaccttcatacgccttttcacacgactttcggaatgtaccctccacaccggtggcgccaaatccgtccaccatgttgcgggtgagacggaacggcacaatctgaaattgacaaacgagaaggagtgtgattttttgtattagaattttatcgcaaaattt

SEQ ID NO: 96536 - DNA, 548 bp, Heterodera glycines
agaacaaataatattttcgattcttaaatatgtttcgtcgttttatttcatccgctccaaatgttgcaaaagttttcggcggagttggactgtccacagttgtggccgctgcaattcccgacgttgaattgaagaagaagccggactggtaccaggagactgtgcaccgcctggagaaaacgctcaagaaacttagcacatatgcttacatcgagaacagtgacattttggaagacgcaaaggacattttgatgcgttgtgagaatgtgaataattgcgatatttcctggcgtctcggtcgcgctctgtcagaaaagggtgacttgttttctgttgttgactccgagaatcgaatcgaattcttcgctaaggccatcccccatttccaaaaagcgtttactctcgagccgaagaacggaagcgcaggggcacacaaatggtacgccatcactctgaagcgactgaggctgatcacttcgcagcacccttatgtgaagaacgcgaacaaagaagtgattgaacacttggaaaaggcccaccaaatcgac

SEQ ID NO: 96537 - DNA, 584 bp, Heterodera glycines
aaatcaaaaaaatttgagttttcatccccaaaacgatgtcggtggtggcggctttctctcgtcgtattttttgcccactcataaaacgatcatttacaaccatttcacctgtaagaaaattcgatgctaaaatttgaatgttttctcttcaggcaattgctgtgcctgaaattgctaaaaaattgaaatgcacattaattccaggcgatggtgttggacctgatcaatcctatgccgtccaagacattgtcaaggcgaccggaataccaattgagtttgaggaagtctttctcagcgaagtgtactactcgagatcggccagcattgaagatgtggtcgactcgattgcccggaacaattgtgtcgcattgaagggggccatccagtccagccttgacgacaaaacggatgggttgaacacgcagctgcgcaaacggctggacctgttcgccaatgttgtgcacatcaaagccctggaaggcatccgaacacggcacaacaaaatgttggactttgtcatcattcgcgagcaaacggagggcgaatattcgcgcatggagcacgagttggtgccaggtgtaatt

SEQ ID NO: 96538 - DNA, 468 bp, Heterodera glycines
aaatgcatataattaacaactcaatttggctcaaatttctcatcaccgcatttctgttcaaaattgcttgctctaaatttggttcaagtgaaaataaaggcttctttttttattttggttatggtagcaacttgcttgaagaacgtatccatgtacaggtaaaaggtgctacttttgtggcaattggagcgctgaagggttacaggctggcatttgttgatttcgaagaaccgaatcgttggcacagtgcagccgcaacaattgagcagaagcaaggctcacttgtttggggatgcatttggaaagtgccaaattcatttgcggacgaactggataaacaggagaccaaatacaagcgaattgatgttactgtttttccacgcccaagtacaaatgaacgtttcaatttaaatatgcgattgttttcaaattttgttataaaatgccgtacctatcaatatgagaggc

SEQ ID NO: 96539 - DNA, 566 bp, Heterodera glycines
aagctggagctccccgcggtggcggccgccctacccacgtggatcccccgggctgcagttacaaaaacgagggattgtttatgttcttcactatttgctccttttcccgctttcccttctcctcccatttgcttttcttcgctcccttctcttcccgtgcctttgtcaattccttctctctccggactcacaattgtggtgagcttcgtttgtctgatgtcggcagccgagtgaaactcttcggatggatggccgccaaacggatgaacaaattcgtcctcctccgcgactcctatggttcagtgcaaacagtgttgccaaaagcgctcttttcgtcgctcaaaaataccaactttgaatctgccctttgccttgagggagtggtggcggacagaggcaaagaaaggaacgacaaaatgcccaccggcgacatcgaagtggtcgtcgacggacttgaagtgctcaatccttccgatgcgccgttgcccgtcgatgaatcgtccaacgaatacacgagaataacccatcgttacttggatttgcgttcggagaaaatgcaacgggca

SEQ ID NO: 96540 - DNA, 663 bp, Heterodera glycines
gccaaacggaccttgcgctgctcatttattgaatttggctgtacaggaggcgttgaagagagatgaatcaatcagcagtttattggccaaaactcgtcatattgttggccgtttcaagcacagtaacactgccttcagcgaattgaaaaaaattcaaaaattactcgatgccccttctcatactcttttgcagatggtatgtgtccggtggaacagtgcgcttacaatgtgtgagaggctgatagaacaaagggcggcaatcacacaatatgcagtcgacaacaacgaattcgagcttttattgaagaatgatgagtgggagcaaattgaagagctggttggggtattgaaatgtgctgaagaagcaacaaaaaggttcaccgcagagccaatttcatttgtcattcctcaagcaagagcattacatgatgagttgtacgaaatgaaaattgttaaccggactgtggagacaatcagaacaaccctttattttgcggtcgagcgacgcttttttgggctagcgaatttgaaggaatatgcgctagcgactttttttgatgtgcgattcaaggacaaagtgctgactgaaaattccgcaacttttcgcgctcgagtcactgtctggatcaaaaatgaattgaaggaatgggaaaatgataatga

SEQ ID NO: 96541 - DNA, 467 bp, Heterodera glycines
gaggcaaaaccgataatttaaaaattaaatatccaaaaataatattattgtatatattctccatcatttttttagaattattgtaaagctttcttctcatcaaaacattgcatgccttcccttttttcagacttatgaccgggaaaattgcattttaacgccagccccttgcacaatttgcgcatacgccgcgacccatggccaacttccggcaaaacttttcgatttcaccaaagaagcggtcgccgtgttggagtccattcggttcatcaacaattccggcgtcgcatacttggccgaattgttcagagggcaattgggcaaaaaggcagtgaagcgaaaagtacggaagcgcaagcaatccaccgacaataaatgaccatgtctttaggtggatgacaatggacacggacgactgccaattttcgcaatgggcagagggttgagtgaacaggtggaaaattcgt

SEQ ID NO: 96542 - DNA, 420 bp, Heterodera glycines
cattgattttccttgatattcttccatcatttgggctgagacaatgatggaaatgacaattctcgggaatcggattagcattaccgcggacggcgccaaagtgtcgccatttggcagcaaaatggacatgggggactattatgttgaaaataacaagctgagaaaaacacggggattgggctgggtaatggccgcactttttgtggtcgccgacatggcaggcggaggcattgtggcattgccaacggcggtggtccgatgccagttcttttccgggttgctcattctgttgtgcatggcgatcatctccaccttttccgcagttatgctgggccaatgttgggaaatattattgcgccgtttcccggtttaccgtactcactgtcgaaaaccgtacgctgaaattggccttaaggccct

SEQ ID NO: 96543 - DNA, 476 bp, Heterodera glycines
gccaaggggttgcagccttggcgcagtacgacaacaacaacgaccacgacaacaacggtgacaacgacaccgattccgcagcgaccgccggcacccgtcgtcacccctccggcggcgccgccacgtgccgttctgcccgatttgccaccacaaaccgtgccaacaaatgcgagattgcaaaactttggcccatcggcgaatgagttgcagatgaaccgacgggtggacagctccacagacaacgatggacaatcagcatcgacactcagacaggcaaacaaaggggggacgagaaggggcgggacgaaaagacaggataaagcaaatagggcacttcacatgcgattggcacggttacgccaaagtcagctggcagcaaagcgcgaatttgaacggaacatgcaaatgaaagcaaataatgccgcccaatcaccggcatcgaattgcttcgacagagctccatggtgttccggatg

SEQ ID NO: 96544 - DNA, 424 bp, Heterodera glycines
gtttctcttttcttattgtcaattaatgctcagcgatacggtagccacagttatgggagcggaacatacggaacaaattattggagcagcagttacggtaactcaagaacacagcccagctatggatacggtgggcaacagagcagatacggtacccatgaacaaaacggtggcgaaaatggacaattcgagcgacaaaacgcatggagaggaggaggaggacaatggggacagaatcagcagaattggggacagccgcagcagcagcagggagcaacagcagctgtagaaggaggatggggacgacgacagcagcagcaattcccctcccccgcgcccccaaaaacgcaaaacaattgggacaattccgacaatttcgccccttcgaccgcacaaaatcgcggaaaattgcgcgtcgaccttc

SEQ ID NO: 96545 - DNA, 613 bp, Heterodera glycines
ggtcggccaccaaagggattcgttccgcgtcggttggtgcgaaagttgtgccgactttggtgtgccgccctttgtgtgcacgactgtcgctacaccgcgatcaccggattgtacgtggagaccgccggcttcctgggatcggcggggcctccgctcgcgcaaatgcggtacagaccgccaaccaaatggcaaagatcggcgccgggcaggcggcagaacagcagcggcgatgccgtcggccgtggattggccaatgttgcaatttttgacaacccttggccagcctggcccccactggaggcgcccgtgggcgcaaatgccggcacgccgttgcctcgggcagcaactgccgaaaactaaatatggaacaactctcagcggtacagcccgaaaataaaattgaaattgaacaaccaaacgaaggagacgctgacggagaacagcaaccggcggaaccgattcaattgaccgatgaggaaagagaaattttgactgtaaaggaggccagtagagctgttgtttcgcatatgtccgagtggagtcacccaaccgagatgacgtatacaaatgaaggaaaaggcgaaacaatgaggaaaatgcggagcaaaatttg

SEQ ID NO: 96546 - DNA, 609 bp, Heterodera glycines
aacttcttaacttaactcatccaccgttaaccctccctaactaattgcccacccccctgccccgcccctcttaatgcttaaccacatttacaacattaacaccaccaccgccgccaccgcgcagcagccgcgcaagcgcggcaccaccggcacaacaaagcacggcacaatgccggccccaacaacgacaaaggcgagcggcagcagtgaacgcggaggcggcacgcaatttcaccagttcacgaatgggcgacaggttaccactggccaaagacggaaaggcgccacaggaaatgaggcacgcgaccgtaccctggccagtcagccgcctttgctgccaccgctcacttccgtctacgatttcaaagatgtcgttggcatcggttccggtgcgtttgccaacgttttccgcgcccgtgaattgataacggcggcgccggccgaacgctaccgccacgtggcactcaaacggattaatctgtcagccatcgaaaaagagaaccagctgatgtacgaatcggtgctgaacgaggtggacattttcaagtcgctttcccacaccaacattgtcaaatgcttctactcattcaccgaaatttcgccccattc

SEQ ID NO: 96547 - DNA, 528 bp, Heterodera glycines
ccacaaaagccaaccgacgctgttgccgcgggcgaatttgctgcgtttctcccgcgaaatcgcggaatggaacgagcgatgcttccccggatggatcaatcggcgcctgcccgccagtgtcacggaggacttcaaccggtgccgcctctgcggtttggacgtacggcaaacatcgcggcacattgcggagtattttcctgaacatcccgctgcaccagtgtccattgtgcgagtacggcgcggccgaggcacggcttgtgcaacgacacatgcgcaacaatcacacgctgaaggaatgcgagggcatggaacccatcgccaacgtggagaagcacagagccgaattctcggagttgcacaaccaatgcttcccgggcagaccaaaacggttgtccaacattacaattgcggacgaaagcagaagggcaaagtgccgaggatgtgctcagactatcagtaagaagcgtcgtctgctgcatttgctggagaagcatctgaagaagcccatctacaagtgcaagtactgct

SEQ ID NO: 96548 - DNA, 445 bp, Heterodera glycines
tgacgctgctcgtgcgctaatggaccgttacccgccgactgtcatttgcgagtttcgagaagagtaccttcgcatctgcgacaggcataagcggctaattgcggtagaacggctgcaaaaacggatggagatggaacccatcagaagcggtggtgcccgtcgttcttctgcctttctcctccctttgctccaaagggacaacatttacgcgttggctggtgcgggtgccgtcgctttgctcagcgcagcaattgtccattattggacctactgattttgggacggtggagactcaacaacatacaaaacaacacatgcacacatacattccacacagaatatattacccatcacatatatataaatacatatttatttctcattttctcaattggaatgatttatgtaaaattaacaacaccatttaatgtaatatgtgaatgaa

SEQ ID NO: 96549 - DNA, 790 bp, Heterodera glycines
caccacttttctgtgctttttgtcctctcttttttctcttttcccttatttttcgccgtttttgtttcatcagcagcggaacaaaatgcgaatcttcaaaagcaacaacaattgttcaccattgagggcaaaacggttgtcaatgccgaattgcagcggataaagccaaattggaaggcctttgaagaggatatttttggactacggaaaattcgttgggtttatcagacaggacggctctttcattgttcccgacgtgccttccggctcctacattctcgaggtggccagtggcgactttcaattcgagtccgtccgtgtggacatcacaaattcgggcaaaatccgtgcccgtcgtctcaacttggtccaaccgaatgtcgtctccacattgccttaccctgtcaaattaaccgcacggcatccgatgagatatttccgagtgcgcgaagaatggcgtgtcactgacgtgttgatgaacccgatgatgctgatgatgggcgccgcatttatcctcgttgtgttgatgcccaaattagccgctcaagacccgaacgtgcaaaaggaaatgcaaaatatgcagctgccaaaggttgacatgccagacatggccgacatgctggctaacatttggtcatctggtagcaacaagaaaggcagccgtaaacagatttcgtcgggccagagcacgaaacgtgtcacacgatgaatcatgacaaatcacaaagaccagccaatcatttccttttggaaattttattttgtagtcagtgcataaattttttaaatt

SEQ ID NO: 96550 - DNA, 470 bp, Heterodera glycines
gtacatttatttttgttgcttcgatgtcgccaaaatcgtctcatgtcaattacgatcttctgccggaaatttctcacaccttccgcagccctgaaccccgaccatctgttctagtttctgacatgttttctgttttgtgtgcttcgccgcttatcatccttttccttttgtggcttcgtattggcatcaattttggaaaattcaagttttcgctcagtgctcttgggtttcatcttggcctgtgtgttttttttgggctctacgttttcttttggctcgagttgaacatgttccagacgttgaaatggctggctgttattggcgtgcccactttgttccttggaagtcgtctttccttttaaaaccatggctttaaagcttaacacacaattttttgggatatattgtatttcttaatttatatgttgggaaataatattatggttttttaaattccatttatcccccac

SEQ ID NO: 96551 - DNA, 576 bp, Heterodera glycines
tgcttttaatttacgcgtataaaatgaccttgcgcaatgatactccgatgcctccggacgaagaattgagagtgcctcatgagatttcgctgtcttcgccttggctaagggctgtggcggtttatatgggaatcgcctgcgagaaggaggccaaagagtttatgcttttgcgttccgaacgcgacaacgacccgcgcaaagcgttgccggtatgggcgcgcagtgactgcgtgcgctatcaattttttgcgcaaaatgcgccgcgagtgcggtgacgaaatccgcgactacgccaattgttttcacagagagtccggcagaatgcatttgcatcagtgtcgccgtgcacaatttcctatggatatttgcgctgacgaaaagctgggcgttcgtcgtccgatggtcggttacttcaacaaattgcatgtgcacgaaagcgctgtcccaccgccggaccctttggaaagacagaaattgtatcgcgattacaaagcggagggcggcaaattgttagaagagctcccggaggattggaagacggaccccaaatcagttcagaagtaccggaaacacttc

SEQ ID NO: 96552 - DNA, 611 bp, Heterodera glycines
cctcgtgccgaattcggcacgaggccaattaagcattttctagttttctattgacttttgcaataaattgaagccttctcatctgagatgtctgtgcctgaaactcattcgccaaccgttgagcaattgccaaaacttccaacggaattgcagtccgaagttgctcaacgggctgggctaaagcatgtgacgacgctggaaaagaatgtgctgccgactaaggaggatttggaggaggagcgcaagcacgagagcttcaagaagggcattcagaactttgacgcgctcaaattgcgccacgtggagacggaggacaaatgcatgttgccctcatcaaatgacattgccgtggagaagacgccacagctggccgcggagttcgaccagtccggactgaaacacgtggaaacgacggtgaagaccaacatcgaagtgattgacaaggcggaacaaaactaagccaatggcgtgacataaacaacagatgttttgaagacggatttatgacgattatttttggtgtcttgatttgctttctattttgtaccttctttatttggtgagctttacaaattccagagattatgagataaatcgcgttaattcaaaaa

SEQ ID NO: 96553 - DNA, 478 bp, Heterodera glycines
ggaacaccaggcggtgaacagaccattgacggagttgcggtgcattggtattctccgggggactacgataagctgacaaaagtgcacaatttgcggcccaacaaattcatttttgcctcggaagcgtgcacgggctatgaagtttttgagcacaaagttttgctgggcgattggtcccggggccgagcttatgcccgcgacattctcaacgatttgcgcaattgggtggtcggatggactgactggaatatgtgtttggatttggagggcgggcccaatttggcacggaattttgttgactctccgatcattgtgaatgccagtgctggcgagttctacaagcagccaatgttttatgcgatggcacattttagtcgctttgtcccgcgcgattcatcagtcattggctcctcactttttgtcgccaatggtggcgtgaacaaattgggcgagaaaaaagtggacaaatcagtggtgc

SEQ ID NO: 96554 - DNA, 342 bp, Heterodera glycines
ggctcgacctgaacagatacgacccgtacgagctgttggcccgctgccggcactttgtgcagcagagggacctgctgaacgcagtgcgggtggccaatctgatcagaggcaagtcggcccgcattttcagcgattggctcaaggacgccaaattccatctcgaagtgcgactgctggttgagctgctcttggcacattcccaggcttcgggaattaggacgacatattgaaaataggcggaaacgaaacaagaccagtttaatttgtccaaaaaatattgattggaatgataaagtttagacgacccatttcggacaacccgcaaagcccaccgacaaaaga

SEQ ID NO: 96555 - DNA, 633 bp, Heterodera glycines
ctgaaatggacgtgtcagttggagaagaatcgcctcatcagcaacggtttctggaagaatgtctgaatttgagtcagaaatttctgaaggagatgagtaaagacgaagagcagcaacagaatgtaataaatggcgaggcgaatgatggcaaatcggacgtggcaaaagagttgctgatttgccattcttcctctcccactgcatcgcctcaaccgagcggatgtttcttaacgtccgccaatgtcgtagcggaattggacagaattcgaagggaacagaacagaagcggggccggagaagcggacggacaaagcaccgccgcaacgacaccgaacgcatcgcgaaggccgagcaattcatccgctgccgcggtcagtggaagcgttgaagacgaattggccaaaatcaaagtggtcttacgacagcacgagaggaggatccgattgcttgaggaccaattggcggatgccaacatggccaatgcttatggaatatgaaaattaatacggacagaaatattgtgattgaagaaatgacgaaaggaaaatatttgaaaatttatagcaaacaaatgcaatttgttcatcacaaaaaatggaatatccgccagctttttgtaaatgagcttcaaat

SEQ ID NO: 96556 - DNA, 519 bp, Heterodera glycines
gcgtgcatttacacggcaactgctccgaatttgacttgccatcgacaggatcagagtctgatggaaattctccgctacaacatggaatatcgacaacaaattgagggttggtttgaaaatcaaagtgccgatcccaactttttcggcatttcttatgcccggttttgtttttcaaaaattccggtcccaaattactcattttttcccaataatttatgtatttttaaatcagacccatcatttttgacccaactgaaccctgcccacccgcgcagttcaaacagaccgttgcaatcgtcgggaatcagaggattttttgatttgctccgtggtaagcattttggcggttctcaaagtgaatggcttcaaagagttcaatgttgctgatgaacatcatcattatcttttgtttttattcattttcgtataaatttgggcataaatggaaaatcgttaaatgattgccaatttgggaaattaacatttaaataagattttttcattttgtctccatttgtt

SEQ ID NO: 96557 - DNA, 687 bp, Heterodera glycines
attatttaatattggctaaatatatttcttctattttaaattcaaaaatcatcaaatatattgggcgagaatgagggtcccgttctctcgcttttgcttgaatgtacagttttgttcggaaacgaataatgcgggatttccgcaggggattcccttaccgcgatttcttaattccattttccgcttctgcatacgtttttaatttattccagcttcttttcttgaaaagtagtcaatgaatttgcgcaagaagcctaaggtcgaaccaatagaagatgagattcctgagaatgagcagcaaataaacatctctacccgttcacataactcttcttataactctgatcgtgtcaatgaaaatgatttggttaaatcgctgtctcaatgtcttctggcaaacgtttctaaacgagggtttgttcgtgatgccgacattggagaaatgttctcagaccgaagagaacgcgagttgcgagcgaatgttctgaagaagagtgagaaattgctgatggatgttcttggataccgattagatcgagatgaggaagggaagcgtttttacctctcgacaaatttatgtaaaggcattgcaatggctatggagatatctgacgacacacaccgaggacttaacgaattcgcagatgaagatgcgtttgaggaagaatcaactcaaactgaacaatt

SEQ ID NO: 96558 - DNA, 614 bp, Heterodera glycines
attaggctgaatgataatgataataataatcattagctaaaaggtcgcgtggacattgttctgtgcagcgcggcattgctttacgttgtgcccattttggagctgaacgacgcggacattcagcgatcgatggatgtaaatgcgatgggcaccattaatgtgagcactgatcaaccggttaatcagtgatgtattttgacttttaaattctcggggtagtcccggccccgctttaaattgtcctttttttcttttccaatttggcattttccattctcttcccaattgctaatggctttttgtcagacaattcgcgtctttttgcccgaaatggaagcccggggcaaagggcacattgtcgcgatgggctcaatcgcctcacattttggcgaagtgttccaaatggcgtacaggtggtcaatgggcaaagatgaaaagtatttttgtaattagatatatttttttaatattttaaaaaataattttgtgtcagtccaacaaaatttgcggtgcgtggcgccatggaatgccttcgggtggagctgaaggaacgcgggctggaggacattctctgcacgaccatttacccattttatgttcgcactcccatggtc

SEQ ID NO: 96559 - DNA, 552 bp, Heterodera glycines
agctccccgcggtggcggccgccctacaactagtggatcccccgggctgcagttatcaaaaacgaggtgagatttctctaaaatatatttgatgaagccgcaagaattttctggagctgacaatgagcagccatctccgagtcgccactcaataattggtgttaagcgcaagttcagttcgattgattatgcgtcatctaacagtcctgtaaaagtgctgccgagttttactagcacatttctgcctgatttatcaaatgcgcaagtgttgaagccaaagcccaccaatgttgatcgtcttcctttatcaaatgaagaatttataactccaactcagccaaaaaagcagcaaagtcgtccaaattccccagcaaatggcgtatccaaattgatacttccgagaagccgagtcgcttcaatacgtcgtgagtcggattgcaatccagagaaaggatttggtgaggcggaagcggcacacgaaaaaatggtaaaatcggcacagcaagtcgcgatgggttttgaggatttttgtctcgacgacaaggctttcga

SEQ ID NO: 96560 - DNA, 496 bp, Heterodera glycines
tgagcatttcatcgcttttcctaaaatatttttcatttttaaatttgcccaatttccttccaaaacgccaatttatttctgctcctccccaccctcaaaatgctcgtcgactctctccgtcccgccactctttcgtcctccaaaaaacgttcagcgcattccatcgacgacaccgaccaattcattgaccacagtcccccgcacaaaaaacaactaatggacgaggaaaatgaccaaattttgacacaaaatacaccaaatgattcattggaccggcggaggccaattgcctttgccacaaaagcaattcacgcggggaatcggccagaacagtgggacatgaaccaggtcgttccgccaatttcgctgtccaccacttacaaacagtcgcgaccgggagagcccaaagggcacgactattctcgagccgggaacccaactcgcgacgtgctgcaggagaacttggccagcctggagggcgcgcggttcgcccgcg

SEQ ID NO: 96561 - DNA, 619 bp, Heterodera glycines
gacattcgagccaagatgaatatccaaagttcacgttcagtgttggatgaccaatggcacactttgctagttgagcgtgaagcgggcgctgccgtgctgtatttggacggtcgacttgaggcgcaaaatcggaccaatttgggcaccattgaactgcttcaacttcaatcgccactgtacatcggcggtcttccacctgagcttgttccccttgctgcgcgacttttgcctggcgttaagcccgaatttggtggatgtttgcgcgaattttcgctcaatgatttggcattggaggagcccgttgccgagaaggacattgcccaatgctcccaattcattgaacagggcattttctttggcaaagatgggggctatgccattctgagtccacaatttgtggttggcttgtcgttcagctttgagttggagttgaagccgcgcacaaagactgctgtgttgctctccgtcggtgtccttgaatttctgtccctgcaactgttgaatggcacgggcaaatttcgcgagggacaacggtggcggcatggaatccggtgctctacgagccaatcagtcccaacttcgtggtgtgacgggccttgggatcccgatccgaaccttc

SEQ ID NO: 96562 - DNA, 475 bp, Heterodera glycines
caacgaacgaacgacttcagtgcgcccaacaacaacacaatgacttctcactttctcgtcggcgttgcagccttcggggcgggaatgtgcttcgcgaagacgtacatggagaaaccgaagagcgaagacgacaaagaagcgcccaagaaggaagaagccacgaccggcggcgaagcggaggagaaggcaaagaagaaggacaagaaaggcgacggcgcagctgcggcggacaagaaggaggagaagcgctaggacaaacacaaatcgaaggaggggaagagcgacgacagcaaccgccgttccaagaaggacaagcacgggaagaaggacaaaaaggacaagaagaaggacgccgccgagccagccgctaacgccggagaacaaagcacagcggagacgacccaagcggacgaatagccagcgatgagaacgacgacggtgcacgacgacctcttccttcacgatcagtcccccc

SEQ ID NO: 96563 - DNA, 561 bp, Heterodera glycines
ttttgcttttccattttatttttgcattcaaaaatgtctctctcctcttacaattgaatttgcgttttatgtcgtcggtccgtcggatgttgtttttgttgggtcggaagtgctgctgttcgacagttccatgctcagcgacagctaacggattcgggtcgattcaacggagaaggctttggacttcgatggcacggctttcctcttccggtccatttatttgtatgatgccactcaaaaaacgacaaatgttcatttcagatgtgtataaacatgaccatttcctgcactttgaccatctgcacattgacaacattcactgtgccaggaagttggtcgtccatttgaggcccagcgagcgcacacttttgctgcaagcgctgaccgaattgaacgccgaggcgaagacggatggaaatggtcattcaggtggaccgccataactccatgatgcttttccattccatcgcaattggaaatgcttttgctttcccttggcagaccatccgccttcgcctgctcagatgaagcagttgttcttcgtcaacacaatcccgttcg

SEQ ID NO: 96564 - DNA, 491 bp, Heterodera glycines
gtccaattaagttatgatttttcgacaatttttgagacgctttttggtagcgaatcatcgctttgtgccattggagtctttttgggttggacgtctcaactcagttttgcattcgactgtttgtggagttggcccctccaatttttccaccggttttgcaaatcatttggttcaacatcgctttttttcttcacagtccgatggtttgaacgtcttcgaacttggctctgagaatgactttgacgatcgcgttctccaagcccaacagcccgtcatggtccaattctacgccgattggtgcggcccgtgtcagaatttggcgccgagaattgaggccaaagtgaacggacagaacggagaagttttgttggcgaggattaatgtggacagttctctcggttttcttactgcacaattcgatgtgacttcggtgcccaccgttgtgtgtttccataacggagaggtcattcaccgctttgagggcgacgtcg

SEQ ID NO: 96565 - DNA, 150 bp, Heterodera glycines
attcgatagccctaattgttctttgtttgtctactgaatttctttaaaaaacttacgacaaaaaaaaatttaaaaaacgtgttttcccgaacacttggccttgacttttttttaaacgggtgtcgaaaacccgaaaaacgattccattca

SEQ ID NO: 96566 - DNA, 628 bp, Heterodera glycines
gtgatgctcgtttccaactccgtgagcagctgatcatgtactgcataaatgatgttgccattcttcgagaatccgtgttgcgctttcgaaaactcatcggagaacacactcagggcctcgatccctttttggtgtcttcaacagctgctggtctggctttatcaacgctccgacgttgttttctaccgttcaaccgtttggttcactcacctgagggtggatacctccgtggacgacgagcttccgccgaatcccgccgatacatccggttcttcgagcttgaaaaccctggagcccaagtgcagtgcgcggattggtctgtgggagaggccaacattgaagacacaggctatcgtgtggacggcctctggcgacgagagcctccgcttcgtccactggccatcgagtggatgggttgctactatcatggtgttttatcgtcttaattttcaaataaaaatcttaaacgattaaaggatgtcccgactgttttccaaatcgaagacaaaagttggctgctgggagaactgcggaggatttatacgaaaggacgatgcggcgactctttgaactcgaacatacccatggatgtgagcttcacgtcgtatggggttgtgagtggaaagaa

SEQ ID NO: 96567 - DNA, 229 bp, Heterodera glycines
gcacatttgggcacagttttggggattaaaatttaaagcatttacccaataacttaaaaaaataaaacaattctatcattaactagcagttgttagacttgaatttttttaacgcttacatacattaaaaaggggggggggtgtcgacaaaaaattttttggtttaatttattttattgattgatggctgcgcatttgcaaaaaatattgggcaaatggcaagaaattt

SEQ ID NO: 96568 - DNA, 483 bp, Heterodera glycines
acggcgcgtgctgatatcgcatgcaacaacgtaattgtggctctggacagactgatggatgtgccgcaagcacccgacaagaaggcaatttgtgtgctcgcaaacaaccgggcagactcaaaagagggtgtgggaaccgtcatgtttcagcagaaagatggagaggatgtgcgtgttacggttgtaatcggcggcctcggtcctgaccatcagcatgcgctgacgatttatcagttcggcgaccttactgtttcttcgggcaatttccattcaactggaaagcattttagtcatgctggccaaaaacatagcccaccggaggccgtcagtcgtcacgttggagatttgggaaatatcaccgctgattcgaagggagtcgccaaaaggaattggtctgacaaagtgatctcactgtttggtcagaataacattattgggcgctcagtcgctgtacatgcacgaaaggatgactttggggagggg

SEQ ID NO: 96569 - DNA, 505 bp, Heterodera glycines
cgcttattctggtacacgtcagaataattccgcttattctggtacacgtcagaataattccacttattctggtacatcagaataattccgcttattctggtacacgtcagaataattccgcttattctcagaatgattccacttattcttgcacgcgtcagaataattccgcttattcaggtacatcagaataattccgcttattcttcaaaatttgttgctgactgacggtgccgctgagcccaaaggaaatttatgaagttttaggtgaattatgaacagaattagtcgacaaattatgattcgcaatttagagccaatttaaagtgtaaaatggaattacctgaaaagttgtttaaattaaataaaaattaattttttccttcgcgcttcacctcctcttctttatgtttcatgtttttgcccgcattttctgctttaaattattgaaaataatgagaagtattttgatacaatcgtactaaaatccctgtggtaatagtac

SEQ ID NO: 96570 - DNA, 340 bp, Heterodera glycines
gaatttttaaaatttaaaatttttttgaatttttaaaatttcccggttcccggtcccgaagaaaaatcgaggtcccggtcccggcttctcaggtcccggcaagtcccggtcccggttttgcccaaaattcccggtcccgcttcactctagtaaaaacctaagaatcctctccctactcatgattcagctccaatttgcgaatcttttaaatgtttttgctattgtcaatgtccgggcgctatactgtgcttttggttcgcacctttaaaatacgtccatttttcagttcttacgggttttctagcaaggaaatacggaaaagcttttttgacttttttgt

SEQ ID NO: 96571 - DNA, 321 bp, Heterodera glycines
gttacctcccacgcttcaccaatgaacttttcacggtggcagaggtgcactctgagcgttcgccagttgtttatcggttacgtgatgacaataatgaaattattagtggttggttttatgcaaatgatttatgcaaaacgctagaagacaaacagcaaaaaatgtatgaaattaaaaagattttgaagaaaaagaggcagaacggtgtggattatgcatttgtgaaatggaaagggtatggcactcgctttattagttggattcccgtaaattcaattagcgagaaaaatatataaaaagaaataaattaataaaatttat

SEQ ID NO: 96572 - DNA, 804 bp, Heterodera glycines
gaacggcttccgttgcgcgccttcaaaaagatcggtcgcgttggcactttgcctgccctcgcgcacacttccgccgcttcggcggccattcagtcggtgatgagcagcggagacgaagcgacgacgccggcactgaccagcggagggggcgctagcagtacacggacggcgggcggaggcagcgcattccaacgatggggaggcaatcggagaggaagtcatttggtcggttgggactccgcgcggcctcagtctgctgcgcgacagcagcagcaaatgctggagagaatgtacagcaaaagcgaactgcacgaatatcagcagctgttcaaaatgttcgacacggacggaagcggcgccatcggatgcgaagaactgaagggagcgatgctgtccattgggttgcaagcggacgacgcggaaattgaacgactgatcaaagaagtggacgaagacggaaatgggtaagctgatcatcaactgatcatataacagccactctgtttgtctgatcagttcgattgatatgtgatcactctttgccttcggattgtctctttctcctcccgcccattagtgaaattgatttccccgaattctgccaatgtatgaagcgaagtcagcagtcgggcggcatcaaaggtcgtctcagcaacgaagaagtgtcacggcaatgttttgaggtgttcgaccaggacagcaacggactgatcacggagaacgaattcatttacgtggccaaagaggtgggcggcttctcccaggaattggctgagtttgttttccgcgaattgctcggcgact

SEQ ID NO: 96573 - DNA, 999 bp, Heterodera glycines
gtccaattaagccggaaaaaggaaatgtttcggattgttgcaaaacgctcgttgtccaccactcgccaatggcttcagcagccgacccatcgtccgccgtcctccgcgctcagcgctgagccgttcatgaacgccacatcaggtgtgtacattgagcaaatgtacgagagttggcagctcgaccgtggctctgtccacagatcatgggacgcgtttttcaccaatgtcaacgcgggcgccgcgccgggccaggctttccaggctcccccgtcagtcccgtcgcttagcaccgttccgcacgccacggttgtgccgcgtgacatgcgcgaggtgcagccgcaaacagcaggccaagtgatcccggccgatgaactgacacgtgccatcaatgaccatctcaaaatccaagtattgatcaggagtttccagactcgtggccacaacattgccgatttggacccgctgggcatcaacagtgcggacttggatgacacaatcccgcgcgagttggagctggacttttacggcttcactgagcaggacatggaccgcgaattcttgttgccacccaccacattcatcgggggcgaacgcgccacattgtcgttgcgcgaaatttacaaacgacttaagaaaatctattgccatcacattggcgttgagtacatgcatttgacaaacgacgagcagcaggattggatccgaaaccattttgaggcgcccgaagtcacagaattaccaccggagcagaaaaaagtgcttttcaaacggttgatccgctccacaaaatttgaggactttttggccaagaaatggcccagaaaaacgcgtttcggtctcgagggttgcgaagtgttggtgccggccatcgaacaggtcatcgactgctcgcacgagctcggtgttaactccattgtccttggcatgccgcatcgtggtcgtctgaatgtgttcgccaatgtgtgccagcaaccggtgagcaccgttttgggcctgttc

SEQ ID NO: 96574 - DNA, 632 bp, Heterodera glycines
actccgaaagttgggccgtggcgtgcactttcttctcgatgctcttcggctaccctccgttccacagttccaatttggagtcgacttactcgcgcatccgtcgctgcgattactcttttcccgtgcgttatccgcccctttcaaagagtgctgttgacctcatcaaacggaccttaattcgtgagcctaaacagcgacttaccattggggaaatgttggcgcattcgtcactgaatccgcctaatttgaaccgcagttttattgatggaaacaatttgcagcaattctcaagaagtgcttcttgtcaacaatttacaacattagcgaagactgtggtactttctatttaaaaaatatttataaatgttctgattgttaattttttatcctcaacaaccgacagtctccaaaaatagtcctccgcctaagcagcccccgtccgcccacgactcgggcatgggcagtgacgaactgtcgggtggatgggtcgggagatttatgtgccaaacattggacaagtacataaactcgatgaccatggtaatgagtccattctcttctctcagtaagttatttttgtgtgtgatccgtcttaattcatttatacatgaaaaaagagtgatcgaccccct

SEQ ID NO: 96575 - DNA, 342 bp, Heterodera glycines
ctattcaaaaatttggtaattgattttttaagtcaatcacgacctgcactaatatgtagagaacggcgttaccagtttggagagcgagatgagatcgaaatgtggctttacataattcacgaggctaaacaaaaaaataaagctgcgttaatttgcgatcagcaattttgggaattgtttcgtactcagaggctgcaatttgagacgtcatctgtctcaatcgaaaaacagtaatgattttaatgggaagaatatatccgaaaaactggaataactactaaatctttataaatatcggaaattgagcgcgataattgaatttttcgggatgactaaaaacct

SEQ ID NO: 96576 - DNA, 490 bp, Heterodera glycines
ttattcaatttgataaacaaattattaagccatcatccatccaatcgctcataaaacacactctttgttgctatcatctttatcattttcatctcaattgttttcgccatttgtccattggaatgccaacgccaagccgtgcccgggtgtatgccgatgtaaatgtaaacaaaccgcgtgaatactgggactacgagtgccatcagattcgatggggcaacattgacgactaccaattggtgcgcaaattgggccgtggcaaatactccgaagtgtttgagggtgttatggtgccatccgagcaaaaagtggtgatcaaaatactcaagccagtgaagaaaaagaaaatcaagcgagagatcaaaattctggagaatttacggggcggaaccaacgtgatcggactgctggacgtggtcaaagatccggtgtccagaacgccggcactcgtgtttgagtatgtgaacaacacggacttcaagcaattgta

SEQ ID NO: 96577 - DNA, 594 bp, Heterodera glycines
gaatggaaaaaaacaaaagagagatgctttaactcttcaaatttaaaatcaattaaatccgactaaattaaaaattaaaaatgactaaaaatcaggccgctgaacaagcccgtctccaggcggaacaacagctaaaagcgcagcaagaggcggccaaacgacaagcggaagaacgagcgcagcaactcaaagcgcaacaacagcaacaacaacaacagtctgtacaagttcaacagcaaaaacaacaacaaccgccaattagcccttccgccacggcacaacaacaaaaagcggcgccggctcccgccgctcaaccgccggccaaagcaccgcagcagccccaagcgccaaaagcagcggttgccccggcacagcaacaacaacagcccaaagcggctgcccctccaccgccaaaggccgccgcggccccgcaacagcccaaagcgactgccgtcgctgcgccgccgaagcccaccgcccctcccgcggtggcacctcaaaagcgcgcgccttcgcccgttgtgcgcgaagtgcaactgcccgaagcgccgacccaacccatcttacgacacgcagaatacacgccgaaattgg

SEQ ID NO: 96578 - DNA, 550 bp, Heterodera glycines
aagctggagctccccgcggtggcggccgctcttccaatagtggatcccccgggctgcaggttccatttcgtctccccaaccagctgaatttcatctccatcgtcatcctccgactcttccttcagttctccatcctctttctccacctttttcttggccttctcttcctcctctttttcgacatctttgttgtccgcgcactttgacgaccacctctttgtccaattttgcctccaaaatttctgtgagcttttcgggctctttttcgctcaattcgtcaacatcaagcgcatttattcccaggtatttttcgcccacgtacgagaacatcgcggtgaccacactgctctccggctgaacacgatcggcgatttcgacgcgcaggaacaggcttttcatgggcgatttcacaatgtgatcgcagaagtgcatctcatttcgtcattaaacattcatttacattaactttttataattttatattataatacctttaatagaatctgggataggatttatatgtgctaaaacttgcagaatcctacagtcg

SEQ ID NO: 96579 - DNA, 477 bp, Heterodera glycines
  unsure (1)..(477): unsure at all n locations
aaccaatcaagtcccctgttgatgccacgctccacgcgcgccacaatgagttgctcgagtagggctactcgttcgggctctcgtttctgtgggagtggtggacctgcgccacgcttatacatttggtcgggaggcgttcttccgacacgcctcacctcccggttgaactccctcttcagctctacgtccatcacgacattcccgagttccatctcctcggctgcccatcccattgcccggcctaattgttgctttaccagttggacaagtgagagtgggtcaagcatcggttctggttcggattctgtgggtgggtgtgtcnacacatccgtaggtgcaggcccgtccacctctggaaccaaatcttgttccttacgtgaagaggtggatggaaccctgcgtttccgaggtggaaccacatcgccaacggcgttgcgcagccgcttacgcgtgatcctctctgtcgcccctaagtcg

SEQ ID NO: 96580 - DNA, 831 bp, Heterodera glycines
tggagctccccgcggtggcggccgctctacaactagtggatcccccgggctgcaggaattcggcacgaggattacatttttattcataaattttgagcaaaacacaaaaaaggtcaaaataggttttgttaaacttcttagggttcaaagaaaataaaaacgataaaataagtgctaataactcgaagagttgcttaacaatcaccaaaaaacatattttccatgctttagggccactggaagttcaggaaaaataagtaaaatctaaaaaacttatttctatgtagtaatattatttagcaatacacattaatatgttaattaaaaagaaatttagtaaaactgacaaacaataacttgtttttatgattactgtcgaaaagtccattattttttatttttctgtcgaaaaatccttcactgtcgaaatgtcctttgctgatttctttacaatacccagctttttggttcttccgtactctttcctctccattacccgtaccctggcttttttccctccggacaaattgatgcccttctctccaatttctgtttgatctccgtttggtaacaccgaaaaatccgcagtgagtgcgcatgctttcactactttagcatagtgctgttcgtccggcttttcttcttcggtgactgggaaaattatattctcgcggagcgtccgattcaaaatcctttgctgcaattaattaattgagggattaacattcatcactaagttttaggggctaattaggtcgcaattactgaacctgttgcggcacataggccacagtgccacgaatgcccacgtaaccgtacactttgtgcatt

SEQ ID NO: 96581 - DNA, 481 bp, Heterodera glycines
atcgattataataactttccacaacgaggcaaggtccacattgttgcgtacaatttggtccattttcattcgcactccatcgcatttacttaaagaaattattcttgtcgatgattactccttcgatgccactattggcagagatttatttggtattgacaaaatgcgaattatccgaaacagaaagcgagaggggcttattcgttctcgagttcatggtgccattatcgccagtgctcctgtcctcacttttttggacagtcattgtgagtgtaacgtcggatggttggaaccggtgcttcaacgtctggtcgaaaatgacaaagctgtcgttgcacctgtgattgacgttataaacatggacaacttcaattatgtctcggccagctcagatttacgcggaggatttggttggaatttggtgttcagatgggaggcattgggaagagaagaaaaattattccggcgaaaaaaacccgaa

SEQ ID NO: 96582 - DNA, 370 bp, Heterodera glycines
tatatttactacataattagagcaaatacggtatacaaacaaaaaacgaatcaatacaaaaaatgcatttacatttgcacattttctatattctttggtagttggattcactcaaaattatgttgttttaatgattcatcatacacaaactttgttttcagaatttgtgttcatttacaaacttgcagcaaaaaacaaaccagcaaaaagatgaaacgcaacggaaattccatttgctcagaaaccaagtctccgcttttggaattgacgccaaagaatgcattaactttccgtggtattgtgtgggctgggccatttgtgttccgggatgtaaccccaccgaaagcaataagtctgaattccgaggtac

SEQ ID NO: 96583 - DNA, 654 bp, Heterodera glycines
  unsure (1)..(654): unsure at all n locations
agcacaacacgagtgctttattggagaatcttgaagagcacaacacgagtgctttagcggaaatcaacggatttttggccggaacgatagctgaaagaatgagttatgggagtaataaagttacgacctcgtgttcttcggacttgaaaagcgcctatcagtgctcccgaaatcattctcggcctgcccttccgcgaggccatcgacatgtggacgttaggctttgtgattgccgagttgttcctcggttggccgttttaccccggctcttacgagtacgactaaattcgcttcatcgttcaaacccaagggcttccgccccagcaaatgctggccgaggcggccaagacgcatcgcttcttcaaaatgatcaaagacatggcctcctattggcgtctgaaaagcattgagtacgagttggaaatgtccacgaaaagcaaggagacacgtcgctatgtgttcaactgtttggacgacattggccaagtgcaccttccgtccgacttggacgacatcgaccgaatgtgcgagcggaatgaccggcttgaatttgtcgacattctgaagcaaatgctgagcatggaccangaccgtcgtctgacaccgacccgcaagttgcaacataaatttgtaaaaatgacgcatatgatcgag

SEQ ID NO: 96584 - DNA, 519 bp, Heterodera glycines
taagaccccggtttggtggtcatctgagcgccatataggtttcaaccatctggtgcaggccgtcgatgtcggcgactttgtcgagctgtacgacggtggtggaccaattcgaaggcttcctccgggaccggcactgcccaaaacgcgaatcctcgacggaagcaatggcactcgcagctgcttgaaggtcaaagtcaacttcatgccgttggattttctgcttttcccggtctcggcgaaggagaaaaacctcagaatggcaatgagcgccgaactcggaccaatcccaatcgccaacgaaaacagtttcaaattgcattgcttctaccggggagtggcgacgctttttttcgccaaggacagcaaagaagaaatgatcgcggaagtgtacaacacaccgtggctgatcaaaagcgacggcgcgtcattagccgaatcggacttttccaccatcgtccacactttcgctttctgccaatcgcaggacgttcatcgtcagggattggtggtggacgcctc

SEQ ID NO: 96585 - DNA, 589 bp, Heterodera glycines
cgcaccatccccgaaagaacagcacacagccacgggcaaaatccgcctgtttcacgcaacagcccggctgacccgacctttagagccaattcttttcccgaagttacgaatctaatttgccgacttcccttacctacattattctatcgactagaggctgttcaccttggagacctgctgcggatatcggtacgatcaggcaggagattcaaatagcttccctcgcattttcaagggccgtgtgttttttacgagacaccacaggaaccgcggtgctttacgggcgcaacatccctatctcaggctgagccacttccaggcacgcacaccctaaaccagaaaagagaactctggctcggactccacacgacgtctgcgagttcatttgcgttaccgcgcaaaacagctcttgcgaaccgtcatttccctagcctggcgtgggaatgttaacccacttccctttcggcaaccggatggaccaactgcgcaagcacagaaaagtcgtcatccgtagtgtgttacggcgttagccggtgccttaggatcggctgacccacattcaactgctggtcacggggaacccttctcc

SEQ ID NO: 96586 - DNA, 945 bp, Heterodera glycines
tcctcaaaagcttcaattggccaacaaataccgtcgaccggtgctttcattgcggaggatgtggacggcgaggcacttaccacgctggtgttgaaccgtttgaaagttggtcttcaagtgtgcgctgtgaaggcgcccggctttggcgacaaccgaaagaacacgctgaaggacatggcggtttcaactggtggcactgtgtttggtgaggaagcatcgctgatcaaacttgaggacatccaaattcaggactttggcgaggccgatgaagtcacggtgaccaaggatgacacgctgattttgcgcggcaaaggctctcaggaggacgttgagaaacgtattgcatcaatccaggatgaattggatgcttccacatcggactacgaaaaggaaaagctgaatgaacgtctcgccaagctgtccactggtgttgcactgctcaagattggaggtgccagcgaagtggaagtcaacgagaagaaggaccgtgtgacggacgctctgtgcgcaactcgtgcggcggttgaggagggaattgtgcccggtggtggtgttgcattgcttcgcgccttgaaaaagttggacacactgaaaccggacaatgatgaccagaagagcggcatcaaaatcgtccaaaaggcgattcgccagccaatttccaccataatcgccaatgcagggcttgagccctcagccattgtggagaaagcgttggccaatgcagagaccaactaccggtacgatgccatgaatgaccaatttgtcaacatgttggaagcgggcatcatctacccggacaaacgtcgtgcccgacggcgttgcacgacgcggccggcgctggtctcgttgatggcgacgacggagtgcgttgtcaccgaaatcccgaaagaatagccgacgatgccatccggtggtggaatgggtggcatgggcggtggaatgggc

SEQ ID NO: 96587 - DNA, 424 bp, Heterodera glycines
atttaacagtctcctattctttgatcagtgatttaacagtctcctattctttgatgtgatttgatcggtctcctattatttgatcaattatctgatcagttttctgttcaccacctggtgttcgtacgttctttccgcgtcgtcaggaaaataaatgcatgccaacccaaagtcggcaattcgcacttggtttcgcaccgtcaccaaaatgttgtccggcttcaggtccttcaaattttagtttggcattaaatgtcatgaaattcatgcttagtcagtccccagcataggtcgattttcaccggatttcgctaaaaaatttttgacaaatttgatcagcttttttcactttattttccttaaaaattcaaaacttttccgctggcgcctataaaaacaaaaattttattgaaatttccaaaat

SEQ ID NO: 96588 - DNA, 473 bp, Heterodera glycines
gtttctgacattacactgctaaaatgggcaaacacaaaaagccgttcattgaccgcaaaagtgcagtgaattattctttacacaacaaacatttggaggaggcgcagcggaccagtaatcgtaaaagtgttgcgaattttcgtccctttgataaacactttgaggatttttatgagggatatgcgaatgaagcggaggaggacggagcggaggaaatgcatgacggagaagggcaaattgagaccgatcctgcgcttttctcttctctgctggcggatgggcaatcacagcgatgtggcgaagagcgttttcagcgggagctgcctgatcccgaactgaagagcgcggtgttgcgctatgtaaaagcgatggaaattggcaaaggaagggccgagccgacggaggacattttggtggacaatgcgaagagaaaccgttgggattgcgagtccattctctccattcattcaaac

SEQ ID NO: 96589 - DNA, 527 bp, Heterodera glycines
actagtggtccccgggctgcaggaattcggcacgagggccctattagactgctaaaatgggtaaaaacaaaaaaccgttcattgaccgaaaaagtgccgtaaattacacactgaacaacagagagttggaggagacgcagcggatcagtgattacaagagcttttcgtttcgttcactcgacaaacgttttgagggtatttacgaggactatgcgaatgaagaggaggagggagcggaggaaatggacgacgaagaaggacaaacgggggctgattctgcgattttccgttctctgctggcggatgggcaatcccagcggagttgcgaagaacgttttcaccgggagctgcccgattccgagctgaagggcgcggtgttgcgttatgcaaaagcgatggaaattggcaaaggaagggccgagccgacggaggacattttggtggacagtgcgaagagaagccgctgggattgcgagtccattctctccatgcattccaccctttacaatcatccgaccgaaattagg

SEQ ID NO: 96590 - DNA, 549 bp, Heterodera glycines
aagctggagctccccgcggtggcggccgctcttcactagtggatcccccgggctgcaggatttccgcacgagggttcttgccatggcaatcgctaggcagttccgctactcaatttatcttctgttagttttggttcgtttttctctccatcaaagtgccgaattggaggacctccaacgcctttgccccgacttaaaaggcgctttctgttcccattgtgaccacaaaagtgttgagcaaatttgtccaatcgaatgcaacttttgctcaacttttcgctcaaacgaaacgccaaaattcttcggaaatgccgcagaaaatttgattgagctgaaaaggcaatgcgccaccattcgattggccttttgcaacgtttgtaagatcacttcgatcaacgaattgtgcgtggaagaatgtttggactgcgaagcgggcctaagagacgaacagaaagaagtggtgccattggtacagacctggcaacagtcagcgggggatggactcgcaattggcgacgatggcacaaattcagcgggagaagctgccga

SEQ ID NO: 96591 - DNA, 492 bp, Heterodera glycines
cctcgtgccgaattcggtacgagggtttgagaatgcactcattgctttgtccacgtgcgtccagctcccaattatcggccctttttaaacgtttttccgtcgggaatggcaccgcttcgaccgattgtgccaccaaaaaagggcctgtcgatgtgctgcgtgcacggcttctctaccagagcagaaagcgtgggatacgcgagaacgacattttgatcggtgggtttgctgaggaacacttggtcaaaatggaggaacacgagttggagcagtacgaccggatcatcaacggacgacacaccgaatgggaattgttccattatttctccggcgtaaaagaagcaccagacgatttggacaaaaatgcggttttccagcggatgcgccaacactttggggagaaaacaccacgccaattctgatggacaaaatgatttgttaacatttacaaataaaaacccagtgcttggtaaattgtgtaattgcaaaaaa

SEQ ID NO: 96592 - DNA, 446 bp, Heterodera glycines
ccacactatcacatatcaaaaatggctcccgcaaagaagaagtggtctaagggcaaggtcaaggacaaggccaacaatgccgtcacccttgacaaggccacctacgacaagatctacaaggaggtccccacctggcgtctcatcaccccctcggtgctcgttgaccgtctccgcctgaacggctctcttgcccgcgttgccctcaaggagctcgctgacaagggtgagatcaagctcgtgtctgcccacggctcccagctcatctacactcgctccaccattggtgccgagcccgttgccgctgcctaaattgccccggttgttctgtttctcccacacgaaaaatgaaataactcgtcttttggtcttggcaatttgatgcggtttcgtctgacgcaacctgctgttgtccgtcgagtcgtaatgtacattgttctaccgccaaa

SEQ ID NO: 96593 - DNA, 560 bp, Heterodera glycines
aaaagctgggagctcacaccgcggtgggcggccgcttcttgcatatagtggatcccccgggctgcaggatttccgcacgaggcctcaacctcaagtcgtcaacactctcatcatgtctgccccgctccagctcaacctgatcgaagccaaccacgcctcgggcaacggcattggccagttcacgtccacgggcatcgacgcggccgccctgggccgcatccagccgggccaggacgtgcaggtcaacgtgatccagcagaatgccgcgtcgggcaacaacattggccaggcgcaattcaccaacgtcgacgccctcgtccacaagatcaacgccaacccgaacgtgggcgacgtgcaagtcaactttatcggtgccaaccaggcctcgggtaacaatatcggccagtcgcaggtgtcggacattggtgtcgtgtcgacgtcgggtcacgcttggtccggccatcacggccatggccacgggcccaccacgggtgacatccagaccaacatctcccaagccaaccaagcgtccgggaacaacattggccaggcgcagagcg

SEQ ID NO: 96594 - DNA, 481 bp, Heterodera glycines
gttcactcacaatcaataacgatattttggacgacgttatcgccttcatcaaacggtccgaattggctcaaaatttctcattggtgagtcaccatttcaattcgcttgcccaacggagaatgcacgacgccaacgcacattgggtggagggcgactgcgtgttcattgccaatgcgaccaccacgcgaatgatcatccccaggggaaacaacgggggatttgaggaagttcccgtgcccacggttgctcagccatcatatgtgctcggctttcgtggcacaattcatttcaacggcacactcagcgacaacgcactcgccttcttccgtcacgcgttgcccccgcccacaacgctgtaccgcttctcggtgctggacgaattttatcgtgccaacggactgctgagcccgttcaaaacaacggaacgcatcaacacctttctggacacgtgcgtgcatttggttgagttgggcggcgacga

SEQ ID NO: 96595 - DNA, 463 bp, Heterodera glycines
ttgtcaaataaatctctaatttcctttttcctcctccaaatcttcttcgtaagctttgcctctcgtgccgtaaaacggtcgctttactcggcgaaatttccattggcactaaatgaaattcgatcagtcgtatcactgaattcgtactttagcaaaattgtccaattttgcagcggagtgttactcacagaaaacattgttctgaccgctgcccattgcattttgagcgacgaatttggtttggccgattacatccacgtgaagggattcggatggaatgcccactccaccgaattcgtaattcgaacggattttatttttctcgatttggaagattcaatttgcgcggacattgctttgatttttttgcccccaaaagtgactggaatttttggcactgccaaattcacaaaattcacagagagcgaatggtccaataaaagtgactccgacagtaaaattt

SEQ ID NO: 96596 - DNA, 251 bp, Heterodera glycines
attttgttttgtgccacatttgtatgccattctccgccattgattagaaattttgattttcttaaaaaatatatttttttaaatgaacattttgttttgtgccacatttgtatgccattctccgccattgattagaaattttgattttcttaaaaaatatatttttttaaatttttgtgaattgttaccaccacttttcgttttggcaattttgctgatctggtcacatatataataaatgtgcactttat

SEQ ID NO: 96597 - DNA, 476 bp, Heterodera glycines
cagctatctaaataaaactgacgcattaatgctgtatttaatcagaatttttttgtctcattattatcaaaatggcgtcatttattttgtttattattttgattattacgaaagctaataactcaatgggacaggattctggtactaatgatgtccaattaacgttggtcaacggttgtccatacaaaatttatgttgccggtgcggtgcaagtgaatttgacggtcaatgaaagacaaacgaaaaatgtgccgtcagtgagcacagcgcaacgattatgggccaacactgactgtgacagcgaaaacaacccgttgtgcaaccttcaagcagcgatgccgccaatttcactcttcgagtggacctttgatgcggacgggaaacaaacatatgatgtcagttatgtggacggtgccaatgtgccgatcagtgtacgtgtgctgaattgtcctggtgtcaatttcaacaaaaaattg

SEQ ID NO: 96598 - DNA, 558 bp, Heterodera glycines
gagggtcggaacgcaatatctcaggaaaattgccaaaattggcgagggctgccatactttgattaattcaatctgctttatcagcttcattgttgggtacgagcaattgttgccaatcaaatggcacggacagcgcgcgagtggtgccacattttcaagcggttcaattcgggcacgtacaacaaccagtggctgatcgttgactacaacaagttcaaaccgtacaccgaattgcctgaccatggcctattttatgtgctcgagcaaatgcccacaattgttctataccaggacatgacccagtggctaaaacagaatgggtattttgccagctacaacatcccattcttcaagaagaccagcctaattagtggctttgagcaaaaagtttaaaaaataaattttttaaattaaaaattcttaattaccctcagggcaacgaattttattggttcagctggaaaagttgtccacgcgcaaaaatttttgccagggaccaacacaaagtggtggacgtggacagtctgaccaaactgatgcgttataacgattacaccc

SEQ ID NO: 96599 - DNA, 233 bp, Heterodera glycines
cgctgttctccgttttcccacagaatctcttcgggtattcttgcaaatcgttgtcgggaaaggaggtcgattggtttgtcgcttacaaattgcccgatttggggtccgatggcgacggcaccgcctttctttattcggacgcgaacaccgccgcttggcgcctttccgacaaaaatgtggaggacaaaacttcagcaattggactgaccgtctcgcaactgttcacagcaaag

SEQ ID NO: 96600 - DNA, 551 bp, Heterodera glycines
gtccaattaagggggagcgataaatacggcaaaattggcttttaaatggctcagagccccataaaattgttcgacgttgccaaggaatggtgctttgcgagcgaacattttcactgtcagagcctttgctgcccgaaacaatcaaattcatcaaggagagcttggaaaagcaaggcgaactccatttcgaattgccccatgtttttgtggttttcggcgcatcgggcgatttggcaaaaaagaaaatttacccaaccctttggtggctgttccgcgacggattgcttccaagagacactcacattattggctatgcccgctcaaggcttacgcttgaaacattgcgcaccgcctttgaaaaacattgcaatgtgcgagacggggaaaggcccaagttcgagcagtacatcaaacattgcagttacatttcgggtcaatacgacacggacgagggcctaattgcgctggacagagccatcattgagatggaacacacattcaaaaagcccgccaaccgtctgttttatttggcactgcctccggaagtgttt

SEQ ID NO: 96601 - DNA, 416 bp, Heterodera glycines
gggattggcgaattgtatcggtcgatgttcgtctccgcccaggtcaaactccttcagagatacgttcccgaactgaggccggaagacgtggagaggggattggcggggattcgagcgcaggcgatggatgccgaggggaatttggtggacgactttgtgtttgacagcggagaaggacccttggccaaaagaatgcttcacgtcagaaacgctccgagccccggggcgacgagttcaatggcaatcgcacaaatgatagtggagaaaagcacggagaaattcggcatttaattgctcacacataaaatacggatttaattgggcaatgggcattttgcacttaaatattaacttttttttgttttgccattccaatttttgaagctatttttgtggtaaacatttttatcccttcc

SEQ ID NO: 96602 - DNA, 275 bp, Heterodera glycines
gtttgcgtttcaaatatcgtaagattgtttgatagggccagacaaaagaaggcaactgttggtaccaagtttgcggtaaaaaaatgagaaaaaagatgtttgatagggccagacaagagaaggcaactgttggtaccaagtttgcggtaaaaaaatgagaaaaaagagataaccattttttagtcaagaattttttttgtttgcgtttcaaatatcgtaagattgtttgatagggccagacaagagaaggcaactgttggtaccaagtttgcggt

SEQ ID NO: 96603 - DNA, 381 bp, Heterodera glycines
caacacaaaagataaatttgaggttggattagacgtgcaattttttgctccacaagaaattgaggtcaaagtgtcgggccaagatgtgatcattcattgtctccacgaaattcgcaaagatcagcacggaagtgttaagcgcgaaattcaccgtcaataccgactgccaaatgacgtcgacgcggcaacattgaaatctcatctgtccacccgtggcgtgcttacattgacagcctcgaaaaaggactaactgagaaggaaaattgagtgaatttgatgggaaattaggacggaaattttgctcatcttgtgagctgctgttgaaataaattgaaacaaattgctaaaattaaaataaaataaaatgctccaaccaaaaaa

SEQ ID NO: 96604 - DNA, 399 bp, Heterodera glycines
ggaacaccaaatcccaactgatgagcggacagagtgcacagaaagacggaaagatcgccgccacaattctaatcgacccggtgactcagaagagtgccaacattaccatccgaacgccggcgcaacagttgcgcatggagcagatcgaagtgccgtacaaagtgcgccctttcgcttttgattcgccgcggagtgcgcaacagaagcattcgctggctcagctggtccacccattcgcttcaattcccccccccatggaccggttgaaggggcaaagggaacttttcgaggatttgtctaccgggcccccctctctccaatggtataccggggggggcaaaaaggggggtcaaaccccccccatttggggtggttgtaaaaaaagtgccccaccccccc

SEQ ID NO: 96605 - DNA, 552 bp, Heterodera glycines
acgaattggagccaaatgacttatcgggacggagatcgcccgcaacgcaaaacatgggtccagaaacaaacggaagccaacaaatccacgccgactttgaacctttcttcttccggcaacggcggtccatcagtcgaaggacggacgagggacacgcatttgagtggggacgaattggctgataacagtccgcaaaagggacagcaacaaattttgaatcagacgttcaccaaatcgtcgaccaaagagtacgacagcgcgactctcattgcgcctgtctcaaatggcaccgaatcgctcaacaatcgcagcggggggttggtgctcgaggacgtctgtgactcaaattcggagatgacgccggaaatgcaggcaaagcgacgcgcgattttggccagccaaattcgacgcaaagagcgaataatggcgaggagtgaggagaaagagacggaagagatggaccgactgcaggtcaaaatgcagcggatggagcaggcggagatgcgcaggatggagcgggagcaaaggcgtcagaaactgctcgaggactac

SEQ ID NO: 96606 - DNA, 524 bp, Heterodera glycines
caggaagcagacgaagaggaggagaacggggagtctcaggagaagcatctcgactcggtgctttacgacgagggcgcatttttggtgcttccctcaggtgctcgcattggtcaccggtcgttggtccgatactttcgccagcgtttgggctatggccttggcgacggtggcagcggcgattggaactctaagcagcagcagcggcaactgatgcataatgccaaacagtcgcgcattttgaagcaattgggtggccctgctgtggggggcggttgttgttcggttgccgttttagaggcgtccgttaaagcgcgtgcgcgcgatgtttcgttcatgaagcggacggtggcgcggtaccaactcagacgcgcgttggcctccaacaaattgttcaaatcacgcggccgaaatgatcaacagtgatcggaagcaaatcaatcgcttgacgaatattattgttgatatattacgagaatttatttgtttacacatttcccaaaatattggagaaaaataatataatc

SEQ ID NO: 96607 - DNA, 565 bp, Heterodera glycines
cccaattaaaccgagcaaatttcaaatttaaaaaatgtttctgaaaaggagaatctccgagcctagcgacgaagatgaaaaacaacggacaaatcaaattcctatcgataacaattcatgtgttgacggtattccgctgaacatccaatcattacgaaaaacttatgtggacagagaagagccatttttactggaaaaggacatgctttcctgtccatttgaccaattctctatttggttcggaaatgcgatcacgcaaaccgacctcaaatacgaagaagtgaatggctttgctttgtcaactgtctcgaggaatggaaggccaagttcgagaatgctattgctcaaaggtttcagtaaggttggtggtttcgtgttcttcactcactcaaacagcaaaaaggggaaggaattgagtgagaatccgtacgtctccgcactgttttattggccaaaggtaaaccgccaaattcgaattgagggtcgagtggaaattctcggggaagaagtggccgacgtttactggtcaaaacggccaattgagtccccgagagggctcagaagt

SEQ ID NO: 96608 - DNA, 464 bp, Heterodera glycines
ataagatgaaattgggcatctgcataagctggggacgaactggcgggcgattgatggtgcctccgagcaatgagccaatccgaccattcactctgatttggaataagacggatggtttggttgcacttcttgggcaaaagttggaaaagggaacttgggttctcttcacactgtccactcggacggcctttttgcattctgtcgaccgaaaattggttgaccgcgtgtccatcacagaccaacgtcgtgagacagcagttgacagtatgaacattcaggtgatggcattcgttcgctccttccgacggtacaacgattattatcgcattggcatggaccaactgatcggatgggttttggtgtcggaggattcatttgtccgaagggtcgtcctccaagaaaacctcgctgctcaaatgtccatcatcttccaacatgactgtgtgcgtggcttcaattgggtg

SEQ ID NO: 96609 - DNA, 481 bp, Heterodera glycines
ctgcgccgcaacaaattccgcaaacttcccaagtaattgccgcaactgttattagtgcgaccggtgcttctggcgttttgcaattgggtcagcaaagctcaaattctgaatttctgtcagccttcgaatgtcccgtttgtcttgattacatgcttccgccatatctgcaatgtccatcgggtcatctggtttgtggaaattgtcgtcctaaagtcactgcttgcccgacatgtcgaggtccaattccgagcataagaaatcttggaatggagaaaattgcagcaagcctgcaatttccatgcaaatttgctcattccgggtgcacccaattcttttatcatcatgagaaagttgagcacgaagagatttgcgagtttcgtccttaccaatgcccttgtcctggagcttcctgcaaatggcaagggagtctggcagatgtgatgagccatctaatgaaattgcacaaatcaatcacaacttt

SEQ ID NO: 96610 - DNA, 331 bp, Heterodera glycines
gctgacatggatatttggtcattggttggctcaaaattgaaagtgctcggtgaagtgaatctctctaacgaaacctatcgcggcattgagaactcagagaaatattgtggggcgagctcgcttatcacggatttctttaacgtgatgaattgtggcgatgacaacggagaaccggtgacaaaacgcataaaaccgatggattttggagtgcaaagaatgcaataggacatctgtgagccattgtaaagaaagagtcttggaacttttaattgtttcccaattgtaattcctttctttatttatttgctttaaaaatacaatatgacaaaat

SEQ ID NO: 96611 - DNA, 235 bp, Heterodera glycines
  unsure (1)..(235): unsure at all n locations
gtaaatacaacatctgaacagaccgaatgcgaatcgagttcgacacgcttttctcatgaaattgttttggatgacgatggcgtcgactgtccatccgttgttagagacgaattgccggcgaaaaagccgaagagaatttgaatgaatagaaatgaagaccttttatttcttttcgggtattcgttttgtttatcgtcgctcttttttacggtgctcaataaatttatacatttan

SEQ ID NO: 96612 - DNA, 628 bp, Heterodera glycines
gtcgcgcaagggggagacgacggtgcagcctttacaagtttctttggaagacctgtacaaagggaagaatacaaaattgcaattgacgaagaaagtgctgtgcaaaacgtgcaacggaattggtggaaaacaaggctcggttcggaaatgtgaccgttgtcagggaagcggaaaggtctttcgcacgcgtcagattgggcctggaatgatccaacagatggcggcgcgatgtgatcaatgctcgggtgaaggagaaatggttgatgaaaaggaccgatgtaaaaaatgtgttggaaggaaaacggtgcaggaacaaaagataatcgaagtgaaaatcactccgggaatgcgcgataatcaaaagattgtcttctacggagagggggaccaggagcctgggattgaaccgggggacgttgttttggtcatcaaaacgaagtcacacgaacaattcgagcgaaagggcgacgatctcttcatgaaaaaaacggtaagtctcgcagacgcgctttgcggtttcactacgaccattaaacatctcgacggaaggcaaattaccctcaccacgatgcccggcgatattataaagccagaatccatccgaggagccatccaagaaggaatgccc

SEQ ID NO: 96613 - DNA, 544 bp, Heterodera glycines
  unsure (1)..(544): unsure at all n locations
gtccaataaagcacttccattttcagtctttcgcttacaatccgtggccattgctctgaccctttggtcgtgtgcacttcgtcccgaacattcggcgcaaaggacgtcgaagtgtccaacactttgctgttgctcgacgggacgccaaacggcgccggagcaaatcagcaacatatcgtctccatcacaaatcgctttgtggagctttccgaagcttttcttcccgaccaaacgttccgtctgaaggcgcttttggagcaaaatttgctcgatttttacaatgaaaatgcaccggcggcggaggaatcgaaaggaatcaaactgaatgaactgctcgaccatgtgcagatcagtgagcagcaattgcgtgaagaattggccaaatttgccgtcgttgaaccggctgaaggtgttgcgacttttaccaggctcattcttaacttggagatttatttgctctgtatttgttccttgataattgtccgttaattacccattggtttttgtcacaccacgggtaattattttttccaacttaaaaaan

SEQ ID NO: 96614 - DNA, 554 bp, Heterodera glycines
tgacatataaattctctgctttgaacatttttaagatgacacttaatccgcctcatttaactttgcgaggttatgagggtcacgattacatgggagacactttcaagaaaacgaatgattacgcccaaacttggttcgttccgttgatgaggggacaatctatagacaacagacaaattcctggcgatgattgtggattcttcgaagatcaatcggttagatgttttactgcttttggtgcaaaattgggccgtttatattgcgaccttgagcatagggaccttcaggaatgtgtttcgcgcacaaaaaagaataaacggttctggaagatcagagatgttcgcttcaaaaaatggctcagaggtgaaacgccacacattttcgaaccattggctgactatttgaaatcggttcatggtgctccgacttcctatccgactggtcatcgtgtgaagaaatgattagattagatatatcgtgagattctggtttttaataggagtcacatatgcatatgtatatttctgcgcgataaaatgcttttgttcaaaaac

SEQ ID NO: 96615 - DNA, 478 bp, Heterodera glycines
tgctctcggtctcgttctcggccgacaaccgtcaaatcgtctcaggctcccgcgacaagaccatcaagctgtggaacacgcttggtgagtgcaagtacaacattgagggtgctcacaccgagtgggtctcgtgcgtccgcttctcgcccaaccccgagaaccccattatcatctcggcaggctgggacaagctcgtcaaggtctgggatctctccaagtccaagctgcgcaccaaccacattggccacaagggctacatcaactcgctcgccgtgtctcctgatggctcgctctgcgcgtccggcggcaaggacggtatccccatgctctgggacttgaacgatggcaagcacttgtactcgctcgatgccggagaggagatccacgccctgtgcttctcgcccaaccgctactggctctgcgctgccaccacctcgggcatccgcatctgggatctccaaaccaaggagcacattga

SEQ ID NO: 96616 - DNA, 402 bp, Heterodera glycines
gttttgcagaatatatgatcaaattctgcaccaaaacgtgtttaaagtgtggcgaggctacgacgagcaaagcgaacggcgcaaaatctgtggcggcggtcggaccaccgcccatcgaattaatcattgaaccgatgatggagacaaaccacgaaaaggggagaaggagcagtaacagaaacaacagcagcagcggggggaggagggaatgtgtggacagaggcgaaagatgcatccaatggaagggcgatggactgtgcgatgccaaaagtgggacgactaaattcaacagaggacagcgaagggcgtgtgccaaaacgtgcggcgattgcaaatgatcagaagcaaaagaattacataaatgtacaattacttattgtgctttgcataaacacctaaaat

SEQ ID NO: 96617 - DNA, 480 bp, Heterodera glycines
gtttgaggacaaaatcacaacgtaaatcaaagaatgtcttcaaatcctgtagaagggactgaaaacttgggccaactacgccaaacggcaccacaacaaacgactgccgcggatccgtcgtcattgaattcttcgaattccgctgccgttgaatcaatggattcggagggtgtttatctttttgctgaccgtacccaatcctccaactcgctcacccccgaacaggccttcgtccacatggtcaaggcaatgcttggcaccggacttctctctctcccttatgcgttttcccattctggtctttatcttggtttaatccttttggtcttaatttgtcttgtttgtatgttttgcatgcggcaaattgtttttgcggcccattacatttgtacaaagaatggtcgtgagattattgactatgccaacattatgcgtggtgctgttgaggcagggccgtcatggatatcgagcaggggatac

SEQ ID NO: 96618 - DNA, 609 bp, Heterodera glycines
ctcatttgtccattttgccattccgatgtctccaccaaaacgtgccaaagtgtcagccgatgatgatggggagacaatttccgacgacggggagccatcaacgtccgcgggggcaaagcgaaagcaaaaggcgtcgaaaccacgccagcggaaggcgcacgaggcattcattttgctggtggacgtgggccgttcgtctgccgaaaactcggcgggggcacagagcgatcacggcaccaccactgacctcgaccgatcggtgcaaatcgtcgattgggtcctttcacgaaaaattttcaccgaatcctccgatcgcttctctctgatgttcttcggccacgaaaacacgtccagcgacgaccatccgaatgtttacgtgcacaacgaacagttcgccacggcgcgggtcgaatggctgcacgtgttgcagaacgaagtgcagacgaacgtcaaatgccccggcgattacgtcgacgccctttacgctgcgttggacgcactgaaagtgcactttgacgacgcaaaagaggcgggcgaaccgatgagcggagcgacggtcactttggtgagcaatttgagcggattggacgacgagcgggcggtgatgga

SEQ ID NO: 96619 - DNA, 549 bp, Heterodera glycines
gtttgagatatggcactctctctattccttctgttggtcggaacaatcattgctaattgcaatggtgacccaaagatgaaatctgttgaagagaaaagtgtgccgcctgccgccttttggccttacattttgcatccaaaaacacctcggcataaatcagaagagagggaggattactacgatgccgtacgagcagaagaggaggaggcggagaaggcaacattgacaagcagtacagcagcaaacagaggcaacgaaaagcaacaagaagaggaggagggggaggaagaagcgcgacaattacagcaaatgatggcacttctgttggccaacattgacccggtgccaatgtttaccgccaacagcgaaaagccaaaaacgatagcacaaacgatggcaccgacaaaggcagcaaccgcgttgacaatgtctaaagtggacggggaaacgtacgacgaacggacagaagcgggcaaagacgacgaagagacagacgatgatgatgacgaagagcatgaaacccgcaaaatggttgacacggaattgaag

SEQ ID NO: 96620 - DNA, 487 bp, Heterodera glycines
cattgcgttggtgagaatgtgtaaggcccacagggggatgacagtggttgcgattggaccgttgacgaacattgcaatggccgttcgcctcgatcccgactttctctcctacatcgacaagctgtacatcatgggcggctcgctcctcgccaagggcaacgccacgcgcactgccgaattcaactttgcctgcgacccagaggccgcccacattgtcttcacgtcctcgaccaagcactcgacacgcgctccgaaaatcgtgctcgccccgctcgagctcacgttcgaccaagcattcgactgggacctgattgcccgcctcagcgacccgtcgcggcacgccgcgcacccgtggtccaagttcctgtaccgcatcacggcggcgctgcgccgcatgttccggtcgcccgcgcacctggatgccgtggcgcaggcaaaggacaagcaccaggcacgacgtgcatgtgccgccgcaccatgttgcgcg

SEQ ID NO: 96621 - DNA, 354 bp, Heterodera glycines
gagactttagctcaaatttcttagagaagagtgcgttctcttaatttttcaacaaaatttatgtgctccgacaacaacgaattgctgaaggacccttccgccgcccacaaattgacgcttttgttggccaaccgccaccgttgtcataaaagcagaaaaactttggccgattttttacgaaaaaaatttcattttcataaccgtcgtgtgaaaaactgtgccaccaatttgacgacgacgacaaaattttttaccgatattagaaagggttgttacacgaaaagcattgaaagaggaggaggaatagcctaacaaaagtcgaggacaaagtgccgaaagtcgagacaaacgaac

SEQ ID NO: 96622 - DNA, 559 bp, Heterodera glycines
caatagtcgctcatttgtcgccaaatcatgcgactgaatgtactgctcgcaatcctcgcccccctcctcctgctaattgcaacagcaacgctttgtggtgccaccggcaaagaagcggcggccaacaaaatcggtgtcgccgccgtcgctttgtcagaggcggacaattcgacgacgccggcgccaccgccgccgccttcgccgggtggcagcgatgacaagaaaaaggacgatgacgataagaagccggacgaggatccggcaaaaaagggcaacggaacggacacgggcgacgacggcaaaaaaacggacgaagcgggcggagcatttggcgcggggtccatttttgttgccattcttttcggcatggctttgatgttcggactgatcaaaatgtatgtccattgggagaagcggcgcgagtcggacccaccgaactatcagatgtattgaaaaaacatggaaagcattgggccaaaacaaacaaagatttccttatttcatttgttgttgttttttgcatcatttttatcacttctcattaaaatttctctaaaaa

SEQ ID NO: 96623 - DNA, 476 bp, Heterodera glycines
cgagtgttgttcatctgtttctgcttctgacaatggcactgctccttcttcctcctcctcttcttgggctgagttgggtctttctgatgcgactcttaacgctcttggcacaatgaatttcccttttccaactccaattcaaaatgctgtgattcctatcgctgttaaattgaaaaaagacataattggtgcagccgaaacgggcagtgggaagactctcgcatttgccattccgattctcgagcattggctgaccaatgcaattgccacaaatgtccaacattttccggtcaaaggctctctttttgcgcttataatttcgaccacgagggaattggatgttcagcagggatgtgcctagggcaacgaacatttggcggatttgtccgcacttcgatttttggttgttgatgaaattgatcggatgttggagcaaggccattttgagaatttcaagaaaaagaaatttaaaattt

SEQ ID NO: 96624 - DNA, 433 bp, Heterodera glycines
gttttcagcgcgcaaatctaaaaatggcatctacccaggaattggcggtcatttacgctattttggcacttcaggacgaggagttgccgatcacggcagaaaaagtgcaaacgatggtcactgctgccggcgttaccgttgagccgttttgggctgggctctatgttaaggcacttcagggtgtcgatgtgaaggctcttctgtccgccgttggcagtccgggctcgggagcggcagcacctgcgggaggcggagcagcggctgctgcgcctgcggctgaagcagcaccggccaaagaggagaagaagaaagaagaggttaaggaagagtcggacgacgacatgggattcggacttttcgactgatcacgtacacatgctattatgtgtttttgttgtttaccagaatttttgcgtattaaatttgtttgttg

SEQ ID NO: 96625 - DNA, 476 bp, Heterodera glycines
gcgagatgcacactcgacttgacagtataaaggcgtcctgcaattcgggtccttcaagctcaagtctggtcgcacctcgccctactttttcaatgctggtctctttaacacgggcgaccttctcaaccaagtcggacggttctatgcatccgccattctcgaccacgaggccacattccgcccatcagtactcttcggtcccgcgtacaagggcattccgctcgtcgccaccacggccgtcaacttggccgtcatgggccacaacatgccctacgtgttcaaccgcaaggaggccaaggaccacggtgagggcgggtcgctcgtgggcatgtccaagctacagggcgagcgagtcttgattgtcgacgatgtgattaccgccggcacggccattcgcgaaagcttcccgctgttgcgcgaccacaatggcgccaccgtggccggtgtgttggtggcgttggaccgcatggagcgcg

SEQ ID NO: 96626 - DNA, 358 bp, Heterodera glycines
aaagctggagctccccgcggtggcggccgccctaccactagtggatcccccgggctgcaggataccggcacgaggtgtacctcttttagacgaagcgtcctaatttccctacaaagtttgaaaacgggcgcgaagcgcccgtcctgaggccgcgaagcggccgaatatcccccaaaaaaaattaaaaaacgggcgcgaagcgcccgtcatgaggccgccaagcggccaaatgttctcaaaaaattaaaagacgggcgcgaagcgccagttcttaggccgcgaagcggccgaatgtccccaaaaaaattaaaaacgggcgctatttttccgtcatgaggccgcgaagcggccgaatgtt

SEQ ID NO: 96627 - DNA, 549 bp, Heterodera glycines
ccccgcggtggcggccgctctacaactagtggatcccccgggctgcaggtacccggcacgaggaatcgcttcacagcctaggtagcgaagctcaagaagcgcgaagcgcttatttagaaacgggcgcgaagcgcccgtctgaggacgcgaagcggccttaatagcccaacaaatttagaaacgggcgcgaagcgcccgtctgaggcatcgaagctgccttaatagcccaacaaatttagaaacgggcgcgaagcgcccgtataagcccaacaaaatttaaaaaacgggcgcaaagcgcccgttcgaggccgcgaagcggcctaacaagctaaaaaacgggcgcgaagcgcccgtatgagttcaacgaatttaaaaacgggcgcgaagcgcccgtccaaggccaacaaaaattgaaaaaccgacgcgaagcgcccgtaacgggcgcgaagcgcccgtatgaatcaacaaactttaaataacgggcgcgaagcgcccgtccaaggccaacaaattaaaaaacgggcgcgaagcgcccgtcttgagcctcga

SEQ ID NO: 96628 - DNA, 201 bp, Heterodera glycines
cgccgcaccggcaaggactgatcgacgaagaggaaatggagaaactgcccaaagaaccgctcaaaatctcatccgggaaccaagttaagcagtccaaaaagagaagcagcaccgcaggatgaaaggggagaaggaaaaaggagtttagagcgtttagcctttgtttttttttgtttcattttttgtcgataaatgtaatgt

SEQ ID NO: 96629 - DNA, 906 bp, Heterodera glycines
aagctggagctccccgcggtggcggccgctcttcaactagtggatcccccgggctgcagttattcggcacgagggtccaattaagactttcaaaaataataatttaatcgacaattttccccgcaaatggccgaagagaatacaaatcaatcggaaggactcgacttctttctgaaccgaagcggatggacagatgcccaattggaggaagtcattcggcttttgtacggcaaaaggctccaacaactttcgattgcccagcgtttcttggactcggcgcaagaagcaaattttgagctgaaaggttttcaaatggtggcgcaggaggagcagtgccgaaggccgaagaaaatgcgcgtggcggccatccaaaacaaaattgtgttgtcgacgagtgcgccggtgcaagcgcaaagggacgcactgcaccaaagagtcggcaaaatgatcgacgcggcggcacgagcgggtgcccaaattgtttgcctgcaggaggcgtggacgatgcctttcgctttttgcacccgcgaaagattaccatggacggaatttggagaatcagccgaggacggagcgaccacaaaattcttaagcgaattggcaaaacgacttggcgttgtgataatttcgccaattttggagcgtgacattcacaaggatgaccttttgtggaacaccgccgtgatcatctcacagacaggcgcagtgatcggaaaaacgcgcaaaaatcacattccgcgggtgggcgacttcaacgaatcgacttattacatggagtccacccttggccaccccgtcttcgaaacggcttttggcgccaaaattgccgtgaacatttgctacgggcgccaccatccgcaaaattggatgatgtacgcgttgaatggtgtgcttctgctgatgcta

SEQ ID NO: 96630 - DNA, 478 bp, Heterodera glycines
cttcgcaagtgtatgctctgaatgattcggcagagaaactgcgcgacatttttgtggaacaccgacaaaaattgggtggccatttcgcactgattgacccatttgagaagcaaaaagagcggcgacgactgatcgacgcttattcggcactgaaaggcatcgacgcctttccctcttcgaatgcgcttttgcaacttggcgaatattttccgaagcaacaaccggggacggcacagccccaatttgggatgactcagttcggtcagccctctgttggtggtggcctttttagtgcctcaaaagcgcccgccttcagtttcgccccctccgctcaacagtcctccaccaatctcttcggcacaccaaaaccaacgccttttggtatgccaaccacaactgccacctcgccaagtcctttcggtgctgcggcagcagtcattccaacttcggctggcgcgtccgctgtgccgtcgctttt

SEQ ID NO: 96631 - DNA, 321 bp, Heterodera glycines
atctatatctattccaacaacaaatatatgatgagctcaaactaaacaaccaataaaaccaatactaataatagcgtaaattattcctaaataaccaaaaagaatttttttacctgtatagaattggatagttaatctaactaaaccaaaagcaggtaaaattaaaacataaacctctggatgaccaaaaaatcaaaataaatgttgaaaaaccaaaggattacctccacctgttctatcaaaaaaatttccattaaaattacgatcaactaataaaagagtaatagctcctgccaaaacaggtagagttaaaattaaaag

SEQ ID NO: 96632 - DNA, 494 bp, Heterodera glycines
tggaggtcgacttggacttggacaacaaagactacaagaagacgttgaaagtcacttggctggccaaacgtgccgaaaacttcgcggtgaaaacggtccgttttgatcatttgatcagcactccgatcattggcaaggaggaggactggaaggagttcgtcaatcgcgacagtgagcattttggcactttgttggccgagccggcacttcaaaaagtgaactgtggagacattttgcaaattcagcgcaaaagcttttacatttgcgacgcgaagacagccaactcaatgacactcatcgaaattccggacggcagagagacgaaaaacgcagcgcaaaaggggccagagggaaaagagacgaaaaaggaaggaaaagagacgaagaaggcaaagattgttaattgagacagtgtattcatgtggaagtattcgcaattgttttgttgtttttatttggtgatttctggtgttgattaaaaagaaagaaactgt

SEQ ID NO: 96633 - DNA, 492 bp, Heterodera glycines
cggaaaagtcactttcaaaattactttgacaagtgatccaaaattgccgttcaaagtactgagtgtccccgaaaatgctccgttcactgccgttttaaaattcgccgctgaggaattccgagtcgacccatccacaagtgccataataaccgacgaaggcgttggagttaatcctgcgcagaaagcatcggacattttcatgaagtacggctcggaattgcgactgattccgagagacagagttggccaaggcgaatgaaagaggaaatgggtctaccgacacacgcggacatatcatttggcaaaaagggaaactgacaggaccgtctattgagactattgtgattgtttctttgttattttttggtagctaattattcggaaaaaaaaaaaaaaaaaaaaaaaaaaaaaactcgagggggggcccggtacccaattcgccctatagtgagtcgtattacaattcactggccgtcgttttacaacgtcgtg

SEQ ID NO: 96634 - DNA, 479 bp, Heterodera glycines
caatctcaaacataaataaattgaatatttgcaatggcgtcaatgtcggatcggatgaagctgatgctaagctcgggaaagggcgccgatgtgcactttttggttgggcaaagcgacgcgaagaagattctcgcagcccataaaacaattctgatttcggcctcggatgtgttcgagacaatgtttcgctttgacgccaaaaatgcaaatgttggaaacgtgaacaatcccgtggaggtgcccgatgttgaagttggtgcattcaatgtgatgctcagcttcatttatgccgacgatttgagccaattggacggagacaacgcaatggcagtgcttaacacggccaaaaaatacaacatcactggactggtcactgccattaagaacatgccaattgcgaagatatgcggcgacgttttcatgacattggcccaaagtcgcctatttgaggaatcggatctcgtcgagcgttctttggc

SEQ ID NO: 96635 - DNA, 226 bp, Heterodera glycines
atcgtagcagccccactaattaatgtgaaaatatgaaaaattattttttattttgatgatgcaacgcatttgttttcatttctctcctttatgaaaagagccattcattcttcattcattgatcatttgtacacattatacacacaaaattgaccacacaaaattgatgatcggactagtataactttctgtaatatttttgatcacttttaaattttgattaccg

SEQ ID NO: 96636 - DNA, 613 bp, Heterodera glycines
aagaaagggcttgtccttcaaggtggttgtggacatgaatggaaacacggtggtgtacaacgacagggacgtgccgatagggacgggttctgtgcggaaagtgggcgaacgatcatatgaggcggtgatcagcaagaatctattcatcactcggctgaaggatgtccggaggggcccatgctgcagagagttgacgggcgaagaatgcaccgaacccattaagttggccaacccgcagttcagtcacccgagccaaagggacgacaatggcacgacgaggctgacctggcccgactgtttcgacatgtccatcgatgtcactttgccaccaactgttcatatcaatcggctggccatgaactattggcagaagcaaggcgcaattgacgtgtggatgaagttttttgaacgggcgcccaaccgagcggagatggaaaaagagttcttctcgcagttggacaatcctttgctgggcaaagccttcaaattggccatcatcggcgaatggttggccgccaacagtttggaccagggaagttacacgccgaccaactcggaattgttggagttttgggtgtcaaaaagagcgcccgaccgattgttggcatgcgag

SEQ ID NO: 96637 - DNA, 477 bp, Heterodera glycines
taaattcaaccttaaagaaggactttttgtcttaatcaaatggttcgaattttgttgccaaacggtgagtcggccaacgtcagtccttcagaaagtgttgaagaagcgattaagcattgcgttggtggagatatttcatcgcagaatgactattcattggttttctttggtcgcaaattaaactccgaccaacgcttagctgacattccgcatttggacggcgagtcacgctcagttcgattagtctgccgaaaatcgcccggtgttagcattgaaaagaacctggcggatgtggacaaactgcggtcacaatgccgaactttgtaccagaatcttggcgaggaacttcagcaaaagctggagacatatatggtggacgataacaatgccatattcaattccattctcaaagaccatcccgaacttgtgcatgatccgatcgcccttcccattgtcaaggatttgcgactgctggtg

SEQ ID NO: 96638 - DNA, 491 bp, Heterodera glycines
atttaagtttgcattttgattttaaaaatgaaaaaacacgtcacgttcactccgagtatcggagacgatgtccattccaccaatgtatcgtcggtagcggagtctgagttcagcgttaaagagcgtgccgaagtgccagaaatattcaagaaattggccgacgatgcctttcaaatattgcctttgcccgacatcgacccgaccgtcacttcgaccccggcggtcgtcaacaatttgatcgaggcggtcgagtcgctcgactcgcggatgcctttggcgttccaagagcagcagcaaatcctgaaaatgcaaggcgaaatgctgcaactcggcgtcagttgcaaggaacactacaagaagatacacgagcagtccgtgatgcgttacaatctcgagaagagtgtcaataaaaacatcgacgatctgaaggagggcgcagttgtcgcgcagaaattggtgaaggcgaagagtgcgtacgaggaaatggtagc

SEQ ID NO: 96639 - DNA, 1237 bp, Heterodera glycines
cccactcgcttaaggcgcttcgcaatttgcgtcggcgttgacgaagaaaatgggacttgtctgatggtttatgagaacgacttaaacgccattgaagtgaggatggtgttttccggtgtgcaaattggcaaatggtaccggttcgacttggcaaaaggcacgagacgaaattgggaggtagcggaggaacgattgccgacgcggattatgccacggggggacgcggggagtggcggaacacgcggggatcgcattcagctttgccttcccattttctttgtccccaacttcaaatgttttggctgcacttggcgtgtcacttcaccaacttcttttaatgacaaaatgcacttcaatttcgtttcgcctcgattggaagcgccaggcaaaattaatttcagcgaagaacgactggccgaattgaacatccgtccgggggagcagtgttttgcatttttgacattggattgccaagggcccgggccgagcataaaaccgccgcaatggacactcgatgcagtggagcattttcacagggtcaatgttgacccattggccccctccgttctgtccgtttccctcggcgcttcgaaagaatggggcattctgctcgatttggtcattgaatctgaggacgaaagaaatggaatgggtttcattctgtgcttacgcgacggaaaattcgcttttggtcgaattttaaaaaccgaaggtcacaacgacagctgctggagggcaaatgtgggcgacactgtcggcttctctttgattgatgttgattgctttaattaccccgttcggttggctttgaatgttattgcctggcaatccccggcgttcacttctgttgactccgatgttctttccgaccaatttccccaagaatccttgcccgaatttccttcagttcgccttatttctaaaagtactggaaaaatggctcaacatttgttcgaactctgttttcctatcgatgactcccaaatgtcgtgtttgcgcatgggctccctcaaggtggaccgacttggtgttctgatcgacttgaatggtgatttgttgtccgcctggagcaacatgaagcgcaaagggactgacgccatttcttcactgttattggcccgagtgagggcccgtttttcatcattgcctgaccaacagcagccgctttggatggtggccgaaatgctcgaaattgccaaaatgcgagtcgacacggaaagcaaacgacaaacgctgg

SEQ ID NO: 96640 - DNA, 369 bp, Heterodera glycines
cacaacagcaacaacaaaatgatggcattgccttccgacattccctcccatgtcagccgaactcggcgagcagttcatcgacggaggagaaaaggccccgcggcattgcacccggctcagtgcagaaactacaaatgcaaaccaaagaaaacgaccaacgatcggattcgtcggctgctccgcctgacccggagacggcacgacttttgcccggccaaatacatcacttgtagaacaacgacactacacattaccacactaatcactcattaaacataattatattatgcactttggccgagtcccttcccaaattcccattgctcattgtcttgtcgtcttaaattgtgataaatgacttaatgattt

SEQ ID NO: 96641 - DNA, 462 bp, Heterodera glycines
ctgtcatgagcttatatttcaacgttcttcttgtactgcttgttctgctcgtccatttattcagaaggtactccgggcgtcttgtggccgcggtgttgcagcgactgttacacgcgcgcgccgcgcacatttacgggctcggctggttcgcgttgcgccatggcgagctgttgctggccaacggactgcacttggaggtgcgcgagttgcgcgtccattcgctgttcaattggtggtggacaacgacggcaccgacggtggacagcgcggccaacgacggcggtggtcaacgcatggcactgaacgtgcgtgtgtccgtcggcacaattcgtgttggcaaacagttggcggacgaagaaggcagcagaaatgctacgagtagcatttgtgatggtcaaaatccgctgattgaaaactgcggtgtgctcgactcggtgtccatccatttgtccaggcccgggc

SEQ ID NO: 96642 - DNA, 389 bp, Heterodera glycines
acagaaattaacacgactcattgtcacttttgcagagattccctcattcgtccgtcccttctcacttcccaggacttggattggtttttacattacagaccatcgataagaaatacctaaaatatatgtttaatctactaaattgattgcatcatcctcttttacagaaatttacttctttttttagtagaatattaccacatatgttttggtcattcttttataaccaatggcttcgtttctcccagcaaaagtttcatttgcttttgcacgatgaaaggctttttctgtttttggccgattttatgttggcttctgcgctgattacatttgtgactttcacatttttggatgcgtgctcttacggaagatatgcacttgtctttctt

SEQ ID NO: 96643 - DNA, 225 bp, Heterodera glycines
gaccacatcaaactcgaaattgttttcgaaatattcgaaaacattaaggaagacgtcgaatgggaattggttttcgtgggcactgatggccgagaagaacacgaccaagtgctcgactcagttctcatcggaccgattcaggagggacgacacaaatttttgtttgaggttttgtgcctttgaaatatttttattccaataaataaaaaaagcagtcgaaaaaag

SEQ ID NO: 96644 - DNA, 379 bp, Heterodera glycines
gccgttcaattgcgagcgaaggcgaacgatcccttagagaaggcgacgctgttaacggcataaaaatactcgagaaggctcttcaatgtaacacgtttgatttgtctctccaatgttcactccattctcaattgggtaatgcgtattatgcccgtggtgactacaggaaggcgaggttcccttcaaccgttcggtctttttactccccgacccattaaagagaccatcacatggctgacctttgcgcttctagattgcaaaaggacgaattgcaacaagcgaagacattgtccaatttgtccgcaacttacattctgtaatggagattatttttgtttgtaattatttgtgtgaactattagtaaataagggctagcgg

SEQ ID NO: 96645 - DNA, 481 bp, Heterodera glycines
ctggcattctccagcgctatgaaatgcaacagtttcggctgagttgcgccaatttcgagtcggaatcgagctgttgctcgacctcacaacagatggagataattgtcgactccgagtcggactccaatctgacgcggtgtccgtgttgtcgctgtgcccaagtgaatttgatctgtgccaactgtctgaacactaatgttgtccgaattggcaaagtgcgggaggacaaacggcgtctgttgaggagcaaaagtgccatttgccatctcatccagaacgcactcgccgacgaaatcaaattcgagggtgaatttcaccagctcagtcgctccattgaagaaattcgggcgaaaattgcgcacaaaaaggaccaagttggacgacttagacaacgcatttcgcacacggaaagtcaaagtgagcgcaatcgacagaatgtgctccttctcgagaagaaaatggtaagccattcggaccgaat

SEQ ID NO: 96646 - DNA, 393 bp, Heterodera glycines
gaaaagatggcttcttcctcaaatgctcagcaagcggccgcgttgcagatggtcgcggatttggagatcgaaatgatgacggacatgtaccggcgtatgactaaaagctgtcaagaaaaatgcgttgatactcactacagggaggccgaccttaccaaaggggagtctgtgtgtttggatcgctgtgtttccaaatatttggaggtccatgatcggcttggcaaactcctaacgcagatgacgcagcaggacgatcgtgcagttcaacagcagcagcagaatttggcagcggctgctcaaaagatgcacatcaacaaatgattagattgtctcaccgttgatttttgtcattgtttgctcaattcccaaaattaaacaatgctaagcgaggtt

SEQ ID NO: 96647 - DNA, 188 bp, Heterodera glycines
gcctgttcagcgggcaagggcgcgtgtgccggaacaaccggcagaaagcgtcggcgtagcgcctgcaccggccgaagtggcgtcaaacgccgccggtggccaaggcgaagcagaagcggcgaaaggatacaggaagaaaatgtgaaagatcggataattattaatgcagaataaagtgattgttgatg

SEQ ID NO: 96648 - DNA, 277 bp, Heterodera glycines
ggcacaaacgcggatgggacagtgacgtattggcgctgcgtacgtacgaattcactgcaggagggcggctgccgtggctctgctcggactgatgaattggacaatatcatcggactgccaacgccacacaaccatccggccatacctgagtttttctaatgcaattgtgatgcaaaaaccaccacacaacgaaggactccgtgcgaagaagtgccatttgttattctgttgctattttatgtatttgaatccattttattgtataaatgcaaatttg

SEQ ID NO: 96649 - DNA, 481 bp, Heterodera glycines
cggaacttttcatcatgggtatctctcgcgactctcgccacaagcgtgcgcacaccggtgccaagcgcgcccactaccgcaagaagagaaagttcgaactcggtcgccaagccgccaacaccaagctcggcgcgacccgtgtgcaccaagtgcgtgtgcgcggtggcaacatcaagttccgtgctttgcgtctcgacaccggcaacttctcgtggggctccgagtcgtgcacccgcaagacgcgtatcttgggcgtcgtgtacaacgcctccaacaacgagcttgtgcgcaccaacaccattgtcaagggcggtattgtcgagattgacgccaccccgttccgtcaatggtacgagtcgcactacgtccaagcccttggccgcaagcagaaggatgttgccgaggttgaggagctcaacaagaagcgctcgtcccgcgtcctccgcaaggttgaggcccgtcaagccaacgccaaggtcga

SEQ ID NO: 96650 - DNA, 449 bp, Heterodera glycines
  unsure (1)..(449): unsure at all n locations
tccaaaatggcaaaaattacaatcattaaattgaacgggtttaaatttaaattaacaaaaatgattaaaaagtaaaaaattaattaacgaaaaaattaaactaaaaattgccaaaaaagggcaaaaaaataaatatataaaaaataaaaataatagtattttttaaacttaaaaattattgcaagaaatttctcaaacgccctccggccggagaaaaagggaaaagtgccatttttggagtggtgccatttcttgtggtgggaaaaatgccaacaaaaaatggcacaaacactcactcattctaacgactttaattgagggcttggtggtggtggaaaatggtgaaacaataggacaacaacaagaacaagaactggggacagagaagaagccccctgtatgggttggcacatttttaatttggcacaatttgtggcgaaatgacnann

SEQ ID NO: 96651 - DNA, 287 bp, Heterodera glycines
  unsure (1)..(287): unsure at all n locations
tggctttaatgatgccacttgtcagttcagaggaatcggaaacaaaaatgaaatcgccgattagtgggtttgcgttctaataaaaaaaacaatcgcaatttcagtggaaaaacatggtaacggaggcgacagactaagcgattatctgttgaaactgtgaagattcacgccgtggattgtattgctttgaggatgacgaatccaaaacgatttatccgtttgatacaacaattattgaatgactttcatttgtaatcgattaaaagtaataaatgacttggaaaaan

SEQ ID NO: 96652 - DNA, 328 bp, Heterodera glycines
attgtccgacgtcgacaaagacggacatttggactcggatgaatttgccctgtccaactatttgatcaatttaaaactcgaaggccacgaactccccacagagctgccaaaacatttggtgcctccctcaaagaaagcgatggctggcgatgcgtcgtcttccgacaaccaaatttaccctactttggatgagtgatggggcgagaattgacctacagatttctatgttttgtactttgtgactgtgaacaactccttcggcagtttcggcggcactatcccaatcggtttccctttttgtcataatatctaataaattaaccaattg

SEQ ID NO: 96653 - DNA, 484 bp, Heterodera glycines
gtttgttaattaaattccgtatttctgtgttcttccaatacacaatgctccaagaaacagaggcaaagtccgattcgagcaaagctccaaacgaagtggctttatcttctgaaggtcgtatcagcaagctttatgtggaatgtttcaacgaacgcgagaagtgtttaacggtcatcggagggggcaaaatggctactgctttagtgcatggattagtttccgctggttttatcgacaagtccgaagtgaatatctgctcaagatccaaagaaacggcctttcgttggacgacacaaggttaccaaaatgcatatacaaatgatgaattttacagcaaagtgaaaaagccacgtggaattgtgattgtcgcagtaaaaccacagatctttcccgggtttctcgacgaactgcgtaaaaatggttggcttaactttgttgggcctgaagtgctttgtgtgtccataatggctgggattgcacttga

SEQ ID NO: 96654 - DNA, 418 bp, Heterodera glycines
gtccatttaagtttttctcggccggctattcatatcatgaaaaaaaaaatcaacaaaaaggaagaagaacggcgaaagcggtaccgaccaggggagaaggcacttaaagagattcggaggtaccaaaaatccacagacaatttgatgccccggcagccgttccgtcgcttgatccgggaagtgataagcgaaataacatggaactctcaccggttggagacccaagcggccactgctcttcaggaggccgctgaaacttttctcacaaccttttttgaagccgctaacagatgtgccgtacacgcaaatcgagtcactattatgccgtccgattttgtccttattcgctggatccttcacacttttggcaataatattgtttgactaaaaactcacatttcttttttcattccatttg

SEQ ID NO: 96655 - DNA, 652 bp, Heterodera glycines
atctttcaggtctcgttgtgagtgattcgtctgacaaggaccacttatatagacaaaagtggtcctttgttggtcgaacttctgcagaattcgcttttaatcagaagagggcaaaaagtgaccgttgcaaattacacaatagtgccggacgagaaaagcaaaatcgttgaatatctacgtgaatattccaccaaagttgactgcattttgaccagcggtggaacagggttctcaaaaagggatgtgacgcccgaagcgaccaaagaagtcattgagagggaatgcccaggaatcgctgtggcacttctgaagaaagggcttgacattacgccattcgctgctctcacccgtctcaccgcgggaattgctgccaattgtctgattatcaatttgccgggaagcccaaaagcagtgagagagggatttgaagtgattgagccgattctgagccatgcgattgccattgtgaagggggatgagagcgaaacttcagttttgcacaagagaacggctttataagacagaagagactgtctgtcgataagcatttgatatcctatgtatgtgagaggcaattttaaactttacttcattactatgtaccattttgaaaaataaatttttaaggtgactcgaataaatttttatatgt

SEQ ID NO: 96656 - DNA, 452 bp, Heterodera glycines
  unsure (1)..(452): unsure at all n locations
catcaaatcaatctcatcttttccttatgggcgttgattctgctgatgatgactcagtgcctgacccaattgtgattaagcagggcgagtcattgagcctttctcagcttgtgcaaaaaattgaacaattacaaaaccgaactgttcaagagctgcttgttaccctacgtcgtcgcacgtacaaaatgcctgttgggcctcccgacccaaatggagatcgcttttcccaaaatgggcatctcctagtggaagatgttgtgtacaattgggtaagaaaaacgcgtaactccatccacggaattgtccagcttcatgtgttatatgaggggattgcaatgctcgatgaagtcaattatcacttttagtgattggttaaagaaaatcttgtaaaattatttgccttcatattttgtactatttgcgaatttgacaataaatttgttccaatgtnn

SEQ ID NO: 96657 - DNA, 449 bp, Heterodera glycines
atcaatctcatcttttccttatgggcgttgcttctgctgatgatgactcagtgcctgatccaattgtgattaagttgggcgagtcattgagcctttctcagcttgtgcaaaaaattgaacaattacaaaaccgaaccgttcgagggctgcttgttaccctacgtcgtcgcacgtacgaaatgcctgttgggcctcccgacccaaatggagatcgctttttccaaaatgggcatctcctagtggaagatgttgtgtacaattgggtaagaaaaacgcgtaactccatccacggaattgtccagcttcatgtgttatatgaggggattgcaatgcttgatgaagtcaattatcatttttagcgattggttaaagaaaattttgcaaatttttttgccttaatatttctactctatgcgaatttgacaataaatttgttccaatgtgaaaaa

SEQ ID NO: 96658 - DNA, 297 bp, Heterodera glycines
ctttggaacaattgcggaacgcactttcgacgcgaagtgtcctctaaacactttgtcggggagctcaattacaaatgcacaaatgtagggaaggaacagagagggacaaaggccaaagggactaaaaaagtccataaaagtaatcgcgttgttgcgggaaagggcccgttcgctggtgaagaaatgggcggagaacgaatgctcaaaggacagttctctttcgctggttgaaagtctttacagagatcttcgagaccaaggactgagctttgagctcgattcgacaaccaacaatca

SEQ ID NO: 96659 - DNA, 505 bp, Heterodera glycines
gtttgagctaatttattctccaaaatgccgtgctctctcgctacacaatcttctgttctgaagcgcagagcacctgcgtctcctcagcaggcaaaaatgcatgacaaaaagagacactttgacgaatcggcaaacaatggacaagaaaaagcggacaaagtgccatccaaaggggacaaagtgtcaccgacaaatgaggaaaagaagaaaaatgttgcctttgccacattggcaatccatgcgggaaatgaacccgagaaatgggacatgaatcaggtggttccaccaatttcactggcaacaacatataagcagcaatttgctggaatgcccaaaggtcatgattacgcacgaggcggcaatcccacccgtgatgtgctacaacaaagcattgccgcgctggaaaatgctcgtcactgtcgcgtgttcagctccggactttcagccacagcagcaatggcaaattggcttcattctggcgaccacattattgcgtcggatgatg

SEQ ID NO: 96660 - DNA, 606 bp, Heterodera glycines
attgaattgatttatttatttattttgctgctatattcttccaattgtttgctctcaaatggtgctcaccgactcggcccatgccgaccccaaaaatgccgtgcccttccgtctgcgcatcgacggccattgggtgcgcgtggacgagcggctgctgcgcgcgcacccgggcagcggcgcaatgctcgcctaccgggacagggaggcgagcactgtttttcattcgttccatgccggctcaaagcgtgcctaccgatggatgacggaacaccgtgaaaatggtggtgccaccgccgaaactgaggcgacaacagaggcaaacggaacggcagcaaaaaccaaaaaaagcaatggcacgggcgccggcgccgccctttggccggacaaaatcgacgccataaatatgggcaaatttgggaggagtgccgaggcaaatgaaaagatttgccgttcctttgatgttctccgctcccgcgtccgttcgctgggccttcttcgcgcggacgacgcctttttcgtgctcaaatttgtccaatgcgttgctctgattgcgttcgccgtgttcctccagtcgcgcgactttttcctcgcctccgccctttgcat

SEQ ID NO: 96661 - DNA, 327 bp, Heterodera glycines
gcaatgcaaatcaaagtcaagaccctcaccggcaaggagatcgagattgacgtcaaccccgacgacaagatcacccgcgtcaaggagaaggtcgaggagaaagagggtattcctcccccgcaacagcgtctcattttcggtggtaagcaaatggccgacgagaagacgctcgcggatttcaatgttgctgccggctccgtactccaccttgtgcttgccctccgcggtggatccaactaaatccacgctcgtgtcgtttgccttttgccgtttgtcactcgagtccctcttcaccgacagtcacacaatacacttgtatttcccatc

SEQ ID NO: 96662 - DNA, 371 bp, Heterodera glycines
gtcttttgcctatggaaagtccattcagcagaatggtggtcccaaccgtgtcacattcattctgcgaaaaggtgcaattttcttcactgggatggttgttggaacagtcgttgtttttaaggcatttaagccaacgcgtcccttcgacgaagcggcagaacgtggcaaaagggagctgttggagaaatacacggaggagtacaacgcgttgcaggaagagctgaggcaggcggaagagcatcttcggaacggagggatgtcgaagaggcggaagcgagaaaggcttagccgatgacaataataatgatcaatttgggtggaagggttgtaaatcctctgaagtaggatcacattgctaattaaacattttg

SEQ ID NO: 96663 - DNA, 318 bp, Heterodera glycines
gtgacacaaattctccaatattagttgtttagcatggtcgaaatttctattagagcccggattttaaaattgccattacttagaaaatggacagggacttggtcccgagattcacgttttccgggactcccggtcccggtattttgtccaaaaaaaccgtggacctgaaccacgagtctcggcaaaatcccggtccctacaagcctaatttatctgcgttttttggattttctccggtatttatcggtcaatacgctttgtccaatctctaattaaaagaataaaacaatatccaaaaataatgggaaattgtaatta

SEQ ID NO: 96664 - DNA, 647 bp, Heterodera glycines
  unsure (1)..(647): unsure at all n locations
tccaattaagatttgttaaaaagtccaattatcactgcattcttatgattctcgcttcttcgtcaaagcgattagcttgtcaattcctcatccgaaaagtgcctcattttgctgtgacttcctcgagaaaagagtccaattggtctgaagttcttgatgaagcggtccccgccagaaaatcataccgcgattttcagacactcaacggaaaccaacgcgatgctttggccgcatcactcttttttttattagtcaatggtcaccgcctatgggctcaccgggttcttgaaaacacctggtggcgagggaagaggtgcattcgaggggcgctcgacaacacgagaggaggaaaaaagaggcgcgggagaggatgatgcaaccaccaagcgacgacaatcccgaagcgggaaggcggaccagaacgcctcacgaaacagagtacaaaaaaggaggacaagagaagacgccccaaaacaaagacagccgcaccccagccgcggacaacgaagaatcgatcagcgggcgggccaacacgatcggaggcaagaccagaatcaacgccagcaaagtaanaagggcacaacacaccagaagacatgaggcccgggcgacagcgctaaagagggacttagagaaagcgaccgacg

SEQ ID NO: 96665 - DNA, 286 bp, Heterodera glycines
cgattgaaataaatggaaaaaaagcaaagtcaaagacaaaactttaaagcactagccgaagcaaagtcaaagacaaaaccttaaagcactagccgattgaaataaatggaaaaaaaagcaaagtcaaagacaaaaccttaaagcactagccgaagcaaagtcaaagacaaaaccttaaagcactagccgattgaaataaatggaaaaaaagcaaagtcaaagacaaaaccttaaagcactagccgaagcaaagtcaaagacaaaaccttaaagcactagccgattg

SEQ ID NO: 96666 - DNA, 214 bp, Heterodera glycines
  unsure (1)..(214): unsure at all n locations
aaaaccgccgaattggcacatcggaggagagctgaaaactgcgcaagacaatcctcgacaacagcgaatttctctgcgaagccgtgcaaaggacctgaaggaaccaaatgaatatccccgaaatcggtggataatgaattttttgatnnnggcncccggaccggaagcgcaggcaccaagagaaataacgcaaaaagcaacaacaagcaagacg

SEQ ID NO: 96667 - DNA, 767 bp, Heterodera glycines
caagtttgagctcagatattatgccatttttattcccttccattgttactacgaataatacggcgtttaatcggattaacgacaaatcagcaaatgttcgccaaaaattggatatgatggaaacagcgcttgtgcacctaacgactaacaaatgtcagcttaatttcagtgccgaaaagacaagatccgatattcgtcgggccactgacaagcacatttctatgttgcgtgaacgcgaattaaaactgtttgaagaggttgaccacattcatcagcgagaacaacagcttatagaggaacaaatggaacaactcaaccaagccattggcacttctaaatttgtggtggagaaaatggccgcatttgctgatgaaaagaatttagaagaactcatttctgtggaattggaccaaaaaatcaatttgcttgataaattggcaaattcgtccaaaggtaccaacatcgtattcagtgccgcttttcaacagaacatcccgcttggtcaaatttatgttggatttgccggtggttcggcttctcctcaggcgaatgccaacgacggcgtttcgtccgttgcttcagatcagcgactacactttgagaatggcagcgagatcagtttcgatcaatttgtcaacagtgcgctcagaggagagacatcggtcaaaggtggcactgatcaggccaataatcacttggccaattgtgcagcaaatggagtaaaaagagaaatgttggtgccggacgcgacatttatggacaaactt

SEQ ID NO: 96668 - DNA, 482 bp, Heterodera glycines
aaaagaaggaaatcgctttaaaaagcacttcgacccattgactaccaaagaagcaaagtcttctgtcacttttcgatccaccgaaattactgcccatgaatatttggatttttcattgtttcgtttggtgccaccgcatttggtggaccctggcacaattgtggtaaaaactgtgcgacagccaaatgttcttgaatagcacaattatcacaagcggccaattatcaaaaccctggtcagaaaacggttgtattggctgcgttctccctccccaacttttgctgattctgatcactcgcaaaacaatgaatcgtcgatagaatcagcggcgaatttgcatgagaatacggcgacggaggagagaccgcgcgcagaaagcacatcacaaaatgttggcgccgatgccaccgcgtgtatgacgacgcgtccctctgacgataacgagtcatatttggatgaacagggcctccgttggcatcgac

SEQ ID NO: 96669 - DNA, 514 bp, Heterodera glycines
gttagggtgggtattcatgggcccgtcccgtattcatcctaattggggagaggctgagttcacttgcgacggtgtcgcatgcaggactccccgctccctggttacggtgtaaaattttagcatataggaatttggagtgggtgctcggaacggatattttcggcctggaaatggccgtggactttaccggcacatcagcatccatttgcacaatggatgcgttggaaggaaagccggtcccaaaaaatcacctagattttttgcttggcaatcagcagtttcgccgatgtaaattagcaatttttggtcattaaataaaatcatatgtattttcagtggccgcccgattgaatgccaccacaactgaaaccgatcgtgacataatgtgggcttataaaattagcgcaggacaaaaaaatcggtgggtgtgtgtgtgtttttacatttatgctaattttttccaacttttaggcagaacggcaacttgacgcattaattactcattttatgcggt

SEQ ID NO: 96670 - DNA, 482 bp, Heterodera glycines
ggtggggacgcagtgccccttccgagtgcagttgctgactccccttttctcgaggtcgatttgaataggacattaactccgcaatctcaatggacaaatgagtcgactggcactatgcatcctatcgttgacactgagccgaatccgatccgagacgcacatgagccaaatcacattttccactattcaccctcatcacactctcccgacgacgacgaaagcagtcaaaacggacagagttcgtcctctcagtcagcgcccatcagctcagctttagacgcttccttgactaatttatacaaggaaaaggaaaacgacgaatgtgatgatgaacggagcatgccgagaagggcgtcggagagaacgctggacagatttgaggacgtgagaacgattgcctccagtgacattgaagttattcgccaaatggacgattggtcggtcacgagcagttatccgaacagctcccaccagcagagcaa

SEQ ID NO: 96671 - DNA, 410 bp, Heterodera glycines
attttggacgcaaacggagacaaacagccgatccatgttttcgaatcactccaccaacacccggtcattctcatgcagtacacagcggcatttgatgtagcaatttcctttgacgaaattggaatggttgaatattggtcaggcagcagaaatgagttttcatttcccaagacggtcaatttcgaatttaaaacggacacggatttatacgaattttgcaagataaaacaaatgcccaaagcattggccatcagtccggacggacggacattcgccgtttggtgttccaattcgtacatttacatttttgacttgagaagcggcaaaataatcaaaaaactcgacgaaactcttcaacgatacatcgaaatgggaaaggagactaagggcaacggactgccggcgatcga

SEQ ID NO: 96672 - DNA, 480 bp, Heterodera glycines
ctgttgtcgctgtctgagcttgtgccgttgaatggccgcggagggagcggcggagttttttacaaaacgaaggacgacaaattcatcttgaagagtctgaacccggatcatgatgagcctgctaaaatagacgaggtgttggacaattattcgaagcatgtgcttggccagcagcccgagaagggcaagcagtccacggacagccgctccatgatgaacaccttcttcatgtacttcgaaatgaatgtttacgccaagctgaaggagggcaagggaaaagagaggaaaaagaaacttcggctgcacatgttacaatttgtggtactgaacaacgtatttgagggaatcgacgagcaaactctgctcaagttcgacatcaaaggcactttcgcgccgggcagtgccgtgcagcacgaccagaagcagaagtggtacacaggagagacgggttggcagaagagtttgtaccgcgagtacgac

SEQ ID NO: 96673 - DNA, 481 bp, Heterodera glycines
catcgagtcttcgtctaggaagtcaacgaagtcatgccgtaaatgcagtccatccaaaacgagaaaagccgaactatgagagaccaaaaagccaacaaagcacaaagacggagcaacaaaaatgctggaggtgcggtcaaacgaaccatcaccacgcagcttgcccgcagaaaggctacaaatgccgaaagtgctcacaaaacggacacatcgagttgcgttgtgaagcagtgcaggaatggcgcaaaaagaacgccaaaagttggctcaagaaaaatgttggcaatgtccacatagtgacagtcaacattggcaccacagcaaaaccgacaacaaagtcaacattgctaagggtcaaggtctcctttcaaggcaaagtcatcgaatttgtcctcgacagcggtgcagaagttaatgtcataaacgaaatgacatacaaattgatcggtagccctaaaatcaaagcctgtaaagaacaagc

SEQ ID NO: 96674 - DNA, 627 bp, Heterodera glycines
aaaacaaaatgaaaaacgcgtagaaaatggacaacaaaaatgtgttgagaacaccaccgggaacagcagcaattgggtgttcaccaccaccaccgtcaacaatcggaaattgctgatgatgcggaggaggaggagaagccgacgatttggagcagggcggaggagggacaccaccaatgccaatgccaacaaaacaacactcacagaggcgcgactgctcctgggacatggcggcgaccacctcggtgacgagtcgcgggtgctccttgaccatctcggcccagccgtcggtctaaaaattttaaagaaatccatgggaaattggaaaggtgctaggtcgttatttaaaaaaccatcattatgatttttgggccccggggtcgtttgggccccaacccaaaaatagaaaaatgtacttttttaaaaattaagattctaaaaactaagcctgagggatccctcgccacttttcactttctgtcgtcttctccgcttgatgggaaggaagaattaagtgctcgacagaactcaattgacattcggatcagtgatggcggatacgacgacgggcgaacaattaaaaaatgcttaatcattttatgagtccaatcgtcgacaattttgctt

SEQ ID NO: 96675 - DNA, 368 bp, Heterodera glycines
acatacggataaagtgaagtgaaatcaaagtacgagatcttctctccatctcgtgcttcatggtaaagcgttagcggtcccgtgcgcccgcccatgaatgcatctctgatcaacagtggtccatcatcaacgtattccgcaaacttttgccgcatctctttgcttctgctcagcatacactgaatttcgcattcccaatacacatccacgtgtgccacttgggagcgaatgaattccaggcgctttgcgtcccgctcgcgcacttctcctgccgactttccatttggtagcagcatgttatcacttggataacactttttgcacccgtgccacgcacaaccttatttttcaaatgaaacgcataatcc

SEQ ID NO: 96676 - DNA, 272 bp, Heterodera glycines
gaattagcgcctaaattcgcttttggcattatgaatcattttgtctaacactggatttgatttgtctaacattgatttgaccaataattataccacctatgctttttaagattacgaattagaaaattaaatttgaaaattcttaaatatgtactaacattttcaaattttccatattactttctaaaaaattctctatagtgtcgaaattaccagccacgaaatttggtcattttttgacaaaaatctgttaacaaatggctttaaaaatc

SEQ ID NO: 96677 - DNA, 759 bp, Heterodera glycines
attcgatgccatccaacgcacagaaagcggacaaaacaatggcaaacggaaaacaacaaacgatcggtgaaaagcaacccgaacacaaacggcgtgtgatgcgacatcggcacattcgcctcaaaccgaatattcttaactcttcggctgcagcgaacgcttccaagaaaagacacccgcagccaaacttcgacacaatcgaagtgctcgaggaggagcacgagttcgaggttccaatcaacgaggaggaaatgatgcgctttcccgggatggaggaaggctcacaaaagtcggataaaatcagcgtccacaggaggttttggcagctgaattggaagggcgtccacttctccggccttcccacttggctacaagacaatgaattcctccacttcggacatcgacccccacttccgagttttggttcttgctttaatagcatttttttcacttcataccgaaactgggaatattttgacacatatgtacggtgcaatagcattcattggcattttcatttggtttttggtccaagccgaagatgtcgtcagttggcccgacaaattgatattctcttctttctttgttggagccattctctgcatgggaatgtcttttgcctttcacacagtccaatatcatttcgaagatatcaacaaattagttacaaattagactattccacatgtgcctactatcattaactcatttatcccttaactctattacgcatacttctaccaatgtctcccgagacca

SEQ ID NO: 96678 - DNA, 476 bp, Heterodera glycines
gggtccgggcagaggccatcatcgcagatcgattaagaaaattgggaccccatcgttcatgggccatttgttgtcgatggactcgcacattcgatggcccgaattcaagacgcctggcccacatttgcgaagtcaagaaatgaaattgcctagcaacattggacagaagaaattgtccaacattggactggttgtgacaactcgaaaaattgtctcaattggtcttgaatatccgcacgcttacgaagaaattgtgaagcagtacaacgactttcgttcccacattgttctcctgcaagatctgaagacggcactgcacaacactgagcttgaacttgaccaacttgccgcccaaatgccagccgataaagaatgtccaatcattgagccacgctttcgtgtgagcagcacattctacgaggaattggaacggagtccggtgagggtgctgaacacgccaatgactgagggaggca

SEQ ID NO: 96679 - DNA, 360 bp, Heterodera glycines
cactttgcagccagcccaaggcgacacgggcaaaccttgcggagttgactatgaaattaaaacaatggtcggaggcgattcgacgcaagagaagcccaagaaacacaactccgtccgtcttgccattcgaaaactcacttactgtcctcaattggagcgaatccaaccgatggttgacgtgaccaaaaattttatcatcagccccggtggccttcatctcgaagcgtcactcgacaaagaaatgtattaccacggcgaatcaattgcagtgaatgtgcacatccaaaataacagcaacaaaactgtgaagaagataaaagttactgttcaacaaatggcagacatttgcattttcacaac

SEQ ID NO: 96680 - DNA, 479 bp, Heterodera glycines
ccgtcgccaaaggcgcggcgcggcgtgccaaaacggcggcgcttttttggccagcaacaggcgcaacagttggcgatgcgcttgtgcgtgtgccaatcctgtcgctcagtgccgagacgtgcattggacgccatttctctgttcactccgctgaacacgccctcaaaatgggcgccaggtcatccacgacatgtggccgtttgccaacggcagttacgtttcgggccgggccgtcacaaagtcgcgggaagtccagcacaatgtccgtgtccaccatgagcaccgcaactgctgctcccgcgacttgccacagatgaggggagggcgacaggctggcggtgcaacacagacaggagaaggaatttgagcgcacaattcgcacttacaaaagcccatacatcagcttcacctatttccactcacagactttggccgaagaagcgaaacgcaacgcgcacacgctggtgctccattttgtg

SEQ ID NO: 96681 - DNA, 475 bp, Heterodera glycines
gatcagtgagttggagatggtcgcgttcatttgccaggtggaccatgtcgctggggaaggagggacgaattttcggtatgcgaccggccgggatgtgatgggcagatgcagtcaggattgctgagcggaggcgtcgttcgccatgaacactacttcttccatcccaatgggccccgttcttccgtgcattggccaaaacaataaaaagtatgaagtgatgaaaaagaagaaggagaaaaatgacgagaaaatgaccttggaaacgaacaaaatggcgggtgaaaagcgaaaaaggccgccgagtttgtccgagaaaagttttccatacaacgccggactggaaaggaacaaattgtttgtgaagaaattggattggtcgtgtacgggcgaggaactcaaaaaatttttcgagaaattcggaactgtagtggacgcgcgaattgtcaccaaatgggacggtcgctccaagggttgt

SEQ ID NO: 96682 - DNA, 453 bp, Heterodera glycines
  unsure (1)..(453): unsure at all n locations
gtccgtttcttcagggccttcttcttccatcggttgttgagcacgaacgcgaactcggcactgtgatcggagcgtaagcgcagcagaactcgaacagaancagcagagaatctgtagctcatccatctcttctcatcgtcatcctctacttttgtccttctccccatcgccatgtctgaagaggaatcgcaatattccgacgaagaggttgaggaggaaagcattgccgcggatgaagggagcgtgcaggaaccggcgcccgccaaagaagaggagccggnnnnnggggggtgtcattnnncccaaaaacctgggggacctccaccggccggggggggggggggccgggtttttcaccaaacaagggggggaaacccccccggggggggtgggagggggaatttcccgggaccccagggggggccccaaaaatttgagggggaatttttgggg

SEQ ID NO: 96683 - DNA, 479 bp, Heterodera glycines
cattgcgtttccgcaaaatgtcaaatttgaattttgaagacaatttgcaacgcgtacaagtggaaattcaatggaagcaatgcctttataatccgatcgtcgctccgtttgccgacgtcggctcttacccaattttcactgacgaattcaaagggacgcgcaagtgcactttggatgtgtacgttcagggaaacttagagcatttggacgacaaagttgtgagttatggcagttctcatggcacttttcgtgccatcaattcatttgtctcgagaatcactcaattgagactcattgcttccatctcgtcccccacccaaaggttttcctcaccgttcatgacgttggcaagacgtatttgtcttgcgtggaccttgccaacagtccgacgctctctccgctggtcggtcagcgtgccgttttcctccacgtttctgtgccagggcaagcgcccggcgctgaaaattttgtcggagagt

SEQ ID NO: 96684 - DNA, 645 bp, Heterodera glycines
attatttttaatggcaccgcccgtcaaaaaaaagaaaaagttttcctccgacaatcaccgcctcatttcttctacagaaattggtgaacatgaacaacaatcgatgggttcacttacgacatcgtttggaaaacggcaaagtctttttcgacatgcaaagaaaatgaacaaccgaattttgaggaaaatctggatttgcactgatatttggatggacactttcccgttctttgaccatgcccaactcggcctcaaattggcactgatttcgccacgtttcgatgttttagtagacaaacatttcaattgccaatctgaattgacaatttggagagaaataacaattgtcaaggacacaggatcagaattaaatctaactgtactgattggtggcaaatctgtgcaatttcctttgcccgaccgttcgctgcccaacaaaattcgctttgataatcttaatattgattacattgaccattccgtcctcgtgtttctccgtgccaataagcaaatttgggacaaaggcaccaatttgagtttgtatgtgtgctggtcacacaaccagaacgacaacaacaacaatttcctgccaatttgggatgtttttgtttgtaaaatttggcccatttttgcgccaaacattcg

SEQ ID NO: 96685 - DNA, 206 bp, Heterodera glycines
ttgaacgctttatccgcaatttgagtgagtgatggatggaatgtgattttcgatggaataggatgggaggacggaattttaagtcaatttctaattttaagattttttttggtggggaggattacgttttcaaccccaaaagtttgccatatttttgaacagggctgcaaactcgaactttttttttaaaacaaaaactttttgta

SEQ ID NO: 96686 - DNA, 596 bp, Heterodera glycines
gaaaatcctagaagtttaaaacaaatgaaaactgcgggggagaatcggtttgttgatcccataaatattgtaaaatgggccttcggcgattggaattgaaaaatgcctcaacaataattaccgccctcacaacaaattatggttgtcgacctgttcgctgttaacagtgcccggggtgtcgaagcaccaattgcccagtttgaaggtgaagtcgttgaggttcatgttgggccgctttttcggtccattgccctcaatttgggcaatttcgtcggcattttccaattgcccatcgaagtatttgatggttttgtccacggacacgggctgtttattctcttcccattccttggaaaatgaaagcaaaattgttggcaagtgatgttaggcgaacccgaaaagagctgccgatgatcccttggagcacaacgtatttcggatgtttggtggtactgaaggccgacctcagcattagggactcctaaatacaaaaataagatgtagtaattgccctcttggtcggttgtaactgtcaggtccaaggcggacttttcctcttggcatttatcacggtctctaaatgtttgatggactgt

SEQ ID NO: 96687 - DNA, 607 bp, Heterodera glycines
cttttagcatttattactttaaataccgataaaaaattgcaagtaaatatatgaaatgtaaatgtgtaaaacacctattaattgctcattttccaatattgcccagttgcgtcttccactgtcagcacgacgtgactttttgccgatttgctccatttttctgtttctcctttcctccgtccaccgtgggacgacagttgtgaaaacgtcgatggatgcgcaaattggcggattgtgcgaattgtttatgacagaatggacactgaaaagggcgttcgccggtgtgcaccgtgcgaatgtgcgtcctaaaattgaagtccaacgaaaaacgctttccacagtcctcaaagtcacaaacgaaacgtttctcgcccgaatggaccaacaaatggcgcttcaatttggaacgctcaatgaatgagcgtgaacactgttggcaaatgtgctgacggggcccatggatttgcaagtgctttcgcattgcgctttgtttcacaaatgttttctgacatcctttgtaagaacaagggatcttctgtgtgaacagttgcgagctcaacattggctggtccatcttttgaacactttccgtccgattctttcgctt

SEQ ID NO: 96688 - DNA, 220 bp, Heterodera glycines
atttctgtttttcaaataatccaacgaaaatccgcgtaaaatgtctaataagcaacaaaagaacgcaaactttggacagagatggcaacttgaatcgaatacgtccggaagtgattcgaagacctttctttgggggcagccacctgattttggatttactgccaagactcggaatgatttggtcgggcctcttccgccctcacaaggcgtcagtccgtcg

SEQ ID NO: 96689 - DNA, 850 bp, Heterodera glycines
aagatttcttttagtacctaatttttttaaattttacggggaaatcgatgcagcgtggtgcacccggtaagattaagttagtttatcgcagaattaaatttttcactgcatgaactttcacctttcttagctgaattcattccaaagtcaatggcgccaattggttgcccaatcgtcttcacctctgcagttccaattggaaatgtccaacctgaactactcgcccattaagttcaacgctcgttttctcgttataaattcgtctgctaacaataagcgacaaacaaatgaaaaatttgcttttgacgaagaaatagccgacgggtttcaaattgcaactgccgatgactctcttctgatagaagttgtgctgtataatatttccaatgttccattgcgctttgaatattgttcattgactctggatgaaattttaaattcatccggtgccaaaaagtcgaaaacactgtccgaatggtctacggcgggaaattcgtcaaaaaattctacgttggtattggttcccaaaagaccaagccgcgttttctttatctacaaaactacatttgcaacatctcttaaacaattgatgcaattgccagcctcaaaggcaccgactagcagatgccaaagtccgttgatggatgaacagaatgccaaggaaattttaataacggtccgacacttttcattgcgtacattgtccggatcactcagctgggacatcgatcaccgatcgacgagtaatagacatcaccaaaattcaattgaggagatggacaagaacaactatgcagtgaagtgcgaccacaacggtgcaatgtgttactgacctgtccaattttggctg

SEQ ID NO: 96690 - DNA, 617 bp, Heterodera glycines
actttccatcctcccaaatttcccaaaaatttctcaaattctaaatttgaccctttctttctttttctttgaatcggccgaatgtcgtcgcttgagcaattggcttcacctcacaacgatttttacgagagtctcttcagacagctgaatccctccggaagtgccgaagtcgatgccgcgtctatcgctgcttttttgaaaacggcacacggcgttagcgtcgcacaactctctcagatttgggaaattgcgagcgaattgagcggatacaaaaatcgaagcgcactgaacaaaattggcgtgtatatatgtttaaagttggtcgcgggcattcagcatggtaattaggcctaattaggataggggcgtggggcgaagagaggttccaaatttgtctttcattccccgtgtgtccaattgcttttccccactctgatcggtactgtctttctttcaccgtgaaggcttccctctcgcgccctccgatctcgacgtgccgttgtccgccgtgccccaatttgagtgtctgtccttccccacgccgcctcctctgccccccgtgccgcctccgccctccgcggactcaaaaagtccgtcagtctctgccgaattgggca

SEQ ID NO: 96691 - DNA, 160 bp, Heterodera glycines
ccggccccctggtccccaaatcaccaacatttttgcctacggtatcagttcggtgccgactgtttcggcgccgccaactttgaaatgccacaacatttttctttgccagttcacgtagcaaatctgggcaccatttgatagcacaatttgtgctatttgt

SEQ ID NO: 96692 - DNA, 963 bp, Heterodera glycines
accatgattacgccaagctctaatacttctcactatagggaaagctggtacgcctgtagctaccggtccggaattcccgggtcgacatcatcatcatcatcatcatggccgctaatacgactcactataggggataaatgttttttcttttgtcttttgctcgattttcctttactagctgtgattctgattttacagactttctttttctcgccatttcttcatggactccgaaaatgcgttgcaatcattcaaagaattcaccggtccaattttgtgttgaattgatcgttttccaatttaattctcttaggctgcactgacgatgacagcgcacgtcggctgttgtccaaatgcgcatggaatttggagagagccattgactttttcttctcgggacgaagggaagagggggatggggaagtgatgtgggacgagcagcagccgatgacgagccaaggaacacgacgacgaatttcgctaattactattaatgacttcaaattagcgttcttccatccttccattccctttgcaggtgtattactctctcttcacttcactgctttctgtttttctcgcaaagacgagcatcaacggattgttgcacaggggtcgcatgttcatcttctcccactcccatctgaaagtgttcctcgccattcccgacgattggtcccccatcggttgtcaattgctcgacattggggccggtgacggcgcagtgacggcgaagttcacttccatttgtgttgttgaagcatccaaagtgatggagtggcggttggccaggcgcggcttcaccgttctgccgatggacaagtggcaacggagtggaccatattcgttgataacggcactgaatctgctcgaccgacaccatgacccaaaaaaattgctgaattctttgcacgaattggccatcgagcacaattgtcccattttactttctgtcgtgctccc

SEQ ID NO: 96693 - DNA, 471 bp, Heterodera glycines
caatatcgcaaaaacggctcaaccaccacactcacccacgccaaccaaccaacgcaaagcacatacgactaggaactttatacaaattttaaaaaagtaatattttgtatatgcatttaatcaaatttctactttctttataaatgttagtttgactcccttaagagagccttcccttctcatgtacttgtacctaaaatgttgttggcacaaaaagtaaagggggaaaaagaagacaaatcatccgatcaagggctaagtctcaacagatcgcagtgtaaaagctgctctactgctaacaaccccctgaccagtagtcaagtcgtatacaagtgattttgcgccccgacgttccaccatggcacacgagtgctacggctttggcaatgtgcgagcaattaagcacgcacatcgggccagatgctggggcatttgtgctgcaccgcaagcggcgcataagtagtacctccc

SEQ ID NO: 96694 - DNA, 214 bp, Heterodera glycines
gtcgtattttttgaaaaaaaaaattttcaaacaaccaattattgatcctaatgaacaaaaagaccgtgttttcttaattttaatgctgattaggctatcagagtttgaaaaaattcaaatttgagtccgattttggacataggcgcaaatgtcggggctccctacagatgaccttttttgcttttgaaaccactttttggagtgccttcttttc

SEQ ID NO: 96695 - DNA, 615 bp, Heterodera glycines
gaaacactttgtgtaaaatgctttcccattctgcgcttccattcacacggcggaagcgttttctcgtccaaccattttttcattttcttcggtgattggcaaaatgctttccacctatgccctcttttatccgaccatcatctgctacattttctgcttccgcatttgggttgctactgcttcgacagcttcctaccgtacggcgggaccgaaaacgaaagtgccagacaaaaacgaatggatgaagcgatgtgcggcggaatacgagcgaaagtactgcgttgagacggacaccaaactgaaacagcagacgacgaagaacaaggagaagaagaagcagcagcaacagcaagacgaatcgccggaggagtattacccgaccaattacgagcccgccttcaattatgacaaattgcatgtgtccgatataatccttccactgacaattcatcaaaaggataaatatcaagcccaaaatggaccgactaaatacgaaccgaaggcggaaggacagcacgtgacgagttcagtaacaaccgcagttttgattctgtggaattgtgtcgggattgaccttttttagttttataatatcaaaataattttcaaaatccc

SEQ ID NO: 96696 - DNA, 480 bp, Heterodera glycines
atttacaaaatgttcttctgtattgtctgttggtccacttatttgttaggaggttttttcggcaatcattaagaattggtgtcccgacgaaaaatttttttctaaatttgtcgagtttccttcacttactgtgttgtatgtctacatttattttgaaattttgcacttacaaatgtcaaatcctcaaacgtacgtccattctttgattcccccctcttcctgttgatgctgctgctgttgtgtttgctcctctccgtctttttcatagcgttttatcgacccttccccgtcctctcccccccccccggcgtccctttcctccccaaacaccacagccacaccaattcattctcttctaactttccaaaatgtcccaaacaccacagccaaccaattcattctcttctaactttccaaaatgtcccaaacaccacagccacaccaattcattctcttctaactttccaaaatgtgacggcg

SEQ ID NO: 96697 - DNA, 550 bp, Heterodera glycines
tggagctccaccgcggtgggcggcccgctctacaactagtggatcccccgggctgcaggttgcgattgagtgacgcaatcattgcgaaagtgccatcttttgtccctccattaaaatgacgcatgatttcaccaggcagcaaatgcgtctccgtttctgcctctgttcatttcactaatgacattgcccccgtcgctctttgcctttgaccaaatgccaactttggacccggcaattccgactcaaagtccccacttggctccctcttccgattcgtgtgttggccaatgcgctttgattttcactgatcaaatgcgctcccaattgggctcggaacattcgacgggactgctgaatttgaattacaacgaattcttggctgccttttccaattcgtctttcttcgattccttttgcaatatttatcatcaattcaatttttgctacacaaaatgcccacaaggatttatgcaagaattgttgagcagaagtgccgaaatagtggaccatttttgtgtgtggaattacaaagaaataaagacaaaattcg

SEQ ID NO: 96698 - DNA, 265 bp, Heterodera glycines
atttataagcatttgaagggttctcagcagtttccctgcaaaatttggtgagctttcgatcagtctagaacgttggggatcaaatgcaaaaaataatttaaaaaaaataatactggtgtggtaagtgtgaagaactgtgttcctccaggcaaaaaattctaagaaaatttataagcatttgaagggttctcagcagtttccctgcaaaatttggtgagcttctgatccgtctagaacgttgggtgataaatgaaaaaaataatct

SEQ ID NO: 96699 - DNA, 251 bp, Heterodera glycines
tctctttcaacattttaccaacttctgaccacgaccctttgccaagtctctttttttgatataaaagttcaattggctttttgtcttcaaaattgatcagtgccatcggtttcattttctctatttctgatcgtccgcattggcaccattttttgctcaatctttcaccactttttggcaattcatttttttgagatgacaattttcggcttaattcgccaacttctttatgaattaatgaactttagagt

SEQ ID NO: 96700 - DNA, 270 bp, Heterodera glycines
attctctcatataaaataaaaatgaaaaaaatattatgttcaaatttattaatattaaaaagcttaaaaactaatttggatatgaaaaaaaaaacaaaataattatttacagggttgagggaattgaactttagaagaagaaaaaagtatggaaggcacaaccaccaggccaccgacgctcacattggctttacattctttgaaaatgatattgaaaaggcaaaaaggaaaagcttcatatctcggccagaagcttcatttagcaaaaat

SEQ ID NO: 96701 - DNA, 518 bp, Heterodera glycines
aatttcaaaattttatgacgaattgcaaattcgatggaaaatgtttattatccattttcgttgacaggacggcatcccgccaaacgaatgccttttctgtgaactcaaatccgacacttgggaggcaaatttggcgcacatgaggaagcagcacggttttctggtcccggactcgccattctgcacggaatgtgcccgggttgctcacttatttggttgtggcactttgcttttccaatttctttttctaattacatttcaaggcttcaaagtcggggacggcctaacctgcgtccgatgccaatgcgcccgtttccgttcgattgacggactgctaaagcacatgcgacgactccaaccattgcaactttcgaatctattcacaacaggaggtgcttgctgttcgttgtgtaaatgaagagcccggagagggagaaatttaggggaactaagaaatggttatttatttgataagattgaaaatgatccttagggggatgtcagacatctaatatatc

SEQ ID NO: 96702 - DNA, 191 bp, Heterodera glycines
gggaattccgcggacagcacaccgcagcaatacgcatatccgaacggaattaactcaaccggcacagtgacaaaaggggcgggggacggcactgtaaacatcgactcgttgagagtgtgccaacaatggaaggaccagggcaaattggtgggtggaaagagtcggacgctcaattagcaaagataaaaaaa

SEQ ID NO: 96703 - DNA, 490 bp, Heterodera glycines
catcaccatcaccacaaatacgcgccgttggagcatctgctgaaccgcggggtgccaatgttcaagcagttgaacgaggcggaggtggcacgggcgatgatcagccgctactggcgcgacctgtacgagcgagcggaatgcgacgtggtcattgtcggggccggcagtgcggggctgagctgcgcgtactgcttggcaacgcggcatccgcacctgagcatcgcgatcattgaggccaacgtggcgcccggtggtggcgcatggcttggcggacagctgatgagtgccatggttgtggacaaggagatggagccgttcctggacgagctggcggtgccatatgaggagggtggccccaattttgtggttgttcctcatgccgcactgttcacagccacactgttggcaaaagtgcttgcgcagccaaatgtaaaactgttcaatgcaacggcggtggaagatttgattataaaacggcaacaacaatcag

SEQ ID NO: 96704 - DNA, 315 bp, Heterodera glycines
gattactttcaacactcacatgtccaccaattttgtccagcaccgactcgggcccatttctgtgcacttcgtccatcagttgttgctggtcggcggcgaacagtttgttcagcgactgtttggccgcgttggatgaaagaccgtggagcagcgcgtcgatgagcacggacacagagttggaggaggagtcaactgagggggaaaattttaaaaaatccaaggggtgaccgaacaagcgccaaaaaccctaaatcacaggacatcgctagtagagaagtgaaattaacgcaaaaaagatttattgttttaaaaacc

SEQ ID NO: 96705 - DNA, 646 bp, Heterodera glycines
ggtccttcaatttcttgtttgaaagtttaaattttttcaaattgatgcaatttcggaattttaggtctctccaacttaagaacataaaatatttgcctttcagtaaaatctttcccggaatgtctgcggataaaacgggcgcactttttgtgggcgatatcattttagccgtaagatttcgcaacaaaagggaagaagcgttccatcatttttgaggtcaatggcgagtcattagtcaatgcgcggcatgacgaggctgtccgtgcacttaaacaagccgggaaaatggtcaatttgcaagtgcaatatcgacgcgatttgcacctccgtcgggagaacatgctgcaccggctgagttgggaggagagtcgggtcggtgcgtcgtcggctgggccgacggtgaacggacaaagtgcgggagaagcgttgcgaagtttcggactcaaattggcatttgtcacgcgaaacccaatcgaggaggaggacccggagaatcggaccatcgaaatacgctcgcacagcgctcgacacattctgacgttgaggtgttcgtctgccactgaagcggacgcttggttcgaggccatccattcgtgtgccgacactctgctcactcaggcgttggcacaagtcaatttgatcctcg

SEQ ID NO: 96706 - DNA, 626 bp, Heterodera glycines
atcacctgtgccaaaatgtcccgtcattagcggcagaaaatttttttcctccgatgcattcaatgttgaccgaaattgcacgcgccacggcggcgaattggtggccaatgtgctgaaggcccacgacgtgcgcgaagtgttcacattgtgcggtgggcacatttcgccaattttggtcgcctgtgaacagttgggcattaacattttcgacactcggcatgaggtgaacgcggtgtttgctgctgatgcagtttctcgccttcggcaaaacattggcgtggcggcagtcacttcggggccaggagtcaccaacacaattacggcattgaaaaatgcgcagatggccgagtcacccgtcattttgctatccggtgccgccccgactctgatgaaaggccgcggggcgctgcaggacattgaccaattgtccattgtcaaatcgatgtgcaaattcacggccaatgtgcaaaatgtcggagacatcgtcccaacacttcgcgaagcgattgccgccgcccgctcggacacgcccgggcccgccttcgtcgagttgccattggacgtgttgcaaccgtacggcaaagtgctggccgagaccaacttcgttgtgcacgcggacaccgcgg

SEQ ID NO: 96707 - DNA, 485 bp, Heterodera glycines
ccacaatatggggtgtgagatgaacacaaacccaagaactgagctttcaattggcgttggaccagctggcggtggtgcggtgtccgcaaatattttctcaatttcccttagactagccaatttttcagaagtcgtcagttccaaattttcaaacaaattcaaaaaatcatcagaattttcgttatcctccgttctcattaattcatttccatttccggccatattttctgtttcttgcccgcaggctaaggggataggagaattgttggaattaatgcttcctgacatctaagagggagaaaaaaatgatagttaatgtgcaggatgggagacagaaaatgaaaaaggaatggttatgaggagaagaacttattgaccgattggaggaggaggcggggcaatgtacaagcgcctgctttaaactaaggggctgatgttagcataaatgagtataagggcaatgttagagaaacatgcagtgtaac

SEQ ID NO: 96708 - DNA, 488 bp, Heterodera glycines
aaggggtaaacatcccccgtggcccttcttttgtttgatgggcacaaatttttgtccaaatcggagttgttgatgaatggaaaggccgtcttttgttgttggccggtcgtttttggaccaacaatttttgaataaattagtgaagtgaaaaaatgtgaaaattttggcgaaaatgttggccgaagtgaggaaatggtggggtgaattgacgaaatgtccgaatttgtgatgagacgggaattaaaacccgttccgactgcttctccttttccgatcagtgccacaaatgcgagagctgccagtgatcggtagagccgaaagtgggggttgaatttgatgaagacgaaaagcgcggccaaggcgatgatttccgaggccacggcgataagcagccattgtcccgtcgagagcaatcgaagaagtggaaaggggtcaaatccccaatttggcattgtcagggtgaacgtgctgcccggctcgatgtgacc

SEQ ID NO: 96709 - DNA, 866 bp, Heterodera glycines
caccgagcgaaacgacgcccgaaatgcacgagacatttttcaaacaattggccaagacgcaccacccccacttggcagacgaccgtccccagtacaccatccaatatcagaccgattctccgatcaacatccgtgcactggtttatgtgcccacaaagcgcgtctcccacttggaatttgcagcagattcacagcgggacatcgccatttcgctgtacaatcaacgcgttttgattaagccaaatgccaaagagttggtgccgcactatttacgcttcctaattggggtcgtcgattctgaagatgtgccgttgaatttaagccgagaaatgctacagactgacctaattctcgaaaaaatcagaaaaacccttaccgaacgatgtgtgcgcttctttctctcacaattgtccaaagaccgagtcaaatacaacgacttttacatgggctattcaatgttcttcaaggaaggcgttgtcacggaacagtccaacaccaccaaggaagaaattgctcagcttctgttgttcgaatcgtccagttttcggtctggcactttgaccactctgtcggaatatgtcgaacgaatgcaatcggaccaaaagaacatttattacatttacgcaccaagccgtcaactcgccgaaacgtcgccttactttgaactgttcaaagacaaatacgaagtgttgtttttgtcggacccagcggatgaactcgtctttttgtcaatgccccaatttcgcatgaaatctttgcagtcgctggagaaatggacgaaggaggagggactgagcattgactctgacaaagaatcatcagctgaattgatgagggacagctccaaaaaggaatttctttggctg

SEQ ID NO: 96710 - DNA, 286 bp, Heterodera glycines
ataaaagtcaacgtagaagcctcaaaccaagtggaaaatgcgttttttatgcttaatatatcgaaactagtgcgcagaaaaaaaggcatatgcctcaaaattcggtctctagctctgacgttactcaaaaaaccatcaaaataaaatatttttgatataaatttgctcaaaagcaatcaaatttttaattcttgatagaattcgatagcaataagtgttttctattagcatataaaatttcaaaaagtttcgttaagtttctagaaagttatgaccaaaaatgttc

SEQ ID NO: 96711 - DNA, 309 bp, Heterodera glycines
tgaccatttcattagaaagaaaacaaaaaataaatttttttagctattttaaataaaagattttactattaaaatagaaagacagtgaaaaggaaaaaaaggttagaaaatgaaaaaaggaaagatgaaaaaaatggcagaaaatacttctgctttcataaagaaaataatgcaaaatggtacataataatttctttaatacataactgaaattaaaattaggcagtatttactatttgtatttataattattatcttatttaaattaataacttgtaaaaaaattgaattaatttaaaaaaatcattc

SEQ ID NO: 96712 - DNA, 569 bp, Heterodera glycines
tgtctctaaaaccaaaaacacaattaaatattccttggttactgtttgaactttgaatatgctaaactctatgcagcattgtaccatttaaggaaagacgattttgcggcggcggtggtggtggaacgggctgacgaaatgagttaaaagatgataaagaagttggaccaactcctccattctgtcgttgttgtacagaaacaacatcgccaccattggtcaggttcatgtccatggcattcccatcaccaacctgaaaatatttggataaatcaaaaatttttttttctcataaatattatttttactttctaaatcaaatttattaattgctgttgctaaccaaccgtttcatactcattcccgatggttgaataatatgcgtcatcatggtcctgttgttccaactgttgaccccttaaaaaatgcaccaaaataatttatatgtccgttgattgaggctttagcccgttaaatgattcggaacaaattttaattaccccttatgccttaaaaaattctcgtgttttgattggtcgaagaggatgaggagggtccggcgctaccaa

SEQ ID NO: 96713 - DNA, 550 bp, Heterodera glycines
tgacattgcaattaaaaactacgtgaataaaattttgttttatcttcttgggggagccttcaattagtaaaggtggatgattccgaatcatgatttaaaaatataccagctagtgccagtctctgggcattggggtcaaaaggcgtcagctgacacatttctcctgtgtctatctcattttgatgcgtcagctgtctagcatttgtccttaatttattagagaaaaagaggcattgagtatcgtaaaaagagaggtattgagtatcgaaacgattcattcataattttatggaaattactgctagtacggggtataaattcaaacatcctcaaaagtggaagcaacaacaacaacaacaatggcaaaagacgcaattttcggcactatgtacgcgcgctggacaccgacgtagcgttcaacaaaaaattcagactaatgaatgctaaaagtacattcatgatccagactctaccatcaaatcctgagtcgcttttgcgagtcatttttggacattgcatacaatcgtcattagatgaagctcagagacgt

SEQ ID NO: 96714 - DNA, 328 bp, Heterodera glycines
  unsure (1)..(328): unsure at all n locations
gaactagttccagctgtatttggagcggaagaagcagctgaagcacgaacggaaacaggaagaggcgaagcgacggaaacggcggagaggggacgagcaccatcgcccgacgccgcccaagtgcaaagcgatgagcgattttctgcctttttcgtggacagtgcttttgccattgatcggacttcttcgcattacaaaggcggaaatttggcggacagacaagcgaaagaaaggcaaaagcgacgtcttcttaaaaacaatacagacgcagattagactctgttaacagatttgtcatcaattttcactgatttaaataaatacncng

SEQ ID NO: 96715 - DNA, 341 bp, Heterodera glycines
ttcaaactagtggatcccccgggctgcagtgactcggcacgaggaaaaggccagcgcagagttgactttgataattgaagacaaaaagacgactttggacgagaaggtgaagcggacggaggagctgacagccaaaatgtcggacaacacgaagaaggagctgaatctgaacaacagtgccgacgtcgtcgccttcgtcaagtcgtactccgccgtcgccgtgccggcggtggccacggagggcaaagcatgatcaatcagtctgatcggaggattcggcattgttgtgtgatgaaatgtagccaataatgaaattcattgattaaattaattttcgtttt

SEQ ID NO: 96716 - DNA, 391 bp, Heterodera glycines
gagacaacgcatcaaaaaagtccacctctgactacccatacaccgctcttagtgaccaacttgcggcaatttcccaacaaatggacaacaacagtgtcgaccccatcactaaacaacttttgaaaatttgtgtcgaacttttacagcaggtccagcaacaacagaccgtcatctccgaacaagaccttcaactccaacatttcaaacaacagaaaatgatggaagaagccattcaagaccatgagcgtcggcgaagcgtcgtcgtaatgggtctccctgaatcgcataaacaaaagccgtccgagcgagtcgctgaggaccgaactgccatctcatgcgttctcgatgagcttggcatcgagagcccaatcactgtgtacagaatgggttc

SEQ ID NO: 96717 - DNA, 168 bp, Heterodera glycines
acaggacagattgcttccaattgcaaatatttcacgcataatgagaagagatttgccaacggaaagaaaactttcaaaacacaacacaaaatgcgttcaagaatgtattactgaattcgttttgcttattacatcccaggttagcgaaagatgctcattgcaaaaacc

SEQ ID NO: 96718 - DNA, 512 bp, Heterodera glycines
gggctgcaggatttccggcacgagggttttcctcaattgcattaccctgtaattactttgtacgatgatgatcatcggggaccagtacggtttctatcagttggtgttgcggaagcacgcgtgcagattgcgttacattctccaccagcttaatggcggtcagttgtcattggaagaccttaaacggaacatcgaatatgcggcgcttgtgctggagacggcgtacatggacgagacacggcggatttgcgacgaggacgacgacttggcggaggtcacgccagaggcggtgccggacgaagtgcgcgaatggctgacggcgacattcactcgccaaacggtgcaatcgcggaaggaaaagccaaaattcaaatcggtggccaatgccatacggacgggcatctttttcgaaaaaatttaccgtcggacgcagtccgttttggctcccattccccacgaatatttgccatttttgcggcaagtgaacaattggaacttcgactctttcgacc

SEQ ID NO: 96719 - DNA, 510 bp, Heterodera glycines
tgccatttttactacgcattattttatttgttgatgaataatgtcttctcgaagaaatgaatatctcgatgcgaagatttatgttggtggtttacctgaggatgcaacttctgaagagttggacgatgcgtttcatcgctttggacgcatacgaaaaatctgggttgctcgtcgtcctcctggctttgcttttgtcgagtttgaggatgcacgagacgctgaagatgctgtgcgtgcactcgacggaacgaggatttgtggcgtcaaggcccgcgtagagctttctcatgggaacggaagagggggcggacgcggttttcaaggaaaaaggggacgttgtgacgaccgttatggtcgtgatcgttatgaccgggatcgcgaccgtcgttatcgttcaagcttttcttcatcaccatcccatcttgttgcccttctcctcaattctcccctcaactccatcttccaatctcaaccctcacataatgccatccaccccatctcttctcattg

SEQ ID NO: 96720 - DNA, 458 bp, Heterodera glycines
ccataaaatgcacggggcaatccgactcaatgagcttattttggaacactcgcgctgcagtcaattggtgcttttttctcttccgaagccgcctttctttgaggacgaagtggacgactacattcagtatttggaggtgatttcggacaatttgcaaaaagtgctttttgtccgggggacgggcgcagaagtaatcacaaccagctcctgataaggggtctctgtgataattgttttagtttttgatttctcaaagtccgttcgttcctttcgcacttttccattttcaatttaattgactctcattttcctctttcctttccttttattttatacggatatttcgagttctgttattcttgacagttttctatgtgtatttctgtgatggaaagttttattctgtttgtcttttttacttctaactaaacaaataagtaaaatgcgatctgtcaaaa

SEQ ID NO: 96721 - DNA, 555 bp, Heterodera glycines
ccaagtttgagcgctaaaatgcaagagactcacattgttctcgggattgcctcggtgtgctctctgttggctatcatcgccacagtcgtcactctgccatctctgtactcggagatgagccaaatgaacagcaaagtgcgcgacggagttgaggccttccgcgtcaacaccgactcggcctggactgacttgatggacgtgcaagtggtcgtgacgccgccgtcgaagccccgtgataaccccttcaactccatcttccgtgccaaacggtcaactgcccggacactgccagtgcgctggcctccaacagccaagctggtccccctggtccgcccggcccgtccggaccgcctggacagcccggacagcctggaggcgcaggacagcccggacagcctggacagcctggccaacccgctcctcctggcgcgcccggtcagcccggccagcctggaaactctggccagcctggacagcccggagcaccgggacagcccggcaaggacagcggctactgtccgtgcccgccccgctcttccgtgttggcagtcaaaa

SEQ ID NO: 96722 - DNA, 476 bp, Heterodera glycines
atttgatcaatcttcctacatcacctggcccatcttttgctgatcgaaatgctaataacgaaccaagaaattgccgaaataagccaatggaaacgatgaaagcatcgagcagcagcctttgttataaaaacagctgttttttgtccgatttattgtcgagtacgaacagaagagggaatttgcggctgctcgaaagtgagccgtttgctgacgaagcggcaaccgaagcggaaacggagctacttttgttcgcggaattggagcagcaaatggacgaagacggaaacaaacagaaatacccggatgaagaaatgccgtgccattcagcttcatcttcggcattttctgctgacaactgtcacgcccaattgccaattttttgcggcgtttgttttgccgaatgcgccgcctttgattctttcgcattgcgccgctgtgaaccgttcggtgcgacacacactttctgcgacgactgc

SEQ ID NO: 96723 - DNA, 550 bp, Heterodera glycines
ctggagctccccgcggtggcggccgctctagaactagtggatcccccgggctgcatgccaagatgaacggatcaacggcatttgtccacccggtgcattgctaatcatcataaaagatgtcaccgaggaaaaatatttgatcaatcttcctacatcacttggcccatcttttgctgatcgaaatgctaataacgagccaagaaattgccgaaataagccaatggaaacgatgaaagcatcgagcagcagcctttgttataaaaacagctgttttttgtccgatttattgtcgaatgcgagcagaagagggaatttgcggctgctcgaaagtgagccgtttgctaacgaagcggcaaccgacgcggaagcggagcgacttttgttcgcggaattggagcagcaaatggacgaagacggaaaccaacagaaacacccggatgaacaaatgccgtgctattcagcttcatcttcggcattttctgctgacaactatcccacccaattgccaatcttttgcggcgtttgttttgccgaatgcgccgcctttgat

SEQ ID NO: 96724 - DNA, 481 bp, Heterodera glycines
gtccatttaagggcactgaagaggccgaattgcatgtagaagaagcaaaccccgagttttaattggcaaaacattcagcggacggtggtgcaaatggtcagaatggcggacgtttcgcaggacgacattttggtggtggagggtgccattgacaacgaccaaaccctgaaaaatttggtcgaacggacgtacaataaatttggccaaatcgatgttttggtgaacaacgccggcagcattcttcagcaccaacgatcgcggcagaacagcaacagcaataacagcaccagcagcaataattacggctacgactacacaaatgggcaaaacggagccgaggaggaggacggaggacgcgggaggtaccacggcttccgcggctttcgaaggacttcttcctcagcaacggcaatgaccagtcgccgcacttgctcaatttttggagctttggacaacgattttgactttttgtttaacataa

SEQ ID NO: 96725 - DNA, 634 bp, Heterodera glycines
tacgaatcggaacaccaagtgaccacaaaccggtgctgagcacattcagagtccaagtgaagaaggtggacaggcacgagaatgagcgcaatttatgagcagttgttgtagggaagtggacaaacgtcaaaatgaacttttgccccaaattacattgtcgaacacagaattccatttcagcaccgtcctcttcgaccagccatcgttgggcgtgctgaccatcacaaacactggacaaacgcccacccatttcagcttcaaacccgctaggcccgaggctgacagattggaggaatggctgaccataacgccgctctcctctttcatcgacgttggtggtgccgtggaggtcactctgcaaatcctcgtcttcgatgagtcggcctgcaaagtgccaaaggatggcgccgaattgagttccattatcattgtgcatcttacgggtggaagagattatttcattgttgtggacgccaaatatcagcgagaagtgaaggatttgatcagcttcaactaattttaatttttgctttccaacccaaaatttaattcatttgtttgttctttttttgtgacataattccatatcccaaaagcactcaacctaatgatcaaccaattagcattattctaa

SEQ ID NO: 96726 - DNA, 592 bp, Heterodera glycines
catggccagatgcctttcaacgtcgtgcaaccgatggcaatgactctgctcaatttgcctctcatcagcgtcatccaccgactcgcaaaaaagtttatctgaaatcttcgctcctgccttttctcaaccaccgacaacaattggccaccgatgctccgcctttacaaaatggcctttcgtcaattgctgccgcggttccgtcgtccattgaatctgtggcgaatgaacgcgactttatgtgcgaatggctgatgcagtcggagggggacgacgattggtcggacgaggagggcacagcagcggggccaattgagccgtgcgcgaggttttttgcttccgcctcacaaatggttttccacgtgtacaacgaacatttggtgccgcttgtccaacagcacagcgacggcgaaccgccgaggattcgctgtcgttggcccatttgcgacaacactccgcgcactctgtggtccatcacaactcatttgcaagatatccattgcactgaaaatgcgttggagtcggcgatgctccaacgggtggagatgggctaccacgagtacgtctatcacattcggcaacagttcgagcgcag

SEQ ID NO: 96727 - DNA, 536 bp, Heterodera glycines
tgagaaatggcttcggttactgatcgttttctgatgaattggaaggggattccgctgggttttggcctcgtcacttcgacaacatttcatatttttaacaatcggtggcttcgaaatcgtttcaatgccaacgcttttgaatcaaaagaaacaaaaattgcagaacaaatgttacaacaacggcgccgtaatgaactgatgctgcactttaaaatggcttcttacggtgcgcccgtggcattgggcactttggctgccggcggaattttgtcttctttgccaaaaatccttcgtcttcccaattcgattggcttcactgtttgcgggtttggcctttccattggtgcatttattgtcggtgctcttcttttggacggaccgatgtacgcgtacaccgaatgggttcagcaacggacagacaaaggaacagaaaaacaaaaagtggaatgaacaaatgcaaagtccaaccaaccgactatgatttttttgttttgttttctttaaacggatttataaaatatgaaagaaaacaaaaa

SEQ ID NO: 96728 - DNA, 387 bp, Heterodera glycines
  unsure (1)..(387): unsure at all n locations
ctcgttttcgcggcgctcatcagcacgtcgagtgagaagagaaaggagcttcagggcaagatcaatacggtggattactgttcggtgagttggcaccctctgtcggcatgttctgcaaagtgtaaaggagtcggcgatcgggtggaagactatcctacgcgctcttcttacatcgaccatgtgactggccaatgtcctgaatatttcaacaaagcgcctgaagaccttgagcagattaagtacagtgttccgtgcaatgtttgggcgtgtgaatgaacgacgaatgcttatattatacaatatttatcttaatgtttgtgttttctgtgttgctgtctaaatatctgtgttcgatatttacattgatagtaaatgttctgttgttnn

SEQ ID NO: 96729 - DNA, 972 bp, Heterodera glycines
aacctttacatcgcaaccggtggagaggatgacctgctcaccgtctattccctagctgaaaatagggtcgtatgtcgtgggcaggcgcataagtcatggatttctgaagtcgccttcgattgttatgcacccgaatttatgttggaacaaactcaaattttcgacgaaaaacgctgttgtccgcctttgaagggtgagggcacctgttcatcgtttgcaactaatgaaggaaacgcctttcaaaatgggcaccatttcccttctggccatgaagaaagtgtttcttctgccccgcaaattggccatttgccttttgctaattgcgacgacctccgcacgaccaacacaaattcgcttcaattgcttcccaacggaaaagtaacgcacagaaacggctcatcggatgatgcaaatgacgtttctcactgtcagcctcagcttctctatagggttggcactgttggccacgactgtcagttgtgcctttgggacctttccgaagacattttggcttctccgcccctttcccaacatcacttcgacgaaatcaccgtttctccttcaccctcaaactttgcaaatgtttcccctcgaaataccacggtcattcccattggcttcgcaaatgcattgtccacaaccgaaactgatgtgagaacagctgacaaaccttctgacgcaaatagcaaaagcagcggacgcttcagaaaatttcataagcgtggcttcagtttcgggtcccgtttgacgggaaatgaacgaaaacagcacgggaattcttcgaacggggcaaattccaatgaaagtacattgaaaagaggcgaaaattatgcacaatttctcggaactgtgcaatgtccacgactcgaagacgtgccaatgattgagcctttgatgtgcaaaaagattgcacacgaaagactcggcgctttgctccttcgcgaagattgcatcgtgacctgcttgtcagga

SEQ ID NO: 96730 - DNA, 360 bp, Heterodera glycines
  unsure (1)..(360): unsure at all n locations
atttgtccgtccgtccgtttgagtgcaaatgaaaaaaaaacaattaaaaaggcggggagggggaaaagaattaatgaattgaccaaacactgatcattttttattttcacattcgttgctgttctgcttttgctgctgtccgatcacgctaacggtgcacagagataaataaaaagaaaggcatcgtcactcatatgaccaaagatgggacgagacatggagggtgagggtaattgaggggttaattggggtggggtaattagagggtgcnaagggcgatgggtaaagggcggagacgctaatcaacgtcaattaccccaaaaaggaaaactttgcaaagacaaaattagcaaatttttt

SEQ ID NO: 96731 - DNA, 504 bp, Heterodera glycines
ggcagttcgaattttgtaattcttcagctaataaaagcagctgaccagctttattacaaggacaaaactttgtatacagccattaaacccgaattaatccgaagcgacacgaaccgaccaaaagacgctgaaaagcaccagcaaatacagaaaagtgggaagaaaacggcggacgataattctgggaaaaaggctgctgaaaatctgaaacaaaacaatgtccaacaggcgaaaaacggggagagcaaacgcagtaaattgcaagaaatgatcggccaagccaaaaaaactgttgaaaatgcgctcggttcttcgcacggatcgttggagagtcaccaaaattcgattgaccttcgtcaagaagtggcggaaatcaattcgaaatgcgcggatttggccaatttgctcaatgcgttggaacagaggctgagagccgtcgaagaactgacggaggggattgccaaaaagatcggctacagcagctgatgagtgtttgagtgagcg

SEQ ID NO: 96732 - DNA, 399 bp, Heterodera glycines
caaagattggcactgggttcaaagacgaagacttgaaaagtcagtttaaagaattccaagagcttcggattgacaagccccgttcgtacttcgccttcgacccttcgttggcgcccgaccattggtttgaaccgtcggtggtgtgggaagtgaaggcggccgacatgtccatttcgccacgtcatttggctgcgcggggattggtcgacgctgagaagggtcattcttcgtcatttccagacacaaaaaattcgtttttaggcatttcacttcgctttccgcgtttcattcgaaaccgagcggacaaaaaacccgaaaatgcaacatcatcagaacaaattgcagagatgtaccgaaatcaggaccacattaagaaccaaaaggacggaaaagtggatt

SEQ ID NO: 96733 - DNA, 158 bp, Heterodera glycines
attgtaataattcccatttttgacaatgctaaaattgggtgaacttttgtttcaattaaaatgcctttgtttcattcattctttttgattttgctctttttaaatttatttttccaatttattttcttaaaagcattgaaagtgccgcgtttcttagt

SEQ ID NO: 96734 - DNA, 476 bp, Heterodera glycines
tcctaattaaaaataacatgtaaaaatggcagcaaaggaactgttccttgctcagcagcccgacctgttcaagccgattcaatccatcaatgccgtgctcatactgatctgtctcggctcctccaccgccgtgccgggcattggcgtcctttggttcatcggcctttgctctctgatcgtctcagtcaccgccacggaatttgtctattcgtctgtcctcacgctgctctgcggggtgggcttttggctttcattcggcttcgcctcccacgtgccggacaatggccattcggccggctatattttcgcggggattttcctggtggcccaagtggcctgctatgccatccctgtgctgatcatttacgatcggagccgaacggacggtccggcagccgccggacacgaacaaatcgccaacgtacatccgtttggggtcaccacggacggatgtgagcagcactaccagtcaatgc

SEQ ID NO: 96735 - DNA, 490 bp, Heterodera glycines
caagttctcccccaatttgtcccaccttttttgctgcttattttgctctcctccgcctgccccttttcgctcgctttttcctctgatatattgccatctgtcaccaattccaccggcatcggcaatggcactgatgccaccactgatcctactgataccactggtaacagcgatttgatgacgagtgcaacgctcccagaagaaacgactgccaaggaggaggagggcacgaagccgggcacggacggcaccgcgagggatggccaagggacaggcgaaccgcaaaaagatggggaggggttgaagcaggacacgggcgtttccgcggcggatggcaatgggacagccgaaccgccgaaagagggggatgagagccctcaagagtcattcgcctgttcagtgctctgttggactctgatcattgtcggcggtgtcttcatttgtgccgtcggattgactgccttcgttttattgactgtgcactaccaaa

SEQ ID NO: 96736 - DNA, 482 bp, Heterodera glycines
gtaaaagatggcaatcatttggggtgcccagctgatcaattgatcagtccatttgcgagtaattcgcctgcgaatgtttcccttccattctgctgctgttgtccatcactaattgattgtccttcaaccaaccagtgatcacttcctcttgcgatggtccgttctttgttcgacatttgtctggcctccgtttgccagcgcagtttggtgttcgatgccgacctttctcttctcccctgcgactgtaaacaacgtttgatggagtttttcgcatcccatgaccaattaaactccgaactgtgctttgggcttatgtcacggccaatgtttggtcggaatttgactcgcctctgcttttacctcagcgaccaattgaatgattcgattttggaagctttggccagttttaaccaaaaccttcgcattatttcgatcgtcgaatgcccccgggtcactgatacgggaattgtcagcgtcactct

SEQ ID NO: 96737 - DNA, 475 bp, Heterodera glycines
caacaagttcaaaccgtacaccgaattgcctgaccatggcctattttatgtgctcgagcaaatgcccacaattgttctataccaggacatgacccagtggctaaaacagaatgggtattttgccagctacaacatcccattcttcaagaagaccagcctaattagtggctttgagcaaaaaggcaacgaattttattggttcagctggaaaagttgtccacgcgcaaaaatttttgccagggaccaacacaaagtggtggacttggacagtctgaccaaactgatgcgttataacgattacacccgcgacccgtacagccgttgcaattgcacgcctccgtacactgcagaggcggcaatttctgcccgaggcgatttgaacccggcaaatggcaccttcgaaatacccggcatgggacacgtcaaccacgcggcacttgattataaaggcaccggctacaaaatgttcaaaaaa

SEQ ID NO: 96738 - DNA, 467 bp, Heterodera glycines
tgccaatattgtccggcaaaaaagtctcctgggacatggccaccgcctcgtgcaccgacactgatgaccaaccgcagcgcaaaaactccaaaggctcgtatgactacatcgatgcggacgaatgccatgatgtcgtgactcatcattcttcgactccattttactccattcgtaactcgaactcgacccgcccttcctcgtcccatcatgcacaaatgtcgtcatcatcgtcgccccagtcgcgctacgactacctggactttgctggcaaaccggaccaaccgcagcagcatcagttgcgacgacaacagcagcgagcagcgccgcaacaacgcgtcgctgtgccgccaccggcgctgcgacgtgctgctgcgtcagcagatgaaccgctctatgcgactgcgtcttcacaaatttactcgttgggcggcagcgaagacccgtacagttccattgtgagtattggt

SEQ ID NO: 96739 - DNA, 559 bp, Heterodera glycines
tacaatccagatcctctcgtcaagctcttcaagcactgggtcccatcaaactcctttgcaaggtcaaatatcctccagcaccgatgacggatgtcccgtacaaatgaaaatcgccaaacctgacttgatggctgaggattctttggaatttgcccacaatgagtatcctgtcgtcttcaaatggcattccgatgctcaacctgccaaacatgtgtatttgactggttcatgggacaattggcgtaagaaaatccctcttgtgaaatccacccacgatttttctacgattatcaatctcaatccaggacgttacgaatacaaatttcttgtggacggtaaatggatggtcgatgatacaatcgcaaaaacagacaatcagatgggaagtcagaacaatgtgatgtccattgatgaagctgattttgcggttttcgatgccctcgacaaagatttggcctcctcaaatgctggcgaggcaatgcgttcgatgaattcgacgggtgcacagccatcgcaagacacgccaaacgatcgcgagttggaacgtcttcgcgaattc

SEQ ID NO: 96740 - DNA, 319 bp, Heterodera glycines
ctgctgcacctgcggctgaggcggcagcgcctgcgccagctgagcaacccgcggccgagcaaccggcgccagcgccggcagccgagcccgctaagcagcaagcatctggctactgatcacttcgtcaatgatgggatgtgcccggctgatcacggcgctgatcagtttcttctattttgattgatcagcaccaactttcattcaaacacttttcaccaccatcttgccggtgtttttttctttcaaacttttgctgtcttccaaatgattttcattgtgtcagtgtgtcttagacaacataaaattttgatcaaacagg

SEQ ID NO: 96741 - DNA, 344 bp, Heterodera glycines
aacctttggccgcatttattgcgcggattggcgacactttggcactgaccgaagagccggaaaattacgctttaatgttcgaagagaaacgacgatttgtgacggaatataacaaacccagcgtggcacaggtgaatggttttgtaaaaagtgccggattttgccggtgacattttgcgtggcttatccaccaatttgttgctttttctgccaatttgacataatttctgttttcagggctttttcctcttgctgaccgcttctccggcaattctccaaatttaattcggcccattctccgctttttcagtccaatttcgctaaacactttctggcccaacttg

SEQ ID NO: 96742 - DNA, 648 bp, Heterodera glycines
tgtaaacaacatagttattttagtattttaatgtaaaaagggtacttaaatttataaaaaaaaaaaatattgctgacatttgctaataatgtaacggttttcacatcaattacggataatacggtcgtatcagcaagctttatgtggaatgtttcaacgaacgcgagaagtgtttaacggtcatcggagggggcaaaatggctactgctttagtgcatggattagtttccgctggttttatcgacaagtccgaagtgaatatctgctcaagatccaaagaaacggcctttcgttggacgacacaaggttaccaaaatgcatatacaaatgatgaattttacagcaaagtgaaaaaaccacgaggaattgtgattgtcgcagtaaaaccacagatcttccccgggtttctcgacgaactgcgtaaaaatggttggcttaactttgttgggcctgaagtgctttgtgtgtccataatggctgggattgcacttgacacctttaaacagcagttgaaattggttggtttcaatggccatgccgcccgttttatgccaaatgtgaattgtctcgtttctgctggtatcgttttggtctgtgccgatgactgtgttccgacggagatggtttagcagaaattgttctagttat

SEQ ID NO: 96743 - DNA, 650 bp, Heterodera glycines
agaatgcccaccggcagcagagtgccgttaattgtggaaagacgaagtgatgagacggaggaggacacgtggacagtttatccgacggcgggcatttgcatcaaattcaaagaggcccatttctccgccgcttcgtccgtctccggcccctccacctctaaattcttcatcaatttggcccattgcactgagctgccgccgccccatcggcacgccgaattggacgaggacaaagtggcacaaatggtggaagaggacccggatgcttttcgcattccaatttgtgtgggcgaattggaccgatcggcggaggaccgcagcggcgaagcggtggcaaaagtcgatgtgctggtcaattcggagttcttccacaaacgcatcagtcaatccgagtttttccgtcagctgacacttcgaatcgttttccaggcaattgagattaaacattcgcttcgtgtggacattggcaagcaggtcattttgcgcaacaaaaaatgcattggcgaactgtgcgcccaaagaattcggaagagaccgatgacgacgaaagaagcaaacggagaagggaaagtgaaagaaacaacagacacaaaagaggaggaggacgaagaggaaaggacagaagtcgatcaaatgttggacattgagga

SEQ ID NO: 96744 - DNA, 650 bp, Heterodera glycines
ctctgatcaactcatctgcctctctagccctttgatcagcccatttatccctcttccatgccaatttcggctctgatcagctcatttttaggcctttgatcagcccatttagccccattcggagtcaatttggccctgatcggttattggcattaccctatttcctttgcaatttcacccttggatcaatacgattcgtcactttcgtgctaattccaggtctgattacttcatttgctttcttcatttccgttccaatttcaccctttgatcagtccaatcaaccttccatgccgatttcggctctgattaaatcattttgttagccctttgatcagcccattccgatttcggttcagaacagctctttttcatcccctttcccaacccatttcgcccttttcgcgccaatttttcgggaccgatttcattaacttccgcttcccgcatcttaggaaatggcaatcgtgtatactgaattcactcgggaaggtatagatacgtggttgttttatgctaaattttgaaattcaagaaattgacgaagctattgaggaagcagttttgaaagtgaaaggaggaactgagagagatggcatgcgcgccgccttggaaacgattgtgagcagcccccatctgctgttgaacga

SEQ ID NO: 96745 - DNA, 460 bp, Heterodera glycines
gtgatcaaaatgctccgtttgcgctgcccatcgcgccactttgcctcgtccgccgcttccgccatgaaagcgcgaccgactgttgagccggtccaacaaaaaatctcccgactgcccaccggtttctctgtttcttcggtggaacttcagatcgccaaacggactgcggaaatgcaaacattgaccaccgccaactgttcgtcatcgtttgctgctgaccaggcttgccaattgttggccaaaggcaccgcactgttgtctccccactttcaaattgggaacatcaccaacaagcgcactccacaaattgtcaactcgcgctggttgaccaaggaggcggcactgatcggcgtcaacatcgaacacgacttgcttttggactatgcgggcccaatttcccaattgatgtttgctttccgttccggcgctcgttttcaacaacatgacgaagccggactca

SEQ ID NO: 96746 - DNA, 581 bp, Heterodera glycines
gagcaattcattttcgattgatgacaaatcttaataaaaaaattttagaatttaagtttaaaataattgtataaaaaccgtttttcatttctgtttctccgcttcctttgtctccaaattccaataatttgatattataaatttgaaagaataaaaataaatgacttacaaggagaagcccgtgatcaatgccgagacgaccgaaaaccttgaacaggaacgggggcacatcacccgtatcctgtcaaggatggaggtcgagctggacgcgtgggctgccatcatgaacggactgcaaggcccagcgagagaggcggaggaagcgcttttcactgcctttattcgagatgaccggcacttgacggaatggttggaagatgcgcgagaaatgctggctcacatagcagcagaactcgcagatgagcccaaccagccaatcgcggcgggaggacagcaaccagctgttgctgtgaatccacccgtgccagccgtgccattcgtcaacaatgccgcatttctcggcggtgccaatgttcaacagccagctgctgttgccaaccatgccaatcagccaccattgg

SEQ ID NO: 96747 - DNA, 581 bp, Heterodera glycines
agggcactcgtggcattatagacaaaaggagcttaaaaaatcgaatttggataccctaaaaatagttttaaaaaaatcggaaattgaggcccacgcaaattcaatcttctgctgctgatcattgcaatgaagtgagaaataattaactaattaggaccaacagaagcccgaggtaataaataattcaattggttactgtaggatttttgaaagaacgttcagattgcttactgtatgcatgctgtatactgtagccttgcccatttaaatattttcgaaccattttttaatttaatttttattaattactccttttaatcatcaaagtctgccgcgaacataagtgttattttttcaaggcttttccaccgccgcccccgcaggggaatttcacagctaatttaatgacccccaccccgcggggttttcccgccggtcgccccccggggctctaattgccaacaacttccgccactttcctcgcccctacagtatgccccatcttagtgacttcattagcaacagcagcacagttcgcaaattagtttttttcaaatgtaattttctctccccgccacgaa

SEQ ID NO: 96748 - DNA, 486 bp, Heterodera glycines
atttattatcaccatgaatcctgctgatggataaagaaaataaaaagcgaaaaggtacaaaaagatccaaaaatcccgaagaaacttcgaaacaaagagaggaaaaccaaaacaaggaaaatgacgatgaatttattcatcccccaaggagacgttcagcgaggttaattgcaatttcaaaacctgctttatcgagtgatttatcggcttcggctgaagattttgttcatggaaaagggacgaaaaccgcaaaatcggaggtgtttggaacggatgctcttttcggtgtctcttcggcttctttcacttcgcctttcaattcttatttgacttcatcagttgaacccatcaaattgtcttcagatgaagcgactgtttcttctaatcggtcccttacaaagagacttaacgcaacaaatattcaaaatgcccaatcgctcggtgaaggaacttcgaaggcgactttacctctttcttcggatgacg

SEQ ID NO: 96749 - DNA, 587 bp, Heterodera glycines
aaaatttagtcgtggcttcttaagcctcgcatggaacatgcacatagaactaccaaaatcgatctgataaaattatcgcttttcttgtgcccgtttctttaattcagtgcactgctccatttatgctaagtcacgttccccgggttgttgcgagccaagttaagcattgagtaggctgactccatagttatctcacgatcaatttcgagaaaatcgggcaaacgcggctcaggatcaccaatagggcgcgtggtgtatgtctcgaggatcatcagctgttcttcattgtacatcaaagctggaggaagaggtgcaatgtaaatgtccaggttaaaatacacatttccgaagagaaaacacacacgtttcttgcgaattgcttgatagtctttgtcaagaagtttcaagtagatctgatactcatgccagtccaactgcttccgtgtttcaaccggttggggaagtttcttgccatcagcgtcttcaatggttcgggtcgtatgtgtgtacgtgtactttccattttggctacgcgagcgaagtcgaacctgactcgaaccctccatatggaggtaagcatcctcaat

SEQ ID NO: 96750 - DNA, 279 bp, Heterodera glycines
gattcctgtgctaaacaaatggtaaaaacaacaaaactttcacatttgaaaaagtcgcgcaaacgactaaaacccttaactggtcaagcaacttcatcattagcatcttcatcatcgactatttctacaacttcagctcacaaacagccgtttgactgtgttgatgaagcgcgtgcaagtggcacgttgcccactcattctggacggactttactgcgaatcgacgaggatggaaactgcgttgagattccgatgcagcgtaaaccgacttcgcccgtc

SEQ ID NO: 96751 - DNA, 187 bp, Heterodera glycines
atttctgtcaatttgattttgatttctcttggaaattctctgaaaatgccttcctccgattttccgatgccgtacacttcacggctcagtgagccttgcttggcaccaggccaatctttggtcttccaagggtccggtcggttttgacagggctaactattggatttgacttccgtcgatcgcttgg

SEQ ID NO: 96752 - DNA, 603 bp, Heterodera glycines
gagagaacaaatatatttttacacaaaaatgttttcattcggtaagcaaaatggcatatgtttaaaccgatttaaaactcggtttaactgaattcttccaaaagccgaaataagtcaactgagatttcggttaaggtattttttgataccattatcgttaagattgaccgtcatttgacaaagttacggaataaaatggggatgtcaatttctagattaaaaaggtaaaaaatcggtcggggtcgttttcgcgtggccattttcgcgcggttgcatataagcgaattttttactttttttatagtttggaaaattttttcactcccgttttacttcgggtgcttaattcaatatatatttaagtgaattttataaactaaattaagctgacaaattattatacagtctaataattttttcacggtctaatgctctgctggtattagtgtaaactcaccatcccaaattcccatcctccgttcttcaagtctatccgagtatatataaagccgaccaaatccctttccagtcatattcttcatcccattaattccatccacatttttttgataattttttttcagttcacttcttcaattttct

SEQ ID NO: 96753 - DNA, 189 bp, Heterodera glycines
ggtcgcatcttcgttccatcagaacgcgccgtgaggaggacagtaacccgcgctttttcatgtccggtgttcaggacagtaacggtctttgagcccttctcagcaacacatgtcccgccacccgggtcaagccaaaccgccgtttcgtccgccgcgtagacatgtgtgtagctgaaaattagtcgtttg

SEQ ID NO: 96754 - DNA, 631 bp, Heterodera glycines
cactccaacaatcgtcaacaatgttagtctcgacccccaagtgagcgccaatttccttcacacagccatcgaagagaagcgagaggatgagattatccatttggtgggccccatttccaaccaagaccggctggaattggcgcgacaattcgaaccattgttcggagaagatgtgtcctccaaactgaagaatgcactctctggcgactctaatgaactgattttggctttgttggaaccgacatctgtataatatgcgcacccaatgcaccgcgcgatgtgcgggctccgcactctcaagggatcgggcctgattgagatgttgctctcacctcgaaagcgaccagttgatgaaatgacccgcgcgtgctagacactgtaccgccatccgctggaaaaggacatcttcggggacagctgcggcgcattcccaccactgctcccgtcggtgtgcaactatactcgcgacaagaggtggagctccgacccgatctgagcgaatatgacggcacgtgctcttgtcaaataaaaccaagtggaaagcgggggcaacgaaagtctgttcaaccagtggtggggcacgaaatttcattccgttgcgtttgatttcgaggagatcccaagggcagcg

SEQ ID NO: 96755 - DNA, 711 bp, Heterodera glycines
attccccttttaatacacaacagcaaccacagcctaatgaagccgccgcgtccgaagaagccgacctgacaaatttggcatcacaggaagcttccgacaatgcgggtcaaatgactactgctgtttccaacaccaatgcacagcaacccaacgatgccaccgtgcccgaaggagtcgacccggcatttttggctgctctacccgaagatatgagacaagaggttatcagagatcatttacttcagcagcagatcagtcaggcggacaataccactgctcgggtggatgccgatgtgccaccagtggaacggatcgcagcaataatgggaatggagattcccgaaggaatggaccccgcatttttggctgcgctacccgacgacattttccacgaagttgttcgtgaccatcaacgacagcaggagctggcccgtcagcggagggcacagatccaagcacagcagcaagaagccaatcatgcaatggtccgtcaccctcacattcaccatcgacattttgcaatgcctcgtttcctgtctcggagtattcggcctcacactcatcgagagcttccgtccacttctgccgcagctgccacttcatccgtggaacgcactgtgccgctactggacaaggaatccataagcacacttctcgtcctgttcctgttggatcaggagaagttcgacacggtgcgtcttcagaaattgt

SEQ ID NO: 96756 - DNA, 481 bp, Heterodera glycines
attagattcagtatttgagttgtcttaattttaaaatgacgaagaaacaagtcaccatcgttggttctggaaattggggcacggcaattgctcgaattgtgggcaaaacagtgcaaatgcataactcagaatttgatgactcggcggtcaaaatgtgggtctttgaagaggtggttgaaggacgcaaacttagcgaaattatcaacgagaaacacgaaaatgtgaaatatttgcccggaaagaaacttcccactaatgttatcgctgtcactgatgttgttgaggcttcaaaaaacgcggatgttctcattttcatcatccctcaccaattcttgcacaaagtttgcgaacagctcaaaggaaacatcaaaaagagcgcaatcgcaatttcgctgattaagggcttggccacttttcacgaaaaagacattgggctgcgactgatctctaatgaaatcgcgacctctcttggcattgacac

SEQ ID NO: 96757 - DNA, 677 bp, Heterodera glycines
tttggtccgtcgacgattcggtcattcacacggattactccgcactccgttccattgtaatgtcaaaccgcgaggaaaccgtaaaaatgccgatcaacgagccggccaagtcacgcaaagcggtttcacagattcaggagtacgtggattactacggcggcgcgggtgttcagcacattgctctgaacccttcggacattgttcacgccatccaatcgctgcgcgcccccggcttggagtttctgagcatcccggacagttactacgcgtctctgaagcagcggctgagcgacgcgggcgtggagttgaaggaggacttggagaaactgagggagctgaagattctggtcgattttgacgagcagggctatttgctccaaatattttcaaagccatgccaagaccgccccacccttttcctggaaatcatccaacggcacaaccaccagggctttggcgccggcaacttcaaagcgttattcgaaagcatcgaggcggaacagaacgaacgtggcaatttgttctacaaagacgtggcggtgggaggggaaaaaatcgaagcgaaaaaaagcgaatgaaaacgggcgatagaaaagaaagaaagacagccctaattgaaaaccaatgagaataataagaaacaaaatatttatcaaaaaaatgcaaaaaagtgaacg

SEQ ID NO: 96758 - DNA, 770 bp, Heterodera glycines
gtggtcattggtacggatgacagcggcaaaatgccgatgactgaaaaacaggagacggcaccaaaatgtgccacaaatgttgcggcacggagttgcgcatgttgtgagcatgtcaccgtgcgcaaaattcggctggacgacgaagtgtgcgtgaatgtgacttatttgcccaccaaaattggcgtccgattggccgtgtcggtagatggccatgtgtactattccaaggatttggcagtgttcaacccggagtcggcctgctttgaagtgcccgagatgcgcgagtacgcgagcatttgcatcaatttgtacaatatggaactcaaaaacaacaagctgaccggttgcgcaaagttggaggccatcctgctgcatttgagggtcgcccagcacaaaattggctgcttcagcataccgatttgagaggagctttgtttattacaaaaaaacagtacaaaaaagaataccgtatgccacccagctgataatacagtatggaatccaaaatacaaatagcactcttaacgtattgattcttctgtgatctttttaagcccccatcaattcgacatatgacgtcattgtacaaattcctcccccctctaattaattgttcaattattctaccatcttatgcagagcagtgctcgtaagtgtgctcattttttgagtgtgaaaaaaagccaaaagtgctgatttttgaggtttcgacataatttttgaaaaatataattttttgcaacaaatctcattaaaaaattttctttttt

SEQ ID NO: 96759 - DNA, 630 bp, Heterodera glycines; identical to SEQ ID NO: 88639

SEQ ID NO: 96760 - DNA, 528 bp, Heterodera glycines
aatgaatccctcaaaaatgtttgctgtacatttcgccggtgttctccttcccctcttcgctttggcatttcttctcaacgccggcggtgcttttgcctattacgcgcaacacttttatttgccgagcagcgaattcgccgacacttttggaaaaagaatcggtgcgcaatcattgccaatgggtgccaacgaatgggcggcacagccaaaaatggcaatggaaagagaggaagaggaagggacggaggagggacagcagcaggggggagccgaagtgatggcggagagtggggagggaaaagcgaaggtcgcgccgatggcgaggggaaatccaacgaaagcaccaatgattccccgccgtacacttcgccatttattcgacgactttggaagtggccaaatggggcgacaatacaaacgaatgaagccgtgcttttactctccaatccaatgtctgatgaagcgatcttcggcttaacccgaccgaacaatgccaaacaaagggaccattctcaaaatacccaattg

SEQ ID NO: 96761 - DNA, 718 bp, Heterodera glycines
attttgccaatgcaagtcagtcaaatgagaacaatgtccttgtcggtggcaagtcttgttgcattgctcgttttacttgccatctccagccatccaacctttgccagtcctatttcttcaagagacttaaatgatgctgctgaagcaggtccactccaagcagttgaaaagcgtcggaatgcagaattcataaatggcttactgacaatggagcgtctgaatgcgatgggcaaaaggtctccagtcccagcatcatcagatgatggagtcgtgccgatgacactctggcgttcccagcacccgttcttctggacagagtgaaagcaaaaaatgaagcaaaactgcggattatttgtcggcttaaaaaacaattataatatgaatgacgcatcatttaatttgtgaataaataaagcgggggcgagagtgaaggggacggagattggggagagaagtgtggacatgtatgtgttggggacggagaggaggaaggagagagcggagaggaagagtggagtagggagaggcggagagagaggggaggtgcggagagtggagagaggtggagagagtagagagggagagagagaggtggagagtggagagtgagagagaagagtgagaaggagtggatggaggagaggagagagaggtgggggagagagaggtgagagagggagagggagagtgagagagagaagagtgagcgagagaggta

SEQ ID NO: 96762 - DNA, 336 bp, Heterodera glycines
tccaactgtcttccgcttcatcaacacaatttgatatgagataagtcaatcgatgcagacattgcacgatgcgtcgctggtgaagtccctcctcaaaaaacgcgcaaatatcgtgccgtcgatgcgagaattctcgactcttacagggttacaataccatcaacaacatcaaccctgcttaccaaaatgatcaaaattaccatacaatgttaatcctgataatatcttcaattttctcgttgaatttctcaaaaattatgaaatacgcccgtagtcattcttcaatgttttgttattttttcgttgaaaacacactgataaatatgttatggtgtt

SEQ ID NO: 96763 - DNA, 465 bp, Heterodera glycines
aaaaatggtcgataagggcgaaggctacaccggctatcaagagctgaaggacggagtgtaccacggctatcagccgttgaagccgcgcaaaacgcccaaattcaccgcagaatttggactgagctcgggcatgctgaacattgcggttgcccgcgacattgactcaattccgaagggggacaaccaggacggaagccaataccagtacttgtcggcacacaacgtggccagaggccagtacattcctccgaccaacccgaacctgccgaacttggacattcctgttcaacaacagcagcaggaagtggccgaagaataactggataattcagaatccaattggtgatgaagatggaaaagaatgttcaatttaatatgtttgaatggttaaaaaaattggattaaaattacgataaaattaaaatttaataaaacaaatcatctgaatgaacaaattttaatacc

SEQ ID NO: 96764 - DNA, 320 bp, Heterodera glycines
ggtggacaaaggcgaaggtgacagccgctaccaagaattgaaggacggaatttaccatggctaccagccgttgcgtgctcgcaaaacgttcacttacacttacacacaaagtgaatagggccccaaagcccgaagatccgtacgcgtggctccaaccgcaggccccaaaacagcagcaacaacagcaggaggaagtgacggaagaagcatagaggaagaagaagaaagtcagcactaaagcactgattagaggtgataagtgataatgacaatgataaatgataatgctggcgatggtgataaagttaattgtcaaaaaa

SEQ ID NO: 96765 - DNA, 341 bp, Heterodera glycines
  unsure (1)..(341): unsure at all n locations
atattcaaagttgttctcactggaggtccgtgttctggcaagacaacggggcaggctcgccttttaagtttctttgaaagcattgggtggaaggtgtacaccgttcctgagaccgcgtcatttttcctcggtcctggacgcattcgttttcccgacctgagtagtgagcaggctgctcaattccagacagatttgctcaaagcattgatacaaaatgaggatgtctttttcaaccaggccgaattcagtgaagcggaaaaaattatgatcattntagaccggggtaggtaacataaattagaaatttgagtaatactaccgattgtatcacaccttttttg

SEQ ID NO: 96766 - DNA, 495 bp, Heterodera glycines
gacatggaggaattatggaaacaatcgcaaaaaatacaaacggacaatcacgaattgtccgaaagagtgtcttctttaactcgagagaacaacactcttcgcaccgaacatgaacgaattcttggcgatcacaacactcttcgcaccgaacatgaacgaattcttgtcgatcacaacactcttcgcaccgaacaggaacgaattcttgtcgatcacaacactcttcgcaccgagtatgaacgacttcttcagcgacagcttgacgatttccactattggattctttgtttcgccttctttatcccgccactgtcaatattagccaccgcgcgtaacaatgggctctcatttccggtaactgttctgtccgcactcgccgcgacaattttctgtgcctttctgtggatccccggcattctcttcgccttggcattttattttggtttgaggaagaacgcgaagaaagagtgatctgtacgaattggaattcccagc

SEQ ID NO: 96767 - DNA, 436 bp, Heterodera glycines
gcaaaaacaaagcggtgaccgtcgttaaaggcctcaccacttgcggtcagtcgcccgggcgaacaaatcgatggacaattacaacaacggttttgatttgacaaaaggtgtcgacttgaaaaccgcctccaaattcttcgcaaatcgtttcgcctgcggctgttccgtcaccgttgactcagccgacgaattggtcattcagggcgactttaaggtgaaagtgtgcagcccttcccacacattgccattttgttgattgaaggacaaactcttcgtagaaatcccgaagaaatggggcgtcgatgaggaagtcattgaggatttggacgaccaaaagaagtgaccactcccctttcacactgcttgtttttactttaatttatatactaattcattgctttgttgtcgtgccgaaaagataaatttgaattcattt

SEQ ID NO: 96768 - DNA, 359 bp, Heterodera glycines
cttcctttcctgtccgttcttttccaattgacaaatggcaaatgaaattcttgaatttccactgaaatatgacaacgatatacactatttaaaagtccgacgtactgatacggtgcgcgaattaaaatttgtcatcgaggcaaaattgaaaattcccccggaagaacagagattgatgattggcaactgtgtgcagccggatacccgccttttgagttcaatgaaagggctggatttggtgcgtgagacgggccctgctgctcctccctaaattggcaatgctgagtagtttgagaaagacgaatgattattggcttttgactttgtttgttgcgaataaaaattaaaaagcaaaaaaa

SEQ ID NO: 96769 - DNA, 376 bp, Heterodera glycines
caagtgatgcacatcgaactccatcaaataagtccgcgtttcatagtgcaatttgtattttttctttgcaaattttgcgctcagcagccactggaaccatcgctggtatttggcttgtcgttgctcgctcccgtcgttgtagcagatgccaatgatgagtattgacgccgaaatggaaaagacaaagatggtgtagacaaaaaggcgcacttcctagcaacaaacggatgaaccaccaaattcacagcggacaacgcgcgacaatggaaaaagcgggagacaggcagaaaaacactgttcgaaacgaacattcttaaaattaaatgcagtgggaaaagtcacaaaaacgcagtaaacgaaattcaacagagaaaaa

SEQ ID NO: 96770 - DNA, 392 bp, Heterodera glycines
aaaaatgaatcgcttcggaataatttgcattttgttgttggttgaaactctgatgcttccagcagtgatggtgggagctccagttgtaattcgtcaaaaacgcactgtgaccggcaaagagttggccaaaggtgccgccatcggagcggccgcgggcgttgccgccacaatggcggcggccggcatcaaaaaagctttggaccatcgtgccgagcaaaaagcggccaaagaaaaggcgaaaaatgagggccaaatccaataaagaaaaaaattggaaaatgaatgaattaatgctgatgatgatgatacatcacaatggaaattatggaatgaatatctgaatatgtttagtctttacggaaagaaaatgaataaaagttttacttgagaaa

SEQ ID NO: 96771 - DNA, 355 bp, Heterodera glycines
tttttggctgggtcaattttcttcagtgcgctgacagtttcctgggtcctttgggacaacagaaatcagcagcacaaaaggacttcctccgtgcgctcaattttggcgtcggcacaacggcaaaagaatatggaggaaggagcggcggggccgaggccaacgagtgacctgccgattcgggggaaaaccgatcatccatcccgtcgttctttccatccttacgatcgatcacccttttccccctcgcccattgtatctccttttgttctctttctaatcgctccctctccaaaatgtgtgtcccggctggcgagaatggcagcaccttctaattctataaaatgcatcgtttgtt

SEQ ID NO: 96772 - DNA, 383 bp, Heterodera glycines
agctaccaaattaaattatcccaaaaatgatttcttcccaaatgttctttttggccctgcttttcatttgtgcttcgcttctttgcttatttactgcttcatctgctgcttcagatgatgggcttgaaaatgaaaacccgagcaaaaatgtgcgcaattttttggccgaatttggagataatggtcattagaagattttaggaggtttttcttcagtctcagatgttggatgagaagatgttatggcttttgggcgatgatgcacattttatgccttttctgactgattacaacaaacatttccattttatcactttccgtagagaatagttattttttattgtcaattagttatactgtagttaaaaatccacatgaaaaaa

SEQ ID NO: 96773 - DNA, 349 bp, Heterodera glycines
gaccaattgctgtcggagacggatgtccacctggacactctgttggcaccgccgctggggcgtggcctcttttacatgtccaaatttacgttggcgcgaaagcgatggaaacaatcgccggcggagaatgaaaaagttttggaccgttttgaagtggctcttcaacatgtgtacagcttcttcttgacctaaagaaactgcgatggcacaatttttaatatgtgatggagagacaacaaattaagagagattttttgtttgatttatatgtgcgactaaggaaaatgactctataaaaatagttcgaaaattgtatcttttttcttttttaaatataatcagtgtgaag

SEQ ID NO: 96774 - DNA, 271 bp, Heterodera glycines; identical to SEQ ID NO: 58443

SEQ ID NO: 96775 - DNA, 350 bp, Heterodera glycines
taaaaccctgttcttggtcgctttcatggcactgttcttcaccggatatcctgctgatgttgctggtgctgttagttcatcaggcaacagacgaaatgttaaatacattgattatgggccgcttattcgacaatcccggaaaaaccaaaaccgtaataaaaactcgagaccgataaagacacggccgtcgccgagacgaggcgattgatgaccagcacagaagaaagaataatcgagagaaagctgatgaaaaattgagaaactaaggatgattaaaactgagtcgaaagtatggaaaatggatgaatgcattgtttttttgggaataaatcatattaaagtaaaaaaaa

SEQ ID NO: 96776 - DNA, 747 bp, Heterodera glycines
gacctaaaaacggcaaaattttttattttttgttgcaaaattccgtaaaaagaaagatgagttttcagggcggcactgcgtgtatgccggattccagagatcactacataaaaatagagcaccattcctaacctttcattttgatgattaaaataattattcatttatttagaagcgatttactagcaaatttgcgcaaatgaatggccaaattattaattcggacgaattaaagattgttttcacacataaggcgcttcatactttgattgcatattattcggacgtcgcagtaccaactggaacaacagttaacagggacggatgtgggctgacaaaacggcgattcttgtgcccgtcggtcaagaccaaagaacagatgatcttcgagatagatttccgaatttcggcgacaattggcgaaaaaattatgtttggtaaaaaacatgacggttcaaccgatgatcttcgcgaggcaacgaggatgatcttagacatggtaaacagcggaatgttttacgacgaattgggcctgcgcgaatttactgttgccccaccaggaccggcactgaaaaacaaattggacaaatttgtggaccggaaattgaatgaatgtgtggcacgagtggagaaattagtgaataacaaaaaggacgaagtgaaagacctggccgagcatttggaggcaagcgacgggtggcacttgaacgaggaacagatccatcaattcttcaaacgcagaaacgc

SEQ ID NO: 96777 - DNA, 515 bp, Heterodera glycines
acaaatacagtgaaaattggtgtgatgaatgacgacattcgagatcagcccgggacgtgttcaagaattttctctctaattggcatcaaatatcagtattatttggacagactgacgccgtacactgcggtccgatggacaattgcaattacgcttattgtttttttcgtgtggaggattgtcgctatacaggggttttacattgtgacgtacgccttgttcatttactatttgaatctcttcttggcatttctcacacccaaaattgatccggcagttgagtatgacgaagatgacgatggtccggtcttgccaagttcaaccaacgaggagttccgaccgttcatgcgtcgtcttccggagtttaaattttggttgtccaccatgaagtccactcttgtcgcctttggctgcactttcttcgaaatgttcgacataccggtgttttggccaattttggtgacgtactttatcgtgctcaccactctgacgatgaagcgacagattatgcatat

SEQ ID NO: 96778 - DNA, 603 bp, Heterodera glycines
aaataccctaaaattcaacaccctcaaaaactttgagagggaattcgaagcgcgataacgggaacaaataaaccaatgaaataagataatttgatgattttcaacaaatatttttaatttttgggaatttgtaagcctacatttaggccctattttccatattttatatcttaaaaatagagcaccctcccccgtcattattagtgccaaaatgcgttccaaatgtgtttttctcgtcatttttgccaccatttttttgctgttaaacggcggcacttcatccaaacacaaatcggcaaaatcaggagtgtcgttggtgcaaaaaagcgttactttggcttcacttcttcgccaaccgagtcagacggaggtggtcacccgcacaatgtcacaacagtgggaagtacagcatgatatgtatgattatgatcattaccctaaagacgatggaccaaaagaaaaaggctccaaaaactgctgcactataatgtaggaaatttggacaaatttcagacgctttttcgagtttggcgatcttagaaaattgtgtaatccgcttttttgaattgtcgaattgttgagtaaaatcttgttgttgctaaa

SEQ ID NO: 96779 - DNA, 213 bp, Heterodera glycines
tgtatctgaatgcctaatccgagcactttctttttaagggttcgaatgaagacgggcaatcgaattcgttacaacgcaaaacgtcgtcattggcgcagaaccaaactgaagctgtaagcgcaaatgaacaggcggaagacggcgggcgatgatttgacttgttgctgttgattcatacatttttatggactgttgataaaggaaattgtcatc

SEQ ID NO: 96780 - DNA, 588 bp, Heterodera glycines
aattctagaccggctcaaaaattgttgaaaaactaataactaattcgaatgtcaaccatcccaatgccaccaccaccaacacaagacgaaaaggaccaacaaaagaaatcccaatggaaaccgctggagataggaaatcggatgcgcacgacctcagaagattcggccgagtcttttgacgcctatggaccggagtgggaagggaagggacggggaattgggaacagaagggaattcagttcgccaaatatgaccagttcggggagacgaatgagcatcacagaacgcttatttggacgtccagtgccccaagaacgaagaaactcattgggagaggaacaaatggggcaggaaaagccgaaaagcatcgcggagaacaaagacttcaaagaattaatgaagcgtcagcgaaaaattttgggcgatgatgagtggcaataaagaaaggcaaaagaaaagaagccattagaggaaaacaaagtcggaatggatcaaagggtagaaaagggaatgacaatttatttatttgtttattttatttaacacttcttctgatttttcaataatgaaataaagacaaacccacca

SEQ ID NO: 96781 - DNA, 318 bp, Heterodera glycines
ggattttcgacaaagccaataattattgacggaaaagatcatttgcttggacgtttggccgctgtcacttcgaaacagcttttgcttggccagaaaattgttattgtgcgatgcgaatccatcaacatttctggcaacttccaccgttccaagctcaaattcctcgcatttttgcgcaaacgctgcaatgtgaagccatctcgcggacccttccactaccgtgcaccatctcggattttctggcgcacggtttcttttcatatttaggctaggctaagcgtaggcttgtttgggcctaggcttaggcacaggctttgt

SEQ ID NO: 96782 - DNA, 443 bp, Heterodera glycines
aaatacgacatttacggctgctttgattagcgatggacgtgctgaaaatcagttggagcaaaagaaacccagccaattgcattccctcccattttccatggattttaatgggccggcattggtctccaaattcttccagactgaggatggcgctaatgggctcaaagcagcactgttccgaggacatttgcttttgggcaaaacggtcagagcgccggagggttttgcgttttatgcagtcaaagagagtgaacattcacaatcagaagagggagagatgagcacgtacaatgttgtggactctgttccgtcgatggatgtttgggagtacgacgaaccaccagaaagtcgtaagaaatgcctgcagaatgcattggttgctctgcaagttgcgaatgatctcgccagctgaattgttgttaattgtataaattttcacaaaa

SEQ ID NO: 96783 - DNA, 192 bp, Heterodera glycines
gccgaacagcgaaatttggtggtttggtcccgattgacaaaaaacggtgccgggacccaatggcccggctttcgtcgcggtgccgagccgttgccgaacggcgaaattgtgccattgtcaatcgcgtcactcttttggggctgaacaacttttggcgtgtgatttttaacgccgacaaaatacattttcaat

SEQ ID NO: 96784 - DNA, 509 bp, Heterodera glycines
aaaatccagccctcagcaggagtcgtctaattcagtaaatacgcagcgaagagagcacaaacggcgcaatgatcagccaatcgccggcagtctcctggacggaagtgaacacacgcgcaacacaaccgccgaattgcatggagacggagatctatatgttatgttctcaataaattgacataaattggaaagaaaagaattttcttcaaaaaaaaaaaaaaaaaaaaaaaaaaactcgagactagttctctctcaagggcgaattccagcacactggcggccgttactagtggatccgagctcggtaccaagcttgatgcatagcttgagtattctatagtgtcacctaaatagcttggcgtaatcatggtcatagctgtttcctgtgtgaaattgttatccgctcacaattccacacaacatacgagccggaagcataaagtgtaaagcctggggtgcctaatgagtgagctaactcacattaattgcgttgcgctcactgcccgctt

SEQ ID NO: 96785 - DNA, 428 bp, Heterodera glycines
tactctctctcactaattgttgcacattccccaattttatttcttccttagtaagtagtattggtgcacaatgcgcacttttctgttcatagccgtagtcgggttgatgttggccgtcatcttggagaatgtaaatgcgactgggaaaaattcgccgacaaagggaaaacagtcgctagacagtccaaaccatgaaaaagaccataaaaatgagcatgaaaagtatgaagcagcttactttcaaaccggttcatctggcagtccgaaaaaaggaaaatcgccacatgccgatccgaaaaaagctgcttcacaccttgtgccagtaacaccagggaaagtatgatgagcaagccttaaaatggtgaagaaactgtgtggagcgatgatgccaaccatgaacaaacccaaagctgttgaagtagatgtag

SEQ ID NO: 96786 - DNA, 742 bp, Heterodera glycines
aatgtccgcttgcatctgtccgctgtgtgatacgtcgcttgcggcgggcttggccaagtaggcaaagtgccaacacattggccatggcccgtgtccttctgcccatgtcagcaagcatggcttttgcccatttttcaattgcgcaatgccgacgacggaggacgaagtgttgctcattacgcacaccgagggaaaacaatccaacaattttgctggcctgaaagatgccaaaaatgtacgcgaagtgatcgatgtgatcctccaacatttgcccgggtctccggcaatgtgcggaagcgaaggacggcgaattggagaaaacggcggacatttttgaacgtttgaccgaaaatgcgccgccgggcgcaaatggtgccgaaatggccgcggcacgaaaaagcgcgtgggacgaattggtggcatttctatggaaggcatctccctacattctcttcgtcactttcgctttgatttgctggtgtttcgtgccttcgctcgtcgctggcagtacaatgctcgagggcgtaataatgtaaaatattttagaatagattggaaatgtcgtttttcttcttgtcggacctctgattaacctgtgccggggtatagcattcgctacaatgttcgagatctccttggttgactgcgatgagtttggaggctaagatgtgcgcgtatcagacatggccttacaaataaaatcgctcggaggtgctacgtatcgactgctgcgatcccagcg

SEQ ID NO: 96787 - DNA, 420 bp, Heterodera glycines
cctaataatcatttttatcccttttcttattccaatatggcagtgacttttgcggatttctttaaagtcatttgtgccatcattttaccgccccttggcgtttttgtggagacgggctgctccatccaccttttgattaacatcattttgaccattctcggctacatccccggcattatccatgccctctacatcattttccagtactgatgaagatatcgcaattgtgaaaattcgatcagttaaaagaattatttttaatttgtcaatttgcttttcaacaatatcggatgttttttgtgatatgtaacagttctcgccaattctctcctccattttcacttctcatttcaggataaaattatggataaaaaaaaaaaaaaaaaaaaaaaactcgagactagttctctctcaagggcg

SEQ ID NO: 96788 - DNA, 503 bp, Heterodera glycines
gctttatataaaactttgtgtaaattgggtgataatctcgtctatccgattctgccagcctttgccaaacccgcgtggaatcacccagcagggccaaaaacggtgttcttttggtcccccacaataaaatgggtcctcgtcggcgctggactctctgatctagctcggcctgcaaataagctgagcatttaccagaacaccgccctaatggccaccggaatgatttggacccgttactgttttgtgatagtgcctaagaattactacttggccagcgtcaacttctttgtcggatgtaccggactcgctcagatattgcggattgcgcactatcagtacattcattctgaggaaacaagcaaatgaatgatgagaatggatggacctcttaaatagattgtcttctcatgcgtgttttttgcgggttaacggctcaaaactcggtttttctgatcaaatagtattggttatttagtatgttgtgatcgtaaaatttgtattgg

SEQ ID NO: 96789 - DNA, 185 bp, Heterodera glycines
acggggtaaaatgcgcaatttgcgtcaaaatatcattgaacacttcactagtcaacccgttcaaagagtgtagtcaaatgctaccgttatgttgcgtgtttttagtcgatgaactttgaggatgggtcttcttattcttatttgtgtgttttctacccttccttttatttaaaggttcaaagatt

SEQ ID NO: 96790 - DNA, 245 bp, Heterodera glycines
tgccaaaagaaggaaatcgctttaaaaagcacttcgacccattgactaccaaagaagcaaagtcttccgtcacttttcgatccaccgaaattactggtgattattttgttctaccataacgatcaaaatgggctttggataatttttgaaaattttttaccgaaaaaattaaattttctattttattttgctttaaaaatatatgtcataatgtgcgaccaaattttaacaatggatttcttaca

SEQ ID NO: 96791 - DNA, 530 bp, Heterodera glycines
atgcattctctcgcctttatttccttcgctttttgcctttcactaacggacgcttttcgtactcaatcgtccggcgtccgggggacacttctctgtggaggaaaagcactcgcggacacaaaagtgaccaattcctttgatttgtttattgttcggtaagaaagaaacaaaattggaatgaaggtgaaactttacgaccacgacaaagggccggacgcggacgatttgatggggacgacgacaacggacgagcagggacgattccaagtcagcggaaagaccaccgaactgaccaccatcgacgtccaactccgcatttaccacgactgcgatgatggcatgatgccttgccaacgcaaggtgaccttcaacatccccgattcgtacgtcacgtcgggtgcggtgccggcgaaattctttgacattggcacagtgaacatgcaaatcatattcgaccacgaagagcgatcatgcattcattaattgacagatctttatttttttattgaacaatgaatgatttgtgagtt

SEQ ID NO: 96792 - DNA, 528 bp, Heterodera glycines
  unsure (1)..(528): unsure at all n locations
gcggacttacaaagaggagaactctttcgacaagcgccgcgcggaaggcgaaaagattcgccgaaagtacccggaccgaattcctgtgatcgtggagaagtcgccgaactcgcgtctgcgcgatttggacaagaagaagtatttggtgccagcggaactgaccatcggccagttttacttcctcatccgcaaaaggatccatcttcgccccgaagaatcgctctttttctttatcaacagcgttatcccccagacaatgacaaccatgggacagctctaccaggaccgccacgaggaggacttgttcatgtacatcgcttacagcgaggagaacgtttacggctgatcgtgagttgggtggtggagtgctactaatgcccatcgacatgcattgtgcatgtggccaacggattcacgttgaaatgctatgggaatagcgtctgcctttctcatccctttcattcatatttgtcaagtaatttgtgtgatcacgcatcgatgatgattatataaaatcgcttttntctg

SEQ ID NO: 96793 - DNA, 401 bp, Heterodera glycines
cgtgcgcctatgaaataattaatggctttctcatctgctgcttctaccttttctatgccgtctttcgcgcgtctgttggcattttgccaagcgacaacagagacttaaggaataataaatttgctttttttcctttcgtctcctaaggcaacactaaatgagggcgacgaatggccgtcttggtaaccttgtccggtctccgctggcgcggaataaatatctgaataatggtgaagcaaaaatgcaacgccggcatagcagtgcgggtgaagaaatgccacgggctgtccagtttgatgagtcgtcggatcagtaccggtgtttgtgcggctgtttccatgttaaaactggcacttacctaatcgcaagtaatctgaaaatggcaccaaatttggttcccg

SEQ ID NO: 96794 - DNA, 531 bp, Heterodera glycines
accccgcatatttcgggctgtttttcccactccgtcgccatgttctgtcgctgctttccccactcctttcttctgctgctgcctgtactgcttgcacttctctcgctgttcaaatgcatttcggcttcaaatcaccaaccgcaagcagagaatgtactgctcgaagaactcatccaagaaattcgaaaactcaacgaccgtatggaaccggcccttgggagagaagggaatgctgaggaggagcaaatgttagaaataaaacggtcccaaggaatggtgccttccgaactttggaacagagccggggacaaaagagcgcagctgcctttttccggtggcatttatggtaaacggtcgccactgccattctctggcggcatttacggaaaacggagcgcacgcaatctgtacagttcgtcactgatttttccgacgctcaatcggcaggcgcgtgcgatgcctttcaacgacggaatgtacggcaaatgaaacagaaagaaaaaaagaaagacgcacaacggagaaaaagat

SEQ ID NO: 96795 - DNA, 582 bp, Heterodera glycines
taacaaccgaaattgtattattttgctggggttcgaggccgaggcgaatacattcgccaaattttaaaattcgccaaagtgccatttgaggaagtgagcataaacattgaagactggcccaaatataaagaagaaatgccccttggccaacttcccgttttggaggttaacggcgttaagttctcccaatccctggccatttcccgttaccttggagaaacttacggactatcgttcaatgatccgctggaacgtgctcttctcaatatgatcgtcgatcaaatttcagacactcagaacagcggtgccttcaaagaatggccaatggtccgtttggacttagtgccgtgcggagataaggcggcttttttccgagaaaagatacgcccgcagttggacggatgcgcgagtttagtcgagaaatatttggtggagaaaggcgacggcattttgcttggcaaagacaaaatcacttgggccgatatttatgccgctgaatttttcgcaaaatgcattcattttggagaaaaagactgcctcgaggcgtaccctcaaattaaatcactgatcgctcgcgttcaa

SEQ ID NO: 96796 - DNA, 541 bp, Heterodera glycines
taaaaccatgcgccgcctccccctcactctcgcaggcacccctccctcccgcacgattcgactcgcattcgttacgcacgctctccagggatacccattcaacccttgcttgatgggaacgactgttcgcgcgagtgtgcatattcgacttccaaagatcagcgcaaatcacgacgacttcaagtccatctgtgaggagttgaaattgcagatccgcgggattcacggcgaacattccgagagcgctggcggcgtttatgacatcagcaacaaggcccgtcttggtctcacggagttcgaagcggtgaagcagatgtacgacggagtgaaacacctgatcgaattggagaagaaagcataatgggaggaccgatctatgatgatgactttatattgcgtaatgtggagatttgctagttgttctgaatctcttaggctttaactatttaattattgtcccaaaatcgtgcttcatccgtatgattatttccgtgcataaatttgttcgtgttcaaaccccccccggaggggaagaaaaaaa

SEQ ID NO: 96797 - DNA, 377 bp, Heterodera glycines
ccaatattctgtctttattttgctgtgcctttttctgattgccgaatttggccacacttccgcagagtgccaaaaggacaaaaccgaagcgacaaaagaagcattattgcttcaatacttttttgctcgtggtttcccttttctgtccgactccgacgatttaccaacagcagcagcagatgaagtcaaacaaaaattgacaaataaatgtgattgatgatggtgatcggcagtgatcggttgagaaaatttaaaaagaaaattttaccaaaaatgtaatttcattaatgatttttaattggtgattggagtttgaaaatgagaatcgcagatcatctcttcatttttggttaatcaaatgaaataaaaattgaaaa

SEQ ID NO: 96798 - DNA, 304 bp, Heterodera glycines
agcgatcattcgaacataatcaaaagtaacgaaaccacccgagcatattcattcctcagcagcaacaacagaaccgaattgttatttcaatcacatcgcattgttcgtcaatgagcaccagcaacaaattgcgtcgcaaaaacagcagcagcgcaacgccctcctccgcctcactgctgcacatcaatgatgcacggattgcgggactgtacgacttggagcacaccattggcaagggacactttgcggtggtcaaattggcacggcacgtgttcaccggggaaaaggccatgatccctcaaaa

SEQ ID NO: 96799 - DNA, 403 bp, Heterodera glycines
aaacggatgattcttgccgaggcggaacagagagcatttgcgcccattccggagtgctttttcgagctgtccaacctgttgatgctcaacgtgcgggaggatgtcgagcagtatgagcagcacaatactgtgccgaaatggttgagacacttctcgggaaaatgtcggacaaggacgcgttccatttgcgcaaggagatgaatgatgttttgacgaaatacgcggccgccgccatcgacgacaaatgagaagagagggattgattgattgtctgccagtgatttattacgcttgcgcatattcatttgatcacaaattgtcactgcttttccgtttctgaccatttgttgagttagttattacccagaatattgaaaattacatttattcacggatcaaaaaa

SEQ ID NO: 96800 - DNA, 185 bp, Heterodera glycines
ggtagtatcgttacagtacacgcaaattaccattgttattttcgtattattattattctcatcattctcagcatcatcatcgtcatcaattattattattcttttttcgcttcaattcctttgattttgccctcccttttcgtcacccatcaattaattaattgatccctaattagtattcaaag

SEQ ID NO: 96801 - DNA, 412 bp, Heterodera glycines
cttcgcttctacaatttttctgttcatcgttttgcaattaacggatgctgaaatgtcaaacgaatacaaagaagcgtgcaatgacacatgtgctgctttaccaaagcagacttgcggtcgtggaaggccacaaagtaacagtaactcacagataacttgctactgtaaatggaagaccagcggatgctgtttcggagaagggtgtgtaccacgtgaacaaaccgcagatgaaattacgctttacggtcgcaccggaatatgaagaaaacaacagcagaagcaacaggcaaagaaacctgaacacttccactgaccaagatgatattttgacattttcggaatgcaaaatttgttgcgatgttatgccatttatgttacatttgttagcggataaaaattgttgtcttaaaaa

SEQ ID NO: 96802 - DNA, 447 bp, Heterodera glycines
tgtcgtcaattgtttaatttttgatgactaattccatgccgaaaatcctcttcacaatcatcgctttcgtcaacatctcacaaattttattcgctactgctatgtataatggcgaagatatttgcggtaaaaccaaggaagattgtcaagcggcactgattgcttttatgaacggacgcggaaataaccagaactatcacccgagcgaaaacggtccaagaaaggttgataatgagtggtgtatttgggtgcaaagctatgtaacaagtggggccccaaagatcaaaatggtgaagccatgaaaattgaaggcggacgaaagaatgatgaatgctaattgaccccatttgcttgttgttgttgttgtttcttttccgtcgggtcaattgtttgtccgcacttttttgggattagatatgtagattgaactttttgctatccaaaaaa

SEQ ID NO: 96803 - DNA, 373 bp, Heterodera glycines
attgtcgtcaattgtttaatttttgatgactaattccatgccgaaaatcctcttcacaatcatcgctttcgtcaacatctcacaaattttattcgctactgctatgtataagggcaaagaaatttgcggtaaaaccgtggaagagtgtcaagcggcactgattgcttttatgaaggatagcggaagtaatcagaactatcacgcgagcgaaaacggtccaatacagcttgctaatgataagtggtgtatttgggtgcaaagctatgtaacaagtggggccccaagatcaaaatggtgaagccatgaaagttgaaggcggacgaaagaatgatgaatgctaattgaccccatttgcttgttgttgttgttgttt

SEQ ID NO: 96804 - DNA, 487 bp, Heterodera glycines
gtaatacgcagaaaaactgctccatttgataagaattcaaagaatttgtgattttatccgtttttgtctgccgttttcatccgattattccgtttttgtcttgaaatttaactgtttttaatcgttttctgccgatggtttgcgttccatgcataattctgcccgtcgtgttggccatttaccttcgatttgttcagccatacattttgcgttttatgcctcagcgatggcgtatttggtttgactcggtgctttacccgacatgtccagtgaacaaaatggaaacgacaaacaaatcgaaaacggagaagaacaaaacagacggagaaggagagacggggaaggaatgcgaaaaggacaaatgaaacagaaaacatcaacaaagttgtatttaagtgattatgaaaatcaaaattcactaaactgatttcctttgtgcatcaaaattcgttgtcttctgagaataataaagtcgcgattatcaaaa

SEQ ID NO: 96805 - DNA, 499 bp, Heterodera glycines
cggcactccaaatttcaaacaccgtcttcatgctgattgtgttggccacttcgcttctgctgttgatgccgtccagcagcaatgccaaagtgatgccccaacttggcttcgcgaatgcagaacaactgatgaatgacaacagcagtccaatgggcgccggagttgagggtgaagtcatggacaaagtggaggcccgacttttgggtgcactggaacttcttcaaagctataaagaagtcccaattgtgcccaaattcacggaaaagcggaagaacaaattcgagttcatccgattcgggaagagaagacgatgatcaacaagagagagagagagtggaaggacagacagtcagacaaaaccatttgagtgatcagagagcggtgatcaatgatacatttttaacaaatacacgtacaattttggtaatattatcgctggcaatgggacattttttgcttttttgatgggcattgaataaagagaaacactgtgaaaaaa

SEQ ID NO: 96806 - DNA, 222 bp, Heterodera glycines
ggcggggagacgttcgatatttattgtgtgtgttagaagaggaagggaagaagcaggaagagtggaagatgagcgcgaatacggaatgctatcgttgccacgaattcgggcacatttcgcgtgactgtcccaatgccggccgccgcatcagcgtcagttgctgatgactgagatgggggtgatggtgaagaaactgcgtggaacgatgatgccaaccatgaa

SEQ ID NO: 96807 - DNA, 343 bp, Heterodera glycines
ttttcttagtttgattaatggctgatctgcaaaagttgagtggtgccgatcggctgctgctgtgccgtcgatatttccatgtgggcttcgtctgtctccctcttctctgggcggtgaatgccatttggttttttcgttacgcctttccttccggtgcaaatgccaccgccgagacggcacaaattcggcgctacgtttgttggtcggcgaccggcgctttgtgctgggggctccttttgacaggttggcttttcttctacaacatccagcgcagctacggactgttcgattggcccgagaaaatcaccgccgtttttcccctgggctatgtctgattcggatg

SEQ ID NO: 96808 - DNA, 457 bp, Heterodera glycines
aatgaattttggaacaggcccaacaaaaaaattttgccaaatttgtagaacatggatcgatattttcgaagagaaggtccaagtggaaaaatttacgatgcacaaaagctgcttcatctgtgcaatctgtgactgtccgctgcagccgggcagctgttcccgcgacgacggattgatgtacatgcagttcatggccggccatcgcattccgatgtggttctgcagcgcgcacatgcacatggggtcgggcgagaaatacgaattgctgaaaaagaagtaccaacagtaccaacagtaccagcaacaacagcaacaacaacagcagcagcactgatcaacagaaagcagatcagcagcaaacaagtggaagcattgatcggaaagtcaaccaataaattagtggatttattgaccgattaaattaatttactgtgacataaaaaaggcaaattataaa

SEQ ID NO: 96809 - DNA, 282 bp, Heterodera glycines
tttctttgtgtctctgagcaacaaaatggcaaaaaaaacgaaatatttgattgtaaggctcgcgagtgttatttcgggcactaaacaaatttgggttagggagagagcagcggccgaagcggcggccattctttacgacccggcgattggcaaaaatgtgctgttcaaagaagttgagcaggtgaaaggaaaggattcttttcccgacagagtgaagaaaatgtacaatatcagttgatcgaatttcaaatgcaaatggatttgataaatttgtccgttttt

SEQ ID NO: 96810 - DNA, 274 bp, Heterodera glycines
tttgtgtctctgagcaacaaaatggcaaaaaaaacgaaatatttgattgtaaggctcgcgagtgttatttcgggcactaaacaaatttgggttagggagagagcagcagccgaagcggcggccattctttacgacccgttggcaaaaatgtgctgttcaaagaagttgagcaggtgaaaggaaaggattcttttcccgacagagtgaagaaaatgtacaatatcagttgatcgaatttcaaatgcaaatggatttgataaatttgtccgttttt

SEQ ID NO: 96811 - DNA, 438 bp, Heterodera glycines
tctcttgaatattgtctttgttcatgcacggcattttgtgccatgagtgaaatcgctgctgaattcaatgcctccgcacaatccaaacgcgtgttatgccatcaacaatccgccaatcccaagagcaacaacttcgctgagtaacagcaccaatccgtcgaacatcaacaaccaaaacaatatcagcaacggaaacggaatggctggaggcgtacaacagcagcaacaacagcagcaaaaggaggcaaagctcaaagcgttgggcaagcaggtgagacagccgaagaagaagcagaactgatgagatgacctatcgatggaatgacattgatcagagggcgagtgatcggaaggccaaacggagacattggcatggaaaagtgatcagttcgagcagaaaatgtgcaatttcgaaattacacaataaaaaaactgatg

SEQ ID NO: 96812 - DNA, 449 bp, Heterodera glycines
gcaatgcattttgggacggcgcaggattatgaaatgaaagattgtgccatttgcaacgagggagtgccattgggggagaaattggtggtggagaaagagacgatccacttgggctgcttcaaatgcgcttactgcggcacgcgtctgcaagtgggcaattgtgccatggaattgtccttttacaaccgatacggcccgtgctggtactgctcgctgatctgtgcccatctgccgaccggggaaaaggaggcaaagctcaaagcgttgggcaagcaggtgagacagccgaagaagaagcagaactgatgagatgacctatcgatggaatgacattgatcagagggcgagtgatcggaaggccaaacggagacattggcatggaaaagtgatcagttcgagcagaaaatgtgcaatttcgaaattacacaataaaaaactgatgaaaaaag

SEQ ID NO: 96813 - DNA, 451 bp, Heterodera glycines
tgaatcaaattaaagtagatcaggaagaaagcaccaaactttgggattggccattgcaatcccatgacgaacttgtgtcaatctacgatggtcgtgacagatgggaagttggcttggacaccggatttttcacgcccaacgaaatcgaagtgaatcggatgggccaaaatttgttcatccactgcaaacatgaccagcgcgagggcatgctgggcacaacatcgcgtgaggttcagcgcaactataaattgccggatgatgtggacccgaaaagcatccgctccaacatcacacgtgccggcattttgcgcataacggcacaaaagaagcgttgaattggcgcaaatttggacaaaaatgccaaaattgatcaaaaaatggagtaataacatttggaagaacataataaatcaaatatattaatcattttatgacataaacacatgtaaaa

SEQ ID NO: 96814 - DNA, 226 bp, Heterodera glycines
taatcgccgcgaacgtggacaacgttatcaaatttgcgacctgggacatgttttacgaagcgcgtcgcattttgatggcggacctggaaatcgtctctacaaccgtggttacgttttggtcagatgactcgcttaaattgaagacgcagccgtatcagttcttcgagttttaaaggatgatccattgttcattcatcattttttgttgcaaataaagacttattac

SEQ ID NO: 96815 - DNA, 622 bp, Heterodera glycines
ttatcctttttaaatataattaaaaaataaaatgcggacaaattgtttggctctgagttcgctcgccattttttattctgccgttttttctgcaattggtgcgccagtcgaaccgagcacaaaagaaagggcaaagcatggtgttgctgctcactatttaaaggcggaagatgaaaaattggaaaagattaaacaaatgttggaagaacaatcgccaaaaatgtcgcccaagggaaaacaaatcgccacaaaatttgttgaaattttgctcaacaaaaaattgacatacgaagaatttcggaaggaaattttaaaacttgacaacgaaacggacgcgaaaacgaacgacgaatttgcaaaatcggaatttgcaaagcaaatgagtttaattgagaaacacagttaaaaatgatgaaaatgaattcaaaatcattaaatgtttatttaaaatttcattgtgattattagaagtccaggaaaattaaaaatattcgttaattttcataattttaatttggcatttacactgttgattgacctcagctcgactttacattatacaatattttaatccatgttcaatgtgcttacccattcatcatagattaccgtaatttgaaaa

SEQ ID NO: 96816 - DNA, 433 bp, Heterodera glycines
gctctgagttcgctcgccattttttattctgccgtttttttctgcaattggtgcgccagtcgaaccgagcacaaaagaaagggaaaagcatggtgttgctgctcactatttgaaggcggaagatgaaaaattggaaaagattaaacaaatgttggaagaacaatcgccaaaaatgtcgcccaagggaaaacaaatcgccacaaaatttgttgaaattttgctcaacaaaaaattgacatacgaagaatttcggaaggaaattttaaaacttgacaacgaaacggacgcgaaaacgaacgacgaatttgcaaagcaaatgagtttaattgagaaacacagttaaaaatgatgaaaatgaattcaaaatcattaaatgtttatttaaaatttcattgtgattattagaagtccgggaaaattaaaaatattcgtt

SEQ ID NO: 96817 - DNA, 528 bp, Heterodera glycines
  unsure (1)..(528): unsure at all n locations
tttttcatccatcgcttccccgattaaaatggtcgtcgttctgtcggcactttcctccggcacttttccccctcatttttcactgcgttggcattccctctcatttttgctggtgttcattctgcttacagttcgcttctccgccgacttcaccaattgtcattccgtgccgtctttaatggcatttgaccccacaaaattgcgacgacttctgccaattcgggaatttttgagcgacgatcaattggcattcgaacgcgcaattcggcaacccgcgggcggcgtcaaatggatgcgctttgggaaaaggacgccccagggcaaatggatgcgattcggaaagcggaaaatggcaatcgaagggggcaagtgggtacggtttgggaagagagcggaagagatgcagggagaggagtgaacggacaaaatgtaagaggaaaaaggaagagatgagagagtggaggggacgagacactgtgaanaaggagagaacggcagacgaacagacagacagaaaatcactgctga

SEQ ID NO: 96818 - DNA, 502 bp, Heterodera glycines
  unsure (1)..(502): unsure at all n locations
tatgaagccaacttttctcatgctcatttcaacttgtattattgcgttggtttacgcatctgcggagtatgatgaatgtgaagtttgcactgatctgtttacggaggtgatgaaaaaggttgatgagtctggtgaaaagggagagccggcagtgaagaaaatgattattgagcattgcaagtctgtcaaaggtgtggatgataagaaagaaaaattgtgcttctttattggcgctcatcctgactcgtccacttcagtcctgggcgatattgcgaaaccattgagcttccataaaccgccgaataaagtatgctctcaactcaaggaaagggattctcagatctgcgcactgaaatatgataagccaattgattgggacagtttggtgctggagaaaatgcgtctcacacagctcaaggaacttttgcttaagattggcgattcctgcaaaggttgtacggacaangttgactacattacgcggatcaatgagctcagagcg

SEQ ID NO: 96819 - DNA, 468 bp, Heterodera glycines
gatttccctgattgtgcttggcattctgctgaccaatttggaggcatttcgccaacaaactgttggcatcagaggccgtctgatgtgtggcaatcagccgttgaaggacgcgaacgtgaaattgtggaacaaaaacacgctcggttccgatgaccaactggcggctaacaggacagacaatcatggcaattatgagttgcaaggaggcgttggacagctcaccaagatgaatgtgcatttcaaggtgtaccatgactgtgacgacggaatcaagccatgccagcgcaaagtgaattttggcgttccggatcattacgttgaacgctcagggtccaccaagaaatggtttgaggctggcacaatgaacatggaattcaaatacccagatgaggagcgcagttgcatcaattgaattgaagattaactgaggcaatttgatgttgagaaaaacaaattttttgatagtaa

SEQ ID NO: 96820 - DNA, 524 bp, Heterodera glycines
gaatttggcatcggtgaccgatttttgcttgtcctaattagctcagcaattgtttacaaaatcttcccattctccgtttttgttgcccttttctcttttatcgtcgcttcgtggatttactttcaataccgccaaaaacaacattggcataatgtcggagtgccgggaccaaatacaaacattttatttggcaacacattgaaacaatttcgcactggcgtaattgaggttgacgaagaaatgttcaaaaaatatgggaattcatatggctcgtttttatttgagcgacgcgaattttgcaccaaagacccgaaaatgttacgacaaattttcatcaaagaattctcgcactttcagaaccgttatgtaattttatggatgaaaatctaaaaatcgatttaagccaaataaaattttggatctctcaaaaatttcatcaaattaaaaaaatgacacagaatgccattcccgaacgcgaacacgcgccaaaatcactgatgcgcaatattctcactgtgctgcgc

SEQ ID NO: 96821 - DNA, 295 bp, Heterodera glycines
tgtgcaaaaacattgaacttgttaaagaacaacagaaacgacaatctgttgctgatgatgatgttgaaaaacaatgattgagtggccttattaatcaaatgatgcatgatgatgagcgagggattttgacttttatctgatccagtttttttatcgataattcattcattatctcatcaggaaaatgatggcctaatttttcccgatcatccccccgggtatattccattcttttttttgaacacacacttttatttatacactcacttgctatttatattttttcattcttcag

SEQ ID NO: 96822 - DNA, 184 bp, Heterodera glycines
cagggcctttgccgatttcatcttcgcccatgtaattctccatttggtggtcgtcaactttatcggataaaccaatgtgaaaggatgggaatataaaagtcattctaaatttaactgaccgtttattcgtttttctgttaatttattttcgtttaataatgttttgcataaatgggtttcgttg

SEQ ID NO: 96823 - DNA, 537 bp, Heterodera glycines
tgaaatggtggacaaaggcgaaggtgacagccgctaccaagaattgaaggacggaatttaccatggctaccagccgttgcgtgctcgcaaaacgttcacttacacttacacacccgaatttgtgccgggagcattgaacattgcggttgcccgtgacctcgactccatcccatcggggccaaaggacgacggcgcacattaccaaatggtcacggcacacaaagtgaatagggccccaaagcccgaagatccgtacgcgtggctccaaccgcaggccccaaaacagcagcaacaacagcaggaggaagtgacggaagaagcatagaggaagaagaagaaagtcagcactaaagcactgattagaggtgataagtgataatgacaatgataaatgataatgctggcgatggtgataaagttaattgtcaaattaattgtctattaacgatggaattaacaaatattcacaaagaattgagtaaatgtgaatggtagtccaaatatgtagcaaatttttttctaattctcatcggaaaa

SEQ ID NO: 96824 - DNA, 267 bp, Heterodera glycines
gcgcaaaaaattcttcgcttttacaatttttctgttcatcgttttgcaattaacggatgctaaaatgtcaaaaaacgattatgaaaatacgtgcggaaacacatgtggtcgtttcgcgaaaaaaggtgattgtgctggtaaaagtccgataaatacgtgtgtaacggaaggagattgctactgtaaatgggaaggatgcagagcagactacgaagagtatgttagtaatccctgatctgatgtcatttttgttacatttgttagcgg

SEQ ID NO: 96825 - DNA, 486 bp, Heterodera glycines
gtttgccacactgaagacaacaagttcaagcagacatttgctgccaattctgttcatcttctgctgttgctaccgcgccttttcaaattttggtgatgcggccattgtgccattgtcagccctgggccgctacaaggtgtcacttggcgagctgaacgaattgctgacagaacaacaacgctcggctgacgcagtgccaagcactggcgacaaattgccaaattatgccaaaattccatacggagccaaacacgaagataagaggagagagtttgaacacggctgggagcaatgtgaattctcaccaatttcgtgcatgttgcgacgtcggaagcgataaatgtgcggacaacgcaaaaaaacgataatgataataacccatgatgattggttaattaataatggtgatgaaaggtgctggattcacttattaaatgatgaaaaacaaacacacgatttgtctctgtcgcttgttccagtaaaata

SEQ ID NO: 96826 - DNA, 456 bp, Heterodera glycines
tctcccgcgctttccttctcttttgtcttatttttgtcgtcgcattaaactcttttaacgaagcgagtttaatcatcgacgaatgcaaaagtgtgtgcccaaagacgaacaataaatgcgcgacggattgtgtgaaatgcgcgagtggcaagtgcaaaaaagaatgcaaaaagccagcggcaccaaagtgcgcggagtgcggaaagaaagcggtgaatgaatgtaaagcgatgggaaagtgagggaaggaaaggaaaagcgaagggaaaaagtgaaagagagagtgaagaaatgggagagggagacagacggacaaagtcaaagagagagagagaagaaatgggagagggagacagacgaatgaaacgaaatgaatgaatggcatttgtacattttttaatgaaacgatataaccgaacattaccatttttatgtcaaattgataaatttgatggg

SEQ ID NO: 96827 - DNA, 449 bp, Heterodera glycines
caatcaacaaaagtttcgacacgctcattatctcaacttcataatgctaacgacccgaatgatctgtttcctcgtcgtatttatgccgatgatcacccacttttccaacgctggccaatattattatcctgcctactattacaacccgtactacagttactacggtagcagcgcatctgacaataatccgtattacagctatgacgcgtcgagcgggagttggaagcttcgttcttcatcggatgattcgtcgtcagccacttacaatccgtcatactattatatgtattattacccatacacatacggagggaagaaataatttacgaattggacaagacaagattgatgagttatcgagtgcttgagtctttttaatcactattgattatctgttttcatttttggcatttagttgggcatcgataaatgtgcatttttcttaaaaa

SEQ ID NO: 96828 - DNA, 560 bp, Heterodera glycines
  unsure (1)..(560): unsure at all n locations
ttgtcaattaatgaatcgattgccaacagattttgtttccgatttgcctatggaagttctgcctgccttttaccctctgccaactttttggatgcctcaaattgaaatcccaccattgagaaaatacgaagtttctaaaaaggaagtgttctaaaatgacatatctttcagtacacattcgaacatgaaaaggcagccatcttcagatgggaaaaagaaagacgaagcgaacgggtcgaagaagagacagagcaaactcagcagatgagaaaacaacggcaaaggcacatggaagagaaagggacgaaaaaggacggggagagggaaagagcggaggagggacagagacggacagaaaggcgaagggataacacattgaataaccctgagtatcgaaacggagaatgtttcaaaattgaatcgcactccttgccctcttccaatgtttcaaagcccaaccaaccgccacattttgcctcttcgtcacttctaaagccagtcccaatgtcgaagagttcgtccaattctttgcacgttggcatcgcatcaactcanaatgg

SEQ ID NO: 96829 - DNA, 329 bp, Heterodera glycines
attttttctttgtgtctctgagcaacaaaatggcaaaaaaaacgaagtcgtaaagatataaatgttctttaaaagatatttatttaagatatttgattgtaaggctcgcgagtgttatttcgggcactaaacaaatttgggttagggagagagcagcagccgaagcggcggccattctttacgacccggcgattggcaaaaatgtgctgttcaaagaagttgagcaggtgaaaggaaaggattcttttcccgacagagtgaagaaaatgtacaatatcagttgatcgaatttcaaatgcaaatggatttgataaatttgtccgtttttg

SEQ ID NO: 96830 - DNA, 374 bp, Heterodera glycines
ttttactaaaactataaattaaacgcaaatgacaactaattaaaaaaacacaacaataaatcactaatcacaaagattcataaaggcaatgaaagatgaagaggaatatcaaaacaatcgtgttcggcctttcgaaattgatcagacaaggggcattgccgatcgaccacgtcttaaaaaatacatcgaaaatgactcagctattaggcaattggtaattgcttatgacgcgaaagaagaaaaaaatgacgatgatttgatccgacatattcatgcattgcaataccgtgtggggatgaagggattcgaaggatgggattagagtattgttgaaaatattaattttgttgcgttgttaaaaattagtatatgtt

SEQ ID NO: 96831 - DNA, 424 bp, Heterodera glycines
tggcatattgccaaaacagctcggctatatgctcattcaggacggcgccattgcaaaatctgaaggtgatttagtgaatgccgaaagattggccaccgttgtgttgcgaatgatcgccgttggtccgttctttgctccatccgtcgcccaggccaatgcgcaaataaatgcaagtggcgatgagggcaacgagttcaatcggctcacagttttgttctccgatcaccagtatgacattgtaatcggaaatagcgccgggggtatttctatcggcggcggaaggcaaacgcaacaccaaaagcagacaattcatgtggtgaaacgaacgctgcccatatgcgaatagacagaccaatgaataaacaagatggaatttgtgcatttttcatttaaatttgaattgctaaaaaaacagagagtggaa

SEQ ID NO: 96832 - DNA, 391 bp, Heterodera glycines
gtttgagttaaattatttcctgctaattactcgttttaaaatatcttgcggaaatggcagtcattgcaccgaaaatggcagcaattgaggaatttgaacacatctcctgcttacactacgaaaaggacactttcaaacccaacgactgttgtgcaaacccaagaagcatcactcaatcagcaaaagatgtggtcacttttgaatgggccaaagagaaagtgcaaatcgaagaacaccgttcgctcgagccttctaagaaggaacacaaatggacaaaaatggaacagaattgaaaagaaaagcaaaagaagaaaatgcatttcctttggattgataaagcgatcattcgatgattaatttgtaataccaataaacaatttatgcaaaaaac

SEQ ID NO: 96833 - DNA, 384 bp, Heterodera glycines
gccacagtctttgtggaaattcgtgacaagaaggccgcctttgtgctgttcggaagcgcaatgaaacactttgacaaggacattgtgccaacatcggatggggcaaggaggaggaggaaaagcgaacagaagctcagactggagacggacgaacagagaatgaggctggagatggagaggcggacgaagacgcgcaagcaaataggagagaagaaacgcagaagattgagcaccgatgataattgggaataggaaaatgccaatttccgttttatttttattcattttaataatttcaaaaagcaaaaaaaaaatgacaaaaaaattgtttatatattgtgtatgatcagtgtgaataaattagcagcgataaaaaaaaaaaaa

SEQ ID NO: 96834 - DNA, 302 bp, Heterodera glycines
gatgatccgatcaatctgtgcccacattgtgacactttatcgacaaaaaattgatgtggttgtggcgctagaagcccgaggatttttgtttggcccaattgtggcgcttgagatggacgtgccatttgttcctgttcgcaagcgtggaaaactgcccgggtccgttttctcggcgacttatgtgaaggaatatgggcaggcaattttgttaatgtattaagtgtaaccagaactttttacgcattttaaaggatgtttttgaaatccaaaagaatgcattgtcagagggacaacgtgtgctg

SEQ ID NO: 96835 - DNA, 550 bp, Heterodera glycines
tctttgagcaaagggagcctcggagtggagggattggccggattactaatggacacggcgaaaaaaagtacaaaagtgccgtacgaagagaaaacggacgaatcgacgcaaaaagggcagacgcaaattgggacatcaaacgaaggcgacgaaggggcgaaggaaggcaaaacgaacggacgaagcataagtgggaagaagacgacagccaaggaacattatttgtccaaatcgagatacatgccagggctaagaagcaacggctcgtccagtctctcggcgggcatcaatcgaaaggcaatcgcacaaccgtcgcaacagagcggcgccaaacaaacgacgggcggcggaatcctttcgtcggttcaggttacgtcccttcttttggtgcgcctcgccaacaaccgccgaatgccaattcaaatgcgaactcactgggcaattcgtcgtcctcaatttcaatcggtggcggaccggcggacaatgccaaaacaaacaacgccttctcaaccatcggaggacggacgaattgggcggcaaaatatcagcg

SEQ ID NO: 96836 - DNA, 224 bp, Heterodera glycines
gccgtcgatgctcagcaaataatcgaactcattctttgcctcattttgccgcctttggccatttttatccatgctaattccgactgtaatgtccacgttcttatttccatcgttctttggtatttttaaattattttggtcattaataatttaattttttggtttaattgcaattatatataagctcggagagcaaaacccaaaattttggtgaatgtttttgt

SEQ ID NO: 96837 - DNA, 419 bp, Heterodera glycines
gataactctcctctacaaattacacacaacaaatatggttgttgacatttcaaagatggagcctttttcaccaccagtgagtcacgcgttgttcccccatttgaccactgttttgctttccatcgggctcatcttcaccgcgtggttttttgtgcatggggtgaccagtacgaagaaaacgcgaaaccttgtcaaggagttgttcatcggcacattggcgtccctttttcttggcttcggcaccctttttctgatgctttgggtcggcatttatgtttagagttgaaaggaggaagaacacagggatttttgtcttatttttggggactttttttttctaatttatttgtattttttttattcctctgctaattgttattgagtgagtctgcccttttttgtttgtttcttcccaattt

SEQ ID NO: 96838 - DNA, 302 bp, Heterodera glycines
ttgcgaaatggttgtgctctcaaaacttggctcgccgcttcgtccgttttccaatgactatctcctttgccgcttccaggcattccgtaattatgcaatcaaaaaagaaaggccgccaccagcgaagattcaagtgccgccacccgcaaacgaaactggccattggaaatatgagcgtgactactcctatgacctgcgttattcaaacccgatcaacaaatactccagttttaccaggttcattacgctcaccgcaacaggccacaaagaattgtgggcacttttcgcccttctgatgcttt

SEQ ID NO: 96839 - DNA, 479 bp, Heterodera glycines
attttcttatttattgttatgataaacgcacttggttgttcaaatgcccagcttaaatgcagaagggatacggtagggacaataaacggtgttggcttgaagatgaacttttccgaagaagaatgcgagtcgacatatttctggcaatcggcatacaaatattgttatgcttcgcattgtttaagaggaaatgaatggcttacgcattatgggtgtgccaaaagcccggagaaaggtgcatgtagcgacaatgttgagaaggagatgaaagatttgtatggccttgctgtgagctgttcattttgtacaattggacgcaaaatggacgacatgagcaacaagaatttcccgctgtacaatacgaccaatgttgtaatgccgccatcaggaggagcagatggagacgatttttcatttatgtcgacaacccaacaactaacaacatcatataatttatctgaaatcgctacgattgtgcc

SEQ ID NO: 96840 - DNA, 320 bp, Heterodera glycines
aaattgctaattttgtcattttttattctttttgccttctttggcttcgctgatgttgtcggaacaccgatacaagaacaagaatttgcaaaattggtggcaaagcgtgccgatgggtttgatgagtgcttgttggcagcaggtgctacaaattgtgctggtcgtttagcttgttgtgaaaagtatggacaacaaagttgcatttgttgaaaagaaaagaaaatggaacaattttatcagcagattatgatgcttttggctttttagcaaaacatttcgatgcgattttaaaaaagaaaatataaaatttttgtccactt

SEQ ID NO: 96841 - DNA, 451 bp, Heterodera glycines
tattctcttctgttcgcggttttctgcgtttttttggcaattttccccagggtgcgcaggcagcaaaaaagaaagtgtatttcgtttatggtactcgggtcacagttaaagctgtatataacggaggcgaaattaatcttggaaaaaccacgggagaaggtgttgaattgaaacaaatttggagattgatacagaataatggaccggaatgaatggcaatgatctgattactttccatgttcacacatcgtatggcgtgactaaatgtgacaaagctacagtacgcgaattacgtcaaactgatcaaccgaaagactttgctgatcaaacaatccgaacagtttaatgatgaagatgagtaggaagcaaaccagcagaagaacggctttatgtatttgacttcatcagatgtcattttcattgctttgttgatgccatttttggcttgttg

SEQ ID NO: 96842 - DNA, 562 bp, Heterodera glycines
attttaacctattagactgaaaatggctactgcaaaaaagaagacgcgaaagcttcgaggacacgtttctcatggtcacggtcgggtgggcaagcaccgcaaacatccgggcggtcgtggtaacgccggtggacagcaccaccaccggatcaacttcgacaaataccaccctggctattttggcaaggtcggtatgcgaaactttcatgtgcgaaagaaccattactactctccaagcatcaatttggacaaactgtggactctgtgcacagaacggacgcgcaaacaatatgcagaagtgaaggacaaagcgccggtgatcgacgtggtccgggccggctatcacaaagtgttgggcaaagggttgttgccgaaacagccgctgattgtaaaggccaaatgcttctcgcactctgccgaggaaaagattcggaaagtgggcggcgcatgtgttctggtcacataaatggaagaaagggcttgagaagaatgatgatgatggcgccccttgacgaggaacacctttttatgttgttgtctttgttaaagttattcctttcga

SEQ ID NO: 96843 - DNA, 513 bp, Heterodera glycines
ctgaaaatttattttttgacaatggcacaacaccaggaatcgttgatccgtcagaattttgcagctgaaactgaagccggcatcaacaaacagatcaatattgagctgtacgccagctacgtctacttgagcatgtccttttacttcgaccgtgaggacgttgctctccacaacattgcgaaatggttcaaaaaacagtccgacgaagagcgtggacacggcaccactttcatgaaataccaaaactctcgtggtggtcgtattgtgcttcagaacgttcagaagccggagaagggtgagtggggcagtgccttggaagcattccaagccgctttggctctcgagaagttcaacaatcagtcgctgttggagctgcacaacctcgcttcccaacaaggcgactctcagatgtgtgactgtcttgaggacaaatacctccgtgagcaggtcgaattaatggaggaaattgggaaaatcatcaccaatctcgagcgtggtgggaaggggttgggg

SEQ ID NO: 96844 - DNA, 362 bp, Heterodera glycines
tctttttatcgcaacaatcagttgccattccgtcatcaaccggacaattccgacagcgcaaatcgaaaggattacgaaaacaattcgaacaaagagagaaatgacaacggaaacaaaaacagttacaaggaaaagcagcgaaagaatgaaagtgacggagaggaaaacgaagaagaacggacacgacgacgaattgaacagagacatttgggaaaagggaaggaagagggagaaaagagttggacaagggagggcgaaaagggcacggaaaggcgggaggaaatggccaaaagtgaaagcattttgaacgcattgatcgaacaagtgcggcacagaagcgaagtttgtcacggattctaagg

SEQ ID NO: 96845 - DNA, 399 bp, Heterodera glycines
cttgtaatcagaataatctacagaaaacttttgtctcacattgtgccaaacccagtgtgtatggttctgcgacaaatattcctacggttttggtgataccgtaggaattggcgtcaataatgctaattgatttttatgtttaaataatcaaaatcccgcaactttttcacagatacttctgattttatggttgatccatcttttgctgatggctcattttatccattcgttactttgtttgtctctggtgacaaaattgaggcgaattttgggcccaatttcaaattcgatttggcaactctctgaaggaagaattaattattcactaatgttttcgatcaatttgctctttttaatcatttttgtgtctttcttcttcaattaaaatttggttttttg

SEQ ID NO: 96846 - DNA, 183 bp, Heterodera glycines
aattgcattggtgcgaaacgcgagcgccgaaacacgagcgccgaaacgggagcgccgaaacgcgtgggtccccaattcttatgcttaatttttaaacgatgcaaataaccaaattaccaaatttgcaacaagagtatatgtaaattactgtaattcatgaataataaagatttgttaatggtc

SEQ ID NO: 96847 - DNA, 494 bp, Heterodera glycines
atgaacacgacgtcccttattcgtcttctgttcgcggttttctgcgtttttttggccaatttcccccaaagtgcgcaggcagaaacaaagaaagtgtatttcgtttatggtactcaggtcacagttacagctgtacataacggacgcggaattaatcttggagcaaccacgggagaaggtgttgaatcgaaacaatatttggagattgatacaaatgtgtggaacggaatgaatgacaatgatcagattgttttccatgttcgcacaccgcatagcgtgacttcatacgacaaaactacagttggtaaattacgtaataccagtgaattagactttgctgatcaaacaatccgagcagtttaatgatgaagatgagtaggaagcaaaccagcagaagaacggctttatgtatttgacttcatcagatgtcattttcattgctttgttgatgccatttttggcttgttgaaaaaaacatttttttaaattaaaaa

SEQ ID NO: 96848 - DNA, 259 bp, Heterodera glycines
agctgtatgaacagcgcaaattgattagcatgtttgtcgtgctgatcctttttgcttttttctgtggactttttttgggttctgtgttgaacagcgaaggatcgaaggaaaagtgcgagctcttatgcaaattacgcggacatgataaattcaagtgtgagatgttttgcaaagtgcgtgatgagcatgaattgtaaggaattaatcctgaaaaatatgttaatctgttgttggtaattcataaaggtctttgttgttt

SEQ ID NO: 96849 - DNA, 324 bp, Heterodera glycines
gccttttcgtcagtcgaaaactgatgatggaatgtttgcggggtgccggactgattttagaaaggtcggcacaattcgaaatgaaaggggaaaaccccggaacaaaacagagaccaattggacaacgaattgttttatgaattggacggaatgtacattttggtagcgaggaaaatggccgagtgaaaggaatggaaaaggatttaatggattttaaaatttgttaatacatttattatttttgattgtttcacaacaattgttgaaacttttcaacagttaatttggcagtttttgaaaaatacaattattttttggcaaaaa

SEQ ID NO: 96850 - DNA, 480 bp, Heterodera glycines
agtaatcccttctcttctgaactgtcccgcacgtaacttgtgcgaccgcttaaatcacccggatgagatacaaaaagtagaaaaatacctcaaaggaaaaactctacagacaacatacaaaaatcaactagatgaatacaaagattttgagtacggtggaattacaagagaaagtgcccgtaagcaaatggcttacaatggtttcaagaatgtgaccgtcgaccagcatttttatgtacggtaccgcatttgtcttcgctacgctaataatccttgcgtgattgagaagcatagaaatggacacgaacgattctacccacttgagcttgttaaattgaaatacgtagacaaaaacaatatttatttgggacaaaatttcccaaagtctatacctttacttgacgaaaataattcaaaatataatgacaattattatgattcttgtcgtttatggtgaatatttgaaattgcagataattt

SEQ ID NO: 96851 - DNA, 312 bp, Heterodera glycines
ctacattgacaactacagatgttgaagagactatcaagagaattcaatcgcaaaaaggtgtcaccggagtgattataatggacaatataggccgtgccattcgttccacgtttgatgatgacaccaccgcgcaccatgccgcacttcttcaacagctctgcgaacggtccaaaaatgttgtgcgcgaaatggacacgagcaacgacctgagcttcatgcggttgcgcaccaaaaagaatgagatcatgatcgcaccagacaaagattatttgattgcagtgatttataagaagagccgctgaaagacaagac

SEQ ID NO: 96852 - DNA, 343 bp, Heterodera glycines
taccgttcccgtccgtctgatcggaatccgagtacgatcaccacccgcctcgtcttctttgaatttccaaaattcgcgagaatccaccaggataatgttcggcacattgtacattcaattcgcagtgtttcgcccagccatcgattaacgctcatttccaactcattttgtctattgtttgcttcagtgtccgccattatccaacagtgacgtggaagaagattagaaatatacaagaaaaatttcaatgcaaaaatacattttatttagtgataatcgcaattggtgacaatttttattaaaatataagcgttttctttaaacaaattttcattggtcaaaa

SEQ ID NO: 96853 - DNA, 434 bp, Heterodera glycines
atcatcaatctcatcttttccttatgggcgttgcttctgctgatgatgactcagtgcctgatccaattgtgattaagttgggcgagtcattgagcctttctcagcttgtgcaaaaaattgaacaattacaaaaccgaactgttcgagagctgcttgttaccctacgtcgtcgcacgtacgaaatgcctgttgggcctcccgacccaaatggagatcgctttttccaaaatgggcatctcctagtggaagatgttgtgtacaattgggtaagaaaaacgcgtaactccatccacggaattgtccagcttcatgtgatcagaaacttctaataccataataatcattgctttttaaaggtgttatatgaggggattgcaatgcttgatgaagtcaattatcatttttagcgattggttaaagaaaattttgcaaaa

SEQ ID NO: 96854 - DNA, 256 bp, Heterodera glycines
aaccaatggctgtcaaggacgacccaccggaaattagggcactgaagctgtggaaggcggacgtcaagaactcacagttgattcgcggcatgattcgcggcaaaacgaaaagtacgcttcatgggcgagtcggatgattgcattctgcgcttggctcagagggatggaataattccgcaaaatttgtgaacgttgattcttcacagggatactgttgattttgttgcctgcagaatgataaacactgtttttcttc

SEQ ID NO: 96855 - DNA, 271 bp, Heterodera glycines
taaattttgcaagcaagcgagaaagtgtggcatgcgcaattacatcgaacatttcgtgactaaaatttgcgacggagaacccatactgtgccatttacgttgtgccgggaaggaacgcgacgccagtgctaagggcggaatattcaaatgggcgactagtccacgtgaacgcaaaggctttcagcacggagcgagtttgtttgcatatgaacaaccttaggacgcgcagtggaattccaatttataaatttgaaaactcccatttttctca

SEQ ID NO: 96856 - DNA, 371 bp, Heterodera glycines
cgctttccttctcttttgtcttatttttgtcgtcgcattaaactcttttaacgaagcgagtttaatcatcgacgaatgcaaaagtgtgtgcccaaagacgaacaataaatgcgcgacggattgtgtgaaatgcgcgagtggcaagtgcaaaaaagaatgcaaaaagccagcggcaccaaagtgcgcggagtgcggaaagaaagcggtgaatgaatgtaaagcgatgggaaagtgagggaaggaaaggaaaagcgaagggaaaaagtgaaagagagagtgaagaatgaatgaatgacatttgtacattttttaatgaaacgatataaccgaacattaccatttttatgtcaaattgataaatttgatgggag

SEQ ID NO: 96857 - DNA, 368 bp, Heterodera glycines
ctaaaaggctcatcattttgcttttaatttacgcgtataaaatgaccttgcgcaatgatactccgatgcctccggacgaagaattgagagtgcctcatgagatttcgctgtcttcgccttggctaagggctgtggcggtttatatgggaatcgcctgcgagaaggaggccaaagagtttatgcttttgcgttccgaacgcgacaacgacccgaatcagttcaagaagtaccggaacaacttcgttttcgacgcgttcaacccgaccggctgatgctccgaactttgtgttgttttttcgtgcgttcctttgtaaattttcggaacgatttttagggaatattctgttttcgataaatgtctatgccac

SEQ ID NO: 96858 - DNA, 414 bp, Heterodera glycines
atgccaaaaatggacatgaccttccacttccgtaccagtgagttcattctcctccgagaatggcttcctcagagtattttcgcttatctcttttctttgcttgctgtgctcgccctttcggtggcttatgaattgctgcgtgtgttcagagccatccttttccaatctctgctccatttcattcagttttttttgggtttctctctgatgcttgttgccatgacttacaatgtgcccatctttgtcgccctcctcttgggccattcgatcggttactttctcaccgcccctctctatcgccatggattggctgaagaaaatcggactggcggagattgctgctgttcataaacttcactttttgtttgcataaattcattagcaattaagttagagcgttttaatggtccaaaa

SEQ ID NO: 96859 - DNA, 439 bp, Heterodera glycines
tgtaggagtgccgggaccaaatacaaacattttatttggcaacacattgaaacaatttcgcactggcgtaattgaggttgacgaagaaatgttcaaaaaatatgggaattcatatggctcgtttgtatttgaacgacgcgaattttgcaccaaagacccgaaaatgttacgacaaatgttcatcaaagaattctcgcactttcagaaccgttataatgccattcccgaacgcgaacacgcgccaaaatcactgatgcgcaatattctcactgtgctgcgcgacgacgattggagacgcgtgcgaaatcgcataacgccggcatttacgacgggataactgaaaaaattaattccgattttatgcgaaggcaccgaaaaactgtgtaaagtgttagaaacggaaaacgcactgaaggggaaggaagtgccgttgaaagag

SEQ ID NO: 96860 - DNA, 460 bp, Heterodera glycines
tacccgaacaattcccctctcctttttcatggaaactgaaaacgctgaggaaacacagcaacaacgaccatttgcaattaagcgatggaatttggtgtctacatggagttgggacgtggagtgtgacacgtgcgccatttgtcgtgtccatttaatggaggcatgcctccgttgtcaggccgattcgaaggcgcaagaatgtgtggtcatttggggcgagtgcaaccactgtttccacctttgttgtatgtctctgtgggtgaagcagatcaaccggtgcccgctgtgccaatccgattgggctgtccaacgagttggaaagtgaagagtgaatgattggcatcacatttttcatttttaaaaatttaatccatccaatgattccaatttcaaagcgcataaatttgattatggtctccctatcaaacgcaatttttatttaataaatggatttgaggat

SEQ ID NO: 96861 - DNA, 525 bp, Heterodera glycines
gtcctcccaattggttgctgctgatcatcatccgcttattcttccggcactgattaccttcgtcattttgctggtctcttctgtcttcttttttatttaccgcagattccgacagaagccaaatattattttgttcgttgggttgtcgggttcaggaaaaacgacactgttcaccaagttgataaactcgaagaattgttgggactcattcatttcgctgaaggaaaatcagttcgacagttacgcgacggacaatggccaaacgctcactttgctcgattttcccgggtccgattcattcaagaaaactttgtgtcgcaagtggctgaacgagaaacggaattctcttaagggcgtcgttttcgtcttggacagtgcgacgttcagcaaaaaagatgccgccgaattgctgtacgatgtgctgtttgagtcgggcaatgccgtcccggttctgatcgcatgcaacaaacaggacattggacacgccaaatcgcactctctcatcaaaaaggcattggaaaatga

SEQ ID NO: 96862 - DNA, 263 bp, Heterodera glycines
atgttatgacaacaaacagaggcatggcgattggttggaagcttttgacccgagacaacagaaaaaaattgacgcagattacgctcttttcgttgccggtcatgatccaccgccaaagtgcaagaaatatcgcgaggcagatgaaagaattttgagactgacacaaaattttaacccactaaacattatggaatttttgattggtgtttctcgaaattaccagatggatgcttagaattttatgaataaatttttgggatgtt

SEQ ID NO: 96863 - DNA, 410 bp, Heterodera glycines
gtcgttagaatggcttctgcggttaatccattaaaggcatttggacaaattggtgcgcggctcgggattcgcgagaagaagaaccaatttgtgcagaaggcgtggccatacattgaccctggcacgcattttggcaagaagaatttcggctatttggtcagtgctgtttcgtttttggttttctacaaagtctccagcaatatcaagtcgaagaaggcaatagaagcgaaacagaaattggaaatgaagccgtacgttgttcaggacgcgatgacgcgcagcggaatttaaagaaacaatgcgttctaataggcgggaggcaaagtgtcttcgaattcattagttttaaactcagaatggcgtatttgttgtaactgttcccaagagtaaagtaattctatgaaaaaaaa

SEQ ID NO: 96864 - DNA, 462 bp, Heterodera glycines
tcttttggttatggctgactcaattcaaaaccttaacaagcctaaagatgcctttgaacaattggaggaggaggagggcactcgccagggattctgtcacatccgaattcagcagaggacgggtcgaaaaacgatcacaacggtgcagggaatagcgccggaatacgacttgaaaaagattgttcgttacctcaaaaaggaatacaattgcaacggcacaatcgtcgagcaccccgagtatggcgaagtgattcaactgacaggggaccaaaggcagcacatcaaggactttctgtgcaaggtcgggatcgtcaaggaggacaactgcaaaatccacggattttaagcaaaacttattccatttgtgtatcaatgagcattaaacaaaatgtgttgaccgtccctaattcgttgatatgtcaccgtaaataaacgaaaaaaataaaatgaatgttttaaaaa

SEQ ID NO: 96865 - DNA, 589 bp, Heterodera glycines
  unsure (1)..(589): unsure at all n locations
cattcttttaaatgaatcaaattaaagtagatcaggaagaaagcaccaaactttgggattggccattgcaatcccatgacgaacttgtgtcaatctacgatggtcgtgacagatgggaagttggcttggacaccggatttttcacgcccaacgaaatcgaagtgaatgccaagtgcaatgtgttgacgatcctcgaacggcacttggttcacatcgtagctgcagttgtacaattgttgataccggtcggcatggaacagatacaaatccatgttgaaaaaattgtaaaaaaatagttttccctgaatttttaaaagtttttaaatatttacaaaaattcctacgaatcgaatccatccgagtcgtgaaatttactgtttttcccaaaccatggccttatgaccctttgtccttttcaattccccgacaattcatacttaatttttgggcactgaaattcatcaccgacttaggtactcagttattgtgaatctctgtatccattcccaaaccgaagaaatttntcgagatttttgtgaaaaatttttggtcttatgtacgaaaatgtcataaaacataatgtaacaga

SEQ ID NO: 96866 - DNA, 466 bp, Heterodera glycines
  unsure (1)..(466): unsure at all n locations
aattcgcaaagggataccaactgcttaggagatgccatcgtccagcgggtcggaaaagggtaatggacgcaatggtgttcgtggcgagagacgtcgatattacatcgaccttcgcgaaaatcggcgtggttcctttttgcggattactcagctcgagacgcattccgggattcgcaactcagtggcattgccatttgaggggatcggccaattgcacgatgcactggactcaattctggaggaatatggcgaagggttcattgaggaggaagccgaacttncccattctcagatgattcgtgctgatgggaaaagctttttttttgatcctgaccacaattctcgcggggactttctgaaaatcaccgagttgaagtcgttcatgggagtgcgcaattgcggcgtactttcagtcagagcaattccggagtgcgctcaaaggctggtcgagctctacaatgactat

SEQ ID NO: 96867 - DNA, 560 bp, Heterodera glycines
aattctcttttcgtcaaaatgctttctcccttctcctacgatccgttctatcgccgttcgttgtggcctatggccactcatgttggcaacgtcctttcgcccttccgccagttggagcgtgaactcgaccacttcttcgaggggatgcagcccatgcttcgtgaccatgtcgctcagctgaacgtctcggacaagggcgacctcacttacaaagtcgatgtcagcggcttccgccccgaggagatcaacgtggaggtgattggtaatgagatcatcgtcaacggggaacaccgcgagcagaacgacagcgaatcggtccaccgtcagttctcgcgccgtgtgctcatcccggagggcatccaaaaggagagcatcaagtgcgagttggacggcggtcgcctgttcatcagcggaatgaaaacggctgacaaaggcagcagtagaaaaggacggcggaagtgaagacggactgactgtcggtcgaccgaatgatccattgacattgatctttttattttgatacttttgcaaagtgatctataaattatttttccttcaaa

SEQ ID NO: 96868 - DNA, 529 bp, Heterodera glycines
tttttttattcgtaaattactactaccaaagagaaaatgggccaagctctaagtgaaccgatcacaaccaaaaacagcgcctcttgttccaatgatcgttattttgtcggttcgtcttcgatgcaaggatggcgaataagcatggaagatgcccacacgcatttgctcgaactgcccgaagatccgagcacagcttttttcgccgtttttgatggacatggtggcgctcaaattgcgaaatacgccagtgaaaatttgcatacgcaaattgcccaatcgaatacattccgtgagggcagaatatccgatgcattagttgaggcatttttagaattggacgagcaaatgatggccagtgaacagatcagtgagcagggagggaatgacggagcagcaggaggatggaccagtgccgaagttggaggagaagcaacggaacggcaccgggcaaaaagttggtgtggaagatatcaccgaggatgtccatgtccctccttcacccgctggcgccgtggaatatacgcaacct

SEQ ID NO: 96869 - DNA, 531 bp, Heterodera glycines
cgccccccgggtggaagtaagcaactgatagtctgctcaataaatggcagggaaaaacggacattgagcagctgaccaggctttttgtggtgatgggcacgccgacggagcagagttggcccggctgggaactgttgccggacgcgaacaaagtgatgttcgacgtggtggagccggccaatgattggaccaaaattgtcccatcagtcagtagtgaagggctccaactgatccgatcattgatccagctaaacccatgcatacgttcgtccgcactccgctgtctacagcatcccttcttcacacaccatccacagtatgaccaaataccgtaccagccaccgttgttggagcaaatgggaggacgaagaaaagtgccggaaattgtgttcaatgacagtcgaagaatggagaagatgaagccagcaacaaacaagaaacaagcgcaatggcacaaaggttaaataaatatctgttttcgactgaaaatgatcagtgatcacataatggtcgattattaaatcggaattt

SEQ ID NO: 96870 - DNA, 514 bp, Heterodera glycines
cttgccaaattcacgccatttgttgggaaaagcattcgctatgaattgcataattttctacaaaattcttctctgttgtcaaagcgagtggactttttccacgtttacccaaaagcattctcagtgaatggttcttcttctggcgagcacagcaacagggtaattagccaatggcttgtcggaattgagcttcttcccgggaaaattgtggattccgagctcagaagcgaattgagtcaaatgttgggcaatttcgatgcaaaagttaaaaatgcttttaattatttccttttccatgctgtggaccttttctcagaatatgttgagaaaaatgaactcaaattacggcgatttgactaagaaatattttctgaatctcttttcacaaaaaaggggtgttcgtccggctattgcccaaatccaattcaatgtgatattttatttcttttttttaatgtaattcaatctgtttgtttaattaatgagcttgcaaaaggttaaaacgagcattttg

SEQ ID NO: 96871 - DNA, 490 bp, Heterodera glycines
cttttcataatggctgcacgttctaatactaataaagaaactctaaagaaccatcaaacgagtaaaacaattgcaaccaagaagctggtggttcaagactacaaaaatcgattgaaggacggaataaaatcgttaaatgataattttgaatgtatattgggcgcttcgaaggtaaattgcgatgatgcgacacatcgatcaaacagtgccggaaaattaggagagcattatgcaatcagaaacgaagcaattgcgagggctgcgcttctcgtcaaggcaacaaatgagttaaaaatgctgacaaatgaaatccgagaatttctcactattcgcgacttcaattttataagcaactcaatttccaaagcagaagaagatttcaaaaagcgattgaaacaatatgaaaatgattacagtgcacttcggatgagcataagcacaatggcatcagagattgatcgagaattggtggaaaattctttgtatagat

SEQ ID NO: 96872 - DNA, 357 bp, Heterodera glycines
cggcaaaaactggcgttttgcagatgttcgggcggcaatttcacattgtgatggctgacaattccgtggcagttttgaagtacaagagagtgccaaatcgacgaatattggacttttaccacactgaagtgccgcccgatttccgtggccaaggctttgctgaacaattggttcgggctggatttcgccattgtttggacacgcgtttctccgtgtacccgtcctgtacatatgtgcaaaaatacatcagagatttggccacggaagaagagaagaaaattgttgtagaaaaatattattaaatttgctgctgctgttttttttgaattttgctcattttgaaacaaatatttaaaa

SEQ ID NO: 96873 - DNA, 440 bp, Heterodera glycines
aacatttctgacaaatcagaacagatcgcatccctggtttaatttaataaaaatgaatggcgaagttcgtagaccaaataaaattgtcaggtataagccaattgatccgatggtacagccagtgacagcggaagacagcattccggagtatatgaacgtgttggggatggtcttttcgatgatgggtcttatgatgagactcaaatggtgttcttgggtggctcttatttgctcttgcgttagttttgccaatatgcgcgcgtccgatgacactaaacaggtggtcagctcgttcatgctcagcatttcggccgtggtgatgtcctatctgcacaatccaacgccaattgtgccgccatgggcgtaaaaaataaatgcattgaattgttcagttcaaattatgttattctatcggtttcatttacatctcttattatttg

SEQ ID NO: 96874 - DNA, 164 bp, Heterodera glycines
gtgtaacccaaaaaaggtctgctgatcgccctccccccattataaaaaatagatttcaaaccaaccaccaaataatcccctcaattcatactcattcgcatttaagtattattttgtatgctaaggttaccaaattacgtaattaaaatatttagtttcaaaaa

SEQ ID NO: 96875 - DNA, 434 bp, Heterodera glycines
  unsure (1)..(434): unsure at all n locations
aacggggctcgcggcttgggccgttgtccaatgactatgtcctgtgccgggtccaggcattccgtaattatgcgatcaaaaaagaaaggccgccaccagcgaagattcaagtgccgccacccgcaaacgaaactggccattggaaatatgagcgtgactactcctatgacctgcgttattcaaacccgatcaacaaatactccagttttaccaggttcattacgctcaccgcaacaggccacaaagaattgtgggcacttttcgcccttctgatgctttcatcatctctggcgataggaattgtgttctatagccttggcaagatcgaagtttgggttgaccgaagcacgtgagctccnacgggggagtgagcgcgagtgggtgacaaatattgaaggtatccgacggttcacggggaacccagcggcatgact

SEQ ID NO: 96876 - DNA, 300 bp, Heterodera glycines
gtccaataaagattgttccaattggaggaaatcgttttatttctgtggatagattcaaaggacgtattttgattgggataagagaatactatcaaaaggacggcaaatggctccctgggaagaaagggatcagtcttaatcaggaccagttcaatggcttattgaagattctccctgatgtgaagaagatgatcagttccgcctgaatgaagtgcacacgacacaatgatctttgtttagatttttagacaaatttgcttgttttgaaatatatttttatcacatcttgctggcattttc

SEQ ID NO: 96877 - DNA, 338 bp, Heterodera glycines
gggccaacgaagaaattctgcgaggtctgtcggagctggattgacttatttgaggataaaattcaagtggaaaagttgatgatgcacaagcgttgcttcgtttgcgcaatttgcgactgtccgcttgagccgggcaactgttcccgagatgacgggatcatctactgccaattcatgtgcaacgaccgtgtgccagtgtggttttgttctgcccatatgatgttgggatcgggcgaaaaatgccaattgttgaaggaaaaatggatgaaggaaaatgaggaaaagcaggaaatatgacacaacaaatgattaatgcatttcattagtcatgtgatgac

SEQ ID NO: 96878 - DNA, 782 bp, Heterodera glycines
cgtaatcacgcggtggcggcatccttttcatcgattacgacattcatttaccgtagcaatttatgtcaatgaactcgctgaatatgggcaaagaagtggccaaacggtggatgggcatcaacaacagaagaatggcgcccttttccctttcgcccgtcgaccgaatgcgtcaaagtgtgttccgagttcgaagtcgtcttgcggtcaatttgttgtcggaagggttggccacctttctgctgctgctggtcggcaatggcattggggcacaacacattttgggaggggggaagctggacaattacatgcaggtgtgcttcggctggggcatgctaatcgctcttttggtgttcgccacttaccacacatccggtggccatttgaacccggccgtgtccctcgccttcgttagccttggcaaattgccattcgcccattttttgctgtattccctcgtccaaactgtcggcgccttttttggctccgccctttgcttccatgtctacagagaatccttcgagaaattcgacgcgggcattcgaacggtgggagggcccagcggaacgggcgcaattttctgttcctttccggacgaacacatcggacatttaccagcttttgtggatgaaattgtcgggactgggctgctcctcctttttgccatgcgctgatcggtcccgcgaatcaaccgccaaaatgggtgcctccgatccggtttggggttgcaatcgttccgacaactccctccttcggctgaatgccgccctctccgaacaatgggg

SEQ ID NO: 96879 - DNA, 269 bp, Heterodera glycines
gacaatcttcttcactttcaatgtctttgtggcgttcaattgggttgacttacacgcgttactcgcaggttgctgctgcgtcattgcgcgaatgcgtgaagaaaggcacttcgggcgaggcaaaaactgcggaaccgataaaaatcacttcatgggaaggaggcaaagcgaagaagcccgaataaggaagcattgaccttttaggaccaaattgtttttttgtagactccgttattgctattgtcagataaaaacgagattttaaaaaa

SEQ ID NO: 96880 - DNA, 483 bp, Heterodera glycines
accattagttcatgcggctgggcattttactttttgtttttcgcatttcattaaatttaattgcaaaaacaaatgccacttatttttatgtacgcggtgaattgtggtgccaaggagagccttacgttggcgccaaaatcttcctgatggaggctgacacgcttgatccggatgatttgttgggcgaagaacgatcggcgcccgacgggcgctttgaagtgcgcggaggtgagagcgaaattggcgacgaagaaccgtatttgatggttgggcacacctgtccacagcgaggtgtcccacctgacccggcctgccattttttgactcgcgttgatttgccaaatttcctcactcacattgaagtgccgccaattcatttggacggacaatacgaatttcagcatatttgtggcgaggatgatgtttaaaaaatatgaatgatggatgaataagataataaacagttcatttgcccatcttttt

SEQ ID NO: 96881 - DNA, 798 bp, Heterodera glycines
attttaaaggtggaaaattcatacaattcttcattttgttcctcatcaatatgcttgggttgttgaacgtgcgggaaaattccatcgcattcttgagccgggggtgcatatcgtataccctctcatcgacgagatacggtatcggcactgtttgaaggaaatgtgcattgaaattccacaacaagaagcaattaccaaggacaatgttcagctggatttggatgccatcctttacgtccaagtggtcgacccgtataaggcgtcttacggtgtgcaagaacctgaatatgcgatcagtcaacttgcacaaactgtaatgcgtgctgaggttggcaaactgatgttggacaacgttttccatgaacgggccaatctcaatagggcaattgtcggaggtataaaagaatcgtgtgctccgtggggcctcatttgccttcgctatgaaattcgcacaatgaatatgcctccggaaattcggcgcgccatgaagatgcaagtggaagcggaacggaaaaagcgtgccgcaattttggagtcggagggcatttgcgaggcggaaaagaaccgagcggagggcgagaagcaggcgcgaattctgcgctccgaagcacaaatgcaagagcagatgaacaaatcgatgggtttggcaaaagcggccgaagcagagaaaatccaacgcattttgcaatctgaggcggaaatgcaaatgaaagttaacatggccattggacttgccaagtcggccgaaagtgaaaaagagtcgcgcgtcatattagcggaagcggaggagcaggagca

SEQ ID NO: 96882 - DNA, 674 bp, Heterodera glycines
aataaaaaatcgaaaaaatgaaaaatttccttacatttttggcttttttcttaatagtgccatgtttcaaggctgacaatgagaaaaacaaagcggcaccacgagtgtttgctgaacatccggggccaaaattggtggacgaaaccacgcgatggagcaaatgccaagcggaccaaaacctgaccatttatgacttcgaagtggaaacacttgacggcaaattcaccaacttggagaagtacaaaggacaaattgtactgctaattaatgtggcaacattttgcgcgtttacccaacaatatttggacttcaatccaatgctggagcgtaaccgtgccaacggcgtcccattgacaattttggcatttccatgcaaccaattccatttgcaagagccggccgagaaccatgaaattctcaacggggttatgcatgttcggcccggagacgggtggaaaccgcactccaacctgcacatccatggcaaattggaggtgaacggcgccaacgcacatccgttgttcgactttttgcgcgactcgtgccctcaaacggtccctgtgcttgggatcaaggaatcaatgttctataatccgatcacggtcagtgacatcacttgggatttttgaaagtttttgatcgacgctaacggggttcctcgttttcgtattcac

SEQ ID NO: 96883 - DNA, 338 bp, Heterodera glycines
tttgtcgcgtccgtccatttctttgctcttcccatttctatggagtcccgcacctcaaatttgtcagcttccatccatcgccacggcgattatcagctgcgattggcccgctcttcggcctatgtgcgggcgaaagtggcgccaaatttgacgaaaaattttcaaaaatgtccaaaatgtctggtgatggtggacattcgactgcacgccaaatgcccagcggatgcaatttaccaaccgtaccaatgggttttggacccggaaagatggtatgtgtgaagaggaagcggacgaggcaaagccggacggacggaagagggaggtgaacagaaggggaa

SEQ ID NO: 96884 - DNA, 268 bp, Heterodera glycines
ttttgtgctgttcgtcgtaccaatcgttggctcatttgtgccgtaatcaaattcgcgtttattctgtagaaagggagggggcgggcacggcttcgggcattgaacacgcgctcaaattcaacaaagcgggagcagtgcacaaaaaagagttgaaggattacaaatgcgtcgaatatcttcaccaaaataattattccttttatgacaaggaggtgggaaaattacaaaaaatataacggtcaaaatatactaacttaagccttcattg

SEQ ID NO: 96885 - DNA, 556 bp, Heterodera glycines
cggtcgcattccttttccgatgggttcatcggcatttcctcctttttgtttattctataaatgttcaggccttcgtgttcaggagtttcttttgcggcgaatgactgatgacaaagcatttaatggccatttcctttgtcttttggagcatccgcccacttacaccgttggcattcgacaggacgaatattctgatgaatttgcccagcgattgcgccttctcggcgccgaatttcacagaataaagcggggcggccttgtaactttccatggaccaggccaacttatcgtttatccggttttcaatttacgcaaattgtctgcggatggtaaaatgaatgggattggtgtaaagcgatttgttgaattggtggaggagacggtgatccaaacattagaatgtgactttggaatgaacgggattggacgcactcaaaacccaggcgtttgggtgggtgagaatcggaaagtggcggccattggaatccaaatccgacacggaatcacttcgcatgggttggcactgaactgtgacacagatttgggctgataattc

SEQ ID NO: 96886 - DNA, 395 bp, Heterodera glycines
agaaatgcactaagaaactatcaaagttagctactgtccatgtggagaaaagtgaccaaactgcgaaacgagtgacaaatgaaaacaaattgttgagttcgaaacaaaaattcaaacctgcaagtgaggaatttaagaaatgcagaatctgcaataagatgacacatcatatttcagcgtattattgtcaaaactgctcgtatcagaaaggcatttgtccgatgtgcgggagaaaacaaattgagacagcaaaatacagacaaagtctgacataaacttgtttctgatacctattcaaacgagatattttgtattcatttgaaatcgcaagttttcgtatttcctttgttagtagatcaatatttttgtcatattggtaaaaagtttggttgcgg

SEQ ID NO: 96887 - DNA, 259 bp, Heterodera glycines
tcggtacaaaaaagcgactcggcctctttggcttttggattcatcgccggggcgggccttgagctgttcaaaatcaacttctcatgttttggcatttcattctacaaagtgttcaatgagaagcagttgtcccaagaactgacggaattcgaagagaaattggccaatcggaactcgatgttgcgcagccgaattgatcagtttcaggacccaaaatgatttttgtttataatttaaaaaggataaaattggaagaatt

SEQ ID NO: 96888 - DNA, 578 bp, Heterodera glycines
aatacatcctttctggaacattggtgtactgcgaacctccgatgataaatcattaatgaatggacagttggcgttaaaggggtgtgaaatcatggcactttatttcggcgctcacatgtgtcagcgatgtcgtgaatttataccggtgctcaaacaattctacgatcagttgaaaaaatctcccgaaacaatgccttttgaaattgtttttgtgccctttgaccgttccgaggatgaattccgcaactctttgcgcgatttgcacgacgattggctgtacattccctatgggagtgttcacattaactcattggccgcgaggtttaacatcattaattggggagtcattccgacattggttgtgcttaaggaggacggcactttgataaccatggctggacaagcaaatgttcagcatttgtcggcatcagaagcaatggtccgctggcgctctattcctaatcccgaatccggattcaaagatttttcgaaattttaaatttccatatcttttttgttaatgttgctaaagcattggtttgatgtgtacaaccaacatgtgtgtcagggatggcacg

SEQ ID NO: 96889 - DNA, 480 bp, Heterodera glycines
  unsure (1)..(480): unsure at all n locations
gcgctctagaatagtggatccccgggctgcaggaaaaaatggncctccttancctttattgtcggnggaaaagttttttggttgttgttgcccctatgaagcttttgctgtttctcatcacttttgtacagattgntgtttttccgtcaaagttgcatggcacagatgaacgcagccaagctgcaacaacagttgaccgccagtgggagcagcagcaaatgccgcagcagcagcaccagttgtgcgtgacaattccgtaccgcgaccgatggacggaattgcagcaaatgttgccacttttgcacaatttcttggtcaccatccaggccatcgccccaccgccccggtacattttggtcaaccaatcggaggaggacgcgctgcgcttcaactgcgccgcgttgataaacattggagcgttggaggcggaacgcgtcggttgcgattacatggcaatccacgacgtggacattgttccgc

SEQ ID NO: 96890 - DNA, 607 bp, Heterodera glycines
ttccctcttctctctaattgccattattattatttctttatcttcctcggctctttccatggatggacgccaaaagaagctgaaaactgttgactttgaaattttgacgcgagaacagctgtgcgtactttgccaagcggtgctgaacaaatggaagggacaagcgaacaaaaatgagcaacactttagggaggaaattctcgactcctgctcgctgatagaaaacccttccgaagcgaaaaagtgccgtgatggagtgaccgatgccaaagtggcgagactgaggaaggaaggaacggaggaaatgtgcgtggcggagggattttgcggaaagggcgagatgaaagagttggagaagaagatggagcggatggagaagagaatcgacgacaggaagcaaaagttcgagaagggactgcgcataattccgcccgtcgacttgagcccggtaaagtcagtcccaggggacaaagcgacgaacacaacgaatcggacgatgggcggaggataaacgatcaaccgaccgactgaattgattgatcaatcaaaaagggagacgcacttattctgatcagtaatcacttgtccaatcacattgcctacgttt

SEQ ID NO: 96891 - DNA, 273 bp, Heterodera glycines
  unsure (1)..(273): unsure at all n locations
ttaccgctttgctcggcgagggactcacttgggtgctcgtctacaggtccgacgagtacaaacggcagaatttgcaaaaattgctcggattcgccccgtcgcgctcattcaatcgtcagacgcagaatatgggcggcatttttggccaaaatgcgcaatccaatcagttcttccgttagcatttgaaagagcaataagccatgtgatgctttgtaatttgattttttgttttaaaaagttttgtcttcactcattaaacatcnactaaaaagt

SEQ ID NO: 96892 - DNA, 416 bp, Heterodera glycines
ccactgactatttcgacctgttaaagtgcttggatttcatcattctgacgaggactaatttgaccgggctgaactcgcgggcaggccgatgtgctgtatgcgagatggacaaagtcagcctctcatgccaattggcgtgtcgaagtgcgcttttttctccgactctcagccgcaataaaaaacagaagcgcattgaaatggtttgccattggggacacggagacgaaatccgaggggacagaggagtgctgaactgtctgaagagtacgcaccattggttggcacaaaaacaccagcagctgaacaactaacagaacaaagggccgatctgtcgcaatttgaattttaatacggtagcggaaaataattgtgatatacggtagcaaattgccaaaccgaaaacgcattaaatgcag

SEQ ID NO: 96893 - DNA, 252 bp, Heterodera glycines
gctgtcagacctgcaggggccatcagaccgggacctaaagcgccttcatatcgcccgccgcctgggaagtcctttgtgaaaagtgctcttggcttttgcgtgggaatttgtgctgctcgcattttgagtgaggaattgagttcagtataaatcatttgctcgcgcacattgttgatgtgtttctttgattgcatcgttaacaattgtgcctaatggctgttgatcacatcaaatttgaataaatacgattag

SEQ ID NO: 96894 - DNA, 213 bp, Heterodera glycines
gtgatcacagatgacacaacagaggcggaagacatggaaaaggcaatgaaaattggccaaacttacttttggtgtaaactggtgacagaatggaaatgtcaaaataaaaattttaaaaaaaaaataatcacaataaaaaattgatcaaaatttgcgaaaattggaaagtgaaggcaattgcggcgaatgcctatgtgaaaagttgggtgtgcc

SEQ ID NO: 96895 - DNA, 510 bp, Heterodera glycines
  unsure (1)..(510): unsure at all n locations
attcgcatgaaagccaacgactgtccgttggtcgctcttatccgattcggcggttgtgccacctcattcacttctgaatctttcgcgcggaaggccaaccttttgggcaacattgaccgttccaattgcgagacaatttatgtgccgatttttggaggtgccaaagtgcttggctgggctaacgatgttcaaattcgaattgatgagctggattatcaatttgtgtaccgtttgggggtgatggaggacaaacatttgccgatgtattgcaagaagaagttcgacatgcttattgcaaccgattgctgtttcaaaattggatttaccatcgattgtggcaaaaaagtggtctcccgcaagggcaaagtggtcaaaattttgaccgaggaacaaattcagagcgaaatggaggacacctattgaagaaatggaagaatgagtgaatgaatggaccaaagtgatcggagaaacagaaaaatcagcattgttcggcgcaattttgtggaatan

SEQ ID NO: 96896 - DNA, 365 bp, Heterodera glycines
cttcgcttctgtcattggctggggttactctgctgtgcactcattcaatttgttgttctattggacggacttttggacgtgcgtcaactttcaagcggatcacacaattgtgccgttgatcacttttgtgctcagccttgtcttggcgtgttcgtccatcttcgagattgttcttcacaaattcgtgctgaatgatgtcgacacggaaagtgacaatatgggcattcatcagaagcagaagaacggatgtgcctttgtgtgaacaatgagcagagagacgagattgaaacgatgctggtgccaaaatatgattgatgatattatgataatcggattatatattgcttggtaaattgttttactcc

SEQ ID NO: 96897 - DNA, 510 bp, Heterodera glycines
cttaaaaatggacgccaccaaatggcacacttttgtcaaccaagtggccgccacgggcccaatcacaaaggcggcgatttgtggccaagacggaaatatttgggccaaatctgacaatttcaatttggacccaatggaagcgaatgtggcagtgagcgcctttagaaatcccggcgttttggcaaaccgtggcttagcctgcgaaggagtgacgtatccaattacgcagcccccgtccacgaccaacaacacttgcctcagcggagagattgacggacagcacggcgttacgattgcaagaacgaacagagcatttctcgtcggagtgaccgaagggacggacacggacgtcggccgagtggaaacggtttcattggcccagcaattggccactcagtacggctggtgaacaacgcattgatgcggatgaatacaattgttctacactgatgagcatgggctataattgttctgacaccttgcaattatttgcgtcatttctattttcta

SEQ ID NO: 96898 - DNA, 508 bp, Heterodera glycines
ccccccccccccatgagattgaatgcggtagatattcgctcatatcgtatcttaaactcaccatcaaattataatgagactgtttttgaaggggcgttattcttctcggcaccctgctgtgccagtgccattctgactcggtggctgttgaacggtcaaaggtggatgccgtcgatgttggagacgcgccgcacatgatgttgacgcgggcaaagcgtgccagcggcggccgatggaccacgcagcagatcatcgagtgcattttcgctgtgccatcagtgccttttgcaaatccttaaggctttttgcttactaaaaatcggagatttcttttttctcatttttgtttattttaaaataatttgccaatgttttggccgcccttttcagtcaaatcaaatcaaatcacaattcgattcttcacataagtcacatttattatgattctgttatttcttcgactgtgcaattgactttattattggaaaagaataaattctaaaatttt

SEQ ID NO: 96899 - DNA, 227 bp, Heterodera glycines
tttcattcttgaatcgacgtggcagaagttcaagcagcaacacaaaacgagatttggcacgcaaagatcacttttttccacataaatttctgattttttgtggcgtaagcaatttggaggaccggatattttttataatttgtggacccaaatcgcggaattttacccaataagcacataaatcaccttctgtttgttacttaaagcaattctgataataaaaaaaa

SEQ ID NO: 96900 - DNA, 524 bp, Heterodera glycines
aaaattccacgccattttcatcatcttggaattgctgttggattgagtgacggaaatgggaagtgttggcgtcatctttgtcaaaaatgtggccatggttttgatgctgcttttcggacggacgatgatggccccgtttgcgattgctggcatcgtgagcgacaacgttgaggtcggctactacccgtcacgcgaaaaggggaagggcatttatgaatggatccaagtcatcaaaccattggtacagggccgagtaatgttgacattgacgattgccaattcggttttgttcattgccacgtgcattctgctcatatacctcctcgtttttgcggtactgcttagcacgtcgaaccaccagttggaggaactgcgtggaaaaatcaatacggtggattactgttcggtgctgcaccctctgtcggctgctctccaaaatgccagggagtcggcgacgactcgacgatgtgactggcaaatgtcctgaagatttcaacaaggcgccggcgcagattaagtacagt

SEQ ID NO: 96901 - DNA, 354 bp, Heterodera glycines
ttttgttacacacatgcaaaacagtggccttctgctcgaactgatgggcgccgaatgggcggcggttggccaagcaacgattagtaaattggtcaaatacgaagagaatgtcggcatcggtaaaccgtcggatgtgttgcaacaatttcggttggaatacgccagcggagtcacccatttgaccgaacgcaaagatttgcgcccgcgctgattttaaaccgaatgaatgcctttcggattgaggcatttgattgatgatgatgattgtggaaggtgaggctcaaaacgatgtgtaggaaatttgttattcttcagtttgttatcgtttcataggtattttggtataaacttttg

SEQ ID NO: 96902 - DNA, 583 bp, Heterodera glycines
gtggatccccgggctgcaggaattcggcacgaggcgcgtagttgtttcggcaattatttgaagcaaagtcattcactcttcctatttgctgggatgcacaaagacgagacaggctctggtcatcgatccagtgatcgaaacggttgagagggatgcctcattagtccacgagttgggactcgaccttaaatatgtggtcaacacacacatccatgcagaccatgtgacgggttctggcgaactcaagcgcaacaaatactttccaaaagcaatttcgattttatctggaaaagcgggtggaagggctgatttgcttgtcaaacactccgatttaattcgttggggggatggactcgaattggaagtcagagaaacgcccggacacacaaatggctgtgttacttttgtatgccattccaaccaaatggcattcactggcgatgctcttttgatcagaggctgtggaaggactgactttcagcatggaaacgctcggactcttttccgatctgtgaaatcgcaaattttcactcttccccccgattatcttatctatccggcgcatggtaaactaaattaatgt

SEQ ID NO: 96903 - DNA, 582 bp, Heterodera glycines
tattcattactaaaatgaacattttcacatttattttcatcgccttgctgtgccaataccaccgcagcaaacatcatataaatgctggaccattggacgctgaaaaatcgccttcaaatggtgaaggaatccacaaatatgaagcggagaaattgaaaattggagaagttgcaaaattgaatcatggtgaaacaaaaactgaaatggatgaagcagatggccatagacattcattgccaaaagatcgtggcgatattgtgcatccaaaatctcaggacggagtgtgcaagattcatgaggatgtgaagcttgatttcaatgatgacattttcggccaacatgttagtggagaagaacgtccgccagtggccgagccaatgccaatgtcagcttaaattggtggcattttgagaggacacagatgagagtgtgttgttgttttttttgggatttatttagttatttatcattgttagtctcttttttatgttagcttttgtagtcatttttttattagctttaccacaaccttttttaaatgtcatcatatatatacctcaggttctttatggatattactat

SEQ ID NO: 96904 - DNA, 308 bp, Heterodera glycines
tttcttttattttcataaatgaaatcgtttattctcgctgttcttttctcatttctcttcatggctttaatgatgccacttgtcagttcagaggaatcggaaacaaaaatgaaatcgccgattatggaaaaacatggtaacggaggcgacagactaagcgattatctgttgaaactgtgaagattcacgccgtggattgtattgctttgaggatgacgaatccaaaacgatttatccgtttgatacaataattattgaatgactttcatttgtaatcgattaaaagtaataaatgacttggaaaaaaa

SEQ ID NO: 96905 - DNA, 436 bp, Heterodera glycines
tttctaatcttcttccacgtcactgttggataatggcggacactgaagcaaacaatagacaaaatgagttggaaatgagcgttaatcgatggctgggcgaaacactgcgaattgaattgactgacggacgcgtcatctatggtcagttggtttgcactgacaatgtgccgaacattatcctggtggattctcgcgaattttggaaattcaaagaagacgaggcgggtggtgatcgtactcggattccgatcagacggacgggaacggttttgatcaaaggagagtatatcaaacgaatctttcaaattgtgttgccagaagaagaaatgaattcgattagaagaaaagaggaagaaacaaccgaaatgtgaactcaaatgtttgaattgtttttccacatttcatagatgaaaccacagcagacagaacattggcg

SEQ ID NO: 96906 - DNA, 108 bp, Heterodera glycines
gtcccttattcgtcttctgttcgcggttttctgcgtttttttggccaattttccccaaggtgcgcaggcagcaaaaaaaaaaaaaaaaactcgagactagttctctct

SEQ ID NO: 96907 - DNA, 536 bp, Heterodera glycines
aacatttccgaagcatttcccatgaccgattcaatcggcggcatttgccgaagtcacctgtgccgcagtcagtcggccacaaatgtgcccgaaagttgggccgaccgcccgtatccgaagatgacgcgggtccattccacgacggacatcgcacagcgatacgcggagatcaattcgcccacgagatactggcccaaaaacaagccctattactggccgatgaccagcaacttgtgcaacatcgtctccaattacaacttttacccattgttccgttcttattggccttcctatcgcagttatttgttggacaccaattggtacaatcgccgcttcgaccgtttccaatttttgccacccgattcttattatagctattggccaatgtcctgcagttatcactattggtaccattatccatatttcaaacgatggtatctcggaggcctcggtggagtttcgcagttccacaaacaatgaaagtgaaaatggatgtatagcacagaaacacaatgacgcgtaccgtaccctttacc

SEQ ID NO: 96908 - DNA, 520 bp, Heterodera glycines
ctctcaggccggaaaaggaaaaaagccacgaggagggggagaatgattttattcgttttgctgcgacatccatgcaagggaagagttcgttgaaattggtccattcgcatttaaattggcaactatttaaggatggcgaacccatcaggaggatgcgcataattgtatcctcagttttggagatgagtgctctttttttgcagtttatgatgggcacggcggttctgacgttagctcctacctgaagaaaaacttccccgacttcttgaaagagcacaatttgttgctccacaccactgacggaaggtctcagcgcggcattgcacaaattatttgtgaaatttgacgagactctgcgccacgacgatacggtcaaagcaatggtagagctgaagacagcactttcaacaacatcggaccaacaacagcaggcagaagagcaaaaggcaaacgaaggctgtgacccgggggagaaggagcgcaaggaacgtgagagtttgatcggtgggtttaattgatc

SEQ ID NO: 96909 - DNA, 518 bp, Heterodera glycines
ggttgtattatttttgttcggtattttgttggccgttcaattcaactcggaaatcgttatggccaagagtatcggcaagcaatcaaaagcatcgaattcaaaatcaacaccaaatcaatcaaaatcaaatcagccaccatcatcaccgtcttcatcatcttcatcatgcatgggctgtctgtcgaacaccaacacggccgggcccattgattcatacttgggcaagccggtcaagaacagcattttcactttctacggtgccggcggacgcggcgcgtgcggtctagacgccggagtgccaaaaatgtcagctgccggctccggccaattgttcaagtcggacgggcagtggaaagacgcatgccgagccgacaaacagtacatgttggacgacccgatttgcaagaacatttgtatcaaagttgattacaatgggaaaactttgaccgttccaatcaataacaaatgcccggagtgcccgcccaaccacgtggacttgtccattgatgcgtttaact

SEQ ID NO: 96910 - DNA, 510 bp, Heterodera glycines
ttgtattctttttgttcggtattttgttggccgttcaattcaactcggaaatcgttatggccaagagtagcggcaagcaatcaaaagcatcgaattcaaaatcaaaaccaaaaccaaatcaatcaaaatcaaataagccaccatcatcaccgtcttcatcatcttcatcatgcatggggtgtctgtcgaacaccaaaacggccgggcccattgattcatacttgggcaagccggtcaagaacagcattttcactttctacggtgccggcggacgcggcgcgtgcggtctaaacgccggagtgccaaaaatgtcagctgccggctccggccaattgttcaagtcggacgggcagtggaaagacgcatgccgagccgacaaacagtacatgttggacgacccgatttgcaagaacatttgtatcaaagttgattacaatgggaaaactttgaccgtcccaatcaataacaaatgcccggagtgcccgcccaaccacgtggacttgtccattg

SEQ ID NO: 96911 - DNA, 529 bp, Heterodera glycines
  unsure (1)..(529): unsure at all n locations
gtccaataaaggccattttgaagaatttatttgcgtatttggagaactatctaattgtggttgtgagtttggaaactctgtcctcacaaaatgcctctttgtcccaaatgtcagcggcctgtttattttgctgagcgcgtcacttccattggaaaagattggcaccgtccttgtctccagtgtcataattctgcctgtaagaagacgctcaccgttgggaagcattgcgaacacgacggaaagccatattgtgagcgatgctacggcgcattgtttggacctcgcggctacgggcatggcggagttgagtctcatgtgttcttggacgggactacctgagaaaatggtggtgcgagatgtttaagaatattatatatctcatatgatgtttgttcaattaccattcaactgaagttctaccttaatcattcattttctatccacatacgtatttcattccatgagttgtaagaaaaattcatatgtgtataatgtgccaacatctcagtatgtattgtangctatgatt

SEQ ID NO: 96912 - DNA, 456 bp, Heterodera glycines
agcgcattcgcggctttcttgttgacataaatggcgtactctttgacacttctttggacggaggcaaggccattcctgggtcgattgaagcagttaaaagactttacgagctaagttgtgttcgttttgtaagcaatgaaagtagtgggacacgaggagcaatttgtcaaaaattacaccgtctcggattcgttgggcctcagcctgagcacattttcacaccggcaccggttgctgtcaaataccttcgacagcatggactacgaccaaaattgatagtgcacaaaggtttaaaagttggactttgagttgatataattatttggcgaaccaactgtaccgactaaaaccatgaaggacacttaatttaagactcctcgaacttcagatgtacttcccgattttgaagaatttctcaacgtcgaaaacccaaattgtgtggtgttaggcgacgca

SEQ ID NO: 96913 - DNA, 361 bp, Heterodera glycines
gagggccggcccatcataataaataaaaatattaaattgcaataattaattattgcgcatttttggctgcttttcctccatcattttttggcttccaaattgccgtcacaattgcgtcaccgcccaatggcactgtccaccggcggccttccgtctgatcaaaaatggacacattgtgcgcatcccgatcactgttgatcagcaccagcacatggaggcctgggaaaagaaataatttaaattggaatgattttacgatgaaaatgcaaattaatacgccaattaataaaatttacaatgaaaatgccatttattgtaaacgctaattaattaatttttacagttaaaatgccaattaaaa

SEQ ID NO: 96914 - DNA, 221 bp, Heterodera glycines
acgggacttttattcaatcggagcaaaacgaggaatgcaaatggggacgatctcggcgaatcatgactcatcagttaaattcgaactgatcagttccgatttaagcctatttcccatcgaatttatctgttgtcccatccctatccttctcaattgtctggctcaactcccgctatcaaatatgaaaaaatccagttttggacaaagtgtaaattttggtg

SEQ ID NO: 96915 - DNA, 524 bp, Heterodera glycines
taatagttttgcgttacattacacaaaaatgtcgtcaaatggcatcatcacaattgtggcgctattccttgtgttgtttggcactcacataacaacacaaattggggcaatgaatcgtcatcgccagcagcgctcacttggccatccgtttacggtggataagcagcagcatacggcacagaacgaaaatttggtcggcgcttatttgtctcggggaatgttcagctgtggcgccaaatatgttggcacattgcaaagactgaaaagaatcattgaggaagtgcatgccgactattcggaatgccaaaaatcgatgaagcaaatggacgagaacgagcaaatggcattcggaaaagggcacggcacagagcgatttgcggtgattgacgaactgattaattgagcccaggggggcaatttgtggcaaaatcacaaaattcgaagcataaccatttgaaaaacattgaaatgatttttcattgtttgtgataaagcgaaacagcaatttgttaataaaatgccaa

SEQ ID NO: 96916 - DNA, 265 bp, Heterodera glycines
actgcacagaacgaaaatttgttcggcgcctatttgtctcggggaatgttcagctgcggcgccaaatatgttggcacattgcaaagactgaaaagaatcattgaggaagtgcatgccgactattcggaatgccaaaaatcgatgaagcaaatggacgaggacgagcaaatggcattcggaaaagggcacggcacagagcgatttgcgatgattgacgaactgatcaattgagcccagggggacaatttgtggcaaaatcacaaaa

SEQ ID NO: 96917 - DNA, 665 bp, Heterodera glycines
caaaatattatttttccgagaagtatcttttgttcctcgtctattcgttgccctttggaaaagccttaactgaggagcaacttggaatacgcttacggaggaaagaggagcaaacgccgagacaactcaaagagaaaagtggcagggaaaggccgttgccttttctgagtgacagtcaaaaaactgaggaaatactaaatacagctccagtcaaaataaaggatcgattgacgggacgacgaccatgtcaaattgcttacttggacaacagagagggagcgtttgccctcaacgttctaactgaaactgcaacgaccaaactgacacttggcgaccacgttaagccattgggcaaaggcaaccctggaatttgtgcgccatttgagcctcggatttgctcggattatttggtctcctacacaaaccccggtccttttgcatcgttcgctccccactttgatttgacttgggcgacaatgtcaaagcgtgacagcgacttgctcctttcttgctacggtgacagagataatgtaactgatgcgactgcactccgacaaatggactcaaatgtcggaacaccaacttcagatgtgggcgagtccatggtaaatgacctcactgaccatgaacacttaggaactattacgtcgctaggaaacacgagt

SEQ ID NO: 96918 - DNA, 210 bp, Heterodera glycines
gaacatgtcgttgagaaatgctaccgaggctggtgccgggattggatgttggagtgccattggttttgtgacgcaattcgagggttggacaattatggccgttgtacggaatgtttgaggccgagggggagcgcttgttttgaatgctttgacctttaatcactcaattttttttattccaaatgaaaatcaacaataaagtaaataacc

SEQ ID NO: 96919 - DNA, 348 bp, Heterodera glycines
ctctcttccgttttcatgtggggaggttacggtggtggttactacgacggctatggctacggtgggtactacggttcacagatcattttggtcgtcgttctgctgatcgtcggctgtctctttctcacttgcgttgtcgccggcctttggctgctttattcaagacaacagaaagaaaggggcgaagtgcggcaacaacagcagtattacccccaatattacactcgcaacggcggaccatacgcaaccaaagaattgagcacagaatttccctaaaaatggcattgatcagtcgccacaattggcattttaatcggacaaatgaaggcgcaaaaaaattgaaaattc

SEQ ID NO: 96920 - DNA, 683 bp, Heterodera glycines
aagggccaaaacggaggcgcagctgaactattggccgtattattcgtcgcccgtttattcccacgccgcttcttacgaccattacaaattgggctcaatgtaccaatggtttttacgttcggccgcccatcagaacagcccaaaccgaagggcacgttattactgctacagtccgtacacaaaacagcacgagcacagcttcttcccctactttaccaaccactgaaaaagagggaaaagcaaaggaaaggaaaagcaaaggaaagaatttagacgaaacgcgaagaattctgatgattgtgctgcatgaacgaaaatattagcgcaatctgtggttcagcaacaacagaaacatcaaaaattcacctttatttcactcacataataataattatattgtaattgaacaattaatttgtccggtggtcttccccccccgccccctattttcccatccccttcattcattcggtcgttcgtcaatttggccaattatccgtgccgttgttgcgtccatttggcgccctttccctctgctcattgtcagtttcggcactgtccatctctgtccccacggcacttccattgttttcggcttcactacccgaccgcacttcgatgatcacttcatctgcagtgcctcgtgctgttccatctccaattggcccattcgatggcccaac

SEQ ID NO: 96921 - DNA, 155 bp, Heterodera glycines
aatgaatttttatattatattttttcttgtgattttttccacctttttttgtcagctgctgattgtaggagcaacagagaaaagtggtggtgtccaatgcgatgaagcaaatggcatggaaccatttgagtacattccggcactgtggagggagg

SEQ ID NO: 96922 - DNA, 252 bp, Heterodera glycines
ttctccttctcgtaaatattttgctttgttcaattgtgttgctacatttattgtcaaatgaaaatggattggtcaatgccatgccggcattgaacggaggcgacgagttgttgttgagaaagaaacgccaagacgaaggtgatgaagcggaagaaaatgccggaggcgagaatgcggaaaatggaaatgaagaaaataacggagaaggacaaaatgaagaaaataacaatggggaagaaaataacgaagaag

SEQ ID NO: 96923 - DNA, 166 bp, Heterodera glycines
ttatttaaaatgtcttcgcataatacttcagttattgatgaaaatcgacgatggagtgacttacgctgtttaacagatagggcgtctacatttgccaattcaggattcgtccctggaatcaaggtaaaattttgtgtaatagtttagatggtaaccatcctttttc

SEQ ID NO: 96924 - DNA, 354 bp, Heterodera glycines
cgccatcgtcgctgacgatacacaacccaaacatcgaccaaataaacaaccgagcagagaatgagcgcggcgaaaattgtgccgatgagcaacggatccgtcgacggcacgacatgccattggagaagcaatgtttcatcactgtccatatgtagaaaattccgatgggaaatatgtgcaagaattgtcacatctgcacaaagcattaatccagcagaaaggagcgcataagttaatgactccttaattgataggaagagatttatggctaaacaaatggaatctttaaaacgaaatttgtcattagaccgggaattttgggctaaaccagaaccagaaaagccatgaattttc

SEQ ID NO: 96925 - DNA, 524 bp, Heterodera glycines
gttgacgttggggaaattgcggctgggcatcacgttacgcctgtggacatgacaacagctaccagcaaacttcagcttgaggctgccgaagtgcgaaatccggcgaataaaccgaattggtcatcgtatttgcgctctcaattggtgcctcaaaatgagtacaatttcattattgaattggaaaaggccaaaaacaagcaggagagggacgaagcgttagccaaggacaagacgaattcggcacggagtattatcaatttgatcaccgaagttgcgaaggatcagctgatccgttacgttctcacccttttcgacgaccttttgcaggaggacaaatcccgggtagagattttccatgattatgcaagacggcaaaaacgaactatttggtcgtggttccaagggattttaacgcgaaatgacagtttcattgtcaaccaaatgtctgcaatattctcaaaattggcttgctatggctctgtgcttatggatggacaagaactgcaagcttatttcaatttcct

SEQ ID NO: 96926 - DNA, 517 bp, Heterodera glycines
gccgctctaaactagtggatccccgggctgcaggaattcggcacgaggggttccattttccatccaaaatcaaatctttgacctttgaatttcaacccttcacccatgccatttgtaccttatcggctcaaaaccatggaggagcaacaacctctggcactgttctactaatgaccgggacaacatcagcaacaagcagcactaataacactattaatactaataataacaacaacaacggtaacagtacctgtgtgaaagggtcgtcaacaacgcatacggtaacggcgcctccatcggacatcagtttgacggagcggatgaagcatttgctgaacacgggcaatgacgcggatgtgcactttttggttggcagcgatgacaaaaaagagcttcttcctgcgcataaactgattttgaagacggcctccaatgtgttcgaggcaatgtttcgatttgacacggaaaacttgaaggcttcaggaaaggacccgcatagtgagataaagcctgtcga

SEQ ID NO: 96927 - DNA, 480 bp, Heterodera glycines
  unsure (1)..(480): unsure at all n locations
tcattcgaacataatcaaaagtaacgaaaccacccgagcatattcattcctcaacccgccggacgagttcgatgagaagccgaagcacaacctgtaccgttggctgcacacaccgcgcaaggatggccgtccgaaaattgtgacaattcgcaagcggcgcaaactgcaatgggcttcgtttatgccaagcttgatcacgtttttcaacgcttcgagtactgtccctgtcaacttcctcgtcatttgtcacattgcatgccataccaacttccagaagtgaacgcgtgggagaaggaggcaaaccaaatgttggacaatttgctgtgcttcaccatcaaggacagtgacattgggcccgcactgctcgccgaactgatggccaacgaatgaggagggatgagaaggaagtgtgcgcantccaagcggaagatgaaaatattgtggatgaaataaatattcattgtaaatgtgccgatgggc

SEQ ID NO: 96928 - DNA, 261 bp, Heterodera glycines
gaatgaattcctgacagaaaataaaaaacagagaatgacatcattggcattaggcggaattgggctcggaatgagtggcaatgagtgaatggcccgccacaaaaacattctccgcattcatttgattattctttccttcgctaatgctaatgcatcatttttgtccctaaaagtccattttttgcttatttgccctttcttttcctttttttgtcattattatttttttgagacaaaaaatttcaataaaatattaaatcg

SEQ ID NO: 96929 - DNA, 335 bp, Heterodera glycines
tgattttttaaacatttttaattcccatcgttccttaaaatggcctgtgaatgttcctgctgcaaaaacaaccaatgttgtaccactaactgctgcggagattcttgttcatcatgccaatgccccaactgcgagtgccaaaagcaaaagggacagtgccaaccccaggggaagggatgctgtgcttagagaagcgaacggaaaggacggagagaggggagagggtgaagcagagagagagagagggagagagagaaaaaagggaccacagtgatcggaatgaccaatttgtgtgccaatgataagagcaaatgacaaacataattactaattgt

SEQ ID NO: 96930 - DNA, 547 bp, Heterodera glycines
gtggattaagaccatagcatcttgctgcacgtccttttttctcctaattattacaaagttttacacacatttttttaatgagttttccttgcggagacggatggcggcagcaaatccatccggaggaacagctaccacaatacgagcagaaatgtgacattgaaatgcaactggacactctcaaacaaacggtgaaggcaaacacaaaagcatgtgcagagtcggcacaacgaatcgaagacttgcaaagttttcgtttttattacctcatcttggcattcttcgcattcttcatcctcatcatgtctgcaatgttcctttatacacgaattagcttactaagtgaccggatttatacccaaattggcaatgtcgacaacagaattcgagatcatcttgacaccaaatctgagcgtctttatgccaaaattgacgctttatctgcccaagttcaacgacttgggctggcaatggctacgctttcgaatggaagccacaccacaacttgatgaaagaggacaacgaacgacagaagaagagaaggcat

SEQ ID NO: 96931 - DNA, 530 bp, Heterodera glycines
tccccacaaaaatgtccaatttgtttgtggcttcttctgctgttgtttttctccttctccaattgcatttcgtcgtcactttcgcatcatcctttgaaggggcgccgccaaaagcaaatgaagaagcaatgccaacgacgggggaacaagacggaggtgccgaatttggtggaagcaagcagaaaatggcacggaaaatgatgcgatacaatggcaacaattttgacaaggtgtccgtcctcttcattcgacgtgaaatggcactgcgaaaacttcagctccaaatcaacgttttggagcagcaattggccaatgctttgtcgtccgctttcgccgccggctgtcccccctccggcgtttcttccgtttccgatggcatttcgcaccgacgccatttgccaatgccccgcgagtgaaagtgcgacagagaaaggaacacaacccgatcagtgaacgcatcagatgagaaaatatcagaaaagagtctcccccccccatttttgatcatttgagtaatttataatgtatcc

SEQ ID NO: 96932 - DNA, 549 bp, Heterodera glycines
cagttctgtagccgcatttcgcttttgtcagttttcttcgtccttattcaaagcacagtgtccgcagcgcattttttgcagagccgcatcgactgtcatgtcgacctctgaagaattcaaaaagcagaccattgtgccggatgtggtcacgaaggcgccggaaaagcgggcaaaagtggtgctcgacagcggagtcgaggctaatcttggcaacgtcctgacgcctacccaagtgcagaatccgccgaaagtcacctgggaggccgaggctggcaaactgtactcccttatcatgaccgaccccgacgcaccgagtcgcaaggagccgaaattccgcgaatggcaccactggctcgtcgtgaacattcctggcaccgaggtggacaagggcgatgtgctaagtgaatatggttagttattttatttatttttttaattttccgttttaagttggttcggggcctccccaggacacgggtctgcaccgttacgtctacctgatttaccaacaaaagaacacaattaaagacaccgaacacggccacctga

SEQ ID NO: 96933 - DNA, 374 bp, Heterodera glycines
tgatcagctttatattgttcgtcaaagcatttggaggaggttcaccaaagaaaaacaaaaaaatcaacgatggattggcacaacgcatgagcaaattgttgagcacgggcgcttatgcagatgtacaatttgtagtggaagaaggcgacaaaaaagagcttctgctcgcccataaggcaattctttcgcatgcctccgaagagtttgctttaattctcggttttgacacacaaaattcatcacattcaaatggaaaaatatctgctgaaacaattaagactgtgctggtcacagatgttacaattggggcgttcaaagtgatgctgagctttatttatacggaagggttgaagggtgataaattgagtgtttgc

SEQ ID NO: 96934 - DNA, 536 bp, Heterodera glycines
cagtttaacaattgtccgtttcccttttgtctttttgctccatgtcttcctcccgcttctttgtcctccttcctctcctctttttcctcctcctttcgttcgaatgcgttcttttggctcccaatttgttctcctccaaaatcgtcgcttttggtgagagtggcgatgcgtttgattcgccgtcattcgccgatggcacatcgacggaacgcttttcggcaacggaaagcgacggaagggcaatggccaaacggaacagtcggatggtcaacgcattgagcaccattctgaacaaacggaaagaattgggcaccaatgatgcttttcgagttcgaatccgatcattggaccaaatgggcaatacgaattgctacttttcgccggttcagtgttatttctttgaggaacggtagaaaaaagtgaaccgacgatggaagagaagaaaagaattggaacagacaaaatgaaatgattgttttgggaatgagaagcgatgccctttttgtgatttgccaattaaattgcgactcagcgaa

SEQ ID NO: 96935 - DNA, 302 bp, Heterodera glycines
caccggagatgctgcaatttcggggtcatctgcacaacaggcaaaaacgggcaccgaatcgagcacgagcaagccaaaggcgtgctgcgtctgcaaggagacaaaagggaagcgggacgaatgtattattctgaacggtgaagagaattgtggtcaactgatcgaagcacacaaaaaatgcatgagagaatatggatttgaagtgtgatgagagaatatggatttgaagtgtgatagctgatatacgtttcttgttttaatgttttagtattattgtagtaatctagtataaatggttgact

SEQ ID NO: 96936 - DNA, 362 bp, Heterodera glycines
catcgcacccgtgctatgcttgtcaattttaatgatcggccaaatgccatgccaaactgatgccgttgctgttcatcccgctgttcgaacagcggtgagacttgccaatacaaaaggcggacagattgcacttggaattgtggcgcctagtgccctcccagctgctcggatggccaagcattttgtgcgttagcgtacgctgaggcaatgtgccaccagtgactgatcagagaaaggcagcaaatggctcgagtgatgggaaggatcggaattttgttgtaacaattttttcccaaatttgtagttttttcatcatttttaattaattttcggctttttattaaagttgggttggacaaaaa

SEQ ID NO: 96937 - DNA, 191 bp, Heterodera glycines
ctaaactctgccccttctccaatttcttttggctgttagcttttgctttccgagtgatccttccgatgaattcgccgtgccttttcttccgtcaatgactcatccccaaaaggcaattaattcattaatttttcttctcccttaaatatatttgtgccaattgaggagtttaataaatgttgtggtgtaat

SEQ ID NO: 96938 - DNA, 672 bp, Heterodera glycines
ctctgggaccgattgatggtgttggcttcgaaggtgcaaaaagtcatcaatctgtcgtccaaaatttcatctgtccagaacacggaccacatgatgcaacagccaacggaggaacagcgccagcgaatttatcaaactgataaagcaaagtctgcactgcttcatcttctgctcactgattgtctagcgaaaaatgatgaaacaaccgtttttgaccgttttaaaatgttaaaagaggaaaacaattgtaaaattgctccagagatgttcagcaatttaccattggcacgattattagtcaatttggaagggaatgacaatgagacgaggactcgcgtcgaagaagtcagaaatttgctctttcgtgcattgcaagtgcttattgacgcggaaataacgccatctgatgaattactctatagcttcgagcagcaaaaaatgtacgaagaggcgaagctaagcggtttgagcacattacaatggttggaacgtcagagatcattgaacaagaggggtaaaaagcggaagcaggaagtggacacgaaggcatcgaaaggacgcaaaatccgttacgtggagatcccatagttagtcaatttctttccccgcacccccgaaagaattgcatggacacacgaaagacgggacgagctggttcagacgttgtttatt

SEQ ID NO: 96939 - DNA, 619 bp, Heterodera glycines
ttttgcttatcaaattggcaatgactgatcagcagaattcaattgacgggggatggacagagcaaaatgtgaacgacgaaaaaatcaagtctctcgcttctcgctcagtggccaaaataaactccgagtcaaacgatcgcttcagtcttttccccttggaggtcggaaggtcgaactgttcgaagaatcagtcaaacttggctgaccacgcaaactgtgcaacggaggatggtcagacagcgcgaaagacttttttggtaacgatttgggagaaaccgtgggaacaattcgagcagatcacttacaaactcgaataagaggaaacccgaagaaagaaagcgagcaaacagaagggggcggggaagtgattgatcacatcgcaataatcctgttcaaacatttaattatttccaatcggtaaaaaatggcgaaattatcacaatgtcctccttcccagctgatctgtcaatcgatggacgaaagattttcttgtcccgcattgatcacttttattgtcttccactgctgatcagtctgttttccatgtccctttccgttgggtacattatgttcaaaaattacaatttcaagacttacacttgataaaaatgaaaaattc

SEQ ID NO: 96940 - DNA, 459 bp, Heterodera glycines
cttttcgtcaaaatgctttctccattcacctacgatccgttcaatcgccgttcgttgtggcctatgaccactattgttggcaacgtcctttcgccattccgccaattggagcgcgaactcgaccacttcttcgatgggatgcagcccatgcttcgtgaccatgttgctcagttgaacgtctcgaacaagggagacttcacttacaaggtcgatgtcagcggcttccgccccgaggagatcaacgtggaggtggttggcaatgagtttattgtcaatggggagcaccgcgagcagaacgacagtgggttttgttacgttgccagggctttaaaatttgctgagacaaatatcggagcttggtgttaattttgaggatttttgcttactttagcggcggagttgatgaaatatgaaaaacttatacttcaatttcgaaaattgtgtcttccatttgtttgc

SEQ ID NO: 96941 - DNA, 359 bp, Heterodera glycines
ttttctgtttttttcgtttctccatgtccatgtgttgggcagagccatggaattcggctccaatttggccaacactcgtccaatcttttccgtctcctctttcaacaatgactataaaatggacagagaacatccgttcgtgaacgatttgtggagtttctacagcccaccgggcggcaacggcgaactgagcgatgagaatttgtggagcagtgccctcagccgacacctccttttccatatgaacagaaaaccgaaaaaatggtgaaaaaatgaaatttccaacaattgttgcaatttgagaagcgaaaaatgtcctaattaattgctgttaaattaatgaaagaattgaaataata

SEQ ID NO: 96942 - DNA, 150 bp, Heterodera glycines
aaatccaaatagtacaaaacggaagttgcgaattgatcagaaacaaaagaaaaacgaagaatcacgcctgcaggccgatcagccgaattaaaatgactttttcatttcgtgtaaaataaattcaactttcttcaaaaaaaaaaaaaaaaa

SEQ ID NO: 96943 - DNA, 417 bp, Heterodera glycines
gaagatgtcaaaaacggggctatccgcggcaattgatgatgaattcgaccctgacattgatctttcacagaggtccaggtcggattgggttggttcatttgctggtaatccgtccacagctccgacggtttatgcgatgttcaacaacagcgtttggacttttatgcttgtttacggcgtgacaggccgatttatttccgcaagtgttgtaagtttactcacgatgccagccactgctgctctgtgggtttgggaggctgatcgcgactacgaacgctgggaagggtcgcgggtgttacgtgagcgccgagttccaaaatttgtgctcccgcgaacgattttcgattggtctgactttgattatgctcaacagatgagaaaggctcctaccggttaaggaaaaagactatttaccta

SEQ ID NO: 96944 - DNA, 450 bp, Heterodera glycines
tttttaagatgacacttaatccgcctcatttaactttgcgaggttatgagggtcacgattacatgggagacactttcaagaaaacgaatgattacgcccaaacttggttcgttccgttgatgaggggacaatctatagacatcagacaaattcctggcgatgattgtggattcttcgaagatcaatcggaatgtgtttcgcgcacaaaaaagaataaacggttctggaagatcagagatgttcgcttcaaaaaatggctcagaggtgaaacgccacacattttccgaaccattggctgactatttgaaatcggttcatggtgctccgacttcctatccgactggtcatcgtgtgaagaaatgattagattagatatatcgtgagattctggtttttaataggagtcacatatgcatatgtatatttctgcgcgataaaatgcttttgttc

SEQ ID NO: 96945 - DNA, 517 bp, Heterodera glycines
cttcaaaacagctcctctcatcgctgttgctcttctgatccattttggatgcttaatgtttttgatggaagtgaacggtgaagtccatgttcaaagctctctggcaccaagtcatcaagtggtaaagcgtcattgctcttgtggtggcagttggggcggttggggtggcggcggtggagcatgctgttcctgtggccaatgcggcaacatgggcggttacagcagtggcggatgttacggttgcatgtccggcatgggaggctgttactgtggaaagaaaaaatgaaaaatattttttttcattaaattagaagaaaaaaatcggaaaatatttttaccagaacgattaataatttgttataatgcatttcaatgtacttataatattctttctatggatacaaataaagaggtgtaattttaaaaaaaaaaaaaaaaaaaaactcgagactagttctctctcaagggcgaattccagcacactggcggccgttactagtggatccgagctcggtac

SEQ ID NO: 96946 - DNA, 384 bp, Heterodera glycines
ctttttgcactcgaagtgcacccatcggctggcgatttgattttctttttccgtgagaaaaacggcgatcggaaaacgaacgccgacaaaaatgaaaatacgcaggaacgcgatgcgatctgtgaggtgtcgagcaattccttcgcggatgcatttcacgtcggaataattgtggagcggcgaacgcaaaatcagtgggcggaggaggacaaaacggagagaattgtgcacgcggcacgggacgaggcaagcagagaagcagaaaattaagctgaagacgcaaaaacacaccaaaacaacgaaaacacaaattaaccatttaaaatgaattccaaatttttgagtgtttattttaattttcaggctaaaacattattctagcac

SEQ ID NO: 96947 - DNA, 494 bp, Heterodera glycines
taattgctgacaacgcaaattgttagaacaaatctctctcttcgactgccgtctcgtcaaaagaattttgggcccaattattacacagaaaaacaatggtggatcacgagaaaaataaagaagttattcatgcgatttcctatcttggaaaggacccttattttgggtattctgttcagcactttggccattccttttattactcagaggaaaaaactcctcaatatgcgcaacaatctttcggacgacgagtgggccgactttacgcaaaagcacaaagccacgatccttgcaagactcaaattcggccaaaatttgcacctcccattttacaacaaagacaaagcgttggaacaggacgagcaaacgcagaagacattcatggacagctgaacagaacggacgaaaattggcggaatgaaatttaaaagtcaaagcaatttttgttttattattttgtgttataattttggcccttttgagtaaaatgagat

SEQ ID NO: 96948 - DNA, 473 bp, Heterodera glycines
ccattctttcttccgatggatccctccactgctgctcttccccctatgcgtttttcttcgacctctctcgtccccgacccctccgtccaatttttgctcgatttggaaaccaatgcgcgttccattgcctgtggcattgacatggcattgcgcgacttgcggggctctctccgtggaatgagtgatttgacttgtgagtctgcaaatgtttttggctctgtggtcaattcgacttgcgattcggtcgacgcgtccattcgatcgatgtatacgatgttagcgaagactgaggagcttgacgagtctttgcggagcattgagaagctgctgcagcagatcaaagacaccaaaagacttctggacaaattcgaagagcacattgtcgtaggaaatcagtgatcagaaatgatttggcattttgttttgaatttttatccatttttatcgaacaaatcaataaatggatgaaaggg

SEQ ID NO: 96949 - DNA, 563 bp, Heterodera glycines
  unsure (1)..(563): unsure at all n locations
gctacggccagcagcagggccaagcctaccatccccggggggccaacccataccaactacagccgggttggaatgtgccgccaccgccccaaggacaacagccgtataatgcgcaacatttcgccacaatcaccaaaagggacctgaccagtatgcttggcattgtgttcatcgccacaatgtgtttggcattgttcggcttggttgtgatcattgtcggaatgttcaccaatgtgcgcattcttttcgttgtttacgccgcgattggggcatttctgttcatgatttggttggccattgacattcagatggttatgggcggtcgtacctacgaaatttccccggaagagcacattttcgcgtcgattactttgtttcttgacatcattcagattttctggtttcttcttgcaatttttggagatcgcagaaactgaccttggcatcgcgacatttgcaacacataaacaaatatntgttgatgcttttcagttntacattcttatccgatatttacgcaatttaattgtgatctgaaaatattaatcacttgagaaatatat

SEQ ID NO: 96950 - DNA, 521 bp, Heterodera glycines
acaatggcgaagagccgggcttataaaagcgcttttgtgcggagaggaattgacgtggactatccccgacgaacgtgagcgcgagctcatggcttggcacgaggttggacacggagcattcgccgctaaagacaaagacgcgattccacttcgctacttgtccattttgccgatgtacgattccatcggacagacgtattgtatgcccaagtcagatgcacaaacaatgtcagtggcgcaagtgcgggcggaaatcagcggatttttggccggaacgatagctgaaagaatgagttatgggagtaataaagttacgacctcatgttcttcggacttgaaaagcgcctatcaggccgaacagcaggcccagcaaaaccaggacgaccaaaatcatggcggccaggaggccacggacgaagaatattgccgttaacagtaaaggaatggaaaaaaccaaccgaatgatcatcatacatttttatttattcgatctcaaaaaggataaaaattacatgtataaa

SEQ ID NO: 96951 - DNA, 234 bp, Heterodera glycines
tgcgccgttctgtgctttttgcttctcatcgaagtcgcctttgtgccaattgtgaacagtgcgccacttgagcgggaaaagcaaatgctgcggcagccgacgcaggcggagccgacgcggccaatttaaaaacaaagggccgaaaatgaaaggatgccaaagaaagacagaaaacggagagaattttaaatgaaatttatgaaaggacagataaaattttaaaggtgcaaaaaa

SEQ ID NO: 96952 - DNA, 175 bp, Heterodera glycines
ggtagcgagggcaaaattttgactggagaaacaaaggaattcggatgaaatgaattatttgcggcaagtgggtgagattttgagtcgcggaacggtgcgcactgacagaaccggcacaggaacaatttccatttttggcatgcaaacgcgctatagcctccggggaagtcaatcg

SEQ ID NO: 96953 - DNA, 205 bp, Heterodera glycines
ccgtgatttttctcacgatgaccacattaacaacgctattgggaccaatggcgacagtaaagacgcatccaaaagaaaggacatctgccgtgattttctgaataatatttgcagcaggggggggggcaaagggatcattcgggaagccactcaattttttgtatgtttaatcaatcacctgcataaattcaattttttgaaaaaa

SEQ ID NO: 96954 - DNA, 174 bp, Heterodera glycines
gatttgatgggccattcggaccgcgtgctgtgcgttgattggacagtgccgagccgtatttgcagcggttcggtggactcgacggtgaaagtgttctcacatgggaccgaagaaaatatctaattgtttatcgtgatatcatttgttgttttattatagttaaaatttctgtac

SEQ ID NO: 96955 - DNA, 382 bp, Heterodera glycines
catttattaaacaaaaagaaataaaaaatactcaaataaaattgatgacatttttgcggggaattaattaatttattgcatttttaatttgtataccaaaatctgtagtaatttttgcgtccctttcattcagttggagaaggacctgtccaggaggtacaacgggcgcgaggtgtacatcatgggcgagatcaacgccgtgctgtacgggagctgaacgcactcgggcggcacgcgcgcctttcgcttctgtgccgtccgtcgttttgtgtagcgcgtgttttgtgttctgctcatttcccactctttcacaatatgtgtttttgttgcattttatcattgattggcggagggtcataacgaaaaaaatgtgatgcgattt

SEQ ID NO: 96956 - DNA, 175 bp, Heterodera glycines
tttaatcgagagtcattgccccgttaatcatttgtaacggtacccactcgggcaaataaccttctcggctacaggtgtctaaattcaaatgaagccaaaagatttttcaatatttcacagcctttacaattaattttatgctcgttgattttgaaaaagatgaaaaaagactgac

SEQ ID NO: 96957 - DNA, 146 bp, Heterodera glycines
tctttttgtgtcgtacttttccgtctttgagttttggtgcgcagttcaacaaaaatctgttcgccgcttcacaaaaaaatgctgctctaacgaaacatttgcacgtctctcctttccgttacgccgattcttcggacgatggcaaa

SEQ ID NO: 96958 - DNA, 177 bp, Heterodera glycines
ggttgaaacacttctcgggaaaatgtcggacaaagacgcctttcatttgcgcaaggagatgaatgatgttttgacgaaatacgaggccagaccacaaatgagagggattattggggaaaaacccaactcgtactgccccaacaaaagtcgattgaacgcataaactgtatttgagcc

SEQ ID NO: 96959 - DNA, 153 bp, Heterodera glycines
cctgacgacaacactcggaatggtccacttttgaggtggcgcagtcgaacgctttgctcagctgagcagacggacaatgggagccgagcaaagcgattagcagctgaaataacaaattatttttaaaaataaaaatgccattgctttttaaaa

SEQ ID NO: 96960 - DNA, 220 bp, Heterodera glycines
aatttgcattcgagcagcccatttccagctttcattggttcgttcgtttccgtgactatgttaaggtgactgggagcgacagtggcgaaatcgctttgtgggacattagaagtggcaaaaacgagttgaattcatgaagatgcgtttagtgatgacgaagatcggtgacaattcgcaaatctgtttttttcttttttatacactaaactttcattaaaaa

SEQ ID NO: 96961 - DNA, 150 bp, Heterodera glycines
ggaaagccggcacattgttatccctcagaaggcatttctctcaaaaccatccattacgatatttgctgcgactaattctcttattcgataaattctctaaaccattcgtagtttttccctggtttcttaatgatgaactttgttttccaa

SEQ ID NO: 96962 - DNA, 187 bp, Heterodera glycines
gccatttggagaccattgacgcgttggatatttacccgaccggtgccacggaggagcaaaagtgccggtgccgtgagaagcgcaaatgcatggtggacactgtgcaaacgctgctcaacgaaaatgacaaatacacattccgactagaccaataccgcaaatcgttgttgtacaaataaattattat

SEQ ID NO: 96963 - DNA, 184 bp, Heterodera glycines
gaatttgtcacctgaagttttgtgcttggggcgggggcggcgttcgctgtgttcgttctttggacatcgaagttcgttcgaggagcaactaattaaactacaaagtcaaattgtgctgattatgaccatttttgtctcgcatataaatgacgaaattagaatgctattaaagcggtcccttttt

SEQ ID NO: 96964 - DNA, 221 bp, Heterodera glycines
agtaaaaaaacacaggaaagtccattgcaaaggcgttggaggaaaagtagctggaaaaatgtgctcaacactttgatcacgcccgaccacacaaagaaggcctacgttcgcttagccgcagattatgatgctttggacgtggccaacaaaattgacattatctaaacacattctttttttattccgcgctttgttgattttcgggaataaattgttgtttg

SEQ ID NO: 96965 - DNA, 188 bp, Heterodera glycines
ttatttcttggttatgtcggtccatagtgaattggctcggtccaaaattttgacctgctcgaacaatacttctttttgtccacacttcgctgtctctgaaaattccttgcgattcgttcggaccaatggacggccaatggcccttttcattggtcgcaaaattggggtgactaaataaaaagaaattg

SEQ ID NO: 96966 - DNA, 156 bp, Heterodera glycines
gagttatttcttctaagccattgtcggacgacaccgacagaagtgccgaagggagcagtaactctcaattggtgcagacatatgccaatgaaaacagcgaaggcggagctgacagtaagaaaaaaaaaaaaaaaaaactcgagactagttctctct

SEQ ID NO: 96967 - DNA, 214 bp, Heterodera glycines
aacattctcaaacaaaatgactgagtttctatacattcgcatgaaagccaacgactgtccgttggtcgctcttatccgattcggcggtgggttttttatttgctgaaggagtgccggcgtggtcaaaattaaaaaatgacattctgtaacatgtggttggtatatactgtcggactcaactgtcactgtatgatggccaagcacgtagccaaaa

SEQ ID NO: 96968 - DNA, 276 bp, Heterodera glycines
  unsure (1)..(276): unsure at all n locations
tcccccccccccccccccggggtgtgtgggaggtagacgacctcagaaancntcaaaaatttaaaacttgatgctttattcaaagttttggctccaccagacgaagaattcgaagaatggctcagagatcttaagcttctacacaccactcgtttttgtgactgtggcaacgaaatgcgctacaaatggattaaggaggaccggatattttttataatttgtggacccaaatcgcggaattgtacccaataagcacataaagctcgtttatttgaa

SEQ ID NO: 96969 - DNA, 192 bp, Heterodera glycines
gacgaattcatcttttgatcaaatgatcggccataaaagtgaacgaattgacggacaaagcaaagcgaatgtgtgagaaaggcgagacgaactcggaaattagctgaaattgccggattgagaacggaagaaagcatcggaattgatacaaatttctccataattttttgactcaaaattcgaaataaatgc

SEQ ID NO: 96970 - DNA, 289 bp, Heterodera glycines
aaggtggttctgatggtggtggtgcattgagtcaacaaagcacgtccacggcgcccaacagaagcagtgaggaggaaagcgacggtcgtgttgatgcatcatcatcggaggaaagcgacggtcgtgttggtgtatgatcatcggaggagcacaaataacttagttttccactctcatttggcgcctttgtttcactaattgaaattgttttatgcgcgggtgcttttcttttctcaaaaacctcattcatttcatgctttttcgatgaataaaccgagttagcacaaaa

SEQ ID NO: 96971 - DNA, 124 bp, Heterodera glycines
tattattgtatttgcttagtgcgtaaagtgtagatataataaatttgaactgctaaaaaaaaaaaaaaaaaaaaaaaaaaaaaaaaaaaaaaaaaaaaaaaaacctcgaaactagttctctctc

SEQ ID NO: 96972 - DNA, 178 bp, Heterodera glycines
atgtgcccaactttttctccacgttgcataacgccatgcgtctttccgcactgctcaacgttcatccgtcgctttgccagtgaaaggacgagaatgggatgagtcagacccatccgactttaattgattctcaatttgacttaaatgatctgtttatcttttactgttttgttgtttt

SEQ ID NO: 96973 - DNA, 192 bp, Heterodera glycines
gaaaaggaacgtgatattttggtttcactcgcatcgaaacacagaacagttccgtatgacgttttgatgaatgctctcaaaattgcaaatgaaagggaatttgaagacttcatcattgaatcgatttatcaggatatcattcaggtaaatgatgggtttgagataatgatggagaatctgggctccaaccac

SEQ ID NO: 96974 - DNA, 520 bp, Heterodera glycines
tcgggcacaaacgctacactggtgaagtgatgaacggaatgggcatggaccggcacctgttgggcatccgtttgttggctgccgaacatggcgtgccgttgcctgaactgctcggctccgacatttaccaacgattgctgcacttccgtctgagcacctctcaactgcccacgtcccatgttttgcccatgggttttggcccgtccgcgcccgactgttacggagtgtgctacaacccgcaggagaaccacatcttcttcatcatcacggcgttcaacgactgcgcagaaacgagcgccgaacgatttgccaatgcgttggaacgtgccctgctggacatgcgcgacttggtcgactgggccgggcgattgaagggacgggcaaagctttgatcggcaaagtctctccaccacgtcatctaactaaatctaaagccatttatttttgccttaatttctaccctcaaattgcccaattgctatataattataaaatgtaattttaaattatgtataaattt

SEQ ID NO: 96975 - DNA, 588 bp, Heterodera glycines
tggcatttagaaaccagtaaacaaaatgcgaacccaaagcattttctcaattttcttccttctgcttatatttgaagtgatcaactcattcccatcaaagtcgagtgaaagcggcgaaccgcctgcaaatggagcagaagtggcgcaaagtcgcaagaaacgtcaggccgaagaagtgaccactgaagagccaccatcagaaacaaacgatgccgaaggtgccgaggatcaccaatctgcggcagcgggaaatggaaaagcaccaaaaaataagggcaaaaagaacaagagcgacagcagcgactcgtcaagttcgtcgagttcgtcgagcgaaagtgacgagaagaagaagctgaagaagaagaacaagcactgagcatcggtcgactcactaatgaggccgcttaattggattggggtcattagcgaagagtggactgtcacaattaatgttgtcaaaattgtaaagcttttattctttgatgggaataaattttattagtggaaaaaaaaaaaaaaaaaaaaaaaaaaaaaaaaaaaaaaaaaaaaaaaaaaaaaaaaaaaaaaaaaaaaaaaaaaaaaaaaaaa

SEQ ID NO: 96976 - DNA, 535 bp, Heterodera glycines
ggtggaatatgccatgttggagaacgaaataggtgtcaaaatggacgaactgcagggactgataatggcactttcgtattcccatcagattgtcaacatggcggtctcaatgcccgagcccgtgtaccaagcggacgaattggccaagcgagggaaaaataattttgccgcattaaaacggttcaaaccgaaccaagtgccgaaaaaggagcaccgacttttggcgaaaaaaggcgcaaagcgacagaccatttcgctggttgaccaccacgaattgaacagaattctttcatattggggcgacggaactttcgtattgtctaatcgtttcacggcttaaattctaacgacgagtaattaaaggaataattttaatatttctgtatttgttcattcattcataatttttgacagatcattttgttgtttttaattctcactaaaagagcgtatcataatgttctattattcattctcacattgctttaatccattgttttgcattttgacatccgaaataaaaattgtccaagaa

SEQ ID NO: 96977 - DNA, 400 bp, Heterodera glycines
aaagaaaaatcctattgtgaattggcatttctctgtttaaaatgcgcttcgttctgtccctcgcccttttggcacttttcgtcgtccaatgctccgccgacgactcatcgccgtcctcagaggcagctgatgagaatccctctgctgcccttgccgctgctgaaccatcagcggcaggcgacggagtgccgccgccaccgccgtcggccgaaggggcggcagccgaacgaaagaagcgcagcggagggaaagtcgcaccggcactaatcctttgaagaagccgaagaagaagagaagaagaagcggaagaacggaaggaagaagaaactttgaaaatttggtagtgatttatgacattatgtgaaaaatcattttgcaataaactgtgaaaagaaagaat

SEQ ID NO: 96978 - DNA, 273 bp, Heterodera glycines
  unsure (1)..(273): unsure at all n locations
aatcatagcgagttgcgactacgatgaggcagatagcgaatggagcgatcggagaagggtagcagccagcgagtggctagggccagcgattggtgactacaaggaagaggacatggcgatcgaagaaccaacagnagtgggcgatcactacgagtgctgggcggggcgaccagcgattaatttctctctctcacctcacatgcattttttgctttgatcagtcaatcaaccaatcccaatcaaaagtgcattttcgataaaaatttttccatt

SEQ ID NO: 96979 - DNA, 571 bp, Heterodera glycines
  unsure (1)..(571): unsure at all n locations
ttaaagcccttttttaaatcggaaatgaatcccaacggttttttctttgttttagcggtgctctttcttgtcaaagtcgactttttacagtgcaaatacaatgaaccaatggcacggcaggtgctgcaaaagcatgcatcacaatttcagcagcattgtaaaaatgcccgcagaggaagtgccgtggccaaatgttgcagtgccatcagaagcataatgggccgattcacaagccaaaaaaaggcaatgaaccaaatgctggccaagtgtaaagcgggcacaacgccaagcgaagcacagcaaatgcgaagaaaattggaaggatcgaataaactgaaggattgtggccagtttaaaagccaaattcagcacaagttcagcgagttgaagcagtactgcaacaatggggcagaaaatgaggaggaaaacgacgaatgatcagagagggagagagaagaggagagagtagaaagagagaggaacagcaaaattctaatcactagtgatcactgataattgccgattgattgaccggtacgactcatttggctgattgaagttnttttatggc

SEQ ID NO: 96980 - DNA, 551 bp, Heterodera glycines
agcccttttacaaatcggaaatgaatcccaacggttttttctttgttttagcggtactttttcttgtgaaagtcgactttttacatggcgtttacaatgaaccaatggcacgacaggtgctgcaaaagcatgcatcacaatttcagcagcattgtaaaaatgcccgcagaggaagtgccgtggccaaatgttgcagtgccatcagaagcataatgggccgattcacaagccaaaaaaaggcaatgaaccaaatgctggccaagtgtaaagcgggcacaacgccaagcgaagcacagcaaatgcgaagaaaattggaaggatcgaataaactgaaggattgtggccagtttaaaagccaaattcagcacaagttcagcgagttgaagcagtactgcaacaatggggcagaaaatgaggaggaaaacgacgaatgatcagagagggagagagaagaggagagagtagagagagagaggaacagcaaaattctaatcactagtgatcactgataattgccgattgattgaccggtacgactcatttggctgatt

SEQ ID NO: 96981 - DNA, 283 bp, Heterodera glycines
ttttaccctaaaaaaaataaaaaaacaaatttctaaagacttctcttggtattataaaaaaaaataatttttaattttttaataaattattaaaaaaaataaaaaaaaaaaataaaaaaaaacattcatcctcgaatccattaaaaaaactaattaatttgctaccttagaccaatcacgctaaaggtgcctttaaaattaataatcaagaggcagtttaaaaaaattaaaaaaaaaattaccaattattctaaaaaaaaactttaagaaaaaaaaaattaat

SEQ ID NO: 96982 - DNA, 368 bp, Heterodera glycines
gagagaattgggaaggcgttggacgagctatgccaagaaacggacaaaacgaatcttttgggggcgacagaataacgcaaacggaatgccataacaaagtgatgcacactttcaacaaaatttgttttaatttctcaaagagtccgtacgttatgaaatatgcaaaaacattggccaatttgtgcgagcgaagggcggacacggcacaaatcgtggccattttgaatgaacaatgtgctcaaatggaaaagatggaagttcattactcaaattaattaccaattgaagagataattggttcattgaaacggacgatgcgatgacgtcatccattcatttatcatttggataatttgttaaataaaata

SEQ ID NO: 96983 - DNA, 291 bp, Heterodera glycines
cgtttccctaaaccatgatgccctcgtcgccatcctccgcccccctcggagcaaatgttttggtgaccggcgccaaccgcggcattggccttggcattgtcaaggaaattttaaaaactgacggcatcgtccatttgttagccggatgccgaaacccaagccaagcggaggtcttatgggaatttgtggattctttctgtttcgtagagctaaaatttaaaagattttatttcaattaattttctgtttaaaaatttatttttgcaattttttataaaaattagtaaattt

SEQ ID NO: 96984 - DNA, 513 bp, Heterodera glycines
ccactgaaattcgaatcccttccaccgcaatgagttcattttcatttccgtgggcgacttttctgtttttctccctaatttcttgcctaatttcgctgacagaggccaacccgaagtttctcttgtcctgcaaagtaatcgacggcatttgccaaaatgacgaactttgcctggaagaaatgggcattcgtttccccgactgttatttggagcgcaaaattgattttctccaaccccaaaaaagcgcactaaatccacgccattcactgaaggggcaaatggaccacaacgatttctgaaaaggactccagcgatgaaactgatgaaggtgctaatgatgaaagatcggattccggtgggtcggagatgagcggagaatgccaaacgaataaaagtgaggatgagacgagcaaagacaaacaaataataatcagaaattgccacctcaaacagtccattcattctgtgcaaaaagacatttagaggcgaatgtttaataaatggaagaatcaa

SEQ ID NO: 96985 - DNA, 509 bp, Heterodera glycines
gacgagtgctgcgagcagtgtgttcaacgacgcgtcctccgtcagcagcggagggattgtcgagcgtttgtggggcgacacggagactcccgaagagggggccgggacttcgtcgccagagactttggcgacgatggcgatggaattccgcagagacattgtcatgggtgccattgttcgtctgatacttcgcgctttttgcgattttgtgcgtgtgcagaaattttcacgacacggttttgagcagctccaagttgactttgcttatgtccgtcaaaagctttggtatttcgtggccgatgagcacatgttgaacacgtgcattgaggacattgtcacggctgcggtgaaccaatgtgcccagcccaaattgttggatccatcggtagttaggagaatttgtgaagaaatgcagtgatctatttgtatgtacaattaaaattaaattaattaattgttcactttgttttttattttgcttacattaaagttgacaaggattaaaaaaa

SEQ ID NO: 96986 - DNA, 829 bp, Heterodera glycines
  unsure (1)..(829): unsure at all n locations
gcaaactatctgaaaaacccttacaaactctgcggagattattacttccagccttgcacgtttgttttccgttgtgatatttgttgggcaattgtgactaatttaggcaggacgttttggagccaactatgctgtcatacaaaatgagctggattttggacaaagttaagaagaaccgttcaaaaccaccgtctacgattttcatcattcgcgatggtgttagtgagggaatggttccgaacgttagttgggctggaagaatcacgacggattgtaaaagtgtgctttagaacattcacgacgaatttccttcctatgtgaaggcgtgtaagaaatatgacccgacttgggagcccaaattcgtctattgcatcgtcgacaagaatcacaacaaacgtttcttcgttaaggggcagcaacaagtcgagaatactgctccaggggcggttattgattcgaaagtggtacgcgtcgacatccacgagttttggatgcagtcacatgttccgctcaaggggacatcaaaaatgccacaatacatttttcccgtcaatgatcccaaggccaacaacaacgaattgcagggtttcttgcttgctctctgctgcagctggcaaattgttacgctggctccggctttgccaactcctgttcgtcaggctaaagaattggctaagcgtggtcgtgccaattttggggaattgaagcgcactccacaatatatcccgcgcgccgagaaccagcaaatcgactaccagcagttgaacagacgcctctgctacaatggacatattttcgcggacactcgctntaatgcatgaaggatggg

SEQ ID NO: 96987 - DNA, 290 bp, Heterodera glycines
gctccattttttcctaactgaaaaaaaactaggtaaataattaaaattatgcttatatgaaaaacagaggaaaaagcaaccaaagattttaaatctctttgtattaaacaaattaaagaacaaaaaaaaagtccaataatagcaataaacaaaaaaaaaaagaattactaaataaaaaactaattaaaaatcgactaaaaccatgaaccccaaattttaataaaatcccagctaataatatactagcaacagtagaagcttcaacatgtattttaggtaatcaaaaatgt

SEQ ID NO: 96988 - DNA, 161 bp, Heterodera glycines
cggcgaaaattgtgacgacgaagaaatgttagggaaaagacaaagcgcaaaatgggaggaaaagcatgagaaaatgaaagagtggagaaaaagaacaaagggaaggaaagacaaagaattaatgattatgataagagacaatgactgataaagtttagcat

SEQ ID NO: 96989 - DNA, 480 bp, Heterodera glycines
ggaccaaacagaacgaacgaaccgaacactctcaaccccaccgcttctcttggcccatcctcacaaaatgtcttctcttcagcctctctttttcgccgctctctttttggcagtcttttgtctctgcgccattgcaatgccggcacagcccgaagggccaatgttcgaaggcgggcaacatcaagccgaggcggggcgtgccaaacgttggagtccgtattactacggcgcatacggcggatggggcggcgcttacccttacgcctcgtcgtactacggccacgcttacccgtactattcgggatattggtggtgaaagacggacggacggacgaacaaatcggaaggacgaaaagaaaggaatgaacgaaggacggatgaatgacgagaaaagcacaatttaatcttacaacgcaaagaaatgccaacgaacgttcgcgcgaaataaattcttttgcattaaaagaaaaagaagaacca

SEQ ID NO: 96990 - DNA, 362 bp, Heterodera glycines
ttcgttcattccttccattttcctgtgttctaaaccttcatcaattaaaaacaatgcctttcctccgctcgcttcttcttccttccgttttgcttcttcttcttcttctgcttctgtccgtgtctctttgctccgcgggggtcttcgctccgctgcgtatgaagcgccaattcgattggtttggcaattcgatgggtgccgcgtggcgccggcttcggaggcggatgggtgttcggcagaagatgaaccgttaaaggcgccaaccaattaataaaataataatgcacaataataataatatttatttcatttgcccccgattccccattttcaaatgaataaattatatattcaaaagaaaa

SEQ ID NO: 96991 - DNA, 177 bp, Heterodera glycines
caacagaagaagaaaattgtcatcgatgaggacgacgaatgacaatggcacagaacagcgaagggagtgacaatcggcgatttccccaaatgggggagggttttttggcagaagtcgaaaaaatgtcaaaatatggttttttgtgctcaaaactttatgattaaaaaacgcggccag

SEQ ID NO: 96992 - DNA, 465 bp, Heterodera glycines
ttcggcactggatggcgcaagaatcgcgacgaggccaacaaaccgatcttttgggatgggaagaatgagggcgggaaagtgatgatgcacattcgccatgagctgaaggccaaacactcatggactggtccacaggaggaagaggagtccaatacgaaagttgcgcgagatgatgcggaacgtgtggcgccgcattgacccttcgaaacgtgccatgttcggcggtggccgctcggccggggtgctttcgcacgacggaggggcgcgtggcgggcgcggcggtggaaactttcattatcgcaaccattagacgaaacatttggcattccaaagaagagctttttattattggacattttcacattattcaacgaaaggatgagccaagttgtcaccacattatgttattttctggtcaaagactgactgttcaaaacgaaaactgctgaataaactgtgccaggg

SEQ ID NO: 96993 - DNA, 528 bp, Heterodera glycines
ctctctcactaattgttgcacattccccaattttatttcttccttagtaagtagtattggtgcacaatgcgcacttttctgttcatagccgtagtcgggttgatgttggccgtcatcttggagaatgtaaatgcgactgggaaaaattcgccgtcaaagggaaaaccgtcgccagacagtacaaaccataaaaaagaccataaaaatgagcatccaaagtatgaagcagaacttatatatgagcaaggaaaaccgtcgccagacagtccaaagtatgattccccaattttagccggttcatctggcagtccgaaaaaaggaaaatcgccgaatgccgatccgaaaaaagctgcttcacaccttgtgccagtaacaccagggaaagtatgatgagcaaaggtaaccaacagaaccatgctaccggttgccaaattttgtaatcattagtcttaaaatggtgaagaaactgtgtggaacgatgatgccaaccatgaacaaacccaaagctgttgtagtagatgtagaaaa

SEQ ID NO: 96994 - DNA, 551 bp, Heterodera glycines
ggagaggtccatgaaggcgttgattggcaccgtcgacgaactgaacaaagcggtgaatgcctacggcaaatacacggtggaaaagcaaaagtacgacacaatgtacaacaatctgatgcagaagagacaaacggagaacgaagcgcggcaatcgcgccggagaaccgccgctgacaatggaggacataaagcggcagctgaagcagccgcaaatgcagacaaagtacggaatgttggacttgctgctgaacgcgctggacaccgacgcattcacgacgtaccaaattcagacgaccaacgaaaacgtggccaaattgcacctttcccaagcggtctctgctcagcccgtcgtcgccgcctcttccgctgccattggcacttccgccgcaaatgcgcccaatttggaaaggaaataaaaacatggaaattggggcggagagagaagggaaatgcgaacggagcaacaaaaagattggattattattttgttttccctgttgctcttaattgtatggacacacacaaattgttgctgtttttattttgtttcg

SEQ ID NO: 96995 - DNA, 155 bp, Heterodera glycines
aggaccaatggaaccaattggaactgatcggaaggaaatgccaacatcgggcagagatcaattgcattttaacactttgataattcttctgattactttatgattttattttcctttaatttgataggtttaccaaatagaaaagcattgctaaa

SEQ ID NO: 96996 - DNA, 197 bp, Heterodera glycines
aaatccccgtgaccgaccaaaacatccttttccccttccactgctctagtctgaacacttccgcacattccgaagttctgtccgattaaacattcctatttgagctattggatttgaatgtctacgctttggggggcttttcgataaacttgggcgcagtgttgtacagaaattgacgataaaatgttaattcattt

SEQ ID NO: 96997 - DNA, 502 bp, Heterodera glycines
aattaattggaaatccaattcaatttttgagtataaaatgaactgctccttcttcctctgtctcttcactgttcagctgattctgctcaatttcgcagtcgaaggaagagaagatgatgaactgaagagaaagaaacgcaacacggacgtggacgtgctcggcctggtaaatattcacgcgccgtcgcgaaagaatgtgaacgtcgacgttggcggagaagaaagagaccgaaatgacaaattggtcaatgtgaatgtgcagggacacaggaaaaatgtgaacgtcgacgtgggaggagggcattataatgagggaaaagtcgtaaaatacgaaagggacggagagaggggaagggaagtgaacgtggacgtacgagtgccgaaagtgaaggtggatgtggaccgagaagacggatatccgaagaagaagcgagtccatctgaaggtgctggataaactgaggaagtacgacagcgaagaaagcggcgaacggaaacggcac

SEQ ID NO: 96998 - DNA, 631 bp, Heterodera glycines
gactctttataccgcggaatccaataaaatttctcttaataaaaaaatactattcaaataaataatcattcctagctgcttttggtttgatcacaaatgttcgtccaactcgtcctccttgccatcgttggcattacttttgtcgatgctgccgcaccgccgttcggccaattgtccgtcaaaggcaccaatttggtcggctcaaacggcaaaccggtgcagctgatcggcaattcgttgttctggcaccagtggtacccacaattttggaatgcccaaacagtgaaggcactcaaatgcaattggaattccaatgtcgtgcgcaccgcaatgggcgtggaacagggcggctatctgagtgacgcgaacaccgcctaccgactgacggcagctgtgattgaggcggccattgcacagggcatttacgtgatcgtcgattggcacgcgcatgagccgaacgcggacaaggcgattgaattcttcaccaaaattgcgaaagcgtacggctccaaccctcacttgctttacgaaacgtttaacgagccattggatgtgtcttggaacgatgtgcttgtcccttaccataaaaaaattatttctacaattcataccatccacaaaaacaattgat

SEQ ID NO: 96999 - DNA, 489 bp, Heterodera glycines
ggacttcattttcaaactactctctctcactaattgttgcacattccccaattttatttcttccttagtaagtagtattggtgcacaatgcgcacttttctgttcatagccgtagtcgggttgatgttggccgtcatcttggagaatgtaaatgcgactgggaaaaattcgccgacaaagggaaaacagtcgctagacagtccaaaccatgaaaaagaccataaaaatgagcatgaaaagtatgaagcagcttactttcaaaaaaaccgtcgccagacagtccaaagtatgattccccaattttagccggttcatctggcagtccgaaaaaaggaaaatcgccacatgccgatccgaaaaaagctgcttcacaccttgtgccagtaacaccagggaaagtatgatgagcaagccttaaaatggtgaagaaactgtgtggaacgatgatgccaaccatgaacaaacccaaagctgttgtagtagatgtag

SEQ ID NO: 97000 - DNA, 501 bp, Heterodera glycines
ggacacttcattttcaaactactctctctcactaattgttgcacattccccaattttatttcttccttagtaagtagtattggtgcacaatgcgcacttttctgttcatagccgtagtcgggttgatgttggccgtcatcttggagaatgtaaatgcgactgggaaaaattcgccgtcaaagggaaaacccgtcgccagacagtacaaaccataaaaaagaccataaaaatgagcatccaaagtatgaagcagaacttatatatgagcaaggaaaaccgtcgccagacagtccaaagtatgattccccaattttagccggttcatctggcagtccgaaaaaaaggaaaatcgccgaatgccgatccgaaaaaagctgcttcacaccttgtgccagtaacaccagggaaagtatgatgagcaaagtcttaaaatggtgaagaaactgtgtggaacgatgatgccaaccatgaacaaacccaaagctgttgtagtagatgtag

SEQ ID NO: 97001 - DNA, 513 bp, Heterodera glycines
atttacgcattaccggaggacatcgttgaggtggattgatgatggatcacgggtttggttgttattttaaacgatggcccaggtcaaatccaaaatggtgatgacggtgttcgcgtgtatgatggcccttgactttatgccgaatatgaaggaagtgaccaacggaaattgactgactgtgaggcacaattacaataataaattaatttattttccctgttattctgttttattacgttgttcattcccggcttttgaatcgttgctcttttccggatctttctttccgaattttcaaagatatcctttcccctcgcgtattaaattattcgcttttaatttgctttatttgttttgctctttcgtacgttgtttctctgaagcgctcaaagcgtacaattttccctcatcgtcagctattacatatgtattacgaataccgatgaaaatattattgaaaattatatttatttaaataacagaaatataaaaggaaaatgttattaaaaaaaa

SEQ ID NO: 97002 - DNA, 743 bp, Heterodera glycines
attcccaggactgaattgttccgattggctcagcggtacattcttgccggacggaaagtcgcagtggttaaatatgcgctcgacacgcgttacgacgagtcgcacgcatgcacacacgacaaacgcaaaatggaggcgattagtgcgacgaaaatggaagacgcattcgaggaaatttggcatttccatttgtgttagttcaaagacatcgtcaaatacgcgcaagaattggcaaacactggcaaaacagtgatcattgctgcactgaatggcgattaccggcaggaggttcaccgaagacgcacttttgattttaccagcccttccaaaatgtggcgatgctcattcctttggctgagaaaattgagaaactaagcgcagtttgccgctgtggacagtccgcctcattcacatttcgaatgtcggaatgcacgagttagaaatgatcggaggtcaagaattgtacagagcgttgtgccgaacttgtgtcgttgagtataatcatgtgaagcaacaattgctgaatgggctgaagaagaacggcaacgtcagcctggccaagaagagaaaggcatccgatgcgaccgctcacccgaccctccgaattgacactgtttaacaaacattctttttgacctaacacggaatctgtcattgtgctgaatgttctgttaaaagccaaagagccacataagagtaaattaatgacttttattttcggattatgccaaacaaacgaatcc

SEQ ID NO: 97003 - DNA, 463 bp, Heterodera glycines
caaaatatgctcaaaaaggcaatcaaaagcggattgccggtgtttgtcactgagagcggcgccggctcaggcggaagcaatgcgcccgttaatttgccagtaatgaaccaatggtggtcccttttggagcagctcaaaatatcccaaatcatttgggcagtgcgcggagagggaaatttacaaaatccgctgaataaaaacacggcacccgcaaacattggacagaattgggcactaacggaatacggaaaagtggtgaagaatgtgttcacgaagaacgcaaagccgattgggtgttaaggggagagaatgaaaggaaaggaaacgaattacgaaaaagggacgaaaggaaaagccaaaggtacgatggaaattaacagaaatgagctaattacaataacaaatgtcacattaacgcatcaagaaataaaaatagccaattgaaaaaaaaaaaaaaaaaaaa

SEQ ID NO: 97004 - DNA, 352 bp, Heterodera glycines
ccaaattgcggagatcattgccaaaaagcccaaatattgtggtgaacgctttgccaaaatgcgggataaggtttgtcgctggcccggcgaacagcagccgtgtcttcaactgcaccacagcatcaaagagcgtgttcgtacgaagtgctgtgcggagggctgctccctggaggaaatgaaggaggaaatgtgctgcatgacggacgcatgcctacggaggtgctacccgggaaaaggctaccgactgggctccgtttactgaatttggcacaaagggccaacagataaaatgacaaagatgaaattcacggcactatccagaaatcatttcttaacaagaaaggctatatcc

SEQ ID NO: 97005 - DNA, 194 bp, Heterodera glycines
aggaaggcgaagggtgactgcaacacattttaaactatacatagttttattgttgttaattcataataagtttaagaaagatatgtataatctataaaagagcataaagcttatcaagttgacttgctaaacaattaaaacttataaaattgctttttatctaggcattatttgtattaaatctgattctgagg

SEQ ID NO: 97006 - DNA, 717 bp, Heterodera glycines
ccctaccgtcaattccctaccagccaattccctaccgccaattccctactaaggcatttgatttccataccaaaagtgttgaatattgataaacattgagattaaaacacacaagaaaatttattcactgccttttagacagctcgtcaagagctttcggatgataccaaatttatcaagattcgatcgttttaaaaaagttagaagtgtcaaatctctcaaaatacggatagaggaaataaagccggaatattttacagaaatgacttcgacttctgctgatatttcaagtgattttgatcagacgaatcaaaaacaaaaaccaacaaatccctcaaaaaacaaaaatgtctcctttccgcttcctgatgatgttgctggttgcgctggtcgctgccatggccatgggcagtggtgttgaggccgctgcgccagccaaaggaaaagcgccggcggcagcagcaaaagctgctccggccaagggagccaagaagccctaggcaggcaccagcagcaggtgtagcagaacaactgcggacatgtgtgaagaatgatttagaatagatgaatgttgatgaaaaattcggtgattgttttttagaaagaacaaaggcattggaaattttttgggttttgcggaagtaaagaattcattcaaaaaaaaaaaaaaaaaaaaaaaaaaaaaaaaaaaaaaaaaaaaaaaaaaaaaaaaaaaaa

SEQ ID NO: 97007 - DNA, 497 bp, Heterodera glycines
ttttaaattctgccgctgatcaccgccgaagacaaagaaagcaaaatgcgcttttcctttccgctgctggcaatttccttcctaatgcttctcctcgtggcaccaattcaaattcatggaatgtttggaagcaatgggagaggcagacaaatgagcgggggaaggggccaaatgggaagcaacggcatgggacccaggaatgggaggcggtggtggcagcattagaagaatgcaacaaggccaaggaatgggaggcaatggtggcggtggtggcggcatgttctgaccgcaattttgaaagacgacggaggacggcggagcgtagcagaagcaataattggtaaagactgactgatcagcaagcagatgaaccaaccaaaacggcacgacgattagtgaccgaccgtactgtgtagtcaatttacgctttaaaaaactcaaaaattgtctcatttctcaactcactcgtgctgataaagaaacattttgctaaaaaa

SEQ ID NO: 97008 - DNA, 449 bp, Heterodera glycines
tgtgaaataaaatatgcgtcaccaatttccaattatttttgccctttttctcattttaccaattttaattggaaaggtaatttcaaattaattttaaatgttgaaaaatgcaattttgaaaatgtttctgccgataattgcatttgcttcagacggagtgccaaagtgacttttgggcctctctttcccagcctttggtttccgtgggcagtgatgcgaaaatgccactgaaggacttcggcatggacttcagcagactgaacgattacagctcattgtttggacgaagaaagaaaagggcgcactgattgtaagactaaaaggaaaggacgaaggaagacgaaacaaaacaaaacgggcccaattattacactaattagacaattaattaattacacatgttgtacgtaaataaaattattattgtaataaatttcattttttcaaaa

SEQ ID NO: 97009 - DNA, 526 bp, Heterodera glycines
gcatctgatgacattttgttggatggaatgtctcacaaccaacgtggcaatgcgaatgctaacatgggacctcctcaaggggttggttctggctcttctgctgagaattccgactcatctgcggataatcaaccttcaaatgagcaatgggaagcagcattcaatagcatcggcgatttttcacattttgttcggcaagtttttcattcggtcgttcatgggatggctgtgaatgacagcagcatattcccgccgaattctgcacaggccagaaacggcttcaccgccaactcgcgagtcaccggttttaccccttcaattgttaatcctccgctgtcgcatgagtctgatgagttgttcatgaacatcggcgcagttcaaggcctaattgccatgccaattcctcccagggaaaatgcgccgcagaatcagcaccatccatagccacgaactgagccaatttcggacttgcccattgaattggtggccttaaactctcaaaatttgatttgtccttgtagcttat

SEQ ID NO: 97010 - DNA, 350 bp, Heterodera glycines
tgtacggcacaacgcaacggcggctgttcccacggatgtgttaacacggaaggctctttttactgcgcttgtcccccgggaatggtcgttgatccggcacatccgcgccaatgccttcccatcgacggcggactgaaaagggcggccgatcttttttcgtactgggcaaaaatgtcaaaaaaagccggaaaggaggcgatgatgaacgtgtgtagagcgatggataaacgattgctcagacgtgtattgatcaaaacgaaaaattgatcagagtgatcagtcggccccattttatgtatttgcaaatcattactttacaacatttacgcaaaaataaaatttacagctgt

SEQ ID NO: 97011 - DNA, 1180 bp, Heterodera glycines
  unsure (1)..(1180): unsure at all n locations
ttcggccgttttctgttggatgttattgggcgttgtgggttttcattggatttggacacttttgacgaggaaaacatttttgtgaagcaggcgcgaacaatttttgactttacgcggaagggacaaaaattgcgaatgattctcggggtgtttttcccatgcgtctcacttttatacgaaaatatcactggcaaatcattcgcttttgccatggatgaagagtttttcatggaaatgatgagcgacctttacgaaaagcgccgtgccgaccccgaggcaaaagaaaaatacgccgacattttccaacttttgatgaatgcggtggacgacgaggaatttacaatttcagcagacgacgccgaaataattcacagcgaattgagaagcaatgagcagcagcagaaacaacaggggaaagcatctgaccaggaaaccgaacttttcgcgcaaagtttcatcattttaattgccggtttcgaaaccactggcgccactctttcatttgccgcttatatgttggcgattgagtcagaaattcaagaaaaactcagagaggaagtgatcgacgtgctgggagagaatgaaatgatcacttacgagcatttgaaacgaatgaattacctccgcgcctttgtccaagaaacgctccgaatgtttccggtggcgcccaagatgaaccgcgtgtgcaactccgactgtgtcataaacggcgtgccattcgaaaggggcgatttgataactntgccaatttacgtcattcagcacgacgaaacctttttcccagaccccttcaaatttgaccccacgagattgttgccggagtgaaaagcggaaattgattcgttggcatttttaacttttgggcttggccctcgcaattgcattggcatgccgtgtgccgagttccaaatgcaagttgcgctggcactgattgttcgccgtcttcgcttctctcccggcccaaacacaccggactcagaaatatccgcccaaattgctctcttcggaaatgcttcgcaccgaacaaccacttgttgtgctagcagaaaaaatttgaatttgaaaaaacagtctccatcaacaattattttcttcaacatttaattcgcccattttctctgtttaaaagggattgatcagtttttttttgtccggcgattcaataaatttataaatttaa

SEQ ID NO: 97012 - DNA, 474 bp, Heterodera glycines
caaatcacgtgatggatgtctcggtcataaactattgccctaaaaatgcgacgactatcgtattagcacataatccaagtgccgccaggaaaatttttgagttttcgcaatcaaatgaccatcctgttgatttgattttgtcaggacacactcacaatgcccagtatttggttctgatgcctttcgcttacttcatcctcccttatctctatggcctctatgtgttgtcggatggcgcgactaaattatttgtttcggccggcactctcttccaaaatgcgccgatgaaaattccgtttatgtcggaaatttggtctattgaaattgaacccagaaaacaatgatagatctctattttgcgaaatttacttcaaattagtttattttacaattcggtaaaaatgtatcaaatttatatttatttttttatctcattatcgatgtaaagaaacatgcaaataaacatgaattata

SEQ ID NO: 97013 - DNA, 379 bp, Heterodera glycines
aactgtgaaataaaatatgcgtcaccaatttccaattatttttgccctttttctcattttaccaattttaattggaaagacggagtgccaaagtgacttttgggcctctctttcccagcctttggtttccgtgggcagtgatgcgaaaatgccactgaaggacttcggcatggacttcagcagactgaacgattacagctcattgtttggacgaagaaagaaaagggcgcactgattgtaagactaaaaggaaaggacgaaggaagacgaaacaaaacaaaacgggcccaattattacactaattagacaattaattaattacacatgttgtacgtaaataaaattattattgtaataaatttcattttttctgaaaaa

SEQ ID NO: 97014 - DNA, 352 bp, Heterodera glycines
acggcaacctaacttcctgtccgatgtggatcgaattgcaattcccacggccattacaaatattggacagggcactgatggaaagtgccagcgaaatcggcatggaagaagtgcacagcttttcctgaccaaatcaattcgtgatcagtggtgccttcggcataccgaattattaaaacaaagacattagccgtgttacaatccaaccgatcatttttcatttttattgaacaaaattcacttttgactttcgacccaacaaagtttaagtttggtaacacgggttgactaacacaagctttgattaatttatttgattcatataatcagctaaataaacttgaattattgc

SEQ ID NO: 97015 - DNA, 455 bp, Heterodera glycines
tgtccaaatgattcgcctgccctttctttcgttggcactcgccttttccgccgttctcctcgtcctctgcgacgatttgccatgtcccaccgatccgtcgtccgcgcctcttccgcccgggtgccctccgcccccggcggacggtaaaaaagcacccgccgacggaggaaaggatggcggaaacaaaggccgaaaaaaaacgagacaacattttacgtgccaaaagagaggacaaaagcaaggactctgaacaaaaagcggacgacgacgaagcggactgtgcgccacccaatggcacccctccgcccggcgcccctccgccgggaactcctccgccgggcacttcaccgccttgccgtcgtcagaggggtgggcccgccggaggaggagtaggagcagcgcagcacccgccgaacggtccgccgccgaccacgccgaagccatgagaaattggc

SEQ ID NO: 97016 - DNA, 449 bp, Heterodera glycines
gacgaagaccaacatccaaaaaatgcaacccgtgctgacaatgagagcgaattggaggagtgcgtgcaccagcccaatgggaacatcatttgagatggtcgttagtgaatagaataagacggacgttcttccatagatgccgatgattgtttgacatgagttacctttcggcaaatgtccgtacactttgaccgaaaattgtaaattcacgaaaccgttgaccccatttgcctattctgttcgttttttgatacatttgctcgttatttgctcgttagctatctatttattacattgcaatttgtctttttcattttcctccgttacttccttatcgatcttcatcgctacagatatgtcataaacgaattcatccatttatccataatatcagccttatatgtttttccaacatatttatctttgataacgagaaaacgtattgaatg

SEQ ID NO: 97017 - DNA, 534 bp, Heterodera glycines
ttcatgcctcgacgaagaccaacatccaaaaaatgcaacccgtgctgacaatgagagcgaattggaggagtgcgcgcaccagcccaatcggaacatcatttgagatggtcgttagggaatagaataagacggacgttcttgcatagatgccgatgattgtttgacatgagttacctttcggcaaatgtccgtacactttgaccgaaaattgtaaatttacgaaaccgttaaccccatttgcctattctgttcgttttttgatacatttgctcgttattttatcgttagctatctatttattacattgcaatttgtctttttcattttcctccgttacttccttatcgatcttcatcgctacagatatgtcataaacgaattcatccatttatccataatatcagccttctatgtttttccaacatatttatctttgacaacgaggaaacgtattgaatgtacaatcagagcaccccattactccaattagattaaacccagccattcgatcgcgggtcccctcaagttaaccaa

SEQ ID NO: 97018 - DNA, 171 bp, Heterodera glycines
atcatttgcagcgcacctcacgtcgcaaattggctgatgaaatcgcggctgtaataaaacgggacagatcacgctcagccagccgggcgtccctcgaacggatcagtcgggaagttcggcacaaatttgctcattacacgccacagaagaagaaacaacaactgccaagat

SEQ ID NO: 97019 - DNA, 150 bp, Heterodera glycines
gcgaagctgatcttctgtgtattcgtgatcgtatttatctgtatttgtatgtattgtcatgtattcatctcgctgttgtcatttcattcacttgtatatttcaaattaatataggtaaatattgaagttgataaatttacatgtaaaaaa

SEQ ID NO: 97020 - DNA, 360 bp, Heterodera glycines
cgccttttctcccgccactcattcactcacttctcagttcattctcgtcaaaaatggcaacctccgcaaaaatttttgttctcctcttcgtccttcttacggtcgctttactcgtcgaacaagccacggcacagtgggggctactactacccgtactacggcaaacgcgaggccgggttcgccccccagggcaatgccaacggaaacgccgaagggcccgcggccggcggagagcacgcgatgttcagattctgaaaaagggaggaaggaagaaacgatcaaagagtgatcggattgactgatcagcaagcaaatggtccatttcaaaacatgcgataaataaacggaatgctttttcaa

SEQ ID NO: 97021 - DNA, 304 bp, Heterodera glycines
tcggtgatgcaggatcccaggaagtgattggaggcatgatttcaatgaagttcttcgagagatttgagccatttacttgcttcagaatagtatatttcacatcactgggagtgtttttcattgtgcacttactgtgagccacggagcacctcctgtaagccttatattgttcattggcttgacaatatttgcctggctaaataactacaaattctttacaattcagtcgtaagtgttcatgcaaatggatattaaaaaatagagtttattcaatgagaacaaaaaccttcatagctttagatct

SEQ ID NO: 97022 - DNA, 411 bp, Heterodera glycines
ccgctaatattactcctatagggactccattttttaccaaattattaaattaacaaaatgtcccctcttcgttttctcgccgttctgctgctgatctgtgccatgttcagcttcaacaatttggggctggccaatggcgaggaaagcaaagacagccaagtcgctctccgtcccgatgttgctgctgttcagcctggacctcgtcgttgttcgcgctcgccgtggttactatggaggtggtggaggctgttgcggtggcggttggggaaaaaagaaataagcagccaaagaagaaaggaaggatgccgacaaagattaattatctttaattagtaaatgatccattcgtccattttgtaattggccaaatttagtaaaagacaaaatacaatgataaattttgtatatttt

SEQ ID NO: 97023 - DNA, 337 bp, Heterodera glycines
gatgagattatcaaagttctccgtgaagaaattgatgagcagcaccgagtgcacggaacgcgtgtcaaagtgtggcgtgaacgcattgacagcctcgagcaaatgctgatttcacagcaagagcgtgcggaggctgataagtggtcacaaaatgggcagatgaaggaggaaggaattaaaaacagagaaaagcaacagtccgaaaaagttctcttcatctgcgagaagtgtctgaatgccttcccccgatatggatatttatatgcgcattattcaaattgtaactgatcgttgcgtatcgcaaattctttgtcaaattataattattcacgtagag

SEQ ID NO: 97024 - DNA, 359 bp, Heterodera glycines
caaacaaagatgagattatcaaagttctccgtgaagaaattgatgagcagcaccgagtgcacggaacgcgtgtcaaagtgtggcgtgaacgcattgacagcctcgagcaaatgctgatttcacagcaagagcgtgcggaggtcaataattgcggctgataagtggtcacaaaatgggcagatgaaggaggaaggaattaaaaacagagaaaagcaacagtccgaaaaagttctcttcatctgcgagaagtgtctgaatgccttcccccgatatggatatttatatgcgcattattcaaattgtaactgatcgttgcgtatcgcaaattctttgtcaaattataattattcacgtagagg

SEQ ID NO: 97025 - DNA, 424 bp, Heterodera glycines
gccgtccctgtgccaatgtcggtccctgccaaactcattttgctgctggtagctgcttcgttagttgcggactttgtcttgggtatggacgaacaaaacggagctgccgctggaaaatcttcgaaaacaccgacagatccaaacgataaattgccgaaaaacgcagaaaaatcgaatgcaccgatgaagctcacaaatacaaagaagatagaccaagacaagcttaagggggtgagcaaagaaatcaaatttggcgacactccaccagcagcagccactggtgtaccatcgaaaaagccgaattcaaacaaaaatcagagaggagggagctgaagacaggcaaagaacaagcagtaccacaaccgattgactgatttgaaacggattttgatcaaaagcttttttggcgaaatttttgggaaaa

SEQ ID NO: 97026 - DNA, 251 bp, Heterodera glycines
atgaagttggttaccctattgctattcttgaagattgtgtttgccgacaacgacaaagatgactgtgacgatgacaaggataagagtttgaaggatttggattatcgcgaccaaattggatttgttgactgcggatgttcaaccatcaacggcacggtagtttgtgcttatgctgatccattcccaccttaccaaatgaagggtggattcgactgtcaaagttaatccaataaaaataccattttagcgtt

SEQ ID NO: 97027 - DNA, 302 bp, Heterodera glycines
gcaaagtcagcagcacaattgggaggaagagtccaaaggcgatggaaatgaaaggaaaaattggacgaagaaaaagcaaccgacgaaggaagagaaaaagaggaaatgatcagacagactcactctgctgtgatggcatttcctataaatatcctaattacccctccccgcttttctatggaatgccctcaaccgaccgacactttgtgcataattttttcactttcactatgaaatatacacatatacagtacatatgtattcaaaataaacagagaatcgaaaaaaaaaaaaaaaaaaaa

SEQ ID NO: 97028 - DNA, 681 bp, Heterodera glycines
gttcattgagctgaaaacacagctcaaattcgtcggtttcggcaagtacttctctttcaaagcacttagttggtatttccaatcatttttgatcggcattgacactttggtcgtcggaattcgcagccgtaaaaaatgttcaacgaacgaccctcgacaatgagattggctttgaatattccgtcgagctcggggttcggatccacaggtgccgctgtgtcgggctcgcctccctcgggtccgtccgctgtattcttttcctttttattaaattgttttgttccaataaaaagtttattcattttcatgcggaaactaaaatttgcgggcgatgagtaattttaatgagcgaattgaaattgacgaaatcggatgccatcggcaaagaatgcaaaacaaaatggaaagtggcgaattgttcaccttcgcttttggcgcctttgccatcgctttgattgccctcgtcattatttattacaaatgcatcgaccgaccgccaaaaaaacgattttattaaatgggcacaaaagagagaaaattgaagaaaaagccgacgaacagaaaaaaggaaaagcgacgagcaaagaaagaaagaaaaagcaaagtgaaattggaaatcaaaagaatcaaatgccatttttgttaaaatattttgaatatgttattaaatactatttaatt

SEQ ID NO: 97029 - DNA, 529 bp, Heterodera glycines
catttcgtccgtctcccaaaagcaccaccaatcattcacaagccaagcacaaacaacaacaatatggaaattccatcaagcaattaccccccgccacctccctatgactcatcggtgctcattcagcagcccaacaacccgtcgccgaacagtccgatgatggagaagggtccagctgccacaacagcaggcatatgcgccagccacaggttcaacaccaacaggccgagcggagaatggtcagggacctggtcaccatgttcttctgtttcgttataccgccgattgccatcgctttgcagaacgggccttcaatgaagctgcacatactgctcagcgttctgttgtgcattctgggctgggttccagcggttttgcatgccgtttggtactgtttctttgccatgagacactacaaccattgattaattgatccccccgatttgcgtgatctatgtgatctgcaaatatttgataaaacactaattgatgcatattaacacgcgaaagcattggactaatctcattt

SEQ ID NO: 97030 - DNA, 1224 bp, Heterodera glycines
tccattcaacccatgcttgaccaaggagaattacgtcgagatggaatcaaaggtcaaagcggtcttcgagcagctgaagggcgatgccgagttgggaggcacctactatccgctccagggcatgaccaaggacgtccaaaatcagctgattgccgaccacttcttgtttaaagagggcgaccgttttctgcaggaggccaatgcttgccgttattggcccaccggacgcggaattttccataacgccaagaaaacctttttggtgtgggtcaacgaggaagatcacctccgtatcatttcgatgcaaaatggcggcaatgttggacaagtgctggagcgtctcataaagggagtcaaggccatcgaatcgaaagttccgttttcgcgtgacgaccgtcttggctggctgactttctgtcctaccaacttgggaacaactgttcacacaagtgtacatatccaacttccaaagatcagcacaaaacccaacttcaagtccagtgttgactcagaacaactaagctgatcgcacggtcttgtaccggcgacgtgtctttcaagtgtctgccttatcaactttcgatggtagtgtatctgactaccatggtgatgacgggtagcggaggataagggttcgactccggagaaggggcctgagaaatggccactacgtctaaggatggcagcaggcgcgcaaattacccactctcaacgcgaggaggtagtgacgagaaataacgagaccgatctcttatgaggccggtcatcggaatgggtacaatttaaaccctttaacgagtatctatgagagggcaagtctggtgccagcagccgcggtaattccagctctcaaaatgcatagaattattgctgcggttaaaaagctcgtagttggatctgtgctagccgtccggtgcacactttgtgtgttactggtttggttggcttttctgccggtctttccccggcgttggcctttaccggtcggcgtcggtgggctggcgagtttactttgaagctaattctctcggaaaaaaatgccgacggcgaaactgtactatcactgtcagtcgcattgcttgaacagtcgggcaaacagttggcccacgattggagcggtctctgtgacggagtttctcttctcgaaatggttgaaggggcaatctctgcgctacaccaactcactaaagatggcacttccgcagcacaagttttcagtcgaag

SEQ ID NO: 97031 - DNA, 256 bp, Heterodera glycines
agcggggttggtccgactatccacgaaatcgacgacgatgaagcggactcggcaaacccgaaacgtcgcaagggcgtgttcggcaaattcctcggctgattgtgagagccaattcgatttggcattggcagcgatgtaaacattaactgattgcttttaactgatcacgtagtacccgacaaacttttgtcgcccaatgggtgattggtatgaatcccaaacttgtatcacaaagggatttttataaatattttct

SEQ ID NO: 97032 - DNA, 204 bp, Heterodera glycines
tcaaaagttggccttgtgccgataaattacataaaactgattggaaaatgcaacgacagaaatgcgcaaatcatatgaccagtccgaacattggattaacggacaattcaattctctttcattttgtcatttcatttaaatgtttccaaattttattactgtaaaactttgtatccgaatttaataaaaataaacgaaaatggc

SEQ ID NO: 97033 - DNA, 381 bp, Heterodera glycines
ccggagcggaattgcatcgggtgggtcggcttaactggtcctctgtacttttccgcatagtcaattcggtttgcacgcgggtgaaaacattgccgtatctgtggcagtgaaagacaaacgatgttttgatcgcctcgtcgtgcaaattgagcgcaaatcgaccaccgaaaagttcgatgttctccaatgccgaaagtgtgtgttcaactcgtgttggcttggctcgcgcactttgcacgaccaacgcacttatctgaccaacctccgatcgtattgaccaaagaatatacggataacaaacaatgataacaactaaattattgacaattaaaatgtccaaaatgcattttgatcggatgaaaaaagactttccgccaaaaa

SEQ ID NO: 97034 - DNA, 684 bp, Heterodera glycines
actaaacccgggcgaactcgactttaagggtacgaaacggaaaaaagggaaaacaacggacaaaggggacggggggtacaagaagaaactgagagtcattcattagagacgtaaattgtaatagagagagagagttttctttttgttgcccctttgtcattaagcactttttagagggccaaatcattcagctcgattcgcaaattgacgagcattggtttgagggcacagtggacggccggaccggctttttccccatcacttacgtggaggtgatcgtaccaatcccttcttcttccacgacggcacaacaataaactttgtagaacaccgaacagatgacacaaactgtgctttgggatggtcaacagaacaagtcaaacaaactcacctaaatttgctaataattccttaattttcactgtttgtttttcgacccgagattctcttcttacaatagaaaatggcaaatttctaaaccattaacttctcagataatttgttttatttcttttcctatttctgaaattatgtccgcggagattgttatagctaatcaatctaattgtaaagccatttattcgagcgaccgttacttataattcatcctatgacactttcatcaacattcacataatttcaattataaaatttaataaaaaaataaagaaaataaaattgcaa

SEQ ID NO: 97035 - DNA, 645 bp, Heterodera glycines
  unsure (1)..(645): unsure at all n locations
ctgcctttcgacaactttttcttcctaacaatggtccaaatgtggtgcatggagacctacccgtgtggtgatccgcgtcttccgcaccactgtttcccaccaaaattggtgaatccggacgaattgaccaaacggacgggcgccctctattataagttggatttggaagaccaagtggcattatcaaaacgaattgcaattatgaaattggagcgcaacttcaccaaggaggacacgtacacattggacgcacagacaacgaacgattttaaggaaaagatcgcagaacttttcgaagagacggaaagtgacgaggatcaagcacggatggttttggaagggtcggcatattacgacgtcgaagccaaagacggagtttggatacgcatcttttgtgagtatggcgacttactcatcatccctaagggcatcgcacatcgaatgaccacaacgccgaagaattatgtgaaagtgcgccgctttttcaagtcgagcgatagcgacgaggactgaacaaaaggacgaagaacgaagtcgaagaacagcataagtaatcaccanctgaaaagcttgccctattcaaatggtttaaaatgttcaaatttgaatgacattttgtcaattgtaaacaaaanagaaaaaaaa

SEQ ID NO: 97036 - DNA, 389 bp, Heterodera glycines
ttttcagaaatgcatttcaaattctctctcatttctctcgcctttttgtgcctaacattttgccttatcttccaaatgccatgccaaactgaggctgctgttgctggcgctcacactgtgctgaaagtggctggctcaaagccggggtcgatggcactaaacactgtggcacccggtctcggcacagctgcccgggtcgccaatcgtgtggtcaatcattagcctcgtcattgagcactgccgtaggagaccggtggaaagaaatgccaaacttgggaggagtggagaagtgccggaattttgttgcaaatccttttcatatttgtagtttgttctttttttaattctttttcagcttttgaatttgggctatatattttcttcaacac

SEQ ID NO: 97037 - DNA, 557 bp, Heterodera glycines
  unsure (1)..(557): unsure at all n locations
tgtcgaagaataagctgttcgtcaacggacacttcaccaaggacctgagcgaggatgagcaggaggaattgaagcagtaccaggagcagctggatcagttcaagtccaaagtcaagacctacttggaggagcgccagaaacagttccgcaaccaggtggcgcgccagggcggcgccgaggccaaggagggcggaactcagctgaagaagccggagccgccaaagaagcccagcttctgctcggacaaagccaccacacagtacgtgttcgacggctgcagcgttcaaggcgacaacgtgtacattggggatacttttgtgcgcaagctgagcccggacgagcagaaggaattggcccagtttgaccagaaattcaccgcctaccagaaggcagtgacggccggcttccgcaagcaagttgaggagatgtttggccaacattttagcaccctgttcaacgcctccaatctaagcccatccactgctgangacaaacaacaagccgtaccatcctccaactctaagctaaccccaactaacgcagagaacaacagacac

SEQ ID NO: 97038 - DNA, 451 bp, Heterodera glycines
  unsure (1)..(451): unsure at all n locations
gcgtgttcaagtgttgtggaacggaaaacaccacttttacaaatttagtgcttcattcgaacgaaaaagttacagcctcgagcatcgttcatgtgccagcttggggaagccgcttgagactctttgctttgtccattgtgccagcnntcaaaaatggccttttttaacaaacacttagttgggtttgtgttcactcagcccccttctctgagggagctttgcttttggacggtgcancgacaactcgcggaatggcgccctcgggggaaaatatggaggggcggaaggacccanaaagaantgcaagccatgttcaaaataantcaaaccattcaaattgttcattgaaaaagcatggatataccgacccataaatcaaagctataaactataaagttttaacatcaaagttcattattttttaatcaaaatctgttaataaattacacct

SEQ ID NO: 97039 - DNA, 508 bp, Heterodera glycines
agaatttttcattttccaaaccaataaaagatggcaataattgcgaaagtgtttctccttctccttctgtttctcatgtcaatggcttctcttttattttgcgcgaattggccaaaaaataccgtccctttggagacttatgtggacgaatcgctccatctccattgcaaattgtgcaacaaaatcgccaattcagcttcggacggagccaaatggctacagaaatcggaggagggctatgtgtctctgctgaagttttgcatcgacgaactgcgcaacagcgacaaacgcagccaaacattgccggctgaggagggccatcaccaatttctgttcgcgtgccacggattcaccgcggacaaacgaaaattgagcgaaacgataggggcgatagcgaaaaaagaagccgacttctgcaaggagcagaaatattgccaaatgttttgatgtgttcagtgattttcatattttagtgcctttttaaatacaaatggacaaattgtcgggg

SEQ ID NO: 97040 - DNA, 318 bp, Heterodera glycines
ctccggtttaattgtccaatactataacgcttttttgaaaaggaattacgtggtcagctggcagtgcttggacatcatccgcaaggacatggtcgacccgttgagcggcaagcggatggccgagtcggacatcatcgaactgcaacggggcggcacgggctacgcagctacaaacaagctggacgccaagctgatcagaccccaattggaactgcaataaatggatgattgttcatgttgctgacttgatcatggatttaccaaatatttgctataatttctgtgtttgtaccattttacaatttacaagatttgatg

SEQ ID NO: 97041 - DNA, 486 bp, Heterodera glycines
acaatttcttctttctcgatatttttccgtctcaaatttggcaatgcaaaaaattcgagtcgccaatccggtggtggatttggatggagacgaaatgacgaggataatttgggctggcatcaaagagaagctgatcctgccctatctcgacatcgacatcaaatattacgacttgagcatcgaaaatcgagacgccactgacgatgaagtgacagtggacgcagcggaagccatcaaaaaaatacaatgtgggcataaaatgtgcgacaattacggcggacgaggcgcgcgtgaaagaatttggccttaaaaaaatgtggttgagtccgaacggaacaatccgaaacattctcggggggacagtgttccgtgagccgatcatttgcaagaacattccccgagttgtgcccgggtggaagaaggaaattgtgatcggacgccacgcatttggtgaccaatacaaagcgacggatattgtggtgccga

SEQ ID NO: 97042 - DNA, 446 bp, Heterodera glycines
  unsure (1)..(446): unsure at all n locations
gagcattaaggtgggctcgacccaatgcattctttgccctccgctttttgcattttcactttcggcattctcttccccccccccccaaaggccccacgtctctccgctgtgtttaatatcggcccaaaaccaacaatgcgttgggtggattttgttattggcaacgatatttatgtgacaaaggcgttgaaaatgttatgtgcccgaaaaaaacggactcaaaataaatgcgacgccaaaaagggcgcgttttgactatcatttgttgcacgtgtcacaacttcagtggatgttttcaataacaggggacccctttttcnangaaacagccaaaccatgggagaaatatgcnaagggatgacaggaccgacagacattttcaaccaattgacaaaatatttaatagttctgctcaattccacagaaaaagaagtggtcaaaattgg

SEQ ID NO: 97043 - DNA, 556 bp, Heterodera glycines
gcgggtagtgaacgccaagccaaaataaatgccactggcgaccgactaaaggaggcgtcgaagatcaatttgtccctctcgacgcttggcaatgtgattagtgcgttggcggacgcgaaagtccgcacgttccgtaccgaaattcgaagctgaatcgcattttgcaagaattgctgggcggcactgcaggcccaactgttggagcagagcaaccgttgggcaaagacgacaaaataaatgtgagcttgaacgcgttcgtcgggagttggcaatggagacgcgcttcagaacacagcaagcagaacagtgcgacattgaggagcagtacagcacactgcaggaggagtcccaggggatgggcaaatggttgagaaaggggggcaaattttaaaaaagaatataatttctccacattttcccgttaaacggtgcaatggatccaacggcaactactaacaataatcaaaggtgccgcaagatgaacagaaatataaaatatcagaaataaaagacactctttaacaatgcgagccatacatacgtcaattttgtttta

SEQ ID NO: 97044 - DNA, 483 bp, Heterodera glycines
ggggcctcatttgccttcgctatgaaattcgtatgattaaaaaaaaaaaaattatttttcattttaatggtatgtcttttaaatatttccaggcacaatgaatatgcctccggaaattcagcgcgccatgaagatgcaagtggaagcggaacggaaaaagcgtgccgcaattttggagtcggagggcatttgcgaggcggaaaacaaccgagcggagggcgagaagcaggcgcgaattctgcgctccgaagcacaaatgcaagagcagatgaacaaatcgatgggtttggcaaaagcggccgaagcagagaaaatccaacgcattttgcaatctgaggcggaaatgcaaatgaaagttaacatggccattggacttgccaagtcggccgaaagtgaaaaagagtcgcgcgtcatattagcggaagcggaggagcaggagcaagtgattgtcagccgtgggttggcgtgtgccatcgaaacgga

SEQ ID NO: 97045 - DNA, 497 bp, Heterodera glycines
gctgaaaacacagctcaaattcgtcggtttcggcaagtacttctctttcaaagcacttagttggtatttccaatcatttttgatcggcattgacactttggtcgtcggaattcgagacgacaattttaagctgactcatgttgaatattacccacttgagaatttgcaaagttttttcaagaaaagtgggttcgacacgaacaaatgtctgctcttcctgcaccgttttctctctactgtcaaaaatgagctcaacggagtgccagaagggtcaattttagtgacggagcgtctcaaaaacaccgaccagttcgtgttcactaccatcgatgttgaagatgagatgggacaagcggagtatgcggtgatcagcaaagaattccgtgaccacaactggacccattgaaacttttttgcacttgaatcattgtattccatggttttcaaattcaaatttttttgcgattcgtaaaatgcttttttagttttcaataaac

SEQ ID NO: 97046 - DNA, 497 bp, Heterodera glycines
acgtcgagatggaatcaaaggtcaaagcggtcttcgagcagctgaagagcgatgccgagttgggaggcacctactatccgctccagggcatgaccaaggacgtccaaaatcagctgattgccgaccacttcttgtttaaagagggcgaccgttttctgcaggaggccaatgcttgccgttattggcccaccggacgcggaattttccataacgccaagaaaacctttttggtgtgggtcaacgaggaagatcacctccgtatcatttcgatgcaaaatggcggcaatgttggacgagtgctggagcgtctcataaagggagtcaaggccatcgaatcgaaagttccgttttcgcgtgacgaccgtcttggctggctgactttctgtcctaccaacttgggaacgactgttcgatggagattacgttgacattgatgccataatggagattaatcaaagcgaatacattaacaaatcaatgctcattagttcgaatgc

SEQ ID NO: 97047 - DNA, 178 bp, Heterodera glycines
gcaatttcatttaagcaggttaaattgaaatgagtttttcattgagttcaaaagacatcaaaaacccgcagtgcgcatgttgtgaaaaggaagtgccatttggtgacaaatttagtgtcgatcgattgacgagttggcattttttgtcattaaacttcttttttaaaaatctataaac

SEQ ID NO: 97048 - DNA, 541 bp, Heterodera glycines
cctgattcgccagctctatactctcctatagggaaagtggacgccttccgtaccggtccggaattcccgggtcgacatcatcatcatcatcatcatcacggccgctcatacgactcactatagggggattttaaaaaattcatctttcataagatacaaagcgaaggatggccaatgctgaagaggtttgcccaacgtattctgaggccttttcccatgggaatgacgacggttcgttttgcactatcactgagtttaaacggaataaactcgaaaccgaagctcgcaagaattgggatcgcttctacaaaagaaattcggacaatttcttcaaggaccgaaattggacaaagcgagagattgagcaaatgtgcgcaaaagacatggaactgagtgctcctttgactttgcttgacgccggttgcggctgtggcaacactttattcccattggccaaattcttccccaattggactttctgtggcgtcgatttttcctcaaatgccctctctttgcttcagcaaagggctgtacaaattgg

SEQ ID NO: 97049 - DNA, 162 bp, Heterodera glycines
gattgtgacgctggccaaagaagcggcggtcgacgtgaaatttgaactgtcaatttgattaggctttatttgaccgactgacgacgtgtagaaagaaatggacacagagaaagaaagagatgtagaaattcgtaaatttgtaagataaaaaaaacgatattt

SEQ ID NO: 97050 - DNA, 344 bp, Heterodera glycines
acccgaataaatttaccaagtgtatgacattgtgctcaaactcaaagaaaagcgacacgaagtcaactcgctgttttatggttgattgtcttagaggaagactgtcgagaaaaaggaagaaactgaagttcaacagtccgattgagcccaatctggaagtgattgtatgcacattagttgagcggactactagtggaagtgaaaatccaagcgagaaatttatcaagtcaagctgaagcaacagaatgaatgtgatagcgaaagaatggctgaaaacaataatttttttgctttaagcaaaaattttgaacacttttttggtttaataaatcattggatttttc

SEQ ID NO: 97051 - DNA, 462 bp, Heterodera glycines
gaaaaacgcgttattggccatacgaggtaaacatttttccgaaaggagtttgcttttcccgtgaggtctgctcatctatgttttatttttataaaattaagttaataaatatatgattaaaaataaaataagctatagaaaaataaaaaaaacaaattataaagaggtaaatattttcagaaggctaaaggccgaaaagcttgccgaattgcttcgccaacaatgccaataccaaccgcagcacccgtctccttctgcacttggaatgaccactcaaactcagtattcgtctcaaggggtggcagcctcaatgtatcctgtccttggccaggcttatacgagcccagccaattttcggcattcttatatgagttaggagaacggttcaaccggagattacttggacacgcacttattattttctatcaactttttgccccgacaaataaacgttttataatg

SEQ ID NO: 97052 - DNA, 378 bp, Heterodera glycines
attcaaaatcaataaaaatgtccgcttggatttgtcctgggtttttgctgttttttgtgctcattctgatcactgatcactgtccgatgacccaagctgtcactcaaccgccctatggtcaattggctgtcagtggaaaaaatctagtacaaaaaagtacgaaaaaagccgtggcattgcacggcctgtcaatgtactgtagccaatgcgtgccgaagttttgggtgaaacagaccgtcaacaaattaaaatgttcatgcaatgccaacgttgtacgcgcagcaatggcatccagctttggcggttacatttcaaacccaactgccgaatataaaaaaatgactgcaatcattgatggggcaattgaccaaggccttt

SEQ ID NO: 97053 - DNA, 545 bp, Heterodera glycines
aatttgttaaagaattcaacagagatgaacccaaattggacattctgataaataacgcgggcataatgttttatccacgcttcaccaaaactgtcgatggccatgagctgacttggcagtccaactttttaggccattttctgttgaccgaattgctcctgccaaagttggagcgcagtgaggaaggcggtcgcattgtgaatgtgagcagcagtgtccatctccatgccgattcggtcgatccggaggtggtggagtcgcctcgtcgatttgggataatcgcgacatacgctcgctcgaagctagccaatgttatgcatgttgttgccctcaccaaacgcatccgtaccaatgacagcggttcaaaagtcagcgcaaacgcgtgccatcctggcagtgtcaacaccgaactcattcggaacaattttttcagaaaatacattaaaaaggcatttgctccaattatatggttcgttctgaaaactgatcgggacggagcacagacaccgttgtttttagcgctaagtagacaaattaacggcgtt

SEQ ID NO: 97054 - DNA, 545 bp, Heterodera glycines
aattaaaacggttcaatgtttacggggggaaaaatcgtcttgatgtgaggccgaagccaagagtggatttgactcaatacacaatgaagaaggagtccatcatttacgatttgaatgggatcattgagcatatcggtggtgggattaattttggacattacatttgtgcaatgcgcggattcaaagggaattggttcaaatttgacgattctgagagaagacgcgtaagtctgaatgatgttgtgcaaaacatggacccttacattctcttctacacaaagatttctccctctcccatcaaccaacaacctcatcagcgacgatcctttggtggatttgctccttcgacacctaagcaagctcggctcaacagtttcccttcccacaacggagggacgtcccttcctaagcggttcaacaacacatttcatcgctcgttcattagttgacttagaagatctctcccccttcgttcctccactatctgtccatgttatttatcatttgttgtttcgaaaatgaactcctctttccatttttatacg

SEQ ID NO: 97055 - DNA, 564 bp, Heterodera glycines
aagattttacaacaccaaagcgaacagtgtgggaccaatggaaggacactgacaaatgaagaagaaaagacgcaaaaaatgagcaaaatatgcaacagtgaaaactaattcagtgcataataataaatattataacaaataataattcatttaaaaatatttttataaattaaagtgaaaaaaagaagagtttaattattcgtggacactttcaaattgcaaatagacaaaaaagtgaagaagttaattgagaccatttaatcccttagaaaggttaaaatgactaaatgctctcctaattttcaattgccaaaagtgactaaattcaattattttgagtcaaatttttattttttgcccacctgataataggccacccttttctgtcccctcatttcgtgttcaattggaattgattcgtccgtacttaaaatttggaagcatctataaggaaaattacatggaaaattaccgcaggtaataagtgctttcgacaaggcaataatcgtgcgcatattgaacccatccggcacggaattcagctttggcaaaacaatttatggc

SEQ ID NO: 97056 - DNA, 151 bp, Heterodera glycines
tccacatttattgttgattttgatgtttgttgataataaatgttttaatttgaaaaaaaaaaaaaaaaaaaaaaaaaaaaaaaaaaaaaaaaaaaaaaaaaaaaaaaaaaaaaaaaaaaaaaaaaaaaaaaaaaaaaaaaaaaaaaaaaaa

SEQ ID NO: 97057 - DNA, 249 bp, Heterodera glycines
tcgctttattaaaggatttactcttccaagaaaagaacacccaccaattaaccaaattggctgattcaactgaacccgtctttgttgtcgccaaattcgaccaaagaatgctcttccattcattcgttggcattgtgtgaagaatggcatgcgcttgctgaccaacggaaatttatttaaacaatttatttgttttcgtgctgatgttcttttattttgtcttggaaagttaaataaagtataagtccc

SEQ ID NO: 97058 - DNA, 260 bp, Heterodera glycines
tccatgtatttctacggatatatgctctattttgtgttgtggccagtacttttccactccgttttgcgtccgatgataaaaaagacggcctaatggaagaagggatcattcgtccgtttagtctttttgattcgattgaaaatctccctttaaacaattgaaatttcgtcgtaattgttcattattggtgttaatttcttaattaagcctcaaatttgtttcctttttatggtaataatcgtttaaagcactgtttggtc

SEQ ID NO: 97059 - DNA, 396 bp, Heterodera glycines
tgggggtaataagtcgcgaatttggcaattggggagcatggatccgagtggacaaagattggaccaactcctcggcaaagagtcaaaaagcaatgagcagaaacaacgcatttcttccctcttcacttccgtccatcttttcatgccaaaacccgtcgtcgttctctacggcgaagagcttggcctgttaagtggaaaaccgacagccaacaaattggccaaccgaattgtctatccgtggagtaacgaaacattcggcaatcagtcgcaaggatttttcgttttcccccaacgtacaaaaaacggagacttcgagagccagaaaaatgacaaacattcgccgctggcgttgttcaaagaaatcgcaaagctacgcgagcattccgatttcttctc

SEQ ID NO: 97060 - DNA, 621 bp, Heterodera glycines
tgaaggaaaatttaaaaaaaacgaagggaatttatagcaaatcaaaaaaagagaattatattattataaatgtgtaaattcgacaacgatttttaaagccaaatttaattttatttcaaaaaataatttaaaatataatgttggaaattttttaggaaatttaatttgaatcgataaaaaattataacttaaaaaataatctttaattaaaaaatgttttcttggctcaaattcatggataaaaatttcgacgacccatagtcgagagggccgttgcaatgaaactgatcactttcgtctggacggcaaaatgtggacgcgattatctacgacagaatcggcgaattggaaacacgtcaaaatgtgttcgtcgtggaaagggaagtgaagagcgccctgttcaagtcgccccgcacttcaccttctctgtcgcgagcaaattcactgtttcgcaacagtcaaagcccgacgatgccggtggaagagccaaggcggtcaccctccgccagaagaatgttggccaacggatttgcccggcaaatgacaattgccgacactgactttttcccgaccaaatgagtgaaaaatcttatgtttccttttccgaagaatatccaactg

SEQ ID NO: 97061 - DNA, 558 bp, Heterodera glycines
cccaattaaaaaaagtaaatcctctttaaaaatgaaactttcaataattttattgctttccttggccttttgtgcgttaatcatcgatgcatatccatcgggaaatggtaaagatcttgaagctgacaacgaaaaaacggaagtgaaggaagagaagatggaaaaaagagaggcggaagtggaggaagggaagaaggaaaagaaagcagcagaagaggaggtagggaagaaggaaaagagaggaagtggaggtggaacatggggcaacggaggaagaggaaacggaggaggaaacggaggaggaggacacggaggaggaggacatggaggaggacacggaggaggaaatgacagcagcggcggaggtgatgattagaagccatagctaaaaagaagaagcataatatggaactaagaaaagaacgagcacacaatgcttttagtcgcttattttttgctgcatttaaaatgttaaattttaaaaataaaaataaatttttttgaattttcgtatttttaattaatttctttttacccgcataaaacaaaattagttca

SEQ ID NO: 97062 - DNA, 150 bp, Heterodera glycines
attgaaaactaccttaattgatttagctctacaccttttttcatgtcgtgtaaatatctgaataaaatatcttaatgcttttaaaaaaaaaaaaaaaaaaaaaaaaaaaaaaaaaaaaaaaaaaaaaaaaaaaaaaaaaaaaaaaaaaaa

SEQ ID NO: 97063 - DNA, 332 bp, Heterodera glycines
cttggttaggtggatagagcaccaatgggttcttaagaaaaatggttttattttctgccaaatgagcacgagtgccgagttattgtaaggattattagacgcatttccctcatttaattatttcccattggccattatcaattcaattacatttatccttttctcacctttttccttttctcattgtaatgtttctccgcccattctcttcgcattttctccttccccagtgatcagtcagtcagtagtggtgatggaacagacttcaattatttattccgatttctcgcttcgtataaatccaacaacgaatgaataaagacatctttaac

SEQ ID NO: 97064 - DNA, 829 bp, Heterodera glycines
aatttatcggatggcttacgattatctggacagattgggtgagttgggaaggaaagcacggcgaaatcgccaaatttggtgtattcacgatatccgatggggacaagtttaacccgaattattaacagttgctaaacaacccaaacagtgcggacatttccaatttaaataattaaatcttttcataaaccctaaattaccatcaaatcacttgtgaaacaatccaattgtcatcaaaggtaattttcctcaaaagtccggcccagaatctgctgaagtccctctgaatttgagtcattttctttctcgaccctaaggcaaagtggacggcctcgactttgacgcgttcactaggcaattattcgaccgatggttcggcgcgtacacgcgctgcggcacatgcaaaaatggcaaatgcagcagacacgggggaccgttgggaagttcagggtgggagcacgtgttcagcggagagtggcgaggagaaattgtggacggacaccacagttgggtgaggttttacctgcaggagaaggcgggagacatcgaataccacggatattacgtgaaaccacggcacggccaattcatcggcaccattcagtacaaatggaagcagtacttgaaaaggatcggcggtttcatgataggcacgtcgccagcttttgacttttctctgctcaccgtttgcattttgactgaaccgggcgaccggaagtgcaaattccaactgaaagaaactcctatgttcgtctcctccttcctcgaggattgtgtcatcgacggatccttcagacacaacttttgcattgcgaccgcttatccgggc

SEQ ID NO: 97065 - DNA, 320 bp, Heterodera glycines
attgctgctgttgcgcaagggtttaaggttttcgtcgacggagcgtccgtttgcgacttcacttttcgtgcttcagctccgccaccaacagaagcaaaccgactgacaattgttggtgatgttggggtacaaaaattcatttttcgtaaccaaaaaaattaattttctcagttcatacaattggaaaaacttttcactttcgaatttggttagatcatccaattccctgctttgttttatgcacattgtgacattttcgggtacttatttattaaagtgaatttgtaattagataaaaaggcagtgataaaatgcaaaaa

SEQ ID NO: 97066 - DNA, 389 bp, Heterodera glycines
cggcggattcagcggacgattcgctgtggagccgataccatgatcaaaatgcaatggaagagttgttggagaaggtgcacagcaaatgccccaatgtcactcgtctgtacagcgtcggccgatcagtccaaggccgcgatttggcggtcattgaattttccctccatcccggacggcatcaaattttgaagcccgaaatggtcagcgatgcacgtaacggtgaaccaattgcaaatgccgtggtgtgggtgagaaatgtgaccgacggagacggacaaacggccatcaaacacccggtgaccacgtggatcactggcgattatttccgtccgttggtctccggctgttaccaaatcgcggtggaagcggacggttatgaaattggcatc

SEQ ID NO: 97067 - DNA, 590 bp, Heterodera glycines
gtggcattttccacaatgctaaaaagacctttttggtgtgggttaatgaagaggaccatttgcgcattatctccatgcagaaagggggcgatgttggcaacgttttgaaacgattgatccgcggtgtgaaaggtatcgagaagcaagttccatttgcgcgtgatgatcgactcggctatctgacgttttgcccctccaatctgggcacgaccatccgtgctagtgtgcacatccgtttgcctaaaataagcgcaaagcctgaattcaaaaagatctgcgaggacctcaagttgcaagttcgcggcattcacggagaacactcggaaagtgaaggcggggtttacgacgtgtcgaacaaggctcggcttggacttaccgaatttgaggcggtcaagcaaatgtatgacggtgttaagaaactcattgaacttgagaaggcgtcgaagtgaatgaattaaatatctatatccatttgacgcctcgtaattgcattgctttaatcacaatattgtatttttgtataggtctatagggtcagaaaatgtattgcattatgaaattgtatggacaagtaaaatggttaattgact

SEQ ID NO: 97068 - DNA, 586 bp, Heterodera glycines
ttactatgaagacgcggacggactgaacggaaatttgagctacggagggacgaaagggcgcaaagaatgggaagaaaacgccgacccgcactcatccgatttgtctttgtataatattgccgacgggaacaagagcagttcgggcatctccagctgttgtacgacttcttcgagaagctgtgagccgccagagaccaatcgctttgtgttggccaaaaaacaaagacatttcaaagcgggggatgaagctgacccaaaaatgccaactcatcgggcacagttcccttttatgccgagacattccgaacagatcgaactgcaaaagggtgacgcaattcgcattttggagaagtacgaagaccactggtgccatggaatcaatttacggagcggaaaaaagggaattttccccgaggcccatgtcgtggagattgaccttgtggatgaaatttgccgaagtgttcttccggatggcactaatcatgccaacaaaatcgaacgggacaccttttacttgaccatgttggcctccattgaggtcgcccatcacaggggaaacgatgtggtaatgcaggcaattaacaag

SEQ ID NO: 97069 - DNA, 214 bp, Heterodera glycines
  unsure (1)..(214): unsure at all n locations
tgataagatcaacaagggtcaattggatggcattgccatgtcatttagttcgattactctcggcaccaacggaccacatgcgaccgcctcgtcggattcgatgatggtcgactcgaactcatgaacgcgaaatcaaatttttgtttaatgaaaacccataattatttttgataccaactatattttatattttaatgaattatctaaaaacccn

SEQ ID NO: 97070 - DNA, 508 bp, Heterodera glycines
gacaaatgctaaacgaatggcttcaaaaaaagggagtgccatcggatgaggcggctttttttcttgaaacttattttcatgaggtcacagaaaaactttctaaacaaatcacagcaatggaaatattttatcagaacgagaaacaaatattaaacaacttcggaagagcattcattgcttgtcatgaaacttatggaacaaattttacggaaaaattggcacaaattggcattactgagaaaaagttagtgcaaatttgtcagtttttagggtatgatgacaaaatatttgatatacaaccaatcgacagtgatgtgaactttgggcttccggattggaaagaattttgcccaaaattaatggccaataaaattccaaaaaattcagtggttgtaatggacaaattaaattcagtggaaaccgtcggcatgaacaaaggtcaaaatattttaccaaaacttttggcgaagcaaagccgtggcactggtgtttttttgccgaaaaatgc

SEQ ID NO: 97071 - DNA, 390 bp, Heterodera glycines
ccccggcgctgtccaaaatatgccattgttcgtttgaccgaagggaccaatgtgcttcagttttaccaattattgcttgataatggtcaagaagaagtgtcttttgtcaacgaaatgcgtgaaaatgccttccaattatatgagaaaccaaacaatgacacgggaaaggatgaggcatcaatagcagctgatacaggtgccggaaagaaaaagctgcctgacgctgaacaaaaacagacgacggacacaaaggagcggaagagtccgataatggtcgacaaaggagtgcaagtgatccccgaaaggacaatcttcgcctcgccctctttcagttcatcttttcgcactcaattgccggcctctccaattttgcgtacggccaaaaaggaa

SEQ ID NO: 97072 - DNA, 535 bp, Heterodera glycines
gcgattgtaataggagggccaatcgtagtcggacaaatagcttctgtagcggtacagctggttgtagttgatggtcccttgacgatactgtgccaatcccttcgacaggctgtcctccatactgtctagtagccaagagcggtaacggtaggtgcgcgaatacgaatcgtagtaggggtcgtacctttaccaataatagtaccagcgattgtaataggagggccaatcgtagtcggacaaatagcttctgtagcggccccaataggagtacgaagacgaccaatagtacgggttgctgatgtagtcgctgtaatagtatcgacggtaagggaacagcgaacggctcgtctcgatttggcgtggcggtggaggaggacgaataattaagtggatggaatgaatgaacggaatgaacgtggaaaagcaaaatgtgtgagccttaaatagcaaattttgcacaaaaaaattcatttggttgccattattttcatcattcattaattatcggcaattcatcttcatcaatcatcccttc

SEQ ID NO: 97073 - DNA, 301 bp, Heterodera glycines
gcaaattgcgcttcattctttccttattttttgtggccttttaaatctcattgcccaattctttctctgaatgattttataggcttgtgaggacttatttttagtttttttaatttctattcattatttttatcttttaacattccttcccatttaaaagtgcaatattttttcattttcattaattgtgattgttggaaaatgtgttaagttggagagataattttgttaattcaattttgctcattatttatctttaaatttaaaaaataacagaatggcataaaaatgcgtatttgtc

SEQ ID NO: 97074 - DNA, 533 bp, Heterodera glycines
agcgaagagctgatcgtcatggaacactttgtagagctgaaggataaaacaatagcagtatacccataaaagtaaaattatgaaatttttaataaattttaatatgaataattgtgacaagtcttactttttgatgaatttcgaaattgtcggcccgaagaaggggagttaatggaaattcgatttggtggcaacagcgaagtcttgtgcctttcgttgcgtccaaaatatccattcgacgaaccattgtccgctcggtgtacagccaccgaatcgtccatggacactgacgccagcatttgagagtccggtgaccaggagattccggtcacatcaccgtcatgtcgtatcggacttcgaaacgcccttgcccaattctccttgttcggcggaatgtccatttcggggtcggcgtcacgttgtcggacagtcgccggctcttccagcatttgcacttcgcattccaaaacttcttgttccaatttccatacaaaaagaaagccgtccgcatccccagaagcgatataagttcc

SEQ ID NO: 97075 - DNA, 150 bp, Heterodera glycines
aattgaaaaataggcattcttttggacattttgaaccccaaagaattttagtgccatacaatgaatctgaaaaaggtttttatttttataaaacttttaacattttcgaataaaaattatttaaaaaaaaaaaaaaaaaaaaaaaaaaaa

SEQ ID NO: 97076 - DNA, 284 bp, Heterodera glycines
ttattttttcgtattcgaagaattttttacgaaaattacataaagtttattatggctgccgctaaagctgggataacaaaatatgaattgattggcgtctcatcactaagttttctcgccgtttttgtggcaattttgattttgcttgtacaaatgctttttcacaaagccaaaatgcaaacagaggaagctgaatgtgtgcacattgaccatcagttgcaacagaagaagaagaagaatgagagattttaaggaataaaaaaagcaaaaagaaaaaaattaat

SEQ ID NO: 97077 - DNA, 538 bp, Heterodera glycines
aaggagaattacgtcgagatggaatcaaaggtcaaagcggtcttcgagcagctggagggcgatgccgagttgggaggcacctactatccgctccagggcaatgttggacaagtgctggagcgtctcatagagggagtcaaggccatcgaatcgaaagttccgttttcgcgtgacgaccgtcttggctggctgactttctgtcctaccaacttgggaacgactgttcgcgcgagtgtgcatatccgacttccgaagatcagcgcaaaacccgacttcaagtccacctgcgacggcctgaaattgcaaatccgcgggattcacggcgaacattccgagagcgctggcggcgtttacgacatcagcaacaaggcccgtcttggtctcacggagttcgaagcggtgaagcagatgtacgacggagtgaaacacctgatcgaattggagaagaaagcataatgggaggaccgatcacacatttatcccttttcgcgcttctgataataaaaagcgatgtaaaaaaaaaaaaaaaaaaaaaaaa

SEQ ID NO: 97078 - DNA, 550 bp, Heterodera glycines
accatgattacgccaagctctaatactactcactatagggaaagctggtacgcctgcaggtaccggtccggaattcccgggtcgacatcatcatcatcatggccgctaatacgactcactatagggggaatcagttgaaaattttttttataacaaaatgatgaacaaaatttatgccaccattcatttcttattgcttttgactgtcattgctaacaaatcgactaactgtgctacaaatggtcaaggaactcaaactgttaaaacagcagatgcaacccatgatgaagctggaaaaatttcgcgtgattcatcatcaagttccgatgaagatgactcaacaactgcagcctcaaaaatgctactgaatgaagcaaataacgctttctccaaagataatgatgagccgattaaccagcagcagaaaatgaggcctgaagctaattttagcgttaaatatcttcccccgagactgaacgctgcacaaattgacaacattgcacaacaagcatcatccatgatcacattacgcacattaaaacatgtgaaa

SEQ ID NO: 97079 - DNA, 127 bp, Heterodera glycines
ggcggccggcagaaaagccaaccaaaccagtaacacacaaagtgtgcaccggacggctagcacagatccaactacgagcttcttaaccgcagcaataattctatgcattttgagagctggaattacc

SEQ ID NO: 97080 - DNA, 422 bp, Heterodera glycines
ctctcactaattgttgcacattccccaattttatttcttccttagtaagtagtattggtgcacaatgcgcacttttctgttcatagccgtagtcgggttgatgttggccgtcatcttggagaatgtaaatgcgactgggaaaaattcgccgtcaaagggaaaaccgtcgccagacagtacaaaccataaaaaagaccataaaaatgagcatccaaagtatgaagcagaacttatatatgagcaaggtaacctacagaaccatgctaccggtaacacatttattcagcaatcacaaaatttttatctaaaattaacatgaaaattagaaaattttataaatatatttaattattttatataacatatatatttatcagaatggcataacagtaaaatttctgttatttttttttgtttcgctc

SEQ ID NO: 97081 - DNA, 528 bp, Heterodera glycines
ctctctcactaattgttgcacattccccaattttatttcttccttagtaagtagtattggtgcacaatgcgcacttttctgttcatagccgtagtcgggttgatgttggccgtcatcttggagaatgtaaatgcgactgggaaaaattcgccgacaaagggaaaacagtcgctagacagtccaaaccatgaaaaagaccataaaaatgagcatgaaaagtatgaagcagcttactttcaaagtttgttgtttttttatatgagcaaggtaacatacagaaccatgctaccggtaacacatttattcagcaatcataaaatttttatctaaaattaacatgaaaattagaaaattttataaatatatttaattattttatataacatatatatttatcagaatggcataacattttactcaaataaaagtaaaatttctgttatttttttttgtttcgctccaaatgtgtccatgaccaaaatggcggtgcataaatggcaccgaatcattaaaataaaatttttaacg

SEQ ID NO: 97082 - DNA, 231 bp, Heterodera glycines
agtggtgagagaattaactttcccatcatccccaactcatcatcgctgaatgtattgactaactggtttttctacgtaaatcgttacagcgaatgtctcaacattatctccaactcagcatagagatcactaattgccgtgttcatctactatatccgatccatttgttttttcatttcattaaaacataaaatgtacataatttttgtttcaattaaaattgaggtttag

SEQ ID NO: 97083 - DNA, 251 bp, Heterodera glycines
cagtgatgcagggcagtgagtcatcaccaagactaaagctgtacttttctcaacaattcagtgactgatggggttgtgatgacggctgatgaaactgaaatttcgcaacagacttggcgcccacagtagaaaagaatgattgacaaatgtgcaataattttaacatccataagttaatagtttccggattatgaactatggactgtctcgtaattattgtcgttttttgataaagtgaaaaattcaaaaaa

SEQ ID NO: 97084 - DNA, 402 bp, Heterodera glycines
gagtttcgaagccccagagaaagagttcgacattttgaaaaaagcttggcctagacttggttccatgttggactggacaaaaatccagttcaggaaaaacccggccccccggggtccgggtccaaccaagcctgggacccaagtccaggtcgaaaactgtactaagaaccgtttgacaagattgtttgctttttcgaaaataattggtttgcatgcattatcacttttgtaatccaagtgcgcttaaggccttccaatgtttgtgactgagtacggttgctactcggctgacggcaatgaaaaagcaaatttggaagagttgaaaaagtggatggaacttttggacggctatggcatttcctacgccgcgtggcacgtggcagacattggcgaacagtcgtc

SEQ ID NO: 97085 - DNA, 383 bp, Heterodera glycines
gtcgagctccgccgagacggaccctggcattgtcagttttgccgaaatttggacaccgatcctgcaaaatttgggcgcaacattagtcggcattggtcctggtgaaccgtttgcctccaaatcgagcgctaaccttgaggaaaagatggaattctgttccaaaattgagcctcccgttgatgtgctgctggcggagacggactgccaggccgaggtggccgagctggtcgaggaacggggcggtttggccgtgtccagcgaatgggtcattcaggccatcgtcactgtgttggctgaatgaacatccacagttttggtggtggatgacggcggcaatggactttgactctacttgaacacacctaacaatatcataaaccatt

SEQ ID NO: 97086 - DNA, 213 bp, Heterodera glycines
ctggaaaaattttagtgatttttaatgcgatttgttaacagatttgtccacgaaaatggccaaatttagcgacttctagcatattttcaagaaaattaaggatttttaggtccggcggtgccgataggcgccgccgggaaatttttaaaaatttcaaggcaatttattaacagaaaattgtataaaaattgctatttttttgacaaaaaaatc

SEQ ID NO: 97087 - DNA, 526 bp, Heterodera glycines
tacgccaagctctaatttcactcactatagggaaagctggtacgtctgcaggtaccggtccggaattcccgggtcgacatcatcatcatggccgctaatatgactcactataggggcaaatgcgattcggtggtgttgctgcgccgacaaaacattttgatgatgcaacttaggaaaatcagcagacaaaaccgggaaatgagggaggtcattgcgcaataccagcagattcccaacctcttgcaagcaataaagtcagtattttatttaccaacaaatttcataaacaaatttaaaattaaaataatttaaattcataaaaaaaaaaaaaaaaaaaaaaaaaaaaaaaaaaaaaaagtactctgcgttgttaccacttagtagtagtaggcggccgctctagaggatccaagcttacgtacgcgtgcatgcgacgtcatagctcttctatagtgtcacctaaattcaattcactggccgtcgttttacaacgtcgtgactgggaaaaccctggcgttacccaact

SEQ ID NO: 97088 - DNA, 547 bp, Heterodera glycines
taaattctttctttttaaaaatgctttccgctgctttttttatgcctttgtttttcattgccattggccaattcctccaaatttctgatgccattgactgtttttcttgcgcatcgccggcacttcacaaccaatgggaggcaactggacttcccgaaattccgccgcccgaccgtttcgcgttccacgcgtgcgatgggacgggcactgactataaaccgtgtgccgatgtttgcatggaaatgcttgttgctgctggcaatgagtacggtgttgtgcgcgggtgcatgtccgacttttaccatggtcaaacaacgtcgacaaacactgacaagtgttactttggtggatacccacacaatgtgaccatttacgacccaaccaatggtgccaagacgtacagtcagctgtacgtgggcgtgcgctactgctccaccgtgaatggcgcgtgcaacaacaaattcatggcaaagaaagaagcggccgaaggaagcgggcttttgccgaaacattttgtcgtcagacccaacaaatgccaacaacggct

SEQ ID NO: 97089 - DNA, 541 bp, Heterodera glycines
accatgattacgccaagctctaatactcctcactatagggaaagctggtacgcctgcaggtaccggtccggaattcccgggtcgacatcatcatcatcatcatggccgttaacacgactcactatagggcaattggaatcttttccatccattcatttctttttattttatcccaatttttagttttatttatttttaaatagcgcataaaaaatgacgacaaattgggagaaacttagaaaggaattaaacgaaacggaagaaaagggaaaaggaaattcgaagaaaagaaagcgaaaagtgagtgaaaattgtaacaacaaatggaagaaaatgcgagaagaaattgagaagaatgaccagcagaagccggaaaaggcaattgaaacgacaattagcgcaaagaaaattttgatggccatcgattgcgaatatgttggagttggactgaatggagcggagaatatgttggccagggtatcaattgtcgacgccgaaggaatcgctgtctatgacaaatacgtcaaaccgaccgaagaag

SEQ ID NO: 97090 - DNA, 383 bp, Heterodera glycines
gttccattggaaagagcccaaaaaagcacatccctttcccgattctgttgtactaaagattcctggcccaaaatacaattctttggtggcacaaaatgggagggaagaacaaacggacaacgcaatggaagaagaaagctccgattatctgatcaaagcgcacaccaatgagattcttttctacaaaaactttccgcgcttcgacgcgtccctccgtctgcccaaattttacttcggttccgactacagtcccagccacaataatgggttgatcatcatggaggacctgagcagccgcgcttcgtcccttctcactttgccaggcttcgacgatgcccatgtgctggtggtcatcgacgaactctccaaaatccacgcaattt

SEQ ID NO: 97091 - DNA, 251 bp, Heterodera glycines
caaagctgcgtgaagtcggcctgcaaaagcacttgcggcgacaatttgtcggaaccgaagtgcacggaatgttacgacaaaccgcacgaatgtgcgccaaaataacagaggacggaatgccaaaacttgaaatggaaacgaatgacaattaattgaggatgaggaaaaggaaaaggagcaaattaatcggaattaaatttaattatttttcgtattttaatttgtggaattcaaagaaaatgattaaacaa

SEQ ID NO: 97092 - DNA, 409 bp, Heterodera glycines
caaagattattcccagaattgcaaactctctcaagactttctgatcctttcgaaagcgagttcagatcactgcgccagttctcgcaactgcctgccattgatgtaaacgaaaccaaggaagcgtttgtagtccatgccgatatcccaggcttcacacgtgaagaaatcgacatctccctcaacggtccagtcctagctttgaaaggaaacaaggaaaagaaggaagaaaagaaggatgaaacccagcacatccaagaaagaatccagagctcgttctacagaagcattacattgccagaaacttttgcacctgaaaatgtaaaggcttcattgaaggatggcatcttggaaatcacaattccaaagaacgctgtaaccaaaaagattaccatttcataaataaattatt

SEQ ID NO: 97093 - DNA, 330 bp, Heterodera glycines
  unsure (1)..(330): unsure at all n locations
acaaatgctcgatatcgcgttatcaatgcgaccatggaatttagcgtcaaggagcctttgacgattaaaagaaaatcggcaaaatcacgggaatgcttctcgagatggaaaatgccgagattgtgttgttgcttggagacgaggaaatgttgcgtttgcgcgtggacgaagcagcaacagtgctttaccaggccacgtgtcataaggaggcgcagtaggataaatgaagtggatggattggatgaataaattgatgagtaaaaggagaaatcaaaaaaattgatatgttatttggcttctttgtctgagtaaatgcttatctgttaaaan

SEQ ID NO: 97094 - DNA, 855 bp, Heterodera glycines
tgtgccgactccaagcaactcatctgctcgctcgactctttctgctttttgcgctttgcactgctttcgttagctctctcactgctgttgccccgccattcggccaattgtccgtttccgacaccaatttggtcggcgccaacggacaacccgtacagctgatcggcaactcactgttctggcaccaatggtacccgcagttttggaacgctgacacagtgaaggcactcaaatgcaattggaatgccaatgtcatccggggggccatgggcgtggatgtggcatcacagaacccaatcaaagactaccaaaatctgatgtacactctccacttttacgcgtccagtcacttcacgaatgatcttggtgccaagctcaaaacagccgtgaacaacggtttgcctgtgttcgtcactgagtacggcacatgcgaagcgtcgggcaacggcaacttgaacactgactcgatgtccagctggtggactctgctggacagcttgaagatttcatacgccaactgggcaatctccgacaaaagtgaggcctgctcagcactgagccccggtacaactgctgccaatgtcggtgtttcgtcccgttggacatcctccggaaatatggttgcttcgtactacaagaaaaaatccaccggcgtaagctgtagcggctcaagttccggcagctcttcgggctcgagttctggctcttccggttcaagttccggcagctcttccggctcaagttccggcagctcttccggctcaagttcgggctcctctggttcgagctcagggtccagctcgggttcgggatccgccagcatctctgtagtcccatccaacacgtggaatggcg

SEQ ID NO: 97095 - DNA, 456 bp, Heterodera glycines
ctcctcatttaccaacaaattcacctattagcgaagccaacaattattcataccttccattgttattgctccaaaaagaagaccaaaaatggaagcacccgctgaaattgacgaaatatacaggccacatgaagccagaattcacgaagccttttttaatacgctttccaaaccaattcatagcaaaaacgaaagaaggaaccgagcagaaggaatcttcacaacatcggaaagtcaacaggacagggaaagaatacacgtcacatggcgccattttggtcaaaagaccaagttcttccttgaccgtaatgaacatgatttgtttgaggcgcttcaccggaaaattcgcagtgaattgccaaattttcggggcaccgcttggctctccgatatccgcggcagacagttcttctccgctgttgcggccggaagagagacaacgcgaagaaaatttcc

SEQ ID NO: 97096 - DNA, 513 bp, Heterodera glycines
ccatccatcgggcggcgggtccacaattgttggaggaatgccgaacactgaaagggtgcgaagtcggcgaagcgaagatcacaaaagcgtataatttgatgccaaacatcaaagctatcattcacaccgtcgggcctcaaattgggactgaagtgtcggacgaacagtgccgacagttgcgcgactgctacgccaactcgctaagcctggctcgcgacaacaaattgagatccatcgcttttccatgcatttcgaccggagtttacaacttcccaaaaaaaggaagcctctgaaattgcgattaaaactgtgagagattggctgaccgaaggccaaaacaatgaaaagctcgacactgtgattttctgcgtgttcggcgatgatgaccttggattttacgaaaaaaacattcctcaatttatcctatgaagattcaattgaaagaagggatgaaaaactcagtaaaataatttattactagtaattttctaaaataaaattctgaatttctta

SEQ ID NO: 97097 - DNA, 786 bp, Heterodera glycines
gtccttctactatgtgtgagaagcgttagccatcactttgaaatttaaaattgaaatttccatttttctccacccatccaattcgaatggattcgctcaatcgtgagatcaaagatcgggtgcgcgattcgcattggctcggttcgtacggcgacagtccgcacgcgacatttagcgacattgtgatgagaagttttgatgaggtgaaaaagtctgggagaaatgccagtgcctgtcgcttctatgacatgtatcacccggaaattggcattcttcgcaagtcgaagagttacagcgcattggcaccgacaaacgcaatgcgattgaaggaccgtttggtggcacccgacctaagaccttttcatccgtacaaaccgaagcggaatgaatggaagacggagcttgaaaaattgcaccatggaacacatgcaaaactgaacattgcgccgtcgccgttccttccgccattgcctcccacttcgcgccgtcccttccaagtgccggccgatgcgactcgttttgagaatttctgtatgtattggggaggtcgggcgcgtggactcgactattcggagccatttttgtacgaaccgcagagagataactacagtattatggaggacagacggtaccatcgactgtactgggctcagcatatgattcccagccaaccgtcggcacggcatggacgacaaattatgctgagtgcttattgaaagaattggagggaaaacaatgatgcgctatgcgtagatagaagacacatcaaacaccgagcactaattt

SEQ ID NO: 97098 - DNA, 542 bp, Heterodera glycines
accatgattacgccaagctctaatactcctcactatagggaaagctggtacgccttccgtaccggtccggaattcccgggtcgacatcatcatcatcatggccgctaatacgactcactatagggggttgttgattacttacgaaagcaattaaattatcccttttcccgtccgacaaattgtgaaattaaaaaaacaaaaataaatgacgactcaacaacgaatatttgggaatcagctgctttttctttgcatttttcttattggagttgttttttttcctcttttctgctgctgttgcaaatggtgctcatttagttgactcaagcgttgatcaaattggtcgtgtacagcacaatcataacggcgacataaacatacgcagagggattgaacgcttcaacgacaatcggatggcacaaaatgaattggactttttgcacatctgacgagcgaaacgtcagcagcacacaaagattaagacgcattaaacactaattacaaaaattgattttttacttccgttatttatttttccttca

SEQ ID NO: 97099 - DNA, 388 bp, Heterodera glycines
caacgaaaactgacgggaatggtgcgggacggagtcaattcggcctcgcgctattactactcacaaatatgcgacgcgaacaaacaaaacgtaatagacatccttttgggacaacagagaacagcggaataacgcagaaaggcacaacccacttcaaaatgttgtaattattccaattttttactattttgccctcattccaaagatattttcattctgtaagatacttgtgttaattatggcaaatgctttatctgtgcctgtgatactttcccgataaaccgtcattttgtggccagttgctatcagctttaacctttcatttaaaacatgttctctttgttttgtcttgcataattgccaaagtataaatggtggaaagaaaaaa

SEQ ID NO: 97100 - DNA, 393 bp, Heterodera glycines
atgttacaaaaatcttgagttaaaattacgggattttgtataggctcaccctaaatcatctcgtcttttttacttcaagcggcaatgacccaatcgccccgtcctgcttatgtcagttctttgctgttgctcttccccatctttttgcttccctatgccgtcatatttttcatcgtcgtttccttctttttgttcctccattttcgtaaccttccttcacctgcgaacaatgtggccaatttcttccgcggttttcacctcggagggcatcgcggaagtcccacaaatgctcccgaaaatacaattgcttctttcaaacaggcactggcggagggcgtcgatttcgttgagttcgacatcggtctaacggctgacggagtgcctgttctaatg

SEQ ID NO: 97101 - DNA, 438 bp, Heterodera glycines
tggagaaggctgctttgcgtatcgcagaagggaagtggttgaacagcggacagacttgcctggcgccggactacgtcatgaccacggccgagatgaaaccgaagctggtgaacgcactgcagaagagcagtattcgagaatggtcaatcaacttcatttcgaccgagtgaaggcgttgctggacaagactaatgggaaagtgctgtacaagaatggggagccggaccgagacgatgtgttcattccgccggtcttggtggatacggacttgaaggacgcactgatgcaggaagaagtgtttggacccgtgctgcccatcctcaccgtgaagggacttgacgaggcgatggacgtgatcaacgacggagaaaagccgcttggggcgtatttgttcacgaacgaccaacaaaaggtggacaaatttttgaacgaaacttc

SEQ ID NO: 97102 - DNA, 188 bp, Heterodera glycines
ggcagtgagaacaagcggagaaatggggagatggacggagagtgctttgtggacaaaatgagtggcaaatgggatagtagccaacaataaattcttttgctgtgtaaaaggtgttcgttttcaaaatctgcctcattttatttgcctactgtatgtatttaccccttctttctgttgttacggtgtgt

SEQ ID NO: 97103 - DNA, 542 bp, Heterodera glycines
accatgattacgccaagctctaatattcctcactatagggaaagctggtacgcctgcaggtaccggtccggaattcccgggtcgacatcatcatcatcatcatggccgctaatacgactcactataggggcatttttcttttctttcttttctcatttacattgcgtttccgcaaaatgtcaaatttgaattttgaagacaatttgcaacgcgtacaagtggaaattcaatggaagcaatgcctttgtaatccgatcgtcgctccgttcgccgacgtcggctcttacccaattttcactgacgaattcaaagggacgcgcaagtgcactttggatgtgtacgttcagggaaacttagagcatttggacgacaaagttgttttcctcaccgttcatgacgttggcaagacgtatttgtcttgcgtggaccttgccaacagtccgacgctctctccgctggtcggtcagcgtgccgttttcctccacgtttctgtgccagggcaagcgcccggcgctgaaaattttgtcggagacttcccctcc

SEQ ID NO: 97104 - DNA, 424 bp, Heterodera glycines
accatgattacgccaagctctaatactactcactatagggaaagctggtacgcctgcaggtaccggtccggaattcccgggtcgacatcatcatcatcatggccgctaatacgactcactataggggtctcatttacattgcgtttccgcaaaatgtcaaatttgaattttgaagacaatttgcaacgcgtacaagtggaaattcaatggaagcaatgcctttataatccgatcgtcgctccgtttgccgacgtcggctcttacccaattttcactgacgaattcaaagggacgcgcaagtgcactttggatgtgtacgttcagggaaacttagagcatttggacgacaaagttgttttcctcaccgttcatgacgttggcaagacgtatttgtcttgcgtggaccttgccaacagtccgacgc

SEQ ID NO: 97105 - DNA, 226 bp, Heterodera glycines
taagcattttaaatttaaatttatttaagaattaaatggatttaagagtgttttttaaatagttaatcgatttccaagagtttttttatatgctattttagaatatattaaactaaaataattcattttgaaagacggaaaatcaattagatcttattttacaaattccgataaaaacttactcaaaaatggaatgaaactgagaaagtgtgggttggcaaaaggc

SEQ ID NO: 97106 - DNA, 265 bp, Heterodera glycines
ggactcggaagcggtgagaaatgttcacatttatattttaattacaaaaccagcggcaagaaaatgtgggagggaatgattggctattcatagtttgattctcttccacttttagtcagaagattctcacccgctgctgtggcgtcccgaaatactcaaaaaacagcgtttttaatcctgttgttttaattttgcattatacatgtttttaattataaatgaacaaacccaaaaatcacaaacgcacaaataaataaatatggac

SEQ ID NO: 97107 - DNA, 271 bp, Heterodera glycines
  unsure (1)..(271): unsure at all n locations
catttgcgggctgcccgagctgtacgattgggttctgaccgcaacacatccaaatgaaatggaaaatgaccgaatcccccgttacatcgcttttctgatttggtacccgggtgtcatcacgcaaatcgtcctcttttcttttgccgacaccccatcgcagaaccgttacgaacttttggatcgacaaatttcgcacatttctcgctgattctttttcattttccaatcctatagacaaataatgcttttaaataaacatattaagttttan

SEQ ID NO: 97108 - DNA, 166 bp, Heterodera glycines
gaatgtcagtgaactcggaatggtcacacagggcggcaaagtggtgtgggcaaaatacgctcaagtgactaaccatcccgagaacgacggatgcatcaacgctgtccttttgttgtagagcgaccttttttgttatttttttctttttaaaaagaatttgttaaaa

SEQ ID NO: 97109 - DNA, 540 bp, Heterodera glycines
accatgattacgccaagctctaatacttctcactatagggaaagctggtacgcctgtacgtaccggtccggaattcccgggtcgacattatcatcatggccgctaatacgactcactataggggatttcactccgtcctatgagtcttcggacctccgtgaagggatggcccttcagaatgtccaggcccgtgctcggatggtcctcgcctatttgcacgcgcaactgacgctgaccaaagagcggcggaaagggtctttgttgatcttgggcgcctcaaatgtcgacgaaagtttggttggctatgtcaccaaatacgattgttcctctgccgacattaacccaattggtgctacctcaaaggatgatttacgtgagtttctgtgccatgcgaatgctaatcataaattcccacacttacaaagtgtcatccattcggtgccaaccgctgaattgcgtccactgaaggacggccaaattgtgcagacggacgaagccgaaatcgggctcacctatcgggaattgtccacttttggcaaa

SEQ ID NO: 97110 - DNA, 550 bp, Heterodera glycines
tttccccaacctcatgtgcccagcgatcacattccgatcatgtcgcaatatgccgtcattccaccaaacttccagagatctttgccgcccattcaccattacggaggctccgcacattccggtggttttggtgcgatcggacggtaacgacggcaattttacaacacatgtgacagttttcatttttaaacgttgtcaattatgtaaattcatctcttatcactcataaaccaaaagacatgttttatgtatgtttgttgatgatgctcttccacacagactaatggtattgacacgttttgtgtacatactttttcttctttcctcgattctttctcctcaacagaataatatatataaaacagttaattaggagatggttgatgggttgggatttattgtaactccgagaaatttttgccatctcaaaagaatccgtttttcttatcccctcctcatcttcttctgctgctgatcgtactcaaagtccattcacctcatatgtgttccattcgtttgtgcttttccatgtaaaaaacggatgataatt

SEQ ID NO: 97111 - DNA, 394 bp, Heterodera glycines
cctaatttgaaccgcagttttattgatggaaacaatttgcagcaattctcaagaagtgcttcttgtcaacaatttacaacattagcgaagactgtgtctccaaaagtagtcctccgcctaagcagcccccgtccgccccgactcgggcatgggcagtgacgaactgtcgggtggatgggtcgggagatttatgtgccaaacattggacaagtacataaactcgatgaccatgctaatgagtccattctcttctctcagcattgtgcccgttttgcctgcctccctcccggcctcttctgtctgcaaatgggtcgacttcaccaacaaacatgggttcggcgtcacttttcgtgatggcactcggtcgttgctattcaacgatcagtcgtccctt

SEQ ID NO: 97112 - DNA, 394 bp, Heterodera glycines
tgaatccgcctaatttgaaccgcagttttattgatggaaacaatttgcagcaattctcaagaagtgcttcttgtcaacaatttacaacattagcgaagactgtgcctcaacaaccgacagtctccaaagatagtcctccgcctaagcagcccccgtccgcccacgactcgggcatgggcagtgacgaactgtcgggtggatgggtcgggagatttatgtgccaaacattggacaagtacataaacccgatgaccatgctaatgagtccattctcttctctcagcattgtgcccgttttgcctgcctctctcccggcctcttctgtctgcaaatgggtcgacttcaccaacaaacatgggttcggcgtcacttttcgtgatggcactcggtcgtt

SEQ ID NO: 97113 - DNA, 268 bp, Heterodera glycines
  unsure (1)..(268): unsure at all n locations
ttattacagcttttcaatgaaatggcaaaagctcatgaagtttggagaccaatacatgaatttttatcggtttggccctcaacttggtctcggcctttgtttgttcacttttgttggtgttgtgtttcatggcgagcatatgaagctttattggaacggaaggatgaggaaatggtggtacaattggaaggaggactaacaaaccattaattaattataaatgatcgtttttattttttctttgaaatgcaataaacaagccatcnnc

SEQ ID NO: 97114 - DNA, 494 bp, Heterodera glycines
tcccaacccagtagcttatagggtgaccgagcacaatcgcctcgcaacaaacctaccggcgccatccctcgggccaccctccaatcgtctgttccggtggtgggcccttcggtcacttgtcaggcgcgacggctttacgtcgggaacattccattcggttcaaatgaagacgcaatgctggactttttaaccaacagatgcatttgtgtggtttggcacaggctccaggaaatccggtcattgcgtgtcagataaatttggacaaaaacttcgcgttcattgaattccgttctatcgacgagacaactgctgggatggcatttgacggtataaattttatgggtcagcaattgaaaatacgacgacctcgcgactatgtggctccaaccgctaattacgaactgcttggcagaatgccagtctctaacattgttgtggacagtcctttcaaattatacattggggggactccctaaccatttgaactcggaaca

SEQ ID NO: 97115 - DNA, 809 bp, Heterodera glycines
gcttttggacaaaagggaaaactgttggctgtcattggagatgaagacactgtggtgggctttctccttgggggaggcgaactattgaactcagagcgtgaaacccccttttggcgttgtcgaccccgacgcaagcgtcgccgaaattgaggacgcattccgcactttcatgtacccgcagagacattgcgattattctgatacaccaacacttggcggtagcatgatctcgataccaaagtggcaccagacacagtggctcaccatcccggtcgtgctcgaaatcccctccaaagaaatgccttatgacgcgtccaaagatagcattttgaaccgagcacgtggcctggtgaacactgacgacctcaagtcatagaagaagacattacaaaaaacaaattctcctttattagtcaatgaatgtgtttaattaattatgggaatgacgagaacctacatacaaatttgtacttttggtcttttcttggtactccaaaacccagacattatgcacaacaaaatttggttttgatgcatctatcagcgattgatcccttcagcacgttgaatagtaacatttattcccaaattcccgttttcagcaaaaaaattcgcatgatttgtgtcaaaagccaaacagtctgattgagaaattgcggcagcgaccccctcgtgaatacttcgtggactggcttcccagcaaagtcgacgccgattgttggataattccaatttgtaaacgaaattttcggcttcctttttggtcccaattagttgaacaactgcgtagaacatttggtagctttgac

SEQ ID NO: 97116 - DNA, 535 bp, Heterodera glycines
aatgataaaatatcttatccaattatattattaatcttatttcaaataaatattgtcgctttagtcaagcggtggtcgcttgtactgccgaagacccgcaagcgcaactcgtcagtatttgggatgaggccgaaaatcggcttatttcacaaattattacccggccgcttgcacgttcacttcagacctataatttggcatcaccaattttcaacactttttggatcggtcttcgccgtgtccttgtcggaaatcgctaccaaagcacatggacaaacggttcggcagcaatatttggcaatgttcccgaaattacaactgctgcgtcaagaaacacatcgccatgggcagcaggacaaccctcgggcaccaacaaatacactgacccaaccggcgcaaaagaggagtgcgtgcacatgctaaatgcagaaggccgatggaacgacgcgcgctgcgaaattcaaatgacaggcgcgatttgcaaaaaatcaaatttttaaatacaattgatggacgaattttaatgggcataagc

SEQ ID NO: 97117 - DNA, 383 bp, Heterodera glycines
tttttttagctctctggcaccaagtcatcaagtggtaaagcgtcattgctcctgtggtggcagttggggcggctggggtggcggcggtggagcatgtaaaacaaattttttatgaaactaaaactcaaattatggtctggaacagaccgggccgggattggatttgagaaatttagggtttcacaaaatccaattctaagggaataaaaaattgaaatggctaaattaggacgaaatctcattgtttttctacggcataaattatttcggggttttttaggatgcacttggcactcacaatttaaggacaccgagcatatgggttgttgctataatttcaggcggtgaattcggttctggaatagaccgtctgaagtatgcga

SEQ ID NO: 97118 - DNA, 283 bp, Heterodera glycines
ccgttctttaggcaattgctaattatgccgggcacatgtcgttcaatttggtgacgcaaaaggtggacgagcggagaatggcaccgcaagcaccgctgtttaacaaattcaacggacacaatttgaaacagcaggacacaatgttttttgcatttgtttgcagttgtccctttgcgttgaaaagcatgcgtgacccaacgatgagttcttgcccatgaacacattcttaaagaattaattttaattttaaaattttattgggtaaataaatgcattaccaatc

SEQ ID NO: 97119 - DNA, 474 bp, Heterodera glycines
ttcattttcaaactactctctctcactaactgttgcacatcccaattttatttcttccttagtaagtagtattggtgcacaatgcgcacttttctgttcatagctgtagtcgggttggtgttggctgtcatcatggagagtgtaaatgcgactgggaataattcgccgacatatggacaaactccgcctggcagtccgaaaggtgggcacggcagcaacaaatcgccaacgacgccgcacagtgccggttcgccacacggcacgcagcatggtaaccaacagaaccatgctaccggacaaacgccgcctggcagtccgaaaggtgggcacggcaacaacaaatcgccaacgacgccgcacagtgccggttcgccacacggcacgcagcatggtaaccaacagaaaaatgctaccggacaatcgccgccagacagtacaaaacgggaaacagaacttataattgagaaagtttca

SEQ ID NO: 97120 - DNA, 553 bp, Heterodera glycines
tctctctcactaactgttgcacatcccaattttatttcttccttagtaagtagtattggtgcacaatgcgcacttttctgttcatagctgtagtcgggttggtgttggctgtcatcatggagagtgtaaatgcgactgggaataattcgccgacaaagggacaaactccgcctggcagtccgaaaggtgggcacggcagcaacaaatcgccaacgacgccgcacagtgccggttcgccacacggcacgcagcatggtaaccaacagaaccatgctaccggacaaacgccgcctggcagtccgaaaggtgggcacggcaacaacaaatcgccaacgacgccgcacagtgccggttcgccacacggcacgcagcatggtaaccaacagaaaaatgctaccggacaaacgccgcctggcagtccgaaaggtgggcacggcaacaacaaatcgccaacgacgccgcacagtgccggttcgccacacggcacgcagcatggtaaccaacagaaaaatgctaccggacaaacgccgcctggcagtccgaaaggtgggca

SEQ ID NO: 97121 - DNA, 298 bp, Heterodera glycines
taggacaattaattgcaaatttttacattcatttcaggaatactttgtacgacagtgaaatttttcagttgcaattcagatttgacgaccaatacccattctcatcgccagaagttatgtttatgggtgaaaacattccggtgcatccccacgtgtactccaacgggcacatttgcctgtcaattctcagtgacgattggacacccgtaactttggcagttcacaaaatgaccgacaatcctcaaactgtttttttctttttaggctctcagcgtctcttccgtttgtttgtccattc

SEQ ID NO: 97122 - DNA, 390 bp, Heterodera glycines
caccaaaaagaccctgaagtttcttggagaaatgacgcaactgagggtgtgctgggcaagctcaccacgacgatgggcccttgtttctgcaaaggaacagcttacttaatacattcgttcctcaacgcttcacacacgggaggtatcgcactgattcagtcgatatgtcgccaaattgaccaaaaaaagtctcccatcacaaccagcgagtgtgaaaaatttgaatcaaatcttttcggttccaccatcaaaatggctatcgaattaaccggggatgatgtcatgtgcgagctggttgctggaccatggtcaatgtctacttttttcctttttttaaagtagtgaccgacaaatggggttttggaatttttttaaattgaacggcgccga

SEQ ID NO: 97123 - DNA, 393 bp, Heterodera glycines
caacaattacaacgtgatcaagtcgggaaacgtgaaaatgacgacaacaaatccaaattatgacaagccgctttgcttgaatgggctcagtcaatacgaggcgttgccctcctcgttgtgcaatctcaatttatgcaatttcatcggccgcaatttgtgcgaattgttgcaacagccaggcaatcacacggtgcgcgagatggagcagaaagcgggttggaatgccacagttgtcatgcccgattcaccaagaatattcggcatcccttttgtggacctttttgctggagagttcaattttgaatttctgttggaaacggagggcaaagagattgcgcatttggaagtgccgacgaatttggcatttgtgccaatcggaatgcaaaatgagga

SEQ ID NO: 97124 - DNA, 565 bp, Heterodera glycines
tcgcttttcactaaaatttacaaattctgctgtaactcaaaaagctttattccttcctggatatagcatatattttgtatgagtgcgcctaacaacagtccttcgagcatttcttctacaggaacaaacggaattcgtataacacgacagaggagcagtgctcgcattaattggctgaccgaactcaccacgcgcgattcaactccagttacaaccacccaaacttcaaaggatttttctgaaatcagcaaacatttagcgctcgttgaggacgaagacaatattaaaaggattcaagcaaaacgagaaaaagaagcccacgaacgcgcgttggcttttgtcaagaatcagttattgaactcgcggaaagacgactggctccatcaaccaatcgaagaattgcttggctacgcaccgaaatactaacggaatggcgaagcaatgctttgttactgttggcagtacgcgttttgacgctttggtcgaatctctgttccgtagcgatgttctcgatgctttaaagaaactgaaagttgaatgtgtgacaattcagaatggcaatggt

SEQ ID NO: 97125 - DNA, 389 bp, Heterodera glycines
gtccagtcactttgttgatggacttggcaataagcttaagaccgccgtaaacaagggtaatcatttgatattgtatcgtccaaaaccattactgtttgcaaccgtactttaaggtcttccggtgttcgtcactgagtacggtacatgcgaagcgtctggcaacggtaatctgaactccggctcaatgtcaagttgtttgtagcctgttggaccaactgaaaatttcgtacgtcaattggtcaatcactgacaaaagcgaagcttgtgcagcgctcactggcggaacatcggctgccaatgttggcacttcctcccgctggacgcagtctggcaatatggtagcttcgcaacacaagaaaaaatccaccggtttgtctgaccaattaaac

SEQ ID NO: 97126 - DNA, 383 bp, Heterodera glycines
aaaaccgacaaagggcggactattcggactgttgggcaagtcgagttcgatggaagtcagctcaatgtcggaaaagaatttgaaaactccaaaggcatttcgaaagggcgaacacgtgcccagtgaaaaaatgcccggttcaaacgaacggacccgcggaggcggcggcagtccttccccgtttccgtcgtcgtcgcttccgcgcggggggcgcaatccgttcaaagggatcagttcgcgcatcgtggaacgcgtgcgcaggtcgctgtcgcgcagtaaaaagaatttaagccgcgatggaggacaaagtcgggacggaacgccctcacagaacaccatcggcataaaagcaggtggggaagtaagagaagaagtggactgat

SEQ ID NO: 97127 - DNA, 493 bp, Heterodera glycines
  unsure (1)..(493): unsure at all n locations
cctgnattacgccaagctctaatacttctcactatagggaaagctggtacgcctttccgtaccgggccggaattcccgggtcgacatcatcatcatggccgctaatacgactcactataggggcgtatttttttaggtcgattcttaggggtgtgttttttgtttttattgcatttttgttaaggaattttccaaaaaatctcgaaatagtgtcaaaacgccaaaatagtgatttttcactattttagtgacaaaaccccaaaatagtgatttctagtgacgaaaagtgacgtccaaatgaaaaaattttaacgcagagatgcgttttttgagctcctttcttcaaaacaattgttctataaaaaaaaaaaacgactctgcgttgttaccactgctttagtagtagtaggcgccgctctagaggatccaagcttacgtacgcgtgcatgcgacgtcatagctcttctatagggtcacctaaattcaattcact

SEQ ID NO: 97128 - DNA, 480 bp, Heterodera glycines
agcaaagcttgcatcccgccccatggctttgtgcatttgtttagctccaaggtcgaatttctgtgcatataccttttcgagatggagaagagaaggggtttttccggaatgtttttatccggaatggttcccagtgcatgaaatgagaaaaagagacacacactcttctttttatagattccataagcctacccaaaattgggtcgctattcaaaaggaccccctccctcctccataaccttagccgaaattggttttgtatcagcaaatgaaagacgccacaatataatcagcaataattgttttgaagaaaggagctcaaaaaacgcatttctgcattaaaatttttcgattctgatgtcattatcagtcactagaaatcattattttggcgacttcgtcactaaaatagttaaaaatcactattttggcgtttcgtcgctattttttcactatttcgacattttttggaaaattctt

SEQ ID NO: 97129 - DNA, 344 bp, Heterodera glycines
ggttggccctcgcacacaaaatgccccaaaaatgccggcactttgggcattttccaaagtcactgattgatttgccattcctttctccaaattatcccaacggaagtctaacacaacgaattattacgatgccaataacagaaaaaagagtgccgttgaggatgaaacgccgaaaatcgaaaatacattctcgaaatgtgctccgaacgccgctgataattcccgaattggaactgatgaaaaagtggcgaaacagtcgaagaaatgacgaaaagccaaggggagaattaccaagccaaggggaagatgaagcaataaaattattgctgctgaatgatattggg

SEQ ID NO: 97130 - DNA, 497 bp, Heterodera glycines
tcaaactactctctctcactaactgttgcacatcccaattttatttcttccttagtaagtagtattggtgcacaatgcgcacttttctgttcatagctgtagtcgggttggtgttggctgtcatcatggagagagtaaatgcgactgggaataattcgccgacaaagggacaaactccgcctggcagtccgaaaggtgggcacggcaacaacaaatcgccaacgacgccgcacagtgccggttcgccacacggcacgcagcatggtaaccaacagaaaaatgctaccggacaaacgccgcctggcagtccgaaaggtgggcacggcaacaacaaatcgccaacgacgccgcacagtacaaaacgggaaacagaacttataattgagaaaggaaaaccgtcgccagacagtccaaaccataaaaatgaccatgaaaatgagattagtaacctacagaaccgtgctaccggacaatcgccgccagacagtacaaaacgg

SEQ ID NO: 97131 - DNA, 205 bp, Heterodera glycines
gaacgaagggaaaaaccaatggcggagaagaagaatgaagtgccgaaacaaactaacattaagcatcgaattgtaacttttaggtgcaagatgagaccaatccaaccgaaactcattgtcagtcatccaaaatgtcgcctcctttacttgaaatcgaaaatgaactcggacaaaacccaccaaataaagtgaagccttctccgca

SEQ ID NO: 97132 - DNA, 539 bp, Heterodera glycines
gaggaaaatcaacgaaaatagtgaactccactcgaagttattcgacgttgaaaggcgttttgacgaagctgtgacggcattcactcgtcggattgatgaattggagaaggaaaatgacgccctgaaaagtctcgtttccattccattcgatgccgaacagcgaaaagaatttggcgaatcggaaaacactgccccggggcaaacacttcagcagacggaggcaaattcggaggagaaaaatgcgccgtcggcggttgtgccgaagaccgactcggccgatgaccttttgggctgttcctctgcttttgcgaatgaatccgccgatttatgcagcagaaaaccatcggcaattgcaaaagacgaagcggtggaggaaatggcagccgaaaaatattccacggagagaattgccgccctcggagaatcgctgcggcacgcaaaaggacgtgcgacctattacaagcaggaatgtgaggaattgctcagaaaggcaatctgtgaccagcagcgcatcgaagcattggagcagaacattttcg

SEQ ID NO: 97133 - DNA, 586 bp, Heterodera glycines
accatgattacgccaagctctaatatttctaatatagggaaagctggtacgcctttacgtaacggtccggaattcccgggtcgacatcatcatcatcatggccgctaatacgactcactatagggaagcgccaccgaagggtcaatggaacgaaggccgaattccaaactgaaggtaaatttggaaaataaatgctgttccccatttataccgtttcaaatactcgcggtgccacaaaggaaaggtcggaccgccgtgggcggacggcattttgtcaatgccgctgtggagaaaggcgaagcgatcgtactcggagcagccgttgtacagatgcttcagtttcaagagagcggaatgctttaagggtggtaagaggttttgaaatttcacaattaaatttaattgcttacgaatcggtcccgttgctcatcactgagcattcggtattccatgcgcaatgccttcccataacttttcccattgattgagcactgagcaggcgaagaggaaattcctgaaattggaattgaattagaatttaaccattaattagcttagttaaacaattgtatttgtttattattac

SEQ ID NO: 97134 - DNA, 394 bp, Heterodera glycines
gccaaaaaacgaattcaaagcgttggatgccttcgctttgtccgctcacttaaggccgggccgtcatcgatgcgattgtcaggcgcgtctccattctttggtgcgcaattgcattggctgtggacgcattgtttgtgcccaggagggaagcggacggtgcttttactgcggccgtttggtgtgcacgagggaggaaaagacgataattgagaggaaggacggtgagggtttgcgactgttgagatgccttttgaacgacttgcaagcggactacttcagtttggagcataatccatacttgacagcagccgaaagagaggcaattggcaatcggaaggaggaattgagacagctcagtttgagtgtcaaaaggaatattctcgtcgatttggac

SEQ ID NO: 97135 - DNA, 763 bp, Heterodera glycines
agtggatcccccgggctgcaggaattcggcacgaggctcattacaaattcacaaaattctcctgcttattgtgtgcttgcctatgaccacggggatggtgtgttgcgcgagataattgaccatcttggtctcttggaaagtggcgggcttggagcccagcaaaagaaaattggttccgaaactttgccatgccacacgctccatttggacacaaagtattacacatgcgatgtgcctttgctcagttgtcactcatttgtgcgtctcaaatcaatttgtgcagctgaacgacgtagcaatttgtcagtgttcgctgtgctcttttgtgtcactcggcaacagttgacagaagactttctggcattggtatcacaatactcggccagtttggagaaggcggaagtgaaggcacttgttttgcgtgatgatcaaactgaagaagcaaccacctcaatgaataccaatgatgaagtgttgaacaaatttgctctgtcacgacgcatcgaaatcatcaaaatcggacggaaaacgacaaatgttgtggacgatgatgaggaggagggcttggttggcattccgcgaattgtggaatccattgaaactgtctgttggccgaacatgaaactgaagccgaacccggtgaagttttttgagcatcccactcctcttgaaaaatacatcaactccgaggcgtgcgctgatgacactgcggtttttgacatgttccccggttgtgctgatgattttgctccgggaattgcat

SEQ ID NO: 97136 - DNA, 394 bp, Heterodera glycines
gcgaagagctgatcgtcatggaacactttgtagagctgaaggataaaacaatagcagtatacccataaaaatgaatttcgaaattgtcggcccgaagaaggggagttaatggaaattcgatttggtggcaacagcgaagtcttgtgcctttcgttgcgtccaaaatatccattcgacgaaccattgtccgctcggtgtacagccaccgaatcgtccatggacactgacgccagcatttgagagtccggtgaccaggagattccggtcacatcaccatcatgtcgtatcggacttcgaaacgcccttgcccaattctccttgttcggcggaatgtccatttcggggtcggcgtcacgttgtcggacagtcgccggctcttccagcatttgcactt

SEQ ID NO: 97137 - DNA, 207 bp, Heterodera glycines
aagagcgccttttgccgccgcctccgccgccgacaatctcaaaactgcacagaagctgcactgaagaatcatcggctcaaaattcggtcattctctactgagaaaggaaaagcgtagcgaaacgcaccaaatgcattcattcattttaattgtttcattttgcacattttccaactgacttgctcaagaataaagcacacattattt

SEQ ID NO: 97138 - DNA, 387 bp, Heterodera glycines
ccctccttgataatgctcggcattttcgttgccactttcttttcatcgatgagcaatttaatcggcgcctcgcgcgtactcactcgatttgcacaggacaaacttttcggcgctttgctcagaccggcgaccatcgaagtgggctccaaacggaatcccatcatttccgtcattatctcgtggatttgtgtcgtgatggttttgatgatcggagcgatgaatcgaatcgccaaattatcattcccaacaaacacaggaataattagcggaaaaatgtaaaagaaaagctgtgcgatgattaagggaattgtgaaagaaaaacgttttattccgtaatgagtcatttgggcgaaaaattgagtttatttttgtattgttttggatcaa

SEQ ID NO: 97139 - DNA, 198 bp, Heterodera glycines
cgctcgtcctccgcctcgggcgattaatgtggtggcgaacaaagaatggatggatggaagggttttgattgctttggttgaaatgatcgcttatggaacgattaatttgttatttttcatcagttcaatcccttcaaaggtattgagtctcaaggcgcttttttgcctgcttttggttaataaatttcatttctgaaa

SEQ ID NO: 97140 - DNA, 386 bp, Heterodera glycines
gcccaaagttggcacttttgtttgcgggaagaaatgctcaaaaataaggttggcccgttttcttctcaaatggtgtactgcttgaagttgttgctgctgcgcgctttctgagtcctgccggatgccaaactccgcgtcaaagtcgggaaatttagggaatatgggcttcgccgttgccattggccgatggttttctgccccgctgggccgacggagttgatcctctgtttccgcttgcctccttgggccaattgcggtggggccaaatagcggaagcaaatgtgcgtgctgttgctgacgttgaactcgttgcagcactgcacttcgccatcggaaggagcctgccaaaaaatgttcatcgaattactcaattcgctcgcaaatgg

SEQ ID NO: 97141 - DNA, 244 bp, Heterodera glycines
actaaacccgggcgaactcgactttaaggagggccaaatcattcagctcgattcgcaaattgacgagcattggtttgagggcacagtggacggccggaccggctttttccccatcacttacgtggaggtgatcgtaccaatcccttcttcttccacgactgcacaacaataaactttgtagaacaccgaacagatgtttccccctccccccccggatgggcaacagaacaagtcaaacaaactc

SEQ ID NO: 97142 - DNA, 296 bp, Heterodera glycines
  unsure (1)..(296): unsure at all n locations
ggaccattcaatttaattatacccaattaaaaaaagtaaatcctctttaaaaatgaaattttcaataattttattgctttccttggccttttgtgcgttaatcatcgatgcatatccatcgggaaatggtaaagatcttgaagctgacaacgaaaaaacggaagtggccgctatggaaatgacggtcgtcgatgaacgaaaagaaacgaaacgatagattaattaccgtatcattaattcccactaattacaaaacatttactattttttaaataaaatgtttttttttttaaann

SEQ ID NO: 97143 - DNA, 541 bp, Heterodera glycines
gattacgccaagctctaatttcgtaactatagggaaagctggtacgtttccaggagacggtccggaattcccgggtcgacatcatcatcatcatggccgctaatacgactcactatagggctgtcatgccaccgaagggaatccgttcggtcccttttggcgttacgcaggcacacattttgtgggcgaagaatattttggggtgaagacgggcggattcgacacgcaaagggagacaatcagagaaaaatgggcgacggaattccccgcccattcttcgcctgtcctcgctttttcttctgcccccgccgcttttcccgtccgccccgaccaccgtttcatccagcgattcgtccagtggaatgatcgaattaagcaaaaagcgattgaatttgcctcccgcaactttggccacggaaaggcattcgttggcattcatttgagaaatggcagagattgggaaaatgtgtgccaatttctccgggaagaaaatgtaatgggaaaacgacaactgtttgccagtggccaatgcacggggccg

SEQ ID NO: 97144 - DNA, 369 bp, Heterodera glycines
aaccctttgccacattgatggtccaaatggagcaaacgccctgacgcttgcgcacctgcgtcgccggaggtgcgggcggaggagcgaactcgccaatattgccccgttcagctcgcatcggcggtggtccgccgcgctgctgctgctccggcgggtaataatcgccacctccgatgtcgggcgacgaccgttcacggtgagccgagtcctggaactgtggacgaccgccaccgcctcctccaccgccgcctccgtaagcgcgaggcgctcctccgcttccccctcctccatatcctccacctccccatcctccattccaaatcaattaataattgtaaacaatgcttttgtgttaaatgtgttttttct

SEQ ID NO: 97145 - DNA, 384 bp, Heterodera glycines
tatcaaaaatgaaactattctcaatgtttcttctcctgactttggcattcgccgcttttgctgagagcagcagcagtagcagcagcgaatcgtccgaatcatcggaggaatgttcttcagaagaaggcaatcccggtacagaaccggagacgacaactgttgttgattcagacgaaaattgcaacgcgacatcagatagtccaaatgatgagtcatctcctgtgccatcgtcggacagtccaaatgacgagtcatctcctgtgccatcgtcggacagtccaaatgacgagtcatctcctgtgccatcgtcggacagtccaaatgatgagtcatcgcctgtgccatcgtcggacagtccaaatgatgattcatcgtctgtgccat

SEQ ID NO: 97146 - DNA, 400 bp, Heterodera glycines
atataattatcaaaaatgaaactgttctcaatgtttcttctcctgactttggcattcgccgcttttgctgagagcagcagcagtagcagcagcgaatcgtccgaatcatcggaggaatgttcttcagaagaaggcaatcccggcacagaaccggagacgacaactgttgttgattcggacgaaaattgcaacgcgacatcagatagtccaaacgacgagtcatctcctgtgccatcgtcggacagtccaaatgacgagtcatctcctgtgccatcgtcggacagtccaaatgatgagtcatcgcctgtgccatcgtcggacagtccaaatgatgagtcatcgcctgtgccatcgtcggacagtccaaatgatgagtcatcgcctgtgccatcgtcggaca

SEQ ID NO: 97147 - DNA, 443 bp, Heterodera glycines
gacggaagaagtctttgaggtggattgaatccggtgatcttttcattccccaattttgtgctatatgttggttttaaaaaccagtgttgttatttattattttttgtctgtttgtctctctcttaaatcccaaatgctttttgtcatggaatgaaattgttgatcaccaccaataaattattacttctttccaattttgtggtggagatcaaaagtggtggaccaaagtaattgtacctcgatcccactcgcccccaaatttcttttccattttggccctttttaccgtatgattcatttatgtttagttttcttgctcaagtcaaactgattctcggttccattttcgctttgttttcactgttgtgccaatttttgttgttgttttgtgtcttcgtttttgccttttatcaaaagccagccatggacagtaaaaaagtata

SEQ ID NO: 97148 - DNA, 276 bp, Heterodera glycines
  unsure (1)..(276): unsure at all n locations
aggctgtaagaaaaatgctggattcaaaggatttttctaaagcgaatttttgaacggggaaaactgactgattttcagaagattctgctatctcacttttcttctgtatatactgatacaaattaataataaccgaacaaaagttggaaagctttgtcctgtcggatgaggacatggtacattactcagttctcctacgagatttccacttaataataaaaaatgtatttttttggggcttcttataagttcttgattgtattcattgataacntn

SEQ ID NO: 97149 - DNA, 165 bp, Heterodera glycines
caaatgcaaaataacacaaacatcaaatagaaataactaactcatggtcctttcttttttaatataattttaatgccttttcattttgcaagtattttcctgtgataaattttttatgttcaaaaaaaaaaaaaaaaaaaaaaaaaaaaaaaaaaaaaaaatatt

SEQ ID NO: 97150 - DNA, 453 bp, Heterodera glycines
gcattgttgtgatcggcttcaaaccgttgcatttgctgaaggattcgcatcggatgggcgccgccgtttttgtctatcccatcgaatcggtaatctccggcagttccgccctttaccgtgcccttctgaagcgctgtatggacaaacaattgtttgtcctcgtccgttatacgcataaaacgaacactcctccaaagctttgtgcgctcgtcccccaatcggccgaccgaattccgagtggttgtgtgagcagttccatccgaatggatggtcactctcatcagatgcattttttagacactcgcgcgcgaatatttctacgacggctttcatttggttgaaattcccttcgcggaaaagtcgcgatcgatggaaaagcgccttctaccgccagatggcggaattgggacatggcaattggccaatccggaccaagtggaggcggccaagcag

SEQ ID NO: 97151 - DNA, 150 bp, Heterodera glycines
ggttcaatgtttacggagggaatctccgaaggggtgataatccgaaagatattcataaatgaattaaaaataaattaacaaggaaatacgaaataacgttcaatgaaataataaaattcacttttatttaaaaaaaaaaaaaaaaaaaaa

SEQ ID NO: 97152 - DNA, 541 bp, Heterodera glycines
tttcaacactttttggatcggtcttcgccgtgtccttgtcggaaatcgctaccaaagcacatggacaaacggttcggcagcaatatttggcaatgttcccgaaattacaactgctgcgtcaagaaacacatcgccatgggcagcaggacaaccctcgggcaccaacaaatacactgacccaaccggcgcaaaagaggagtgcgtgcacatgctaaatgcagaaggccgatggaacgacgcgcgctgcgaaattcaaatgacaggcgcgatttgcaaaaaagcagctcagtcggttggaagcagcggcacggtcgtgtcgagtgccgtcgttttcccgtcttcggccttcgatttgtgcaatccgagtgtttcgcaatgcaatggttttggatggaccatttccagtggcaaatgctacaaagtgatcgagggactgatgaatgggactcaagcggtggtcgcttgtactgccgaagacccgcaagcgcaactcgtcagtatttgggatgagggcgaaaatcggcttatttcacaaattatt

SEQ ID NO: 97153 - DNA, 384 bp, Heterodera glycines
cctcgttttcttcaattttacactcgacctgtaattttcaattttgaaatgttcacgaagcttttcttcgctgttctgcttcttctttccgtgctcctctcatttgagcatccttcccaaattgccgtggtcaatgcttttccttcggaagtcaacggccgaatgaatgagcacaggcgaatcaaacgcctcagctgcaccaacgacaaatgtttcaagaattgtgcaacggaaccgggctcgcagaaggaatgcgcgagtatttgcgaatgcaattttagcagcgggtcgattaaggcaaaacaaaatgattgaaacaaatgatggagaaagaaaagtgaaatggggagaaaaaggagcgaaaagtggtaggaaaaggaacga

SEQ ID NO: 97154 - DNA, 391 bp, Heterodera glycines
tattttcagcattactctcacaatggcgtcaaaaattaaaccattaatttgtccgtcgatattaaatactgatctgtcagatttggctgatgaggtgaagctgttctaatagcatattataatattcattatgtgaaattcaaatgctttgctttagtgtcgaagacttatggccgctggtgcggattatttgcatttggatattatggacggtaaacggacaaaagcaacaaaaagactcgaaaattaactccctattaaagggcaaacaattgcgacttatttgagtcctttgccatcatttcccttccctcgcattctttcgttttgctttaggccatttcgtgccgaatttgacgttcggacatccgctcattgaatgtctgaggaa

SEQ ID NO: 97155 - DNA, 535 bp, Heterodera glycines
tacgtcgagttggacgaactgaacaaaaatggggcggacggaacgcgcgcgaaattggaatattcgatgcgcgacgcattcggcggattggacgcgcaaacattggacgcgcacattcaaaaggcgaaacggaacggcacagtgttcgacgcattgatacggcacaaccacgtgatgtacgaggcgaacaacaattggcgactgaacgccacgcaacgtgctgttcacctttgtgccttggaatttgttgactacaaaatgtttgagcagtgtttggccaacgacgccaacaccaatgaccaaattcccgcggcaattccgttggccatcggcggtttcgctgtcccatttttggtcacattgtcttcaattctaaccttacttttgccattttgacttggtttctgatcggctattcctttttaaatattattgtttaatgagattaatttcactaattgctcaaagaagaaattaggacaaaaataaataggaattatttaacccataaattttatttataaatgctaatatt

SEQ ID NO: 97156 - DNA, 481 bp, Heterodera glycines
gaaaatgaaattacattcggccactctttccaaaaggctctttttggccggtggtccttcgcccttctcgtcctccttttgctcgttttgttgtcgaattcgcttccgacccgtccactcattcccgccactctcagaatcggccgtttcttgcccaccgtcgtctgcctttttctgttgtttctctgctgccgtgctcttcttctcgtcctccaaaatggtcagcacggcatcgggcaatctgaaaagtgagaaacaattggactagtcactcttgtaaccttttcttaattccgataaatgtttaatcgatgagaattcatactttatggccatgtgtcgaacatttcgccacgggtccgtctcaaatggctcttcctttggtgccgtcgttggtgtcgtccctccgccgccgtttgcgcttgtgccgttgtgtggaggtgccaatgtgctcagtttcttcgctatgctgaacagatga

SEQ ID NO: 97157 - DNA, 606 bp, Heterodera glycines
tttatgagtcgtttttcggcatttgggatagaatttttatttcatgaaaaaaaaaattcttgaaatttttttcagcaataaaaattctgttactaatttatcatgaaatttttgagaaaatcgcttaaaaattttcaaaaatatttatcttgaaattttattataaaaagtgctatatccattccttttaccgtagcccataccgtaacccgtgattacggtgctgttgcactcataacctatgttctctatatcctgtaaattttgtccaggctggttcctctccctgtcctccatgctttgcattccaatctatgccatttatttgtgggtggtcaccgatggcaccgtgtcggagaaattcaaaaaactgtttcgacccgacgtgaatttggtgccaaaatcggacaaagaccgggaggaggagaaggaactgaaaagggcggcaaaattggccggcgttggcaccgccaaatgaacggcacggcacgaaaccgggcaaccataagataaatgatgatgatgatctcggcaaatgcatagaatggaggggcatagatgaatttgtggttaaattttgtaaattcccggatttccaacccccac

SEQ ID NO: 97158 - DNA, 486 bp, Heterodera glycines
aattccgtgtttaatcgttctttgaaagtcacaaaatgtccttccaacaaattttctccacctccgccgttcttttcggcttagtttttattacgtcgacgctttcggccccagcaccaaaaccgcaaaaccaacaacaacacccagcagaaaagcagccattcaatgcttatctaaatcccggctttgacaagcgatctttcgattccttcactggccccggcttcactgggctggacaagcgggccgctttcgacaccggcttcaccaattacgacaaacgcgcgttcgactcgttcactgggcctggcttcaccggacttgacaagcgatttgaaccgtttgatggctatggcttcaacggatttgagaagcgatcgttcgattcgttcatggggcccggcttcaccgggatggacaagaaaaagagggcgttcgattctttcacggggcccggctttacgggaatggacagaaaatgaacac

SEQ ID NO: 97159 - DNA, 400 bp, Heterodera glycines
tttcttataattgggggttttctttctattggctattttgaggcttcaacatcgaaacacttgagttcatgggttggaaattgaactgttgggatgttggcggtcaaaaaagtctccgtacgtattggcgtaattattttgaacgaactgacgctgtgatttgggtggttgatgcttgcgatgtctgtcggttggatgactgtttcaatgaattgcattcactgatcaacgaggaatgtctgcatggagttactctcttagtactcgcaaacaaacgcgatttacccggctcgataaatgctcatgaaatagaaaagattctccggttggaaaagataaaacaccactggcgcgtatatgaagcgagcgcttacactggccacggactgctcgaatctct

SEQ ID NO: 97160 - DNA, 234 bp, Heterodera glycines
tgtgtgtttggatcgctgtgtttccaaatatttggaggtccatgatcggcttggcaaactcctaacgcagatgacgcagcaggacgatcgtgcagttcaacagcagcagcagaatttggcagcggctgctcaaaagatgcacatcaacaaatgattagattgtctcaccgttgatttttgtcattgtttgctcaattcccaaaattaaacaatgctaagcgaaaaagaaaaaaa

SEQ ID NO: 97161 - DNA, 398 bp, Heterodera glycines
cttcagctcacttacttcaggaaccaaggttctttttcgctgacttacgaggcgtccatcacgcgtttattccgtgagggtcgcacggaaacgattcgctcgtgtactaacgaatcgtgtgattttgtcagggcgatgttggacccccagcagaagaatgaggaacgtttgcgcttacttcgactcgcggcagaacgccaccagaatttgacacgggatgcgatgtgtgggaagggcgtggacaggcatcttttcgccttgtacgttgtcatgcgccatttggaagagagttcaccgttcttcgacaagattttcccgcctcaatatttgctgtcaacttcacaaaccccactcaaccaattcgattccgagcaggaaggcatttccatggcacagaa

SEQ ID NO: 97162 - DNA, 420 bp, Heterodera glycines
gacagtgccgtcaatgtcttctggcacagtgtctccccttcgtgacgttcctctgcgtctctctgataagccctcccttccctttccctcccctcgccgtttgaccaatgactgtccttcttccccttctcccgctccgatcactttgtatctccgattggtcagttgggtctgctcaatgggtggccttctgttcggctacgcttcttcctccattaatgatttgctccctttcatcgtccgtgagatgcgtcttggccctgctgaggttggcgtggtcatctcctgctttatggtcggcgcgggcatcggcggttttgttggcggaaggctggcggaccgaattgggcgcaagcgcagtttggtgctgttcgacgcgctgttcattgtgttcagtgtgtgcacttcattggctccaac

SEQ ID NO: 97163 - DNA, 395 bp, Heterodera glycines
tttgtacgctttgttcgatgggcatgccgggcgacgtgcggctgattattgtgccgagcatttcgctcgattgttcgttgctgttttcaagaaatgtgggaaaatttctatgaaacattattttttatatatacagatgtgcccccaaagagtgctatgtcagtattcgagaaatccattcgtaaagtatttgtcgatacttataagggtatcgatgatggtttccttgttgaagcaagacgacagaaaccaacgctgaaagatggtacaacggcgacaaccatttttttattggataaaacgctttactgtgctagtattggcgactcgaaggctattgtttgtcgacacaaatctgaaaagagcacaaatattccgctgcaaatcactgtgga

SEQ ID NO: 97164 - DNA, 220 bp, Heterodera glycines
  unsure (1)..(220): unsure at all n locations
aaaaaaaagtggcggcgccagcgttggcccatcaaccgaatgaccgattgaagcagccgatggaagggacgaatgatctatttattcattcattcttttttgtgttttattattgtgctgttataaaaatctgaacacnaaaaaaaaaaaaaaaaaaaaaaaaaaaaaaaaaaaaaaaaaaaaagaaaaaaaaaaaaaaaaaaaaaaaaaaaaaaaaaaa

SEQ ID NO: 97165 - DNA, 394 bp, Heterodera glycines
acgactgctccgcctgccgtcgcttatcagcgcgttgctggcgttctcgccgtccttgctgaactgctgcaaccaattaaggtcaaagacacacacattgagggcatcacaacggagcccaacccgaatttgaacgcattggaagggggcggggacagcgacgggggaggcgactcgaacggagccgaaggcaatggcgaagaagccggaggaccaatgaaaggcagctcttccggtggtttcaaatccgctggcgctccgcatgttcgtggcggatcgtttatgcgtggcggtcgtggaggaagcgggccgcctggaggtcgtggtggaatggccaatcgtggcggttttggaagcggccgtggacgtgggacgcctggcggaagtcgcggtg

SEQ ID NO: 97166 - DNA, 340 bp, Heterodera glycines
aggggcgtacggcgcagtaggaaaagcgacggatgacgcggcatttacaaccggcgcattgcgacggacctttccgatgttttgccaatttcaattttaaaatcgcttacattcccttttcctttcaaatgatttgtttatcttttttgattctaattttttgctttctctcttcctgaaaagcttttttcctttacggatttttgattttttttttacctgatgaaaagtttattttgtgctggcaaacaaacagatggatattattgtaaatttaatgctacttttaagcattgcattcgttcaggtcttttctttaattaaaaatgaattggataaa

SEQ ID NO: 97167 - DNA, 114 bp, Heterodera glycines
attgctctccgatccgtcatccctgaaaagggccgttgcaatgaaactgatcactttcgtctggacggcaaaatgtggacgcgattatctacgacagaatcggcgaattggaaa

SEQ ID NO: 97168 - DNA, 152 bp, Heterodera glycines
gggggcgtggctgtcggtgcagcagttattgacacaccttttcttttttgaccagcatttatcaaaatattctaatctaatggcactttttcacttaatcattttcattttttcttattgtaattggtagatttaaaaaaaaatttttgtgg

SEQ ID NO: 97169 - DNA, 364 bp, Heterodera glycines
attcaaactcatcaaattcactcaacatcatcaccaaccgtgaacattatgctgaggattgctctactgatctccattttggcactgtttggtgattgcatggacaagggaaaaagaaaattaggaggaataagtattaatgagccaagtgaatatagaaccaaagaaaaagaagccatcgcaacaagcagaaaaggcaaagaaaaagtcggcgaaaaaataagcgttatgaacacagctgaacgcattgaaaaaatggacattgcccaaggcaaagctaaaatggatatagacaccaatgtcaaacccaaacaaaatgaggaaagtgctcctccaaaatatgttttcatttggagcggtaaca

SEQ ID NO: 97170 - DNA, 532 bp, Heterodera glycines
ccgatgaacgcgaaagttcgaaaccaaagcggacgaacgctgcgcgggttggagctcagactgagcaaagacgtggtgtacaagtgggccattcattcattcctttgcccaaaaagttaaattcaacactttttaagggacgacggcatataaaagcgaatttcatattattattttgaattttactgcaactttttgatatttaattcgttcatttcacagatcgaaaacatttgcgggtgccgaacagcgacggaccaccaaaaatgtggtggagagagtgcggctgaaaaaggtgcccagcgggagcgaattcgaaagtggcgcattgcctttggcggtgccttcggttccgccgcgactcgccccaaagtgtcgcctaatcgacatttcgtattctgttgagctgagttgtcagtcgccccctttttgcgtgtcccttcccgtggtcatcggaacgatccctttgttgcctcccaatctccgatcaaacgaccaaaatgtggcacagaacaacggcactaatggagtc

SEQ ID NO: 97171 - DNA, 414 bp, Heterodera glycines
tccttggaccgacaaaaatggcaaaattcgttgccattgctcttctctcgctgaccattgtttcgatggcacctgcaaaaactggcaaaagtcaaacggcagacgaagttgagggatttcgcaatatgaacatcggcgacaacaataaggttgacgccggaaaggagcccgcggctgctaaaggaacgaccaattgatgggcatgagcgttgagaaatttaacgaggagcttgctgtgttgttgccaaaagccaacacttttatggaaaatgctttgagcttcatcaatgaacaaatggaaaaaaatggcattgcaactggcgctgccggggactcgtgctcgaccgggatcccggccaactaggagaccaatgccacaggacggcaccggaggagggaagaaaggatgacgag

SEQ ID NO: 97172 - DNA, 362 bp, Heterodera glycines
aaaccaccaaatgttaagaggaaaatggccgaacaattggtcaccaaagttttgtgttgggaaagcattggaagggtcgacggttggtatttttggaatggggcgcattggacgaagcattgccgataaactaagcgcatttcgcccgtttgaaatcatttatcacaaccgtaaagccaattctgaatatggtcggattgatggaagattaaacgattttgctaattaaatgaattatgttaattaatcagagggtcgcttccgttatgtgccatttgaagaactcatcgaaagaagcgactttttgattctgtcggcgagtgtcaatgatcagacgaagggactgttcgacaaagaaaagt

SEQ ID NO: 97173 - DNA, 353 bp, Heterodera glycines
  unsure (1)..(353): unsure at all n locations
ttaccatcgatcggactgattatgcatatgtcttgcatcaataacaataatttttcttaaatagggccgggagtccgatggaaaacggcggcggtcaatttggttttaattaataaacaaaattattatttaattaatactcgcattattatggaagtatttttatttttcgtttacctttccagcggtatccattcaaattttgctgaactaaattggaattaaatggaaagcaaagaatgcggcgattgttttgctttgtctttggtcggtcggtggtccgntaatttgtgttttctttttgcattatcattgccattaatcgcactttttgccgggggaatctcagcaga

SEQ ID NO: 97174 - DNA, 276 bp, Heterodera glycines
ttttgtattcaccgatcttcagagtaagaggctaatgcccttctgtagatattttattgactgaataaataaaaataaatggtgtacggacatttcgcctactaagccaagaagccctaggcaggcaccagcagcaggtgtagcagaacaactgcggacatgtgtgaagaatgatttagaatagatgaatgttgatgaaaaattcggtgattgttttttagaaagaacaaaggcattggaaattttttgggttttgcggaagtaaagaattcattc

SEQ ID NO: 97175 - DNA, 394 bp, Heterodera glycines
tgagacaggttagttttaccctactgatgacctcaccgcaatggtaattgagcttagtacgagaggaaccgctcattcacataattggtttttgcggctgtccgaccgggcagtgccgcgaagctaccatgtgctggataatggctgaacgcctctaagtcagaatccatgccagaacgcggtgataccacccgcacgtatagatggactttttggaggctgttaaggacaagtttaacaaactgctcactgcttgaagaacaaattgggaaccatttacggcaatctcttatttaattcgatatttttttttgaacattttccgtctcataatcagattttgtccgttttgtctgttccttgcccatttctcatcaatttattgtgcattatt

SEQ ID NO: 97176 - DNA, 241 bp, Heterodera glycines
cgctggaccaagtgaacggactgccggacatggtcttcgcctgcaacagcggccttttctaccgcaataagctttacctttcccactttcgccacgctcaacgaatcggagagcagcggcacttcgccgacttttacaaagggctcggcttggagctgtacggcgccgattgcgcggaagtattcgaaggcggcggcgatgcgtttttctccgacgagcgaacgctttgggccggctgggg

SEQ ID NO: 97177 - DNA, 405 bp, Heterodera glycines
cactttcatcggcaattcaacagccattcaggagctttttaaaagggtcactgagcagtttaacgcaatgttccgccgaaaggcttttctccattggtacacgggggaaggcatggaggagatcgaattcacagaagcggagtcgaacattggcgatctgatcagcgaatatcagcagtatcaggacgccactgctgacgaagacgtaatggaagaagaaaaaagcgaaacggaaggagaaaaagcggacgaagcgaattgagggaggacaattcatttcatttgtcaatttaacattggacaaaatgccaatgaaaactgtgccgatcatttcgtcactgagaattaattttaaaataatataatggaaatcttgattttatattttttaatatatttttacca

SEQ ID NO: 97178 - DNA, 394 bp, Heterodera glycines
ttttgcctttgttctttgctccttttccttctcccctcggctcttttcgctgatggcttttcgtcgtctggccaaagagttgttttggcccgggtgatcattttcaaagcatccgaaaagcaggggacgattgcttctcaacagtgtggtcgggagggcattggtcgtacatgagaaggcggacgacatgggcaaggggggcaatgaggagagtgggaagacgggcaatgcgggaaaacggatcgcatgcggagtggtgggagtgatcagagaggaaccaatgaaagtgaccactgatcagaccaacggaatgtgaaaacagcgatcagcagaggaattcatggacaatgaagaaatgcaatgcattgagtgttctattatttacgtcttttaa

SEQ ID NO: 97179 - DNA, 488 bp, Heterodera glycines
ccaaacatgccaaacagcggcgtacaaaatcactacagaaaacgcgtcgcatattactacgattccaatgttggcaactattattacggccaaggccatgtgatgaaaccgcaccgaattcggatgacccatcacttgttacttaattatggtgtttatcgtcacttggatgtttatcgtcccttccccgcctcccttgaggacatgacccgctttcacagcgaagagtacatggacttcctccgttctgcaactcctgagactttgaagcagttcaacaagcaaatgttaaaatttaatgttggtgaagattgccctgtctttgacggactcttcgagttttgccaactttccagtggcggctctttggcggctgcggtaaagcttaacaaacaaaaggctgaaattgccatcaattggatgggcgggttgcaccacgccaaaaaatcagaggcgtccggcttctgctacaccaatgacattgtgct

SEQ ID NO: 97180 - DNA, 429 bp, Heterodera glycines
  unsure (1)..(429): unsure at all n locations
tgcacatcccaattttatttcttccttagtaagtagtattggtgcacaatgcgcacttttctgttcatagctgtagtcgggttggtgttggctgtcatcatggagagtgtaaatgcgactgggaataattcgccgacaaaggggcaaactccgcctggcagtccgaaaggtgggcacggcagcaacaaatcgccaacgacgccgcacagtgccggttcgccacacggcacgcagcatggtaaccaacagaaccatgctaccggacaatcgccgccagacagtacaaaacgggaaacagaacttataattgagaaagtttcaaatgtggtgcagaacgttgacaacaaacctcggncatctgctgctgcttcacacctcgtgccaccaacaccagggaacagccctactgcgcatgacagtcgccacaca

SEQ ID NO: 97181 - DNA, 388 bp, Heterodera glycines
ttttctgtgtcaaattttcttaaaatgccatctttttcgtctgtttttgtcctttttgccatcgtcgttatttcgctgggaaaggaacagcaaaagggggacgaactgagggcgaaacgacaaatttgccaaggcttttccgcccaatacggcgcatgcattgcacagaaatactcacagtgtgtttggtgtaacgatgcggattacagagggccacaccgatgcgatgagaaatcatcgatgaaaggctgtgttcaaattgtgcagtgaaatcggcacaattaatgacggaacggaggaaatggaacaattaattagtgaaaggaaaaacacaaaagcatcatttattgtttctcgacacgtattggcatagattattgtctgtcca

SEQ ID NO: 97182 - DNA, 257 bp, Heterodera glycines
ttaataaaaataaacaatcgtttatttttaccgtcacccggcggtgatcgaggcgaatggatgatggaatgtgaccgactgctgcgcatcaatgccgtcgatgcgtctgagaaggaagcggcattcgcaggaaaacggctcacacgtctcatcaggccgcggatggaccagcgtcgccggctcttccgctgctccggcgtcgtcgcttccgcgagtggcgtcgtctcctcgtctttgcgcttcacaatgcgcgttgg

SEQ ID NO: 97183 - DNA, 267 bp, Heterodera glycines
gaaaatgcagtaagtagaaaaccttaagggctattgaatgaaaccaaaaatgtttaatttactaaaaaattaattaacgatttttttgttttagaggcacttcgcgaacgtgaagaagaacaaatccgtttattggaatcggaacgcgacaattttattttgttccaaacgttctatttcgattttacgctcctcaatttcaattcgacggctttcaattcgcgtctaaattttaaattaaatatttataataaatgaatatttatt

SEQ ID NO: 97184 - DNA, 432 bp, Heterodera glycines
agtgcggaagaaatcgcacgaaaaattggaaaagtaagggcgaaaaggggatggaggagaagccatttaccaaataaagcacaatcacaaaaaacacatttcaataatcagaaccgtcgaccctccggcgacgtcgtcgtcctttcgcttcattggggcggcaattggggctacgaaatatcgaagacggagagagactttgctcatcagctgatcgacagtgggacggtggacattttgtacggtcactcatcacatcacccgaaagcgattgaggtgatcagccgacaataaattcaaaagggcggcaaaaaaatcaaagagattggtaattaattctaatcggaggtgtgatttaaaaaccaattaattagactttaccgatcaaacaaacgaccactcaaatagctgcttttacgagtgccgctttca

SEQ ID NO: 97185 - DNA, 156 bp, Heterodera glycines
  unsure (1)..(156): unsure at all n locations
cggacaaatgatgaaaatgattaaatatccattcaattgtttcccaacgaagagtaaccaaaagactaaaatcgcnaaaaaaaaaaaaaaaaaaaaaaaaaaaaaaaaaaaaaaaaaaaaaaaaaaaaaaaaaaaaaaaaaaaaaaaaaaaaaaaa

SEQ ID NO: 97186 - DNA, 374 bp, Heterodera glycines
aacaacaacttacatcccgaaattcaattaattccattctaaaatggcttcatcattgattaaattgctttcactgtttctgctcgtcctttgcattggcatggccattgagcagacccaagcttattatggctggggtggctacggctatggctatccctacgggttttatggcaaacggcaagccggttttggtccatccggaaatgttggaatttttggtggcggtggagaaggaaatgctaacggaggaggagaaggaagaggagggccatcgtcaccaaacaatttttgagagagaaaaacaattacaaagaatggagatattcctgatttccaaaaacggatttttgattaatatgataaatcttggc

SEQ ID NO: 97187 - DNA, 411 bp, Heterodera glycines
ttgtctcctccgccgtcctccgacatatttatttgttattttaatttgtcttcaataaatatttatttgttcgtccattcgacatttcggggaccgaacagtcatcgatttttaccatgctcaaattttagcgacaataaatcgaaaaacaaaagcataaacaatcaatcaattagcaagaatgctaatttggtaataaatcttgtttttgtttttgcaggattggtggcgatgaggacgtcgtattggccgttcgaaatgccctcatcgccggcgagacaatgttcgactcgaacattgcgctgctcgtgcaaaatgccgtacaaaatgttcacttccaaaagccaccagctgatgataatgccgatggtggcgcagaacaaatgccaatggaaaccacataaaaattga

SEQ ID NO: 97188 - DNA, 451 bp, Heterodera glycines
accaaagagaaaatgggccaagctctaagtgaaccgatcacaaccaaaaacagcgcctcttgttccaatgatcgttattttgtcggttcgtcttcgatgcaaggatggcgaataagcatggaagatgcccacacgcatttgctcgaactgcccgaagatccgagcacagcttttttcgccgtttttgatggacatggtggcgctcaaattgcgaaatacgccagtgaaaatttgcatacgcaaattgcccaatcgaatacattccgtgagggcagaatatccgatgcattagttgaggcatttttagaattggacgagcaaatgatggccagtgaacagatcagagaggaaatgtccgggagtacggctgttgcggtgctaatcaaagacaattttatttattgcgcaaatgctggtgattcgagggctgtcgcttctgttgatggcaggg

SEQ ID NO: 97189 - DNA, 487 bp, Heterodera glycines
ccggcagtggcttcaaccaatgccatcatagcgggaagctgtgctcttgaggcattgaaactggcatcaaacatctcatgttctctgaacaattacttgaactttgctaacgtggaaggtatctgtttcaacgttgttgcattggaacgtgatcccgaatgtttggtctgcggtcagaaatctgtccaaatgtattccgtgcgcgaggactgtacactctcaggctttttagatgacttgaaagacaaatacccacttcagaatccttccattcgagcgggtagcactttcctgtatgaaatcaacactcttatgccagaaatggagacagcaagtcggaagaatttgtgtaagacgctcaaggaacttcatgtcaccgaggatagcgaactgcttgtagcggatgaagcattaacgagatctattgtttttcggatcgaatattccaaataaattttattcgaatgtccgataaaatatctctgaa

SEQ ID NO: 97190 - DNA, 387 bp, Heterodera glycines
caagttttttacaaccacttattgccaatttaatttcttgcagatttaaagccatccattgcctgccggttctcggcacagcaaagcactaatacggtgtttgactcacttcaaaaaaataattcattacccaaaagttttttacaaccacttattgccaatataatttcttgcagatttaaagctatccattgcctgccggtctcggcacagcaaagcactaatagggtgtttgactcacttcaaaaaataattccatacccaaaagttttttacaaccacatattgccaatctaatttcttgcagattgaaagccatccattgcctgccggttctcggcacagcaaagcactaatagggtgtttgactcacttcaaaaaataatt

SEQ ID NO: 97191 - DNA, 394 bp, Heterodera glycines
attttccttttcagccctttgactttctgtgtccctccctattccattttctgtgccgtcggctgtcagtgctgccaattcaaccacgcggatgaccacctcttctcaatgccagtgctcgagtttctgctatgaaaattgaatgctttcctattgggttcgacgatggcgtttcaaaattcctgagataaagaaaccaaaatgcgaacgaattagcaaagaacggcgtcaaacaatcaaatgtatcagtccgaacacaaaagtcagcttatatgagcggacaggactattcattgaatttggtttaccaacaatttttgtttgaagaagcacaacgatttcaaggacattttcctactccttgtcatttcccgcaatgtaatcggaagcccag

SEQ ID NO: 97192 - DNA, 348 bp, Heterodera glycines
tctgataaattttgagaatggagaaaaacaccgaaagcctttccaagttggatcctagcgaaactttgggaaccgatgccctcttacaattgaaggaactgcgtgaaaaagggaaattggaaagttacggacgaatcactgatgaaaagggggaggagaaagattcttggggccatgcgcttcagaaggaattggacgaaaaggtgcgaaaattcagagagctcaaccgaaagaaatgaacgagaatttaattgattttaccggcattttcactttttcacaatgttagaaatttatagcattattcattttgtttgattcgttcattcggcacaacaactcaaaacc

SEQ ID NO: 97193 - DNA, 726 bp, Heterodera glycines
tcttaataaaaaaatactcttcaaataaataatcattcctagctgcttttggtttgatcacaaatgttcgtccaactcgtcctccttgccatcgttggcattacttttgtcgatgctgccgcaccgccgttcggccaattgtacgtcaaaggcaccaatttggtcggctcaaacggcaaaccggtgcagctgatcggcaattcgttgttctggcaccagtggtacccacaattttggaatgcccaaacagtgaaggcactcaaatgcaattggaattccaatgtcgtgcgcaccgcaatgggcgtggaacagggcggctatctgagtgacgcgaacaccgcctaccgactgacggcagctgtgattgaggcggccattgcacagggcatttacgtgatcgtcgattggcacgcgcatgagccgaacgcggacaaggcgattgaattcttcaccaaaattgcgaaagcgtacggctccaaccctcacttgctttacgaaacgtttaacgagccattggatgtgtcttggaacgatgtgcttgtcccttaccataaaaaggttatttctgcaattcgtgccatcgacaaaaagaatgtgatcattctcggcactcccaaatggtctcaagatgttgacgtggcggcccaaaatcccgatcaaggattcagtaatttgatgtacactctccacttctatgcgtccagtcactttggtgatggacttgcc

SEQ ID NO: 97194 - DNA, 179 bp, Heterodera glycines
aatgtggaaagaggactcggaagcgtcagaagattctcacccgctgctgtggcgtcccgaaatactcaaaaaacagcgtttttaatcctgttgttttaattttgcattatacatgtttttaattataaatgaacaaacccaaaaattacaaacgcacaaataaataaatatggacaaag

SEQ ID NO: 97195 - DNA, 388 bp, Heterodera glycines
ttgttaaataccacgagggttggcaaaaatctggatataaaatcgcaaaaatgtggccataaaatcctttaaatttaaaaccaagataaaaactatttttttatttcgtgcctttcacaccctcccagtgtccaggaaaaaaataatggattgctgccatataattaattgccaaccatataaatcacatttttttaaagaggaaatggaccgcgacgatgataagacagtggaacgcgcggtccgcgagtcaccaatcgttgtttcggaatccagcgccacggatggtaaaattttcaaatcttttaaatttttgaaaattttcaaaaattatacaaaaaatgtttgaaaatttctaacattaattttatacaaacagaggatgatt

SEQ ID NO: 97196 - DNA, 174 bp, Heterodera glycines
tgtctaaacgcattcgctttcttcgtttgggaatacaaaccgtcgatgttggattttggagagaaaaaaatccaaatgataatttatattttggataattaagctttcattttatactctgctttcattgttaattcctgttttttgtacattgataaagttttcataaacatg

SEQ ID NO: 97197 - DNA, 376 bp, Heterodera glycines
  unsure (1)..(376): unsure at all n locations
accatgattacgccaagctctaatcttctcactatagggaaagctggtacgccttcccgtaccggtccggaattcccgggtcgacatcatcatcatcatggccgctaatacgactcactatagggcacggcgtttaatgaggaccacagggcgggggagtctccggccggcggttttcaagaggcttttgagcccggcgttggcccattcaaaccggcgggacgaaggcgacgagcgacggcacaattagcgagacaaatcaattgaaaaattgggatattaaaacccgaattgtaaaatacaataataaaaattaaaaaattgtnaaaaaaaaaaaaaaaaaaaaaaaaaaaaaaaaaattgtaaaaaaaaaaaa

SEQ ID NO: 97198 - DNA, 542 bp, Heterodera glycines
accatgattacgccaagctctaatacttctcactatagggaaagctggtacgcctgtccgtaccggtccggaattcccgggtcgcatcatcatcatggccgctaatacgactcactacagggcacggcgtttaatgaggaccacggggcgggggagtctccggccggcggttttcaagaggcttttgagcccggcgttggcccattcaaaccggcgggacgaaggcgacgagcgacggcacaattagcgagacaaatcaattgaaaaattgggatattaaaacccgaattgtaaaattcaataataaaaattaaaaaatataaaaaaaaaaaaaaaaaaaaaaaaaaagtactctgcgttgttaccactgctttagtagtagtaggcggccgctctagaggatccaagcttacgtacgcgtgcatgcgacgtcatagctcttctatagtgtcacctaaattcaattcactggccgtcgttttacaacgtcgtgactgggaaaaccctggcgttacccaacttaatcgccttgcagcacatcc

SEQ ID NO: 97199 - DNA, 401 bp, Heterodera glycines
gtctttgcaattgctttccacaatttcccaaacgtggcccaggaaggggccaaagaattcgtattttggcactgggcccaactccaattcaagaaccctcacgttcaattcgtgaaactcgcggatgtttgtgtgacgccatttgtgcaagctttcttatgcgatggcagagaagttgtttttgatttggagtgccgtacgagggagcaaataagcgaagcattaatcgggacattgggcatgacagagactgtacggaagcgaatgaaaatggacagttacaaaagggagaaaagagtgtgagagcacattttcgactgacaatgccaacggaagagaaaaaaacaactaaaaagacaatacaagtgaggaagcaaaagagtggggcagagagaacgatg

SEQ ID NO: 97200 - DNA, 420 bp, Heterodera glycines
gtttgagacctgtcaaccccaactccgtcaaacatccacaaattaaccctaagtgaactaatggccgccgaatcgcaatacccaattccttaccgaagcaaactcaccgaaccttttgagccgggacaaacgctaattgttaaaggaaaaacagcggaagactcagtccgtttcaccattaatctccaccatacgtcggccgacttcagtggtaacgatgttcccctgcacatttctgtgcgatttgatgaaggaaagattgtgttcaacactttctcgaagggcgaatggggcaaggaggagcgcaagagcaatccatataaaaagggggacgacatcgatctccgaattcgtgcccacgacagcaaattcactgtttatgcggaccaaaaagaattgaaggagtttgagcatcgcgtt

SEQ ID NO: 97201 - DNA, 415 bp, Heterodera glycines
attaaaaaaagtaaatcctctttaaaaatgaaattttcaataattttattgctttccttggccttttgtgcgttaatcatcgatgcatatccatcgggaaatggtaaagatcttgaagctgacaacgaaaaaacggaagtgaaggaagagaagatggaaaaaagagaagcggaagtggaggaagggaagaaggaaaagaaagcagcagaagaggaggtagggaagaaggaaaagagagacacggaggaggaaatgacagcagcggcggaggtgatgattagaagccatagctaaaaagaagaagcataatatggaactaagaaaagaacgagcacacaatgcttttagtcgcttattttttgctgcatttaaaatgttaaattttaaaaataaaaataaatttttgtatttttta

SEQ ID NO: 97202 - DNA, 383 bp, Heterodera glycines
ccctttaaatttcttatggtcctttcggatcgaatggctcttcgtattgtcaatgttttgctgttcgccgtcacttattttgcttggttttgtgcatttatcgcagcctttcacaattccaatgcttttttgagtgcttctcaaagtgattagtccgtccgttcgttgttcgatggctccgctggtcgtcgttcacactgaacctctcctcgaagaattccgtgctcccttttgttccgccgctaatttctggcgctttttgtcgatttttttctcgatttccttatcacttttgctatgttttgcaagccaggccagaaaaaatgaaatctctaaggattttaagcttttagggtctttggcgtcggtccaacacttttctt

SEQ ID NO: 97203 - DNA, 277 bp, Heterodera glycines
gtgaacattctgttgaagtgaccgatttgttttgaagcgctttcttttcggactgtcatgaacaaacccattttaccgttgaaaattgtggtgacgtgttaaattccatttattattagtttattattaaacattttacaattagcaggaaatgattcctaaaattggtgttaaattgatgttattcactgttctgatttggttgcttcttatttttccggcatttgtaattcgcttgaaggcatttttctcattgtaccataaataccatctcata

SEQ ID NO: 97204 - DNA, 401 bp, Heterodera glycines
acaactaagctgatcgcacggtcttgtaccggcgacgtgtctttcaagtgtctgccttatcaactttcgatggtagtgtatctgactaccatggtgatgacgggtaacggaggataagggttcgactccggagaaggggcctgagaaatggccactacgtctaaggatggcagcaggcgcgcaaattacccactctcaacgcgaggaggtagtgacgagaaataacgagaccgatctcttatgaggccggtcatcggaatgggtacaaaaaaacccacaacggctattggctatacgaagattttggagttgctttctgacgattggtctgacaaacgaaaacaatgcttggaagggcttgactggcttcagattctcggcgtgtttatttggtaccattc

SEQ ID NO: 97205 - DNA, 160 bp, Heterodera glycines
aattagagatacggccacattccttattatttattttttgatttcattataccctctatcactttactctgtgagaaaaatttaattgtttgctaaatttttggcaagacttccttgaaaaaataaataaaacaaacgaaaaaaaaaaaaaaaaaaaaaa

SEQ ID NO: 97206 - DNA, 174 bp, Heterodera glycines
  unsure (1)..(174): unsure at all n locations
gcacccctgcccaaggggtcgctctcttcgcttccttcacccccaaccattcttttattcgttttgctggacttttcgatcaatttttttcaccattttacgcatttttaattcgtcgatcgcttctttaataaattttgtgtcnggaaaanaaanaaaaaatttttttttttt

SEQ ID NO: 97207 - DNA, 406 bp, Heterodera glycines
agtagatgactcgcccctacaaggaattcctcgttcacggacaataattgcaatgtccgatcccaatcacggcaaatcttcaccggtttaccaacccctttcggggaaggacaagcacgctgattttgccagtgtagcgcgcgtgaagccccggacatctaagggcatcacagacctgttattgctcaatttcgtgcggctgaacaccgaaaatccctctaagaagttgtgcccacagaagcaatgagccaactatttagtaggctagagtctcgctcgttatcggaataaaccagacaaatcgctccacgaactaagaacggccatgcaccaccatccaccgaatcatgaaaaagctatcaatctgtcaatccttacggtgtccgggccgggtgagttcgtggat

SEQ ID NO: 97208 - DNA, 362 bp, Heterodera glycines
ggcattggctgtgtgccgttgtacaatttgatggaggacgcggccaccgccgagaacagccgcacccaattgtggcaatgggcgcgccatgaagcgcgccttgaggatggacgtacagttgatcctcagctggtcaaaatgacaatcgcttctgaaactgagcggcgcctcgtccgtgccggctctgtggtcaatcgcatcccggaggcctcggaactgctcgagaaattcgtgttggagcccgagttgagcgactttctcacattggatgcttacgacaagctcgtctcggaaggcaagtgaacaacgaacgggggacggacacttctgtaaaatctaagtgaaacagcgtcaaaatacct

SEQ ID NO: 97209 - DNA, 150 bp, Heterodera glycines
  unsure (1)..(150): unsure at all n locations
gacgacagcacacacagccgaaaagcgcttcttctcatcgccttcgccaccccccaccaccatctgttttttgctgaaaattatgcaaaaatatttttgaataaaatctatgaacnaaaaaaaaaaaaaaaaaaaaaaaaaaaaaaaaaa

SEQ ID NO: 97210 - DNA, 242 bp, Heterodera glycines
gagagagagaaagtagagggagatgagagggggagagagagtagaggaagatgagagggagagagagagtagagggagatgatagggagagagagagaagaggagagagtagaaagagagaggaacagcaaaattctaatcactagtgatcactgataattgccgattgattgaccggtacgactcatttggctgatttttttttttttatggcataaagagttgcggcaaatttttttttt

SEQ ID NO: 97211 - DNA, 163 bp, Heterodera glycines
aaaaaccgaaacgggtcaactccgtctggccaactccgtcttggggccaactccgtctcgccaactccgtcttggggccaactccgtctgagccaactccgtctcgccaactccgtctggccaactccgtcttagtgcctaaggggccaactccgtctcagat

SEQ ID NO: 97212 - DNA, 399 bp, Heterodera glycines
caaaaatatttgccatttttattgaaagaaatttcaagagaggaggggaggcgacaatttttgttccttcatgcgttgaaagaggtgattaacagcgaatgcggagaatgtggcactgtcggagacgctgacgaaatattcaaaaagggcgttgaacaaatttgggagcttttgatgaaatactgcgactcggctgaggagagcatcagaaatgtcgtcgccgagtgcatcggtcggcttatcatggtcaacccgcaaaaatacgtcgaagaacttttgcgacattctgccgattcacaagcaaatgttcgtgccactgttgtcacagctttgcgttttattatcgttgagcagcctcggcccgtcgatgattttcttcgtccggttattggcaaattt

SEQ ID NO: 97213 - DNA, 403 bp, Heterodera glycines
gttgtggcacaaataatcttgatgttgtggaagagaagacattttcgctcataccagttcgccactttggtcggtctttggctaatcccttttatggtgtcacttaaaaatggctggtggcgattcattctttcctggactgtgttcacttcttcaatattttacgtttggcggagggtcaatcagccggcaatttccggatcaactcccaggctcgtctacaaatactttttgttcatgcataaactcagttacatttttggtattgtcggttacttttcactcgtctttactgtcattggaataaattcggtgttcggaattagcagtaatctgagcttggattttggcgtgcatttgttgttttatggcctttattacggtgtgcttggacgtgatttgg

SEQ ID NO: 97214 - DNA, 394 bp, Heterodera glycines
agttttgtttaacaaggaccaattgctggcccaaatggaatatttccttgtgtgaaccgaccgggtatcaagtgcgacatggacgccgcatacattgcagcggaggcgatagtttgtttcatcgaagacgccggccaaacctacgtggaattttccttcgaaagacggtgccccgttcaacagagaaaatgggctcaaccggatgccgaacaagctgaatgccgacggtactttgcctatttacttcatggcccgcaaaaaatggagactccaaaaactgggaagtgaacccttaatgatttcagttttgatttctagtctttttaagacaattatattgtctcattttgtgtcatattaatgttatatgtccattccatgctgtaatgttgtt

SEQ ID NO: 97215 - DNA, 328 bp, Heterodera glycines
gaattcactcacatgaaaaagaagtgggaatggtgcggacgaggtgcaggcgtgttgacaatcaatgcaagcgcatgagtggtcgaatttatccggcacttcgttgcatttgatggctgtcattgagcatcaccacgttgatggtgaacggcacatgggtgaccttgctgtacgtgccaatgtattggaagaacttcttcggtgtgcacagttcaattgaagtgccgcaaagaatgcttaacacaaaggccgtggacgaagtgcgcacctttaaaaagagaaaatttgaatttgtacgaaacaaaagttggaaatggcacaaattgcc

SEQ ID NO: 97216 - DNA, 440 bp, Heterodera glycines
gagggttatttgtcgggaatttcttattctttctacaaaatatttccatttcaaatgttgccaccgaaggaaatttgggaaaacgatgcctacgatcggtggaatgattttaatgtggctctgatcattgtgatttgtgtcattggctttgcactgatcgctatgcaccacagctgccatttggtttacagtggcgcaacgcaataaaaaggcacggatcccacggcatttgtcttcctctgatcgcccttacatcggacgtccggtggaatctatggttatggaagagggccatttggtgaaagacaaatccaagcaggacaaggcatacagagaactgacaaagcccgatggactcgttatcaccagtgtttaaaataattatttacttatggaaaagccattaatcctatattttcaaattgaacatgtaaattagt

SEQ ID NO: 97217 - DNA, 407 bp, Heterodera glycines
tcacacacgcattacttcagttgtacgctgctttacctgttcttgggtgccaattccaagcacattcaggagcagatcactcggtaaagagtggcttttataagacctaaaagtcagtcctcacagtcccgatttaaatgtgatttaaattgtctcacaatttgttgtggtaatctctccccccaccctcttcgtattttccgtccctgtagatagataacttttacacatttaaaacaatatagaagggggttttaccatgcaagacgaatttttaattttttgtttttccatagtattctttttgaacgtttggttgctctccgtccgcacccgtggggtttgttgatcacattcatcgaactgatccgcaaccagcgttacggcttttggaagcacgaatttgt

SEQ ID NO: 97218 - DNA, 399 bp, Heterodera glycines
attggaagtgctttcgcttgacaaatgcgacttaaaagagttggaggaggacatttttgagaatttaacatctctccgtgccctgtccctctctggcaatcccttggaccgaatccccgctgctctctctccgctccattcgctgacgcacctcgccatgtcgtccaccaatctcaaggagttaaaggagggcgactttcaaaagacagtgcctgggctggagaaactttacatgcgaaaaatgaaatatttgtggaaaattggagaaaacactttcaacggactggtaaatttgaagttcatcgatttttccacctcggccaaattgcgtttattggagccaaatgttttcgggaaggacccgccacagaatttaagcgaattgcacttacagcagtg

SEQ ID NO: 97219 - DNA, 495 bp, Heterodera glycines
ctctctcactaactgttgcacatcccaattttatttcttccttagtaagtagtattggtgcacaatgcgcacttttctgttcatagctgtagtcgggttggtgttggctgtcatcatggagagtgtaaatgcgactgggaataattcgccgacaaagggacaaactccgcctggcagtccgaaaggtgggcacggcagcaacaaatcgccaacgacgccgcacagtgccggttcgccacacggcacgcagcatggtagccaacagaaccatgctaccggacaaacgccgcctggcagtccgaaaggtgggcacggcaacaacaaatcgccaacgacgccgcacagtgccggttcgccacacggcacgcagcatggtaaccaacagaaaggtgggcacggcaacaacaaatcgccaacgacgccgcacagtgccggttcgccacacggcacgcagcatggtaaccaacagaaaaatgctaccggacaaacgccgcc

SEQ ID NO: 97220 - DNA, 398 bp, Heterodera glycines
gccgggacggaacgggccaaaccaagccaagtgccagtgcgacggtttcgctcgatactaatcagctaattgttcactaattaccccaaataacaaaactgtctgcttctcccaacaatggccaccaaatgccttccgctcgaactgttgttcgaaattgtgcctttcatccctgccgaaaatgccgtcccgaatgtgctctcgtcctgtcggctgctgtacaactttttgctgccacgtgtcatcaaatggaaagagacaatgaaaaaaatgataaaagagcttcgagatgaagtacgggaccgcttcgcacttatcgaaggggagatacacgcaatgaaaaaccaattttaggttcgaatgaagaatctcgaaggagaagtaaagagtctcaaagg

SEQ ID NO: 97221 - DNA, 355 bp, Heterodera glycines
ttttcttataattgggggttttctttctattggctattttgaggcttcaacatcgaaacacttgagttcatgggttggaaattgaactgttgggatgttggcggtcaaaaaagtctccgtacgtattggcgtaattattttgaacgaactgacgctgtgatttgggtggttgatgcttgcgatgtctgtcggttggatgactgtttcaatgaattgcattcactgatcaacgaggaatgtctgcatggagttactctcttagtactcgcaaacaaacgcgatttacccggctcgataaatgctcatgaaatagaaaaggtcggtggtaaatgtgaattcggcgtgggagagatat

SEQ ID NO: 97222 - DNA, 357 bp, Heterodera glycines
acaaatgcctgaagcgcttctcccactccggctcttactcgcagcacatgaaccatcgctacgcgtactgtaagccattcatgcagcagagacaaagggccgaggagagaacgccgtcaaaggatgaaaacacagagtgaagcaaagaaagaacagcaagcacagtgcaaaaagagcgtgtgagaaattaaaaacgtcgcaaatccctcaaaagccaatcgaataaataacctctccgtcccttcaatgatctttagtatttaatttggtcgctttccctttttgcaaaaccttattaaccactttgacccactaaatgtgacttttggtgctatgcattcataaattaacataacc

SEQ ID NO: 97223 - DNA, 424 bp, Heterodera glycines
tctctctcattaattgttgcacattccccaattttatttcttccttagtaagtagtattggtgcacaatgcgcacttttctgttcatagccgtagtcgggttgatgttggccgtcatcttggagaatgtaaatgcgactgggaaaaattcgccgtcaaagggaaaaccgtcttcagacagtacaaaccataaaaaagaccataaaaatgagcatccaaagtatgattccccaattttagccggttcatctggcagtccgaaaaaaggaaaatcgccgaatgccgatccgaaaaaaagctgcttcacaccatgtgccagtaacaccagggaaagtatgatgagcaaagtcttaaaatggtgaagaaactgtgtggaacgatgatgccaaccatgaacaaacccaaagctgttgtagtagatgtag

SEQ ID NO: 97224 - DNA, 542 bp, Heterodera glycines
accatgattacgccaagctctaatacttctcactatagggaaagctggtacgcctgtcacgtaccggtccggaattcccgggtcgacatcatcatcatcatggccgctaatacgactcactataggggtcccgtggtggtcactacttcgttgttcgtcaattcaattagtgcagttagcgaacggaatatggagtatgtggtgcagttccgcttccaacaagaatggcttgacgatcggttggcctacagcagactcggtgacgagcgcagctttgcccacctttttgtggcacgtgatcagacaatttggatcccggatagcttttttcaaaacgaacgaagtggccattatcatatgcttgaccaggaaaatcgttttgttaaaattcgtgcggatggtcgagtcacttacaaccggcggctgacactgaccttggcctgcaacatgaacttgctcagatatccgatggacgtgcagtcgtgtctgatcgatttcgccagctatgcctacacaaccaatgacatcatttacaagtggga

SEQ ID NO: 97225 - DNA, 393 bp, Heterodera glycines
cgggtgaatgcacaccaaatgcacaatctgtgcatggcaaacgacagagaggggaggaggaggaagaagaggtggaagtgatctcggcaaaaagtttagttcgaagttcggctttaacgcagaggacattggcggaggtcgagagtatccccgaagagctttcaatggcttcacattcggcgaaatccttgccaaactcctccgtttccaccatgtcatctgggaaggggatggtggtcgccgtggaacccgtcgctgaacaccagcaacaacaacagacggacgattcgattgcggaagaagtgttttcggaggacatcgtttccaccttcaaaccgtcggagaagtcgctgcactccattctgtcattgcgtagcaattcgatgagcacca

SEQ ID NO: 97226 - DNA, 338 bp, Heterodera glycines
tatgtggcctattgtcggaattcggatgacctcgattggtacgagtttgacgatgcgaatgtcacccgagtgaacagcttggaagtgctttcccaagaggcgtacattctgttctacaggcagaaggagactttggaagacgaggaagcgatggaggaggacgaagtgttggaggaggaggaggaatgggtggaggcaaattcatccgacgaaatggaaactgagggcggcaacggcacgtgaaagcactgcggcccccccccccttattgtgattattcattatctttattacatgtagtaattatttgccgatttcgccaataaacaaatggacgg

SEQ ID NO: 97227 - DNA, 362 bp, Heterodera glycines
caggaaacggagaaacagctgaaagttgccagggattttatcaacaacgaaatgggccaagaggcgcgaatgcaatgggtttcagatgttccgctgaatctgaccaaggaggaaatgcaaatggccaaagaacgttttaaccagttggaaaaggacaaaacaaagcccgtgttggatgtggtcaggtccggtggaggattttgagcttttcaccctcgtgataacctcggatggatgttttttctcgtgcattttatttgtacgcccataggactgcccacttaatcctttaaaattattgtttcatttaagcccatcaattaattaattacagtatttttgtgcttcttatttgtcctgtt

SEQ ID NO: 97228 - DNA, 256 bp, Heterodera glycines
gaggaggaagaaaagtgatcaaaagaaaagcggaggagaaaagtgatcaaaggaaaagcggaggaaaaagtgatcagagaggaaaaacggaggagaaaagtgattggaggaacggaggaggaagaaaagtgatcaaaagaaaagcggaggagaaaagtgatcaaaggaaaagcggaggaaaaagtgatcagataggaaaaacggaggagaaaagtgatcagagggaaaaaatgtgatctgaggaaaagcggaaaag

SEQ ID NO: 97229 - DNA, 150 bp, Heterodera glycines
acagctttattctttcaacatttcttcttttttgggaaacaaatttataaattttttaataaaattccgtgctttcatttatgaaagaaaaaaaatagacaaaaaaaaaaaaaaaaaaaaaaaaaaaaaaaaaaaaaaaaaaaaaaaaaa

SEQ ID NO: 97230 - DNA, 394 bp, Heterodera glycines
tgaggtttgatttgagcatgatcttagtaactgccacgctagcaagtgatagtacacccggtactcacgtcttagacaattcagacgtagggttcctcagtaacggcaacgccaattgtacactgtttgaaagatgggctagttacgtgggtaacatgaacagcgtgtctattatggattgtgtggccgcagctaggcagggagatatgggacaagacattcccaatacggcccttggtctattcaagtggtgtacggcgtgtttcggcaagagcgtcggacctggccacagtgcgggaacagctacggcaggcaggaagttagcagacgccgcgtacgctgatgaagcagccatcaatgagcatcgcgtcggcaaacacttattgaagcgcgt

SEQ ID NO: 97231 - DNA, 400 bp, Heterodera glycines
gtactattccaaaacaacacacattgggcccagcaccgaaatggagaaaaggaaacgtgtcgaacggctattcgccacttccggcggcagcaatatcgtttttgaggatggggcgctgcagacgcaagtttaagaggaatgtcgaccaccaaccgaacgaaggcattcaaattccattcacttttgcttgttcaaacaaaagctttaataaatggaggacgttgggtttcggttttaatgttttaaatttaagtcctccattcgatgtccatttattttttgtattcagcagaaattcctctcctactgctatttcacttttcatattatatgtatgagcaattttgtctgttttggcccccaaacactcgtttccttcagaaagtcactttgtcagtct

SEQ ID NO: 97232 - DNA, 507 bp, Heterodera glycines
atcatgtcagattcggcagcaaatatgaaaagggctttcgtcgagagggatgaaaatgaaaatcgcattttgccaatcccgaacgggccttgcgctgctcatttattgaatttggctgtacaggaggcgttcaagagagatgaatcaatcagcagtttattggccaaaactcgtcatattgttggccgtttcaaacacagtaacactgccttcagcgaattgaaaaaaattcaaaaattactcgatgccccttctcatactcttttgcagatggtatatgtccggtggaacagtgcgcttacaatgtgtgagaggctgacagaacaaaggacggcaatcacacaatatgcagtcgagaacaacgaattcgaactagttggggttttgaaatgtgctgaagaggcaacaaaaaggttcacggaggagccaatttcgtttgtccttcctcaagcaagatcactacacgatgagttgcacgaaatgaaaattgtccacaggactgtggag

SEQ ID NO: 97233 - DNA, 558 bp, Heterodera glycines
gcaccggacggacagcgcatttgcacgtcgaccacagcgccaagactcaggacagacaacggatttaaactttggacatatcggggcgattttgtttatgaacaaaaatacgatcgagaggaactttgggagatcaaatggcgaccgtgcgcagcgtataacaaattcaaaattgaggagcccaacagagagcaaagtacatcaaattccagccgaataaacgacggaaatgccaaaacgcccttcgacaatttgccgaagggatcgctgacgcaaacggcgcgttacgtcccaccgcatctgagaggaaaaccgcagaaaaaggaagaaaaagggaagaacgagacaaattcggaagagacggacgtggggaagaaaattcggacattgcagaagaaattggacgatatttcgaagctgaagacgaaaagggccgcgggccatcagttggagttgaaccaaatggacaaaatacgcaacgaagatcgattgctggaggaaatggaacgactgacggccacggccaactgctgaaagaattagcatttaatgtcattg

SEQ ID NO: 97234 - DNA, 150 bp, Heterodera glycines
  unsure (1)..(150): unsure at all n locations
ctgatcttctgtgtattcgtgatcgtatttgtgatctgtatttgtatgtattgtcatgtattcatctcgctgttgtcatttcattcacttgtatatttcaaactaatatgaacaacttcnttaaaaaaaaaaaaaaaaaaaaaaaaaaaa

SEQ ID NO: 97235 - DNA, 386 bp, Heterodera glycines
gcagaaaaagcggatcagcaaaactggggagggggaggaagaggagggcgaggaactgatccagcaggaggacgacttgcaaagtgtggaaagtcagaatgagaattgtcgcgctgacttttgccttgatcgtcatgatcatcagcagaatgggaatgcagctgatgatgatgatgatgatgatgaatgttgtgatcaggaaaaactcaaactgattgaacagcaggagacaatgacgacggcagaggcccccctcgaagcaaagggtcgtccccgtccagcaatgttacaaattcacaccgttcagccttatcagtcggcggagaaagtgaagagtccagcacccaatgctgctgctgacgaagcctttcttggccaaatgcgcg

SEQ ID NO: 97236 - DNA, 235 bp, Heterodera glycines
  unsure (1)..(235): unsure at all n locations
gacactttgctgccactgatcccggcacggaaaatggagtggacaagttgaacagaaagaaaggggaaaggtgcgacaatctcttgttgttgatgttctggctttacacgcgcatctcttctattttctcaaattgtcaaataaaagcgggtctttttcacacaatcatttccctctgttaatattttatttcccttgtttttttatttgcaataaatttgtttatttttttann

SEQ ID NO: 97237 - DNA, 393 bp, Heterodera glycines
ttgcgaccgacgaatttgtctgttgcctttgatcaccaaattcgtgagggaacactcagcgaaatgaagcagcagtcggtggattcgttcattccctcgagcaattcgctgcaaatttgcgggggctgtgaaatgcgaattgaggaaaggcattcgctttgtgtgcatcgcccgcgacattttgcaaatttcgacagagaaacggaggccgaatattggcacgagaattgcctaaaatgttgccaatgcgagcggcgattgggcacgggggagaaatgttttgtaagggacggacgcgtttattgtcgcgaagaccattcgaaatctttcggcacttcgtcgtgccagcctaactgcgcccgctgtgccattccaatcgaaccggccgaactc

SEQ ID NO: 97238 - DNA, 474 bp, Heterodera glycines
tttcctccgcaattccaaaggattgtctgaggaactcgtccattggtgccacggcgcctccggcgttttgcatttgctcatcgtcgcctctttggagtttaaggaggacaaatatttggagtcggctgaacgatgtgtcaatctcatctgggcccgaggaattctgcgaaaaggacccggcatttgtcacggagtggccggtgaattgtgagagaatttagagagagagagaaagagtgagaaatcgggcgggtgaataatagcactgaataattattaatttaattaaaaagcaaaggcatttccaatgtttgtgttgtcttttcaggcaatggctacgcttttcttctcctcttccgactcaccaaaaatgacaaattcctgcaaatggcccattggttcgccttcgtaatgatggccccctcttttgaggcgtccgcccgtgtccccgactgtccgtcgagtcttttcgaa

SEQ ID NO: 97239 - DNA, 399 bp, Heterodera glycines
tgtcggcaccgcttatgtgacgcggggcggcacagtgatacgaccggacgaattggagcgggcgatgcgcaagtcgggggtggagtcgtcggcggacactttgtcgcccgcttcatcaagtgccgaattgtcttcgcgtttgctcaatgcgaaccccgtttggtcggtgtattcgtcctccaacccgtattcctactggccctaccgctaccttaccgatccgaattcgcacgaggtgttttggcacgacgtgcacagccaattctcggcattgcgccgcctcgatttgttcggcaagcacaaacccccagtggattacatggccaacaaccatttctggacttacccctacccgtattgggctcgtcaccggggatatctcttcgactatgcaaatcc

SEQ ID NO: 97240 - DNA, 163 bp, Heterodera glycines
tctttgacccggatgtgaagtaaatgcggctactttttgtgcggaaataagcaaaatgtaatgttgttgtttttgatttttgagacataaaattgtgtatgaggaaaaaaaaaaaaaaaaaaaaaaaaaaaaaaaaaaaaaaaaaaaaaaaaaaaaaaaaaaa

SEQ ID NO: 97241 - DNA, 515 bp, Heterodera glycines
  unsure (1)..(515): unsure at all n locations
catggccaattactgttcatttaaaaaattttcccgatgaactcattcgatgtcggacgaaagaaacgctaaaattttgctttttgcaatctctgaaagaggcgtgccaactcaaacttggttctaacattgctgcgtcgatgactaaggatgagcatggtcgactatttgacggcttatgcaacgacagatttaacgacttttggatggtcaacgacaaactgatgggactccgttcatcatcaggcgaagaacagtttagcactattcccgcccgattttatgagtcatcatattcatttcgtcaattgcttttacattccaaaaaacaacttgacgatggcaatatgggtgaagtgttgttgattgacgcgctgcacaaagtgtttcccgattatgccattgaaacagactttgaagcggtgacccatggcattctgttgcccctcaacactccgctcatttggctggctagaaaccttgtgtaccctgacaattntgctcacattgtaata

SEQ ID NO: 97242 - DNA, 394 bp, Heterodera glycines
cctgcattgctacgtacgaaacggacggacaagcccaattggcccgtgaacggcttcacaacgtcgtatggcccgtggcgagcgatttggcactttgtgtggaattttcaactgaggaaaagctgaaccgacgaaaggcggaagaagagcaggaagcatcggcgaacaattcggcactcggcggaggattgggattgacaattgtggtggataacaggggccgtgggcctgaaactgtgcccaactcgggtcccacggtgctcattcagcacgacaaaaagcgacaaaaggacgcggaaaatagaaaaagaaaagttgaggaattggaaaagtcacagaaaactctcgacgaagtgttcaagaagacaaagactctgccggccatttacttttt

SEQ ID NO: 97243 - DNA, 398 bp, Heterodera glycines
ttaggacaattaattgcaaatttttacattcatttcaggaatactttgtacgacagtgaaatttttcagttgcaattcagatttgacgaccaatacccattctcatcgccagaagtatgtgcgatttgaagaaccaattatttataaattttcaaatcactcacaataagtccttttttgccctttaggttatgtttatgggtgaaaacattccggtgcatccccacgtgtactccaacgggcacatttgcctgtcaattctcagtgacgattggacactcgtaactttggcatttcacaaaatgaccgacaatcctcaaactggcactctttttaggctctcagcgtctcttccgtttgtttgtccattcagtcgatgctgtccagttgcaaagaga

SEQ ID NO: 97244 - DNA, 398 bp, Heterodera glycines
ttctgcaggaaacggtgtccagaaacgtaccgtctcgccatcaaatagtgttggctcttctaacgggagtgggtctgtctcgtctaaattccaaagccaagatttgatcagcgaactgtccgatcgactaagcaagcggaaaatgactgtggaagcttcgtcaaatgcaaatggcaccccaaatcaaccgaattcacagactcttcccgtgaacaatgcgaaaggctcagcgaatccttatggaagaattcccagtgtttcgtcgttgtccagccaagatgatgccaccgccggcggagggactccggcgacagcgggcgcagcctccgctgctcaagactcacaattaacttgcgaaacggtggtgaaaggcccaacacaattaacttgcgaaccga

SEQ ID NO: 97245 - DNA, 365 bp, Heterodera glycines
agcaaattccatctcgaaaattcaattaattccattctaaaatggcttcatcatcgattaaattggtttcggtttcaatgtttctgctcgtcctttgcattggcatggccattgagcagacccaagcttattatggctggggtggctacggctatgtctatccttacggattttatggcaaacggcaagccggttttggtccatccgaaaatgctggcacttttggtggcggtggagaaggaaattccaacggaggaggaagaagaggaggaggaccatcatcaccaaacaatttttgagagaaaaaaggaattacaaaaccaaaattgagcttttcccattttgtaattgatgatcaatcggat

SEQ ID NO: 97246 - DNA, 150 bp, Heterodera glycines
attagcgaagaacggacttcacaattaatattgtcagggtttttattctttggaaattttatgtaaataaatttgatgaatggaaaaaaaaaaaaaaaaaaaaaaaaaaaaaaaaaaaaaaaaaaaaaaaaaaaaaaaaaaaaaaaaaaa

SEQ ID NO: 97247 - DNA, 500 bp, Heterodera glycines
aagagaggcgcgaatgcaatcggtttcagatgttccgctgaatctgaccaaggaggaaatgcaaatggccaaagaacgttttaaccagttggacaaggacaaaaagggacacattacggtcaatgacatccgccgacactttcgggaacacaacaacaaaattgacgagcgtttgctgcacgagttgttgaacgaggtcgacctgaacaagaacggcgagttggagttggctgagttcttccagctttatagcggactgaaaagtggtcaaatcactcagaatcgtttggtccgttatttggacgaattgggcggcgaaaaggacaaaacaaagcccgtgttggatgtggtcaggtccggtggaggattttgagcttttcaccctcgtgataacctcggatggatgttttttctcgtgcattttatttgtacgcccataggactgtccacttaatcctttaaaattattgtttcatttaagcccatcaattaatttaatt

SEQ ID NO: 97248 - DNA, 466 bp, Heterodera glycines
tgaatatctgctcaagatccaaagaaacggcctttcgttggacggtttttaaagactgcgactgactgggaacggtttttaatttcagacacaaggttaccaaaatgcatatacaaatgatgaattttacagcaaagtgaaaaagccacgtggtaacaactttttgcttatttttgaagacttggtcaatttttaggaattgtgattgtcgcagtaaaaccacagatctttcccgggtttctcgacgaactgcgtaaaaatggttggcttaactttgttgggcctgaagtgctttgtgtgtccataatggctgggattgcacttgacacctttaaacagcagttgaaattggttggtttcaatggccatgccgcccgttttatgccaaatgtgaattgtctcgtttctgctggtatcgttttggtctgtgccgatgactgtgttccgacggagatggtttagcaga

SEQ ID NO: 97249 - DNA, 511 bp, Heterodera glycines
acaccaattttgagcctaacagaacatacacattgactggaatatatgaacaaagcacaaaaattgacccgccacagtccgaaacaaactttgtgattatgcacaaatccgagcaaacgcggcaaataatgaaatgggctttgctttgtgccgccgagcccgactgtatggtgccaattggacagacgaaggcgtgcatttacacggcaactgctccaaatttgacttgccatcgacaggatcagagtctgatggaaattctccgctacaacatggaatatcgacaagaaattgagaacccatcatttttgacccaactgaaccctgcccacccgcgcagttcaaacagaccgttgcaatcgtcgggaatcagcggattttttgatttgctccgtggtaagcattttggcggttctcaaagtgaatggcttcaaagagttcaatgttgctgatgaacatcatcattatcttttgttttttattcatttcgtataaatttgggcataaatgg

SEQ ID NO: 97250 - DNA, 176 bp, Heterodera glycines
  unsure (1)..(176): unsure at all n locations
attacagganaaacaaggcaagcaagaaaaccaaacccccacccgggccatttgggaattttaaaaattaaaaaaatttatttttaaaacctttttaatggttttttaaaaaaatttttgggaataaaaattttaagcttaattggaaaaaaattttttttggcccagggtttaaa

SEQ ID NO: 97251 - DNA, 181 bp, Heterodera glycines
  unsure (1)..(181): unsure at all n locations
cgagttagccaagcggaaaccggtccaaatgatccgccaaaaagtgcggggacgaaaccgccagcgatccttccgagaccgacagaaatcgctgagggcatatttgctacgtcaacaggggaaaaaagtaaaatgattttgttgttattttttttctttcgaataatgggaaagtgattan

SEQ ID NO: 97252 - DNA, 164 bp, Heterodera glycines
ttgctgagaatgccaaatagcgaattggcgtaattttacgcgctatttcaaaaaatacactggtaatgccttttttgtatggtttattatgagcctccataactcgcatgcatttccaactaatccgaacattttgttatctaaaaaaagattttgaaaaggag

SEQ ID NO: 97253 - DNA, 307 bp, Heterodera glycines
caaatcacttggcactgctccaccaacgacattggccatgtgtttgtgttggaagagcaaaccctttaaagcgaaagacgacaattgcattttaaaaagcgatgggcggagatcaaacggagacggccaaaattaattttcaattcccatttcaatgcattcattcatttctattttctttaatattttgcaacaaaagttcaaattagcaaaattgtttgcccattccttttcttctttttaatggcgtaatttattaattttcaaatatttatttttggccaaataataagcgatcgatggtttc

SEQ ID NO: 97254 - DNA, 120 bp, Heterodera glycines
caaaagatgattagtaaacatttttgaaaaaaacccaaactagcgaagaggcaataaaattttaaaaagaaaaaaaaaaaaaaaaaaaaaaaaaaaaaaaaaaaaaaaaaaaaaaaaaaa

SEQ ID NO: 97255 - DNA, 401 bp, Heterodera glycines
ccaatcaggggatgaatcaattagcactcccacgaaaagctaaaaaaacgaacaaaacaaatgccattgtgccagttcaaaatgcggcctcatttggcgaccgaggatatataccatcgagtgaaatcatactaaaaacaaaacaaaaacgaagaccagaagcatcagctgaggaatacatcaaattcgtaaaaaatgccgtaaattcgctcaacaaaagtgacaatgtacatttcttaacaaatggcttctcattggtaggaaaaaatgctcagcaggaactacaaagatatcatatttatccaaggaatagactaatgattggaggacttatggaattaattgcgaacagaaaaatgaaaagcgccgatgaactggaatatatggtgcttgaaaaagtg

SEQ ID NO: 97256 - DNA, 136 bp, Heterodera glycines
gttgattttattaaaattgttaaatttctacatctaaaaaaaaaaaaaaaaaaaaaaaaaaaaaaaaaaaaaaaaaaaaaaaaaaaaaaaaaaaaaaaaaaaaaaaaaaaaaaaaaaaaaaaaaaaaaaaaaaaag

SEQ ID NO: 97257 - DNA, 394 bp, Heterodera glycines
aaggcacaagttgccatttttactacgtattattttatttgttgatgaataatgtcttctcgaagaaatgaatatctcgatgcgaagatttatgttggtggtttacctgaggatgcaacttctgaagagttggacgatgcgtttcatcgctttggacgcatacgaaaaatctgggttgctcgtcgtcctcctggctttgcttttgtcgagtttgaggatgcacgagacgctgaagatgctgtgcgtgcactcgacggaacgaggatttgtggcgtcaaggcccgcgtagagctttctcatgggagcggaagagggggcggacgcggttttcgaggcggagggggacgttatgacgaccgttatggtcgtgatcgttatgaccgtgatcgcgacc

SEQ ID NO: 97258 - DNA, 150 bp, Heterodera glycines
aactgacaaacggacgaattacaaaatgtaattggacagcgaatagatttcttaatcgttcgattttgaaggccacaaattccgaaaataaaaaaaaaaaaaaaaaaaaaaaaaaaaaaaaaaaaaaaaaaaaaaaaaaaaaaaaaaaaa

SEQ ID NO: 97259 - DNA, 133 bp, Heterodera glycines
gaaaaagaggagaggaaagaagtggaaaaagcagcatggattaatgaaagcaaggctaagcaatatttattaaatattttattttttggtaaaatatttccaatttttcatttccaataaatatttttgcttt

SEQ ID NO: 97260 - DNA, 158 bp, Heterodera glycines
cataatgcaatccaagcaaaagccaaccctttcccccccccccggtgattacgatgcattcattgcttttagtcgcttattttttgctgcatttaaaatgttaaattttaaaaataaaaataaatttttttgaattttcaaaaaaaagaaaaaaaaaa

SEQ ID NO: 97261 - DNA, 394 bp, Heterodera glycines
gaatttcgagttgccattgaaaagggcgacgcggcaaagtttgacggattgttgcgcgagagtccacgctttctcgtcaacacatccaacgatttgcccacaattttgcacattggcatgcgctgcaatgccatgcacatcgcctgccgttcctcaaatgttcacgctgtccgacaaatgttggcccttgttcaaagtggcgaatggttgcgcgatgcgtatgggacggatgcatgtgttaaggaacgcagtgataatttgctggacgctctgctgaatacgccagacaaaattgagaacaacacgccgttgcactacgcatgtcgacaattgtgcgagcccatctttagagaattgattggacacgaacagtgccatcgaagtccggtgaaca

SEQ ID NO: 97262 - DNA, 156 bp, Heterodera glycines
tgagaaggaagggaaaaacgttttgggaggggcaaaacgtttgctgaacaggcacagcatttgctcgactttctcctcagaattcgccattttccgttcatcgacgacgaaagttccgaaggatttccatttaaaaagaaatcgaaggacgaaacg

SEQ ID NO: 97263 - DNA, 207 bp, Heterodera glycines
  unsure (1)..(207): unsure at all n locations
cttgaccattgataaaagaataggctggagaatttggcacatgacagataaaaacgaatataccaaaatataataaaatttctatttatttcccacataattccccatcggtttgcttgttatgtttgtcgttctattctctctttttccccaaattcgcttaaatggaagatttataagaaacttaataaaggattgattcnttan

SEQ ID NO: 97264 - DNA, 466 bp, Heterodera glycines
gcaattgcgtgggaattctctccgattgttttttgcccattggcggtgatctccgcacttttctttggtgtcggatgcaccgccaaccatctctattccggtaaggaatgctttaattgtttgatttgtccctttttcagagggtggctctttccccgtcctttcctccgacaattcgccgcccattccaaatgatccgccgacttttgattccccagccgaccttcttgacaatgaattgcagcagcccaaccaacagtaccaaactgagtttgccccttccatggaacaaatggtcgacgaacaaaggcgcaatcggctggccaaaattattgaacaaatgagggataatgaacagtttagccagcaggaaattgccgatgggcccggactctttttggaagaaggagaagcgaatgttcccattgaacgaccatcggaaacggagacttattgggacggacta

SEQ ID NO: 97265 - DNA, 214 bp, Heterodera glycines
  unsure (1)..(214): unsure at all n locations
aggcgactctttcataggaaggattggattattaatccgctttgcgcggagagtgaactgactgatcgacacgcgatgctccgattttatcaccccacccattcattttcggttattttcgccagtgcggtctctttccctttttgttgtttattttgcgatggatttaattgatttcattccccgtgttgttgaaatagggttttttannttt

SEQ ID NO: 97266 - DNA, 394 bp, Heterodera glycines
ccgatttgctggcggatccgcgcagcaaattggctgattggtttcgcccgggcactaatcgcccgcgtgggttttgcgttatttggcaaatcaagtgttaattgatatgctaattttcctttctgttaagcaattcctaccgacaaaggggggaatctctttttggacagagaccccaaaatgttccgtcatatcattggttatctccgcctgaaaaaggagcgatgcgccgcctctttggcacttccagcaaagccagacgatttggccaaactaatcggcgaatgtgaggcgcttaatttggtcgaattgcgcgaattggcgttggaaatgcttcaaaaatacgtcagaacggaggaacagcattatgtcacttcgtacgttcaaatggcac

SEQ ID NO: 97267 - DNA, 591 bp, Heterodera glycines
ttgaccaaggagaattacgtcgagatggaatcaaaggtcaaagcggtcttcgagcagctgaagggcgatgccgaccacttcttgtttaaagagggcgaccgttttctgcaggaggccaatgcttgccgttattggcccaccggacgcggaattttccataacgccaagaaaacctttttggtgtgggtcaacgaggaagatcacctccgtatcatttcgatgcaaaatggcggcaatgttggacaagtgctggagcgtctcataaagggagtcaaggccatcgaatcgaaagttccgttttcgcgtgacgaccgtcttggctggctgactttctgtcctaccaacttgggaacgactgttcgcgcgagtgtgcatatccgacttccgaagatcagcgcaaaacccgacttcaagtccatctgcgacggcctgaaattgcaaatccgcgggattcacggcgaacattccgagagcgctggcggcgtttacgacatcagcaacaaggcccgtcttggtctcacggagttcgaagcggtgaagcagatgtacgacggagtgaaacacctgatcgaattggagaagaaagcataa

SEQ ID NO: 97268 - DNA, 154 bp, Heterodera glycines
tgacggaagaagtctttgaggtggattgaatccggtgatcttttcattccccaattttgtgttatatgttggttttaaaaaccagtgttgttattaaaaaaaaaaaaaaaaaaaaaaaaaaaaaaaaaaaaaaaaaaaaaaaaaaaaaaaaaag

SEQ ID NO: 97269 - DNA, 307 bp, Heterodera glycines
accatgattacgccaagctctaatactactcactatagggaaagctggtacgccttcacgtaccggtccggaattcccgggtcgacatcatcatcatcatggccgctaatactactcactatagggggggggggggatggcattgcccaacattggcacgcactcatttcacttaaccgaccggtagcaataattcacaccccgggatttcgataacaatcacaaaaaatagaaaaaaacaacaaataatttaggttaatttatgtaaaaaaaattaacttttgcgaagataaaaaaaagtttaatg

SEQ ID NO: 97270 - DNA, 508 bp, Heterodera glycines
tgccgagggcgacgttttccgaggcttacaggtggtcgaattcgcatgcaatgcggcgagtttgctgttgggcgaacatttgccaaacatagccaaagacatggaaacgtacagcttgcgactgccattgggcgtaacggccggcatttgcccgttcaatttccccgcaatgattcctctttggatgttccctttggcactggtttctggcaacacgatgcttatgaagccgtctgagcaagaccctggcgcgacaatgatgctaatggagttggccaaggaggccggcattccggacggctgtgtcaacgtcatccacggcacacgatccgctgtcactttcatttgcgaacagcccgacatcaaagcaatttcttttgttggcagcgaccaggccggcaaatacatttacgagcacgggtctaagtttgataaacaaaaatccctacggaaatggcactgcccttttcactcggtcgggaattgccgcgcaccgtttcgtctcgga

SEQ ID NO: 97271 - DNA, 478 bp, Heterodera glycines
acgcaaatattatttacactatgcacttttacgccggccaacacaaagatgacatccgaaacaaagtcaaaacggcttataaattgggccttccaatgtttgtgactgagtacggttgctactcggctgacggcaatgaaaaagcaaatttggaagagttgaaaaagtggatggaacttttggacggctatggcatttcctacgccgcgtggcacgtggcagacattggcgaacagtcgtccatactgacaaagtcttccgaagtgaacaacatctgtgacccggcccatttgaccaactacggagaagccatcattaacaaattgaaatcgcaaaacaatggtgtgaaatgcagtggttaaccaaccaattccaatgaatcggcggatgttatcgaaaatgtattcaaaagttgaatattcaaaaaagtttactaacccaattattgttagtaatttcggtgtcaataattgtaatt

SEQ ID NO: 97272 - DNA, 453 bp, Heterodera glycines
ctccatggccaattactgttcatttaaaagattttcaaaatcaatagaattcatattcgcgatcagaagccacgaaaaccttcagaattttcccgatgaactcattcgatgtcggacgaaagaaacgctaaaattttgctttttgcaatctctgaaagaggcgtgccaactcaaacttggttctaacattgctgcgtcgatgactaaggatgagcatggtcgactatttgacggcttatgcaacgacagatttaacgacttttggatggtcaacgacaaactgatgggactccgttcatcatcaggcgaagaacagtttagcactattcccgcccgattttatgaggtgctaatttattgagccaaatttacttggaatgatcttttggaccgatactcatgatatacaatttatcttttcgtctagtcattaattttttacatcaacttttc

SEQ ID NO: 97273 - DNA, 323 bp, Heterodera glycines
ttttatggaggcggtatgcaaaatttacgaggaacatctgaagaagctgaaccccgacgtcccctgcatacagtacgacatatccgcactgttcaagttcatcgaccgattggctgatttgagctgcatggtgttggacaaaagtgtatatgtgccaaagggcgaggatttcatcaaagagcagattttcattttgctccgtggccaagcggcgtcgaacgcggcgaagaagtgcccggctgaaggatcgctctgatttttgatcgcattccttttatttgtaattaactttcatacaaataaaagtacaattctttaaaaaa

SEQ ID NO: 97274 - DNA, 181 bp, Heterodera glycines
gtttatatggttccacatttattgttgattttgatgtttgttgataataaatgttttaatttgtaaaaaaaaaaaaaaaaaaaaaaaaaaaaaaaaaaaactcaaaagaagttaccactgcttaaaaaagcaaaaggaggccgcatcaagaggaaccaagattacacaactcttgtgttgt

SEQ ID NO: 97275 - DNA, 158 bp, Heterodera glycines
ggggagaaggacaaaagtagaggatgaagatgagaagagatggatgagctacagattctaaagtgcaaaattgggtaacaaatttaggcgaataaaactgatttgtgagtggctttagaggagggaggaaaggctcttttaaggggaaaaaggaacac

SEQ ID NO: 97276 - DNA, 161 bp, Heterodera glycines
  unsure (1)..(161): unsure at all n locations
aaagtcatttagtggactaattacctaattaattgcctttataaattttaaattaaagaacaaattcnaaaaaaaaaaaaaaaaaaaaaaaaaaaaaaaaaaaaaaaaaaaaaaaaaaaaaaaaaaaaaaaaaaaaaaaaaaaaaaaaaaaaaaaaaaaaa

SEQ ID NO: 97277 - DNA, 165 bp, Heterodera glycines
tccacatatactcgtcacaataacttagcaataattctcggcttgtcccggatattgctttgaacttcatttttaagttcttccaaaagcattcaacgtgatttgtgtgggcgcctatgatcgtgttatactaaaaatacaaaataaaaatgaaaacaaaaaaat

SEQ ID NO: 97278 - DNA, 237 bp, Heterodera glycines
accagagaatatggtagacagacagagaagaggaaggacgagagatacgcttctggtggagaaccaacgcggaggagtgggagaaagacacgggaaaagtgaaggccatagcaaacaaaaagaatgatgaattgatgacaacaccgtcactttcaaacataaaatggaaggaaaaacaaagagcaacgattcatcctattctcttatttatcacagcgattaaagcgaacaattacc

SEQ ID NO: 97279 - DNA, 490 bp, Heterodera glycines
ccatgaaggcgttgattggcaccgtcgacgaactgaacaaagcggtgaatgcctacggcaaatacacggtggaaaagcaaaagtacgacacaatgtacaacaatctgatgcagaagagacaaacggagaacgaagcgcggcaatcgcgcggagaaccgccgctgacaatggaggacataaagcggcagctgaagcagccgcaaatgcagacaaagtacggaatgttggacttgctgctgaacgcgctggacaccgacgcattcacgacgtaccaaattcagacgaccaacgaaaacgtggccaaattgcacctttcccaagcggtctctgctcagcccaatttggaaaggaaataaaaacatggaaattggggcggagagagaagggaaatgcgaacggagcaacaaaaagattggattattattttgttttccctgttgctcttaattgtatggacacacacaaattgttgctgtttttattttgtctc

SEQ ID NO: 97280 - DNA, 354 bp, Heterodera glycines
ttcctttctgcgccaacgccccccgtcccttccggcgacgattctctccaagtctctccacaccaaaccgtttcttctcactccgactgtcaccaaattcagcaaacgcaattggaagaacattcgactaataaggagcaattggcgcattttggagcatttgaggagatgcaagacctttctctctccggcgatgacttcaccgatgaatttggcttgtttttcagtgccttttgtccaaattcgtcgtctaattggacacaaaattgtaacaaacaataatttattttctttcattcattttcgaaaattgttttcactgtaaattacgatatgattaacaatgttaaaaaa

SEQ ID NO: 97281 - DNA, 383 bp, Heterodera glycines
cagatagttgagcatctaacaaaaagcaaaatccatttagaaaggctgcaataagtatagtatatgcacacccctacaaaaaaattaaaaatttttagtcgaaaataataggaaaaaataaaataaaaacctctttttaaaccaaaagttaataaaattcttaataaaatttacagtgtttttccctaaaagtgacaaacgtaccgcatatttttggttgatgaccaaacgctgtaaaaaaatgcacaacaatttggacgtgtccttcactgtgtcagaaatttggttggtttgtccatcggcaacataaaaacgcgaataatactcgtggattgggtgcagcacagtcagaatgtcaacctaaaaagaaaacttttgtttac

SEQ ID NO: 97282 - DNA, 345 bp, Heterodera glycines
aagccggcggattcagcggacgattcgctgtggagccgataccatgatcaaaatgcaatggaagagttgttgacctgttttattttctgaaatatttctacggaaaatgcgcgtttggtcgaagaatgtgctcatatgtacatctccgaagacagaaaagatgctcaatttccgtcttatttaaaattttaaaaaaattataaaattattatggaaaaaaacatttttttagatagattaaatttttaatttataattgcttcttcttaacatacgattcatctttttaaaatattttaattaacagttatttatttgtaataaatattaatctctgaataaatt

SEQ ID NO: 97283 - DNA, 150 bp, Heterodera glycines
aaattgaaaataaaaattgaaacaaacaaaaaagaaggataaaacaaaaatgtgaaagcatggcgatgatgggagaagagaaaggaagaaaatgaaaaatgggatagataatacaaataatgcaacggaatggataaaaaaaaaaaaaaa

SEQ ID NO: 97284 - DNA, 470 bp, Heterodera glycines
ccgcgtgttggacagttctgaggccgactgcatatttttggttggcggtgatggcactttgagtagggcactcgtcggattgagccaaaacagtgcgccattgccaattggtttattccctggtggtcgaaaaaacattgcattttggagaatttttcaatcaaaaaaccagagcagaggtatattactatacatacaaagcgaatttcatttttgttttcttttcttgattcgatggatttgaatgaccaagactcaaaatcagtgcgaatgttttgcgaaagtgcaatggcactgattgagggtgaaaatcgactcgtttatccagtcaaatgctcaataactgaagaaatgaatgactcgccttccgaccatcaaacggtcaacactcccaacactttttggctgctttccgacctttgtgcgggatggttcgaacattgtgaacaaaaggcacccaaactttggtg

SEQ ID NO: 97285 - DNA, 381 bp, Heterodera glycines
ttaattatttatcaaaattataataataattattatttttttgcatattattgcataggttgccattatggcggaaggaaagcagcacgcaatgggaattggacaaatgaagctttcgtcggcgaatgtgcggtcacaaaatgttggcattgccattgacaatgtccacttcatgaacgacgggttgtggcgattaaccactgttcaatgagcacagaacaattttttttaaaattattgtttaattgactctataattaatcgctttttcaattttaaattgttgatgtatgaggaatcatattttttcgtgctttatttgcaaaatgaaatacacaaaattttcattcgaatgtttacattaataaatgtgaggtgatt

SEQ ID NO: 97286 - DNA, 150 bp, Heterodera glycines
cggagaaatggcgaatttttgaagcgacgatttttttaattgttgtaaaaaactcttgataaaacacatataaatgctcaaaaaaaaaaaaaaaaaaaaaaaaaaaaaaaaaaaaaaaaaaaaaaaaaaaaaaaaaaaaaaaaaaaaaaa

SEQ ID NO: 97287 - DNA, 150 bp, Heterodera glycines
  unsure (1)..(150): unsure at all n locations
ccgtgtccatcgattgaccactccatcagcgagcaatctgatgattttcttgaaaaaaacagttatacnaaaaaaaaaaaaaaaaaaaaaaaaaaaaaaaaaaaaaaaaaaaaaaaaaaaaaaaaaaaaaaaaaaaaaaaaaaaaaaaaa

SEQ ID NO: 97288 - DNA, 401 bp, Heterodera glycines
cgtgtgaataaagccgaggctcattcaaaccaattaggtaattagctgacaattagccatcaacaaattggggccaaaaaacgaggatgccatccaaacgcatcactgtgccgctgtttctgctgttgactgtgctcgtcttggcactccgtgcctcggagacaaagattaaggcgatggaggagaaagtgatggaggaacaggacaagaaagaaaatgctgagatgaaaaaatttttgagagaacagaaaaaggaggagcagaaggggacaaacataatcggacaaaaagttggaccaaaacgtaattttggaggttttttgttttgagaactttaagcttttcacatataccaattctgtttttattttacaaaattttgtctacaaaactcacaaaat

SEQ ID NO: 97289 - DNA, 363 bp, Heterodera glycines
cccgaccacatccaggtcaaagagccaccgattgacgtcgcgccgaccacgccgtactcggagcaccgcgaaaccgatgaccactggcatgccgccccagacacaaatgccgcccgcccatcgcaacagcaacttgcgaatggttggccagttgccgccccccgaacgtttttatttgtaagagaaaacccttgctgatggccctaatggataaatgggaaaatttccattaaatttgtgatttgggggggcaccggccccaaaccccctttttttgccggaaaaaaatttttgggggggtttttgtttaaaaaattttttgtttgtcgtgaaaaaacctcttttaaaatatttggggaaaat

SEQ ID NO: 97290 - DNA, 184 bp, Heterodera glycines
ccgtgaaagtgatcagctgaaacagcattctcagctgaaggaactgatcggacaaaatcattgaattgcgaaattggccactctttcgttattttgatatttcattttttttacctttggccattctcagaaaatacccaaaatttaattgatttaatcaaaaagtaaaattaaaaactaaaat

SEQ ID NO: 97291 - DNA, 394 bp, Heterodera glycines
aaataaaaatttccttggaccgacaaaaatggcaaaattcgttgccattgctcttctctcgctgaccattgtttcgatggcacttgcaaaaactggcaaaagtcaaacggcagacgaagttgagggatttcgcaatatgaacatcggcgacaacaataaggttgacgccggaaaggagcccgcggctgataaagcaaccaaaaagggaaaggctcagaaagccggaacgaaaccggcggcggccactaatgagcccgcggctgctaaaggaactaaaaatggaaaagccccgaaaaccaaagcgaagcaagaggtggccactaatgagcccgcggctgctaatgaatggaacgaccaattgatgggcatgagcgttgagaaatttaacgaggag

SEQ ID NO: 97292 - DNA, 541 bp, Heterodera glycines
acctgattacgccaagctctaatactcatcactatagggaaagctggtacgcctttcggtaccggtccggaattcccgggtcgacatcatcatcatcatcatggccgctaataccactcactataggggacaataaaaatttcttaaactcgggtttttgtggggttgatgaccttgagtgtctaaatttattgtcggcctttgttcgttatgttaggtgtggtggcatttgcattatcgacccaacggatctgttacccattgagcggtacattcgccttcccagtggcgtttttcggcctgtaaaagtgccaacaaatgcaattacccctcttcttacgagtgaagttaatgataattcagcagcagttgctacacttaccgatggacgacttgctctttttacgactgaccactttgattcgattgccgatgattcggctacatttctgccgttttccacgactttatccggtggaatgatgttagattgtgcagtgaaatcggatgggcgactgctatgttctgacaatttgggcaa

SEQ ID NO: 97293 - DNA, 555 bp, Heterodera glycines
accatgattacgccaagctctaatactcctcactatagggaaagctggtacgcctgccgtaccggtccggaattcccgggtcgacatcatcatcatcatcatcatcatggccgctaatacgactcactatagggcgcttgaccagcaatgcaccatttcacgttcgggcatttcaatgattgcttccggaattgccaccgaactgttggcttctgtccttcaacacgaattgggcgcagaagcgcccgcccttttggccgaagtggacgaaaacgcgagtcaattgggcgccactccgcaccaaatccgcggttttatgtcacgctttcatctgatgatgcccaccgtacgacggtacgaccgatgcacagcgtgtgggcatacggtcaaacagttctaccggactgagggatttgaatttttgaaccgaatcttccaatgtcctgccgagttggagcaaatcaccggattagccgagttacagagacaagcggacgcatttcaatcggaagttatcgaaatggacgacagtgaaagcatttaaacaagtgcatt

SEQ ID NO: 97294 - DNA, 500 bp, Heterodera glycines
actctccacttctatgcgtccagtcactttgttgatggacttggcaataagcttaagaccgccgtaaataagggtaatcatatgatactgtatcgtccaaaaccattactgtttgcaaccgtactttaaggtcttccggtgttcgtcactgagtacggtacatgcgaagcgtctggcaacggtaatctgaactccggctcaatgtcaagctggtggagcctgttggaccaactgaaaatttcgtacgtcaattggtcaatcactgacaaaagcgaagcttgtgcagcgctcactggcggaacatcggctgccaatgtgagtgattttgggggccactgataggaagtgccgtccgagaatttcacgccacaaaaaagcgaatatttctcgagtcgaacactaaatctctcgaattcagccatttctcctacaaatttgctcatttcaggttggcacttcctcccgctggacgcagtctggcaatatggtagcttcgcaac

SEQ ID NO: 97295 - DNA, 504 bp, Heterodera glycines
aaatttattatggctgccgctaaagctgggataacaaaatatgaattggcaagtagttttaatctttttttattaatcgaatttctaccaaatattttctcatttacaacttatttttaaagacaaaattatgtgtacgctgctactaaaagattttttaatgcttctggaaaatatttccgttttttcatattttaaataaattgtcatttcaatggagtgattattatccatttaccaaattaggaaaaacttttaatttgaataaatatttgtcccagttttgacaatagttggacaaaacatatttggcccatccccaatttccacaaaatccctaaattgccgtattcccacagatcgcgagagggcattttactttttacattactaattacaaaaaataccgtagtccattggaatttaaattattaattttcttagattggcgtctcatcactaagttttctcgccgtttttgtggcaattttgattttgcttgta

SEQ ID NO: 97296 - DNA, 394 bp, Heterodera glycines
cggcgacaatgggatgtacctgaacatcattttgggctccaacctgaacatcaccttgcccagtccggacgagcgttaccgctacaaaaaggagtacgagtcgttcaagctgtccgtcgcttttgtcattctcgcagtgtttttcgtcgtcatttggctgcctccgattctacgcccattggacgccctttgcaactttctgttggtttggtactactgcactttgaccattcgcgagtccattcttcgcctgaacgggtcgcgcatcaaaggatggtgttgcaccattacatcacctgcgttctgtgctgcatcactttgacgtggagcggcggcgactgctacgagcacatgcgtccgacctttgttgtgctcgtgtgctatgtgagcagtg

SEQ ID NO: 97297 - DNA, 394 bp, Heterodera glycines
cggcgacaatgggatgtacctgaacatcattttgggctccaacctgaacatcaccttgcccagtccggacgagcgttaccgctacaaaaaggagtacgagtcgttcaagctgtccgtcgcttttgtcattctcgcagtgtttttcgtcgtcatttggctgcctccgactctacgcccattggacgccctttgcaactttctgttggtttggtactactgcactttgaccattcgcgagtccattcttcgcctgaacgggtcgcgcatcaaaggatggtgggtgttgcaccattacatcacctgcgttctgtgctgcatcactttgacgtggagcggcggcgactgctacgagcacatgcgtccgacctttgttgtgctcgtgtgctatgtgagc

SEQ ID NO: 97298 - DNA, 392 bp, Heterodera glycines
aggaataagtattaatgagccaagtgaatatagaaccaaagaaaaagaagccatcgcaacaagcagggcatggcaaagaaaatagcaaaaatctcgattgagtgcaaattggaactggacgaggaaaagtacgtggagtcgttctgtcccgcgatgatgaccgttgtctccaagtggtgttcgggcgccacattcgccgaaattctagaaacgtccgatatattcgagggcagtataatcagatgcatgcgacgtcttgaagaattactgcaagaaatggtgaacgcagcccggtccatgggtgaccggccactggaacaaaagtttgagcaggcccgatctctgcttaagagggacatcgttttctcagcgtcactttatctctaatttgc

SEQ ID NO: 97299 - DNA, 657 bp, Heterodera glycines
gcccacccgatggcgaacagtcagtgcgtcaacttatgttgctcaacatctcctgtcttccaatcaattatgggaccaatccgcgctcgactcattacaaaagggtgacacgaaatcgactagcggaaaaaggccctgacaatggggacgaatgcgacacgagcttttggaccatgatggcctatcgtcaccatttcaatgatcaaaatggcactgattgtgaggaagacgcctccatgcttgtgggtgccatcaccgtgtccaaccgaaacagcaactgttcctgttgcagttccaataaaaccgatggggtcgtccagccacaaaaacaaatgttttctgtccaaattcagacattggctgttttgcccacttttcgtcgtcatggcgttgccactcgtctgttgaattcgctgataaaccaatgtgaaaaatgggctaacgtcgaaaatatctttttgcactgtcagacgacaaatgaagcggcactttgtctatatcgggcccatggttttgaggtcgttcagcaaattcatggccattatcagtgcagggcaattgacggcgaatcggcggatgcttttctactcgagcgacggtttaccaatgaaaatgatgaggagagaaaagttcgacaaaatgcggcatttcactaga

SEQ ID NO: 97300 - DNA, 296 bp, Heterodera glycines
agcaggtcaccggtgccacaatgacggtgaacggaacgcgcgaaaacttccaagcacagctgagggacggcgacggtccgatgggagagcccaaattcgaacaatttgaacaacatccagattttgctttatggtgacaacaattgcatggggcctttgtgtccactagcagaggatcaaatcaacgcaaaagattgtctgccaatgaatcccgggcccaacggtcagcggaaggaaaggtgaaagaatgaattgagaaatgatatcgatcattctgaataaatttaaaggttacc

SEQ ID NO: 97301 - DNA, 238 bp, Heterodera glycines
acgcagcgagatcagctcgaatttcgtgcacaacatgcgagttttggggatcaaacatacaatgatgatgaaaaaattcgtaagctaatgacggctcttagtctccagttcgtgggaaacgcaataaagtaaaggaatatgaaatttggaagaacgaccattctttccattagaattgttcattccatgttttttttaaacttgttattcgttcaattttataaatgttcattgtttt

SEQ ID NO: 97302 - DNA, 535 bp, Heterodera glycines
ttgacatgattacgccaagctctaatactcctcactatagggaaagctggtacgcctgcaggtaacggtccggaattcccgggtcgacatcatcatcatcatggccgctaatacgactcactatagggcgagatggagcttcggcacagcaattacgaattggcaactgctttgcttcgtcgtgccactacgcctccaccagtgcgtcgtgacagttactttgatgattcggccaaagtgcaaaaccgcgtgttccgatccctgaagttgtggtcgttgtacgccgacattgaagagtcgatgggctcactggaaagttgcaaggcaatttatgagcggatgttggagttgcgaattgcaacaccacaaatcgtgataaattatgcactgtttttggaggacaaccaatactttgaggatgctttcaaggcgttcgagaagggaattgggcttttccggtggccgctcgtatttgacatttggaacgtttatctgaccaaattcatccaacgatatggtggcaaaaagctggaaa

SEQ ID NO: 97303 - DNA, 491 bp, Heterodera glycines
agtgaacgccaagccaaaataaatgccactggcgaccgactaaaggaggcgtcgaagatcaatttgtccctctcgacgcttggcaatgtgattagtgcgttggcggacgcgaaagtccgcacattccgtaccgaaattcgaagctgaatcgcattttgcaagaattgctgggcggcactgcaggcccaactgttggagcagagcaaccgttgggcaaagacgacaaaataaatgtgagcttgaacgcgttcgtcgggagttggcaatggagacgcgcttcagaacacagcaagcagaacagtgcgacattgaggagcagtacagcacactgcaggaggagtcccaggggatgggcaaatgacggtgcaatggatccaacggcaactactaacaataatcaaaggtgccgcaagatgaacagaaatataaaatatcagaaataaaagacactctttaacaatgcgagccatacatacgtcaattttgtttta

SEQ ID NO: 97304 - DNA, 276 bp, Heterodera glycines
tgtacaacagcaaaaaccaatgcgtggacagtgtggtgctaatggacgaagtcaactcgagggaccaatttgaggaggtcgaacggcaccagctgagcttcatggaacaggttctgcaactgaaagtgcttttcaacttgttgccaaaagatgcgcgttttcgtgagaggaatttgatggtggaagtgttcacacggctcaaacctttcctttgattttattttcgttttccatttcaaaattttttgtttttctttgttcgtcattaaaaagaaa

SEQ ID NO: 97305 - DNA, 292 bp, Heterodera glycines
gattacgccaagctctaatatcctcactatagggaaagctggtacgcctgcaggaaccgggccggaattcccgggtcgacatcatcatcatcaggccgctaatacgactcactataggggggggcaatttggcgaaaggaaaactacattaagaaataattaattaataatctacgacggcattcttttaactgtgagtgttttatcggtttttactttgcataaatacataatgtatcaaaaaaaaaaaaaaaaaaaaaaaaaaaaaaaaaaaaaaaaaaaaaaaaaaaaa

SEQ ID NO: 97306 - DNA, 398 bp, Heterodera glycines
taacctatgcgtttggactcagcgacaattatcaggtcacgtttcagatcaaacatgtgaagttgtggtagtgcttctcgttctttccgtcaacctgtcaagcgaaagcaaataaaatattgtaaaattgggtagcgccgatgcatatattgaaattcattaaaaatccaattattaaatttgtccatcaaaattttggcgaaacaatataagccctgaattttacacattttcctgtggcggtatcaattttaacaattgcaaaatctgatgctcgacgttcatttttattttcctaactctttattaattctattttcttctctctcactctcttgctttctctctctctcctctcacttctttctcgttgatctcagtctttctctttctctttg

SEQ ID NO: 97307 - DNA, 398 bp, Heterodera glycines
ttttcaactgttgttgtattggtaattgacccctctccgcccccgtccccttaagagaggtcagcggcaacaagaagtgcacttgcactaaaaattgctaatcaattgtttgcggtgtttttaaaaaaatgagcagcggtgccgatagaatttttcgacatatcgttaatcgattttcaccaaaaattgctattttatgggcgttcgcaaaaatttcgcgttattttttggaatttttgtgagattggatgtggaggggtatcaacaacaacaaaaaaaccgagatttttagctgctatttctctttaaaatttcgagtgcggataggtcttggggttgatagtcttgttggtctaactaacaatgaatgttatgggaaagtcaaaacgggtggaaag

SEQ ID NO: 97308 - DNA, 395 bp, Heterodera glycines
gtttcatctccgccgattgttggctttcggtgttcgatttgctcccaccttctcaacttggcctcggaattgcgctgatcagccaccgatttgacttttacatcgacgaacacttcaagactcgcaaatggacattgaaatctataccgcaacatttgtgccttggaattgtacgccaaatttttccgccgtttgcgtaaattcgtcccgtcaattctcaacgatttccatcaattcactttctctttttctatgccgacaatttcttgatcgaatttccggccgatgacaatgccatggcatcggatggacaagcggtggcaaaatggcttttcactccacgtccggacaatgtgccgaagctgttcaaatgctggttgtgtaaagatgatcca

SEQ ID NO: 97309 - DNA, 394 bp, Heterodera glycines
catactcagccgaatgaattgccgcaactgtcgccgcaggacataacaatgcattcgaaaatcattcaccagaaccagtgggatggtgagaggagtgtgatcatcacctgcagttttacgcctggctctgtctctctgacttcttaccgtctgacgcctagcggctatgaatgggggcgaaataacactgacaaaggcaataaccctaaaggttatttgccgtcccattacgaaaaagtgcaaatgcttctttccgaccgctttttgggctactttatggttccgtcggcgggtgtttggaattacaatttcatgggtgttcgacatgatgcaaatatgcagtatgatgtttgtttatcggctccaaaggagttttaccatgaggatcatcgcc

SEQ ID NO: 97310 - DNA, 397 bp, Heterodera glycines
tgactcgcccctacaaggaattcctcgttcacggacaataattgcaatgtccgatcccaatcacggcaaattttcaccggtttaccaacccctttcggggaaggacaagcacgctgattttgccagtgtagcgcgcgtgcagccccggacatctaagggcatcacagacctgttattgctcaatttcgtgcggctgaacaccgaaaatccctctaagaagttgtgcccacagaagcaatgagccaactatttagtaggctagagtctcgctcgccattttttattctgccgttttttctgcaattggtgcgccagtcgaaccgagcacaaaagaaagggaaaagcatggtgttgctgctcactatttgaaggcggaagatgaaaaattggaaaagat

SEQ ID NO: 97311 - DNA, 378 bp, Heterodera glycines
tcaggtgtcgccagagacaatgaatcagtgtccgacaaagaaggagagcagcatttagacaatcaacagaacgaacgatgcccatggagcagtgatcattcatctccagccttgcaatgcgggcggacgagcgctgttggcgaatttcctgaatcgtttggatggacaaacagtcacacaattcattttgtccctgttcgatatgtaccgtcctcactgattgtacaaatttctcgccatttgtcacgtctgtatcatttttgtgccaaatgttcccatttgacttttgtgtagttcgtttccccatttgtgtcaatttaattccacttatgaaacttgtacggcaaatggcattttaagaaaaaattttttgaaccc

SEQ ID NO: 97312 - DNA, 394 bp, Heterodera glycines
aattaatttaattggcttttttctctcttaaatgcgctcccttctgttcctcgctttcgtggcacttttcgtcgtcaaatgttcggccgatgagtcaatgcaaaatgatgaaaatgatgagcaattccctcccggaccaccgccaagcaatgaaatgtcggaagaatcaaacgatcgccgcaagcgaagccctttcttcaactttttcgggggcttcaaaaagggaggacgaggaggacggcaaaaaggggaaaagccgaacggagtgccgcccacgggaagtccacccgcggagcgggagaagcgtagcctgagcagaggaaatgccaaaatgggaggacgaggaccaatggggggacgaggaggacaaaagggaggaagaggaggacaaaag

SEQ ID NO: 97313 - DNA, 583 bp, Heterodera glycines
caaagagccacggccattgtcaaaggtccgcgggagggcgcggcacagcgcaaacactcgcggcatttgcttttcactctcggaaatattcactttcctttccaatcgcttgtctcatttcgattcaaagtttctttttgggatgaaattgctgaaatccctcccttaatttaaagaaagagtcggtactgaaaaagacattttcagttgaagcgggcgacagtttgaccaatgccattctgggcattttgccccaacaatcggccgacgacgccgaggctgacagcactgggaacggaccaatgcattcagcggaacatcaccagcacgagacggaccagcaacagcagatgatctcttcagggacgggtgccgcgtcggtggaaggaaatgccatcgccgcgggggttcggcgccattctctgctgggaccgattccaatacgttcacagcaacagcaatccgtcgaaggccaacagtcgaccattggccagccgatggtgcgcaatttgccacctgcgactgttcgcactgcgaattttgcgcaaaatcatccgcaatcgctcgtcaattcgcagcatcc

SEQ ID NO: 97314 - DNA, 464 bp, Heterodera glycines
tttagcctttttctccgctgatcgctgtaaaatgagtcaacaaaatgaagaagcacctggcaaggatcaaaaggaacttcgagcagttcaacacgacatggaacgccttttcaaagcacgagacgcgaaaggactttccgagctgtacactgtcgacgccatcttcgcgagcaatgcccatccgccgatcaaaagtcgtgcagagattgaaaagctatggatcaaattccttgacacagactctgccgaattgcatgtaacttttgacgaagtttacttttgcggcgatttgggcgtcgaaaatggcacttataaatttacgaacaacgacggcacagtgacacagaacggacttttcatccaaacttttaagcgcggttcggacggaaaatggcttatccacaacgatttttacacatgttgaaaaagaatgaatcacaatgaaggcatcagaagaaaaagaa

SEQ ID NO: 97315 - DNA, 207 bp, Heterodera glycines
  unsure (1)..(207): unsure at all n locations
aaattaatgaaaatcaactatcaaattgagatgaatctgacgaatgcggggagtttgaagaagaatacaacggaagttctgatgccgttttttgctcggacgaagcacaaaatgcagaaacacaaatcaagcagcaaaacccgatcgaaaaaattcacaatatgtgtcaaacttatttttctttcgtacaataaaacaaaagctann

SEQ ID NO: 97316 - DNA, 164 bp, Heterodera glycines
acggggacaacgacggacggagggggaggaggaacaacgacaatcagttcagaagcggaagagggagggacagcaccagcggagacggagacggaactgtacgacgcagaattggtggaacggaaagtcagagagatcgaaggcaaatggaaggtggaggtgga

SEQ ID NO: 97317 - DNA, 482 bp, Heterodera glycines
cccatcattttaaaatattccccaaaatgcgtgttctcccccttctcttttctgccctcctcctcctctctgttggcctttgttttgcccagtttgatcagtctccgtccgctgctctgaatcatgtgcgggccaaaagaggctacaagccgtggaagaagcaatccttctcctcttcttcaagcgaaatgtacagaaggagaagacccagtggtaacggtcattacagggattacaacggctacggtagcaatggatactatcgacgaaaacccggcattttagaacgggcgctgggaaaaattacgcggagctattaacggacgagcagaagaagagaagcaaaaagccaaacaatgggcgtaacacttttagttgatcaaacgatattacagtatccaacaccaaaattacagtaaccaaacatccaatggaacgaatgactcatttaattcagcaaatttgctggaattgccgataaa

SEQ ID NO: 97318 - DNA, 554 bp, Heterodera glycines
tccaattccgtccccaaaacgatgggtttttctcggaagatgaacagcaaaaatgggtcaaagaacatattggagaggctgagataatttacacgatgggaccaataaaagtggacgcatcgcttttggtagttgccaaagcgttaaaagcagtggtgaccatatctgcgggccatgaaaacatcgacaccgtggaatgtgccagaaggggcatccgaatgggctttggcggtgccattctcactgaagcaactgccgaaacggcgatggcacttttacttacggtttcacgccgccttgtcgaagcagtacaaatagccaaagaaggaaaatggccgaacaattggtcaccaaagttttgtgttgggaaagcattggaagggtcgacggttggtatttttggaatggggcgcattggacgaagcattgccgataaactaagcgcatttcgcccgcttgaaatcatttatcacaaccgtaaagccaattctgaatatgagggtcgcttccgttatgtgccatttgaagaactcatcgaaagaagcgactttttg

SEQ ID NO: 97319 - DNA, 394 bp, Heterodera glycines
aagataaatttgaggttggattagacgtgcaattttttgctccacaagaaattgaggtcagaatgccaaaagaaaagagaaaaattatccaattaaaaaaaaaaaaaacaaggtcaaagtgtcgggccaagatgtgatcattcattgtctccacgaaattcgcaaagatcagcacggaagtgttaagcgcgaaattcaccgtcaataccgactgccaaatgacgtcgacgcggcaacattgaaatctcatctgtccacccgtggcgtgcttacattgacagcctcgaaaaaggactaactgagaaggaaaattgagtgaatttgatgggaaattaggacggaaattttgctcatcttgtgagctgctgttgaaataaattgaaacaaattgcta

SEQ ID NO: 97320 - DNA, 230 bp, Heterodera glycines
aacattttcacatttattttcatcgccttgctgtgccaataccaccgcagcaaacatcatataaatgctggaccattggacgctgaaaaatgtcggcataaatgatttaataataataataataatttttatgttttaagaattaacgttttttttatttctgtcagaaataatttaaaaaaggaaagctttttgaacattttgaaaaaaatataaatttaattgccacc

SEQ ID NO: 97321 - DNA, 166 bp, Heterodera glycines
agagaattggaaaatgatccgatcagccttcactcatttatcttcggacattctgaacaaaggataactgaagaaagaatggaatgttgatcaaacaatttcaattgttttatttaacgatttctgcctccattttaattttttatttcctaactattaaattttg

SEQ ID NO: 97322 - DNA, 394 bp, Heterodera glycines
attatacccaattaaaaaaagtaaatcctctttaaaaatgaaactttcaataattttattgctttccttggccttttgtgcgtcaatcatcgatgcatatccatcgggaaatggtaaagatcttgaagctgacaacgaaaaaacggaagtgaaggaagagaagatggaaaaaagagaagcggaagtggaggaagggaagaaggaaaagaaagcaaaaggcgctgcgggggaagaagcaaaggaagtgaaaacgcgaacctaacaatagtggaaccaatttcactgtactttttacacagctgtagtcagacattgtaaattttggcatcatttacgatttaagcattcgccggttcgttaattaatttgtcgtgttgtgattttctgtactttt

SEQ ID NO: 97323 - DNA, 542 bp, Heterodera glycines
accatgattacgccaagctctaatacgactcactatagggaaagctggtacgcctgcaggtaccggtccggaattcccgggtcgacatcatcatcatcatcatggccgctaatacgactcactataggggcattttttatcggagtgaactgactaatcattccattttcatgtcaattacatattaaccataaaaaccgaaaatgtcgatggttttcattcctatgttcaccctttaaaatttaccaaatcttacaacattaaacttctattttaatttaaagtaattaactgttattatacccatgtactaataataattagtcaaaaaatttaattgtttaaaccacttttgaattagtggaataaaaatataataattagttttaaaattaatccgatgaagctgtgggtggaggacacgacggatgaggaccttttcccgcactttgacatcgtggcagatcagatccatgccgtcatccaagaccgtggtgccgttctggtgcactgcgtcgccggcgtttcccgatccgccgcca

SEQ ID NO: 97324 - DNA, 219 bp, Heterodera glycines
  unsure (1)..(219): unsure at all n locations
gatgacaaattttttgctcgtctgtggcctcaatgaacgcagtgtccgtttgggtgcgctgttttttgatgtcttttggcagttcgtcaccgatttttgttccacgaccttcgcctttttggtgacccattgccttatcattatgttgaaattgtgtcacctatttattgtttcatttctttgatgtcacaaaaacccgaatgaatgctcaatgatann

SEQ ID NO: 97325 - DNA, 150 bp, Heterodera glycines
aaatatttatggaattgggacaaatcgcatttgatatcttttcaattatagacattcttctcacattgacagttctgttgatagattcacagatttttaggaaatatgcaaattgttaaaaaaaaaaaaaaaaaaaaaaaaaaaaaaaaa

SEQ ID NO: 97326 - DNA, 154 bp, Heterodera glycines
aattcgatttggcaactctctgaggaataaataaatatccactaaaactaatcaatttttatacaattaaatttttgctttggtgtagagtcaactaacaacaaaaattccaaaataactcatttgaagagtaaatttcttacagtttgattgg

SEQ ID NO: 97327 - DNA, 455 bp, Heterodera glycines
tctcagaaagcgcttgaggatttggacaaagtgcagacggaacttgacactttaaatgaaacagccagcgacgaaatattaaaagtcgagcagaaatacaatcagatgcgaaagcccttcttcgaaaaacggacacacttcatcaaacagataccaaatttttgggtgacagtgttcataaaccatccacaaatcagcaatatcctcgaggaagaagaggaagaatgcttgcactatttgacgaaagtcgagattgaggaaaatgaagacatcaaggccggttataagttgaaattttctttcgacccaaatccattcttcgagaactctgaaatagtcaaagaattcaattggactgcagcagaaccgaacagtgtgacaactgaaatcaaatggaagcactcgacgatgaagaaaatgaggaggaggacgatggtggggatgaggaggaggaa

SEQ ID NO: 97328 - DNA, 443 bp, Heterodera glycines
cagaagtgtcgtttcgaaagcagcaaataatgttgcggaacaggggacttcttcagtttcgggaaataaggagaatctgttaaatgcctatttacagctctccaaatgccgtctcaccgcattgatcgcttgcacttccgtcagtggttttctgatgtcccccgccctctcttccgccccctcctcccttttcttctcttgcgtcgttggcactgcgcttctttcggcttctgccagtacatgcaacaacgtaatcgaacgtcagcacgataaacagatgaaaaggacgcgttcgagagtgctgcccgtggggaggttgacgcccattcacgctttgctcttcgccggtgccacgggaactgccggacttggcatcctttgcctcagttgtaatcacctcacctccgcccttggcttcgtaaatctcgcgctttacgccggtg

SEQ ID NO: 97329 - DNA, 444 bp, Heterodera glycines
gacagaatcaaagaatggatttatccgatggacgtcggcccaatgattgaagaattggataaattggcctatttttgtcgatcgcaagaaaaagactctgtgatgaaccatttgcgggaaatgcccgttggccatttcgcgctgcgactgtccggcacgaggcgaagatttttggcactgagtatccgagtggaaagggatgagaagaatcagaaagggattgcccactatttggtgcttcgcaatgagcatgggtttcgcatcaaaggttccaagcgttacttccaatcgcttcccatgctgatcacccaccactcagtgatcactgaccaattgccgtgccgtcttttgctgtccgattggcgttggacacggggagacgcaaatcaacgacgacgtcaaagcagcgggggaagcactttggcagtgctaagggcaaccgaa

SEQ ID NO: 97330 - DNA, 381 bp, Heterodera glycines
ccaaaagaagcagttgaagaagaacacggagaagaggaagggcacaataacattcattttatgtacagtatcactctggaccattaccgtacccgtccccttgttacagtgtccactcatagcgtccaaaaaccgtcgtttgtttctttcttcccatttcagtgccgtcctttgtttttgattcgttcattcgcctccatttctcttccaaagcacaaatctcgtcacaatccatcccatccgaattcatttcttttcctttttcccctcattttctccttaattcccctcccccctttaaatgccttaaccaacccaaaagatttccaaattttgttccattcaaactttaaatttgctaataataaatgcataacaatt

SEQ ID NO: 97331 - DNA, 394 bp, Heterodera glycines
ctctcactaattgttgcacattccccaattttatttcttccttagtaagtagtattggtgcacaatgcgcacttttctgttcatagccgtagtcgggttgatgttggccgtcatcttggagaatgtaaatgcgactgggaaaaattcgccgacaaagggaaaacagtcgctagacagtccaaaccatgaaaaagaccataaaaatgagcatgaaaagtatgaagcagcttacatttatcgtggcgactttttccatgactcaaagaatgagccgcatgtggaggagcaattagttgccgcaatttatgatctgatctccaagtacaaagttgatctgtacgaaattgtcatttttgtgtccaagagtccatgctttcaccaggattgtgagccc

SEQ ID NO: 97332 - DNA, 532 bp, Heterodera glycines
aattctagagctaatacatgcaccaaagctccaatctccccagagcggagcgcatttgttcgccacaaaaccaagcgccctccgggcgtccagtgttgactcagaacaactaagctgatcgcacggtcttgtaccggcgacgtgtctttcaagtgtctgccttatcaactttcgatggtagtgtatctgactaccatggtgatgacgggtaacggaggataagggttcgactccggagaaggggcctgagaaatggccactacgtctaaggatggctgcaggcgcgcaaattacccactctcaacgcgaggaggtagtgacgagaaataacgagaccgatctcttatgaggccggtcatcggaatgggtacaatttaaaccctttaacgagtatctatgagagggcaaacattgacattcttctcgtcaccggttcccgagcctcccacattgagaatgtcagacatgtgttcgagaatatgcgccgagaaaagagcactttgctcgtcattgacgacaaaatggacgtttt

SEQ ID NO: 97333 - DNA, 230 bp, Heterodera glycines
  unsure (1)..(230): unsure at all n locations
gacccaacgaccagaatttgtctgagagagagagagaggtgccgaacccgaacaaaggatgccatggcgaatggacgaattgtgccaatgccaaatgttatcggatttattaactttaaatatttttttaacgacggtcgatttatgctgttctgtttatctttatttactcatttattgctgttatcaattattttcttatttgatttaatattacgttttctttaana

SEQ ID NO: 97334 - DNA, 515 bp, Heterodera glycines
tgagcaacgcacttttgcttctccgatacgtcaccattttcctcgctcaacgactttcacccgccgaatttgcgcatttttttccttcccaataaccaaacagacaaaaaaccaaaacagttggatactgatgagtcatttgctcaacaattggaaagtgctgctccataacaatgtcggcttccgcaactttgtgctctcccgcattaatcttgaacagctcgtgctccccgtcgtccgggttttatacgacggaatgtgctcagtgcctggccatggatttcaacgtccttcccccacgtcctccccgaaaatgcggcgacagtcccaattcagccacaataactcaacagttcacacccaccaaacttatttggcactgattgttctgctcatactcagcgaagatgacttctttaagaaagtcatccatgaaatgacaatcaaaaacattgactggtacactttggaccgaacaacgcatttggcagaaaccacgttgggcggtctcattg

SEQ ID NO: 97335 - DNA, 296 bp, Heterodera glycines
aaaatgacatcaatttatgctattggaatccgaatgtacagtatccggatagacggattggccaatgcgagccatctcaatataccaagttagaatattcgaacgtgaagatagagaagaaccggaactgaaactgagaaacgacgaagctgcaaaaccatttgctttagacaccggcacaaaaagctgttaagaaacgccgaccttatttaaaaaagagacaatataatcttacattcaccttggaattttgaagaacccagtataggaatgaataattaaaatttcaaattgtt

SEQ ID NO: 97336 - DNA, 394 bp, Heterodera glycines
gctaaacgaatggcttcaaaaaaagggagtgccatcggatgaggcggctttttttcttgaaacttattttcatgagaacgagaaacaaatattaaacaacttcggaagagcattcattgcttgtcatgaaacttatggaacaaattttacgggaaaattggcacaaattggcattactgagaaaaagttagtgcaaatttgtcagtttttagggtatgatgacaaaatatttgatatacaaccaatcgacagtgatgtgaactttgggcttccggattggaaagaattttgcccaaaattaatggccaataaaattccaaaaaattcagtggttgtaatggacaaattaaattcagtggaaaccgtcggcatgaacaaaggtcaaaatatttta

SEQ ID NO: 97337 - DNA, 394 bp, Heterodera glycines
ctctcgcttgtcactcaaaaatgaatgttaaaggtggtggtatctctcaagtgaatgattccacttctgatgaaatgaggctcttcagaggaggtcttagacatgctggccaaaccccaagcagattgatctacgacactacttcatgcattagaaactatcacgataagtacagctacgaaagaggtttcattgcccactctcgttcaccatccaatcaataccttaacttccacttcatgtacggaggtttcaagaagttcgccctcgagagacacgtttaccagaactggtacagaaagaacattagaaactggtggctccctgctatcatctgctacactgctggttgcctcaccatgagaatgtacgacaatgctgcttatgactattt

SEQ ID NO: 97338 - DNA, 288 bp, Heterodera glycines
cgtcagctcgtgtcgtgagatgttgggttaagtcccgcaacgagcgcaacccttattgttagttgctaccatttagttgagcactctagcgagactgcccgggttaaccgggaggaaggtggggatgacgtcaaatcatcatgccccttatgtctagggctaccataatgcttttagtcgcttattttttgctgcatttaaaatgttaaattttaaaaataaaaataaatttttttgaattttcgtatttttaattaatttctttttacgaataaaaataattaccta

SEQ ID NO: 97339 - DNA, 201 bp, Heterodera glycines
gggaggaagagggaaaagagggctcttgacagagcggtccgcgagaccatcgacgaagcgacagagaaggccaaagagttccttgaagaaaattggagcgcatttgagaaattcgctattgtgttgcacgagcgcaaaacaataagtgcggatgaagcagaggagtaattttttcccccataaattttataaaaaaatagt

SEQ ID NO: 97340 - DNA, 113 bp, Heterodera glycines
attattcagaaaacagcttaaaaaagctaattgaagcggaaaaaatggaagaaactttgaaaatttggtagtgatttatgacattatgtgaaaaatcattttgcaataaactg

SEQ ID NO: 97341 - DNA, 252 bp, Heterodera glycines
  unsure (1)..(252): unsure at all n locations
caaaaggtggtggttatttgacgaggtcatttaaccatggttatttgacctggtcatttgaccacgaaatacgagaaaaacggtagcaaaagaagatagtaaattttctgctggagcaaccaccagtcaccgttttttaaccatgaactaacttcttttgctataccaccaactttctaccacgaaatttttatttacatatatatattttgcttcttttcatggaaaacaagaagtcaataagttgtttan

SEQ ID NO: 97342 - DNA, 337 bp, Heterodera glycines
ttcccttattgcctccatctttgaacaaattcaaacgtccaatgactgaaagttattttggagagagacaatccgggaaaagagacggggcggacagagtgacaggcgatggagaagaaaccgtggcatgtcaatcctcgactcaccaagaataatattaaacggaaaaacaaaccaatttaatgttctaaaatttgtcatgtactttcatcattccttcactttcattttattttgtcaccattatcaggcttattcctacatcagtggttcgtgtaaatgatctcatggattatttgtacatctgaaaaaaagtgatttgaataaattgtttctc

SEQ ID NO: 97343 - DNA, 393 bp, Heterodera glycines
cgcaaactatctgaaaaacccttacaaattctgcggagattattacttccagccttgcacgcaggacgttttggagccaactatgctgtcatacaaaatgagctggattttggacaaagttaagaagaaccgttcaaaaccaccgtctacgattttcatcattcgcgatggtgttagtgagggaatggttccgaacaacattcacgacgaatttccttcctatgtgagggcgtgtaagaaatatgacccgacttgggagcccaaattcgtctattgcatcgtcgacaagaatcacaacaaacgtttcttcgttaaggggcagcaacaagtcgagaatactgctccaggggcggttattgattcgaaagtggtacgcgtcgacatccacgagtt

SEQ ID NO: 97344 - DNA, 484 bp, Heterodera glycines
tcatactgaggatccgctgattgttggcatttgcgcaaactctctgaaaaacccttacaaattctgcggagattattacttccagccttgcacgcaggacgttttggagccaaatatgctgtcatacaaaatgagctggattttggacaaagttaagaagaaccgttcaaaacctccatctacgattttcatcattcgcgatggtgttagtgagggaatggttccgaacaacattcacgacgaatttccttcctatgtgaaggcgtgtaagaaatatgacccgaattgggagcccaaattcgtctattgcatcgtcgacaagaatcacaacaaacgtttcttcgttaaggggcagcaacaagtcgagaacactgctccaggggcggttattgattcgaaagtggtacgcgtcgacatccacgagttttggatgcagtcacatgttccgctcaaggggacatcaaaaatgccacaatacattttt

SEQ ID NO: 97345 - DNA, 265 bp, Heterodera glycines
acaacattgacaaagtagcgcttcttttggagctgtttgagcggcgacacttgcccctgacaaacgaagactttttccataatcctgcaattttgcgggattttggtccgaccggaaaatgtgctgtgcgagcatcgccgttttactacccacttgcaaattatacggatacgtgtacggcttcgtactatttttcgggttcattcatccatgcatgtgaatcgtacattgtttatttttttgtgtgatgaatggcacattttgg

SEQ ID NO: 97346 - DNA, 276 bp, Heterodera glycines
cgaaaccaggagatcaccttccaaatgtgcaagtggatggtgatcctgtccgtgttcttcactgcgcacaactttgccatgatgttgtacgggaccaaggagaagccgttgtggccctacacgctgttcatgaagaagagtgacggagcataaagaagctctctcgacgacacatattgtttttgtgtgtattaggtgtaaacaaaattttcatgttttatggacggaaaatgttagtttggatgtttatgttccatggataaagaaagctgggct

SEQ ID NO: 97347 - DNA, 539 bp, Heterodera glycines
accatgattacgccaagctctaatatccctcactatagggaaagctggtacgcctgcaggtaccggtccggaattcccgggtcgacatcatcatcatcatcatcatcatggccgctaatacgactcactatagggcaaatgcaaggcactctacgaattccaagcactaaacccgggcgaactcgactttaaggagggccaaatcattcagctcgattcgcaaattgacgagcattggtttgagggcacagtggacggccggaccggctttttccccatcacttacgtggaggtgatcgtaccaatcccttcttcttccacgacggcacaacaataaactttgtagaacaccgaacagatgacacaaactgtgctttgggatggtcaacagaacaagtcaaacaaactcacctaaatttgctaataattccttaattttcactgtttgtttttcgacccgagattctcttcttacaatagaaaatggcaaatttctaaaccattaacttctcagataatttgttttatttcttaaaaaa

SEQ ID NO: 97348 - DNA, 199 bp, Heterodera glycines; identical to SEQ ID NO: 61973

SEQ ID NO: 97349 - DNA, 150 bp, Heterodera glycines
gaagtgaaagcgattaaacgaaaaacggagaaaagtgtggatgatcaatcttctgcttaatcttaatttcttaaacatttaacctgtacgtattttactttattattttttcgaaaagaaaattcattttaaaaaaaaaaaaaaaaaaaa

SEQ ID NO: 97350 - DNA, 480 bp, Heterodera glycines
cccctgtcgaactgtcgcgagactcgccacccaattcgactgagacaatattcgtcataaaaggcactccattccaaatccatcatgtccaacacatcatccgtattaaagtgggcgatgttgcaccgggaacaccactaccatcttttcacggcaatgctggcattaccaatgccacaacgcctttggccgttggaaatccctacggacccacgccgcatcaagcttttagtgctgcgcctgctcagcaagacccttcggcttggactcagtattacaaccaacaacaagcgatggcaattgcggggggtccgccttcccaacctgcttcttttggtgccacgccggcacagcattaccaaacagtgcccgggactatgcaaactgctgtttcacaagcagcacagctccattcaacccaaatgcagcagcaacaaatccatcaacagcagcaagcgaccattgctcagcctcagcaag

SEQ ID NO: 97351 - DNA, 527 bp, Heterodera glycines
gtttgagatacctcctcctcccattcgttcattcttctccaattcgtcctttcccttctcaaatggcccaattccccgtcgccaacattctcctcgcctcccttttgttgggtttcgtcattttgaacagcaaaacgaatgcgcagtttcaatacggcggcggaatgttagccgaagggccccaaatggaaggccttttggaggattacggtagggtgggcgactatcccttcgaaagtcttgcaaaacgcgcgccgctcgaccgttccgcaatggccagatttggtaagcgcgcaccgctcgaccgttccgcgttggcacgattcggcaagagggcgccgttggatcggtccgcaattgcgcggttcggaaagtgaggagaaacggacggatggatggaaaccggtggaaaatggcggaaggaaaggaaccaccggcggaaaacaaacattttctgttttcattccttctcaaatttactttttccacacacattttatggcgaaaaagaaattattttctcggtt

SEQ ID NO: 97352 - DNA, 352 bp, Heterodera glycines
aaatcatcatcagcaacaaaaacagcaacaaattcatttaaattcccacaaataattaattaattaattattttattttctacaaaatgatttccgtccaattttcccccatcgttttgctgctgcttctgctcactttgctgcacctttcttcaccggccaatgctcgtccccaatggtattacgccgacccaatttcgatggccaacaatcgtggcactcttttcgacaatttgtggggacggaagtgatttggcactcaaaaagaccaacaaaacaattgtcaatttgtgcataatattgtgtaaagttttgtttaattttgttttaataaatgccattaattcaaaaa

SEQ ID NO: 97353 - DNA, 271 bp, Heterodera glycines
agtcctcaagtcaaagtcaatttgctgctccatgcgcatttaatgcgcattcagttgagcgccgagttgaccaaagacactgattggattgtgctgaaaacggtgcgccttgttcaggcgtgtgtcgatgtgctttcgagcaacggttggctttcgcccgccatccacgcgatggaattgtcccaaatgctcactcaagcgatgtattcaaacgagtcgtacatgaagcaattgccccactgcacgcctgaactgcttgaacgttgcaagg

SEQ ID NO: 97354 - DNA, 270 bp, Heterodera glycines
agcgaagaatcccccaaaaaacgcattattttaccaataatataaatgagaaaatgaatttatttaaattatgctttcacttcattttatacactgactgctaattgcatataaacgaacgaatcctttaaatgaataaatattctatttcaaataaatttattaaaaatgaaaatgttcagttaaatttcatggattgggctatgtaaatgtttaattattaaaataaatttaaaaataaagttcgtttcaaaattgcatttaatttgg

SEQ ID NO: 97355 - DNA, 462 bp, Heterodera glycines
agggttaaattctgaaaattaaccgaccactttcggataccttctagaacaacagttcccatttatttgctccgactcattgtcagaacaatgagcaagccctttcgctcatcgattttatgctgacgcttaaccccgagaaacggccctctgcgtccgctgccttggaccacaacttctttttcgagacgcccatcccagcaataaacattcaggaattgctccaacagttaagagggaccaatttgttcgagtacacttcgggctgtggagctcatgctaaccgtcgtcggccggttgctcctgccgctcccatgcaccagcaacaaatacgcggaaaaatgccttctgttgggggagcgatgcatcgggcaacgggaggggcaccgcaaagggcacaacaccaaacggtgggcggtcctccaaacatccaccggtcaacgggcggagcaccgcaaaggg

SEQ ID NO: 97356 - DNA, 145 bp, Heterodera glycines
aggatggcagcagctacaacaacaggagctaatggaaatcgattcattccattagctcctgttgttgttgctgctgccatccttagacgtagtggccatttctcaggcccctatagtgagtcgtattagcggccatgatgatgat

SEQ ID NO: 97357 - DNA, 339 bp, Heterodera glycines
cgtgtgaataaagccgaggctcattcaaaccaattaggtaattagctgacaattagccatcaacaaattggggccaaaaacgaggatgccatccaaacgcatcactgtgccgctgtttctgctgttgactgtgctcgtcttggcactccgtgcctcggagacaaagattaaggcgatggaggagaaagtgatggaggaacaggacaagaaaatgagtaaggttttcacttttctatctttccaacaacttttaacttggctttttcctaaatgccttttgctaatattttatcaatgcaagcatagttctttcataaaatgaataaatcccttttttta

SEQ ID NO: 97358 - DNA, 127 bp, Heterodera glycines
  unsure (1)..(127): unsure at all n locations
ctaaggatggcagcaggcgcgcaaattacccactctcaacgcgaaggaggactttaagcagaaagtggggaaaaannagcgcgcaacatnttcctcctcctccacccgccaatgcgtctctgatcga

SEQ ID NO: 97359 - DNA, 466 bp, Heterodera glycines
caatggagaaggagtataaacagagtgttcgtaagctgtatgctggaaaacaccgtggctatctgctaatgcctgtcgaactccctaatccaaatgatccaaatggggatcgttttagtggccaggggcatgttttgatggaggatttggtgtggcaactgagaggcaaaacacgcaacgcaacccatgggattattatgttctacgtaatcagaaatttataacctttactttatgaaattgtatccaaggtgcaatacgcgaattggacgctgtataacgtcaaatataacttttagtggattcatagtgcgatccggtcgatgaacaacactccaattgctgatggctgagtaaaagtgtattttctcaaattaacatcgaatgttattaaatccccaaattatgttttttgcgcttttattattgatcattttcaatatgcaaataaagtgtgagacgctga

SEQ ID NO: 97360 - DNA, 366 bp, Heterodera glycines
acaacaaattccttcccgaaaattcaaataatccattcaaaaaatggctttatcagcaattaaattgctttcactgtttctgctcgtcctttgtattggcatggccattgagcagacccaagcttattatggctggggtggttacggctacggctatccctacggattttatggcaaacggcaagccggctttggcccatccgcaaatgttggcacttttggtcgcaacgaaggcgaaaatgccaacggaggaggaggaggaccattttcactaaacaatttttgagagaaaaaggaaatacaaaagcaaaattgactatctcttttttgtgaacgaatttttcgtcaatacaataaaatttgacc

SEQ ID NO: 97361 - DNA, 394 bp, Heterodera glycines
tcattccttccattttcctgtgtcctaaaccttcatcaattaaaaacaatgcctttcctccgctcgcttcttctcccttccgttttgcttcttcttcttctgcttctgtccgtgtctctttgctccgcgggggtcttcgctccgctgcgtatgaagcgccaattcgattggtttggcaattcgatgggtgcgcgtggcgccggcttcggaggcggatgggtgttcggcagaagatgaaccgttaaaggcgccaaccaattaataaaataataatgcacaataataatatttatttcatttgcccccaattccccattttcaaatgaataaattatatattcacttttgtccattggttggccatttaacaaaattcaaaaaaagaaaagaaatc

SEQ ID NO: 97362 - DNA, 555 bp, Heterodera glycines
  unsure (1)..(555): unsure at all n locations
agagtaattaaagttctgcttcttcacacccagagaactgatggcaaattcattcatgcaaattatcattgttccttcataatatttgagcaaatctaatacatattatcttaaaatttatgcatttttaaattcgaaaatgggacagaaggaatcccgtcatgcgtttgtcaattgtgccttgataaggcgagaagaatttgaagacaaaattcaggaactcaacaaaaaatgtgctgagtgttttgaagaaagtactttaaatatgctctttgctacaaaatccacagaagaacgagggattttatggcagcgttctgtccgaattcactgctttacggttttcgatgaaaaaatttaccgaaaggtctacagtctttttcagtttttgaaattctacgaatcattcatccaaattttggaagcatcggaggcatctaaacaccgtgaaaactccctaaacaataaggatttaatgagcatgtcnatatttaaggaaagttgttgtgaatattctgaagacggaaggtgcataatttgttttgactctttccc

SEQ ID NO: 97363 - DNA, 150 bp, Heterodera glycines
atatatttggttattattatatttttcattttttgtagcataaatctttctgaaattaaaaaaaaaaaaaaaaaaaaaaaaaaaaaaaaaaaaaaaaaaaaaaaaaaaaaaaaaaaaaaaaaaaaaaaaaaaaaaaaaaaaaaaaaaaaa

SEQ ID NO: 97364 - DNA, 239 bp, Heterodera glycines
ttgtactgagttcggccaaaaaacgtgtaattcccccccccctcctctcacatttatttcattttccaccgcactttttattttattttatttgtcccccccttcactgaatgccattccttccttttcctttttttcccttttttcgcacttccgccgatttgtttcattcactgctcattcattcattgtcagctgaattgaatttgggcaacagaatgtgaataaacgaaccgatt

SEQ ID NO: 97365 - DNA, 399 bp, Heterodera glycines
ctcacccgtttcccttctcccttttcctccgtttccttttcattccttttcctcctctttttctttctcttccgtttcccttcttccttttcctccggttccatttcattccatttcttcctctttttctttctcttccgtttcccttcttcttctgcttctgtccgtgtctctttgctccgcgggggtcttcgctccgctgcgtatgaagcgccaattcgattggtttggcaattcgatgggtgcgcgtggcgccggcttcggaggcggatgggtgttcggcagaagacgaaccgttaaaggcgccaaccaattaataaaataataatgcacaataataataatatttatttcatttgcccccgattccccattttcaaatgaataaattatatattc

SEQ ID NO: 97366 - DNA, 409 bp, Heterodera glycines
caaaatatgctcaaaaaggcaatcaaaagcggattgccggtgtttgtcactgagagcggcgccggctcaggcggaagcaatgcgcccgttaatttgccagtaatgaaccaatggtggtcccttttggagcagctcaaaatatcccaaatcgtttgggcagtgcgcggagagggaaatttacaaaatccgctgaataaaaacacggcacccgcaaacattggacagaattgggcactaacggaatacggaaaagtggtgaagaatgtgttcacgaagaacgcaaagccgaaaagaggtagaaaagggagcggaatgagggagaaaaaggagcgaaaagcgaatgaggctgaagagaaaagaaatgagcgataaatagtaacagaaggatagagagaagagcaaattgtgc

SEQ ID NO: 97367 - DNA, 372 bp, Heterodera glycines
ggacaattcaatggccgtattttcaacaataaattgaacaatttgggattccccactttcatcacttttgcgcaattaatggacccaagcagaggattttatgacaaagacggggacaaagtgacattggccgttgatgtcgctgtgaagagcaaaagagggacgaagcgcaaattatcggatgagtaaaagtcatcatatttggtaattattcactgaattatcaaaattgtgttcattttaacattctttcactcccgaaattcatttcctcaacactttttactctcaggttccctgtctcttctgaagatatcagattattatccaccatttttgttttgctttttgattattaaatgactacatttc

SEQ ID NO: 97368 - DNA, 159 bp, Heterodera glycines
accgcagacgattacatccgatttggctgatcggactgactgatcggtgataagaatcattgccaagtcgagaatcattatcattgtccatctgctgatcatttatttgtctgatcatttgtggggcggggaattcatataaaaaagtttaaaaaaacc

SEQ ID NO: 97369 - DNA, 154 bp, Heterodera glycines
  unsure (1)..(154): unsure at all n locations
aaagcgaacgaaaaagtaccacataagaaagttctgtgcgcgttgcagtggtggcagaatggggcgggcatttgcctggggggttgttgtgatcgctaactaacaaatttgtcattgtattcccagcggaattgacggtaaatttcttgattan

SEQ ID NO: 97370 - DNA, 166 bp, Heterodera glycines
tttccggcggcgacaattcccggcccaattctcagccgaccaatttgctgttgtgaatgtgcgaagaaactgaataaatagcgaatctctttctgtcatttcttcgatgcgttttcctttgtccaaattttgtttcctttttaaaaaattaaatatttatttattt

SEQ ID NO: 97371 - DNA, 192 bp, Heterodera glycines
ttccaatcactgggattcaagctcagcaaatttattcagcatttttcttatggcataagttgttaacatttcctcatcttccttgtttatttcaattttcttacgacacaacatttctcaacattcatttttacaactttttcaaactaattctcattcattcaactgtatatcataaacgaaatttcatta

SEQ ID NO: 97372 - DNA, 394 bp, Heterodera glycines
aatttcttcatttcctttcttttcaattccaaaatcaatcctcctgtttcccagcgtcgctggtatgagcaaaaaaaaaaagatcgttccgtacttctcgagggttggaattccgtgctgaacgaatgttttctgccgttattcaatcagaaaatgaatatggccgagtcggccgacagcaaacagttcagacagttgcgcggccttttgttcggtcgattttcggagagtggccgttgcgatgtcattgttgctcaagcaaaggcattcattcgattttattcgtaaaaaataagtcatcagaagagcgagaaccacttactctgacgacaataggtaaatgtgcgacatgaggcggagattatgcgtcaaattgagcgattggaggaggaaa

SEQ ID NO: 97373 - DNA, 263 bp, Heterodera glycines
  unsure (1)..(263): unsure at all n locations
aggctttggagaacgacgggaaatatggaaacgaaaggaattggccacggaaggactgagtgaagaagaaatagagaaggcaattgagcaatgggagaacggcggaagaaaaatagtgaaagctcacaatcaacacgaggcagaagaaagccaaaaggggagaacaaaagagtgaaaaccaacacaagagaatgaccttgaagaatgccgcatttattctttaatgtcctcataatcagcaataaaactagttggaaaatann

SEQ ID NO: 97374 - DNA, 222 bp, Heterodera glycines
aatgacatcaatttatgctattggaatccgaatgtacagtatccggatagacggattggccaatgcgagccatctcaatataccaagttagaatattcgaacgtgaagatagagaagaaccggaactgaaactgagaaacgacgaagctgcaaaaccatttgctttagacaccggcacaaaaagctgttaaggttgcataaaaattcaaatattaaaaaaaa

SEQ ID NO: 97375 - DNA, 517 bp, Heterodera glycines
cgcagcgggactcaacgcggttcagctgtacatcccatggaacttccacgagcaggaaatcggaagattcaattttggaggcgaccggaacatttctcgattcatacgcatagctaaacaaaatgagctgtacgttctgatcagaatggggccctatgtttgtgctgagctcgaattcgggggacttccatggtggctgatcaaagaccaggccaaagtcaggctcagatcatcggagacaacttaccttcgccatgtccaccgttggctcgccgcccttttgtccgttcttcggccgttactgtacaaaaacggaggtcccattctgatggttcagttggaaaaggaatacggaagtgtgtccgtttgcgaccacgattacatgcgatggcttcgcgacttcgtcagagaaacactcggcgaagacgtcgtattgtacacaaccgatggacccactgagaaaatgctcagctgcggagccatcgaaagcactttcgccactgtcgactttggcact

SEQ ID NO: 97376 - DNA, 635 bp, Heterodera glycines
cacaaatgttgaaaaacccgtgggctcaatcgccgactacgaccctttggctgccgaaaagcagcaacagaaggccccagccgctggcgctgcggcgcctaaagcgaatgggggcggtttcactgtgaaggcattgtacgattacacggccgcggacaaagacgaagtcagcttcaaggagggcgacgtcattgtgaactgccaaaaagtggacgacggatggatgacagggacagtgcagaggaccttactctggggaatgctaccggcaaattacgtggaacaagtcaaacagcccgtgggacagtttaaattgaaatgaaggatttttagtcctttttgttagcgtccgtccgattgtttcatttcttttctctttaccgattttcttttgtggcctttgatttttcagtttttctttaaacaaatgtgccagaatgttcttcagcaatatttatttctgtttagcactcttagcaatcattttcattgtaagcatttattttctcaaattcacagttatgtatggttttaatttttgtcacatggctgctaatttcctttttatcgtaaccaagtatttgcttcgttcaataaaaattttctgtttctgaaaaaacaaaaaaaacaaaaaa

SEQ ID NO: 97377 - DNA, 211 bp, Heterodera glycines
aaaaagagatcacccgcgagggcaaagtggccaagattttgaccgaagaagaaattcagcgcgaaatggcggacacctactgaagaaacgaaagaatgaatgaatggacgaaagtgatcggaatgttggatcggagatacagaaatcaaaacaaaatatgtaaacatttggcgccattttgagcaataaattggttttatttttaaaaaat

SEQ ID NO: 97378 - DNA, 450 bp, Heterodera glycines
atgcgttgtgctttgtacgctttgttcgatgggcatgccgggcgacgtgcggctgattattgtgccgagcatttcgctcgattgttcgttgctgttttcaagaaatatgtgcccccaaagagtgctatgtcagtattcgagaaatccattcgtaaagtatttgtcgatacttataagggtatcgatgatggtttccttgttgaagcaagacgacagaaaccaacgctgaaagatggtacaacggcgacaaccatttttttattggataaaacgctttactgtgctaatattggcgactcgaaggctattgtttgtcgacacaaatctgaaaagagcacaaatattccgctgcaaatcactgtggaccacaaccctcttgttttgacgaacgaatgcgtattcaaaagtccggcggaacagtcaaggatggccgagtttttggcattttag

SEQ ID NO: 97379 - DNA, 481 bp, Heterodera glycines
tctcaattcagtaacatcggctaataattttgaaatgtccgcttgcatctgtccgctgtgtgatacgtcgcttgcggcgggcttggccaagttggcaaagtgccaacacattggccatggcccgtgtctttctgcccatgtcagcaagcatggcttttgcccatttttcaattgcgcaatgccgacgacggaggacgaagtgttgctcattacgcacaccgagggaaaacaatccaacaattttgctggcctggtttggcattcttttgagaaacggggaaatccattaatttattaattaaattgatttaattaccaaatttaattggccatttctaatttataccccctccccaccctaaggctatttaaaacattttttaaaagtaattgtcggcacagaaaaacgcaaatggcaaaagccgaattttccaacgaatttataaatttgtgcacagaaagatgccaaaaatgtacgcga

SEQ ID NO: 97380 - DNA, 434 bp, Heterodera glycines
tgggccgtcgtacgaaatgcttttccgtttaacaacgacaaatagaagcaaatctgctccttttctggccaaaataccgacaaaaactttgaaaagggaagtcgcaaacgaagcaaaaacggttcggtcttttggggaacaaattgaaatatcaaaggaaattaacacattgaaagaataattcaacaaatgatgacgagaggaaggaggaggagcaattcgcatctctgaaaaacgttggcatacaatcgcatcgacaagcgcaccttttgcttcaacaaaagtgcaacaaaacggggtggacaacaatcattctctgtctgaaaacagccttcgtcttcttctcccgtggattcccaaaaacttttcaacgccaaatggcttttgaaactcggaacaatgcggaaatttccggggcaatttccctttccccc

SEQ ID NO: 97381 - DNA, 150 bp, Heterodera glycines
  unsure (1)..(150): unsure at all n locations
ccatcccaaaaacttcaaattttccgcacaaattacggtattttttattggtaaaaaaaaaatattttacaactcnnaaaaaaaaaaaaaaaaaaaaaaaaaaaaaaaaaaaaaaaaaaaaaaaaaaaaaaaaaaaaaaaaaaaaaaaaa

SEQ ID NO: 97382 - DNA, 522 bp, Heterodera glycines
tctctctcactaactgttgcacatcccaattttatttcttccttagtaagtagtattggtgcacaatgcgcacttttctgttcatagctgtagtcgggttggtgttggctgtcatcatggagagtgtaaatgcgactgggaataattcgccgacaaagggacaaactccgcctggcagtccgaaaggtgggcacggcagcaacaaatcgccaacgacgccgcacagtgccggttcgccacacggcacgcagcatggtaaccaacagaaccatgctaccggacaaacgccgcctggcagtccgaaaggtgggcacggcaacaacaaatcgccaacgacgccgcacagtgccggttcgccacacggcacgcagcatggtaaccaacagaaaaatgctaccggacaaacgccgcctggcagtccgaaaggtgggcacggcaacaacaaatcgccaacgacgccgcacagtacaaaacgggaaacagaacttataattgagaaaggaaaaccgtcgccagacagtc

SEQ ID NO: 97383 - DNA, 182 bp, Heterodera glycines
gctacctatttaatgctggaatttttgttgataaaatgcgatgaaaaaaaaaaaaaaaaaaaaaaaaaaaaaaaaaaaaaaaaaaaaaaaaaaggaaaaaaaaaaaaaaaaaaaaaaaaaaaaaaaaaaaaaaaaaaaaaaaaaaaaaaaaaaaaaggcccccggggttttacccccggttt

SEQ ID NO: 97384 - DNA, 203 bp, Heterodera glycines
agacaatcgaagggacgaacggacagttcaaagccgacaacgcgcagcttacgaccgattaatgtgtatgttcgccactcagcaaaggcccgattcgtgcggattttttgaaaaagaatggaaaaatgaatggaattgtgaaaagtcgtcaccaaaatgtttaatgccagcccaaattaatgtgaataaagcatttaattttg

SEQ ID NO: 97385 - DNA, 519 bp, Heterodera glycines
tagactagtggatccccgggctgcaggaattcggcacgagggaatcttttcagcttttcaacaacaaccccaacacacgtattctaccatggctgactccactggcaacgctgcattcatcaaggccgccgatgaggccaagactctgtcgtaccagccgtccaacgacgagctcctcgagctgtacgcgctcttcaagcagggcaccgtgggcgacaacgacacccctcgtcccggcatgtttgacatcaagggcaaggcaaagtgggatgcctggaccgccaagaagggcaccaccaaggaggatgcccagcaaaagtacattgaccttgtcgaggccctcaagaagaagtaagtctgtgtatcataaaagtatgcttgtgatggctgcacctggctgcacactggctgtactcgtcgcgagtgaccgagtgagtgcgtgagttcttgttgtttgtatgtgatggatgcatttctttattttgttgaaaaaaaaaaaaaaaaaaaaaaaaaaaaaac

SEQ ID NO: 97386 - DNA, 307 bp, Heterodera glycines
agaggccaagactctgtcgtaccagccgtccaacgacgagctcctcgagctgtacgcgctcttcaagcagggcaccgtgggcgacaacgacacccctcgtcccggcatgtttgacatcaagggcaaggcaaagtgggatgcctggaccgccaagaagggcaccaccaaggaggatgcccagcaaaagtacattgaccttgttgaggcccttttgtttaagtaagtctgttgtatgataaaaatatgcttgtgatggctgcacctggctgcacactggctgtactcgtcgcgagtgactgagtgagtg

SEQ ID NO: 97387 - DNA, 114 bp, Heterodera glycines
atttccaggactcactgccagttggatgaaatgaaattcaattgtatgctttcattatgctttcaaaagttaactttcaaattaatgtccattgttctttaatttagtatgttt

SEQ ID NO: 97388 - DNA, 366 bp, Heterodera glycines
gaggcattacacataaactgatcaatgggactcatttggccaaatcctttataatgagaaaccgactgatcagctggtgaatgctgtgccgggtgatcgttttcccactgtcttttgcgtctttcgctttcataaaatgccaattccctctccccttcccatttctcacatttctgtgctttctttgctgttctttctcatttcacttttttcgctcattcgtttccaatcattccttttttgactcaatgattgatcaaatgtcctttaaatcaatcgaaacattccttctaattttaaatttaaattgttccaattacaaatgaattaatatccatctgaattttaaataaatacttaatattt

SEQ ID NO: 97389 - DNA, 197 bp, Heterodera glycines
gcatgagattgttttcactgcccaaatgccccatatgcgtgacggcgtccaattggaatattcgcccctttatcaatttctcattggctttttggacttggaatttgagttcagacccgaaacaacgtctttttcggaagacattctgatggaattcgacgttcgaatggcattttggcgccgggggggcccacccg

SEQ ID NO: 97390 - DNA, 848 bp, Heterodera glycines
gtccatttaagttgacaaacagtttcatcactttgtaaaactctgctccgatgagtccattcaatcgcagaatcagcgccaactcagcttacaacaaaagtcgtcatcaattcacaaatcaaatacgaatgcatcagtgatttactctaataagaaaggtccaattccgtcagtgctgaaccgtctgtgtcgagtggtggtactgctggagggtttccgcttaatggggatccgtccgactttggcgcggcaatgcccgcaacaaattccccacagtcatcaaatctggcggaaaaagcaacggactctctgctcaacgggctgcagaacactccggctgtgacttacgaggatttaactgtcgcgactgacggattcagtcccaacaaaatcgtcggcaggggcggctacggcgtggtctatcgcggagtgtggaaacacacgccggtggccatcaaacgaattcaggggaagtgcggaagtgacgaaaggcagcaaagggagcgaattcgtcagagtttacaagaattgaagactttggcaaagtttcgacatgacaacgttctctcactgtacggttattcgctggacgggcccgagccttgccttgtgtaccaattcatgtccaatggtacgcttgaggaccgtttgctatgccgggtaacttacaacggaaaccatttaatgggacggagccactcggttgggccaaaaagctgtccatttgcgggggcgtttgtcgcggcctgcactttctgcacaccatcaaccaaatgccaatcattcacggcgacgttaaatccgctaacattctgctggacaagcattttgagccaaaacttggcgat

SEQ ID NO: 97391 - DNA, 860 bp, Heterodera glycines
gtccaattaagaggaagcgataaaagtaattttgtcgatggattcactattattagcgacgaatgaccattctaatggagaaacagcagcaacattagaggagatctacagaaaagcacttgaatattggaactcagttgggtctgacttgaacggaatgcttgggggctttcaacaattgcaccgccccgacattaatgactccatcaattttttgtgcgaattgaggaaaaagtcctttcttcgccacttcgaccgcgcgttggactgcggctgtggcattggccgagtgacaaagcatttgcttttgcccgccttccgttccgtcgacatggtcgacttctccgaccatttgatcgctcaatctcacatttttgtgccttcttcgtccaatcccacggaaaacaattcggttggacagcgttttgtcgaatctttgcacacttttgcgccggccgaaaagggcggagattacgacatgatttggatccaatgggtgaccggacaattggaggacaaccatttggtggactttctcagaagatgcaaggagagtgtcctccgtcgggacggttgcattgtggtgaaagacaacgtggccaaagggactgaaaaagaatttgacgaagtcgacaattcatgggccaggccccgggaaatgctgcacaaattgttcgaacgagccgactgtcgaattgtgctggagagaaaacagccgaacattccgaaagctctttacgaggttcgaacctttgctctcaaaccgttgtcaaatgatgaaacaaatgggatgaatgatgattgaaaacacacatattttattcattatttacttcatgatttttcctttctctgtggtt

SEQ ID NO: 97392 - DNA, 722 bp, Heterodera glycines
gatttccttaaaatatatttgatgaagccgcaagaattttctggagctgtacaatgagcagccatctccgagtcgccactcaataattgtcctgtaaaagtgctgccgagttttactagcacatttctgcctgatttatcaaatgcgcaagtgttgaagccaaagcccaccaatgttgatcgtcttcctttatcaaatgaagaatttataactccaactcagccaaaaaagcagcaaagtcgtccaaattccccagcaaatggcgtatccaaattgatacttccgagaagccgagtcgcttcaatacgtcgtgagtcggattgcaattcagagaaaggatttggtgaggcggaagcggcacacgaaaaaatggtaaaatcggcacagcaagtcgcgatgggttttgaggatttttgtctcgacgacaaggctttcgaggagcgcaaaagggccaagtcgttgtctgagcctatttgcattttcaccaatgcgttccttccccaatgttcgtcaccgtcgccgagtaggggttcaatggatggacagaaacaatgctattctccgtctgcccagcaagtcgtccgcagcaatttggcgtattctccgagtccgagtccaactccgtctggcactcagtcaatgcaccgaatgaggtcttgcgagagtcaaacgcaccttcccgatgattaatttattgaattcgctgaaataagagactatta

SEQ ID NO: 97393 - DNA, 456 bp, Heterodera glycines
gagactttctctgtgccatcgcttctgccagctacaccgttcacttctattttcacgtttccagaacatcaattgttgagccatttgaattgttgctgaacgaacggacgaccaacgaaaagttgacactgatgaaggaaggaggagccaattttggccgaaattgttggtggacgatgaagcggtgcccaattgttggggagggggcagcggctcaattggaagacgacgacggaggaattaattgggacgacaaattgaacaatgtccaaattaatatgtgggctcccaaaaattgcattggcccattgtcttcgccaccagcagcggaagaagaagaagcgagcgggtcaatgcgaagaaaaaaggcgtctgatgagtgcgcggaagtgaattaattatatttgagaaatgctcgatcatctcaccaattgcaaatgaaatttgattgctctc

SEQ ID NO: 97394 - DNA, 482 bp, Heterodera glycines
  unsure (1)..(482): unsure at all n locations
ctgcctttacaacnggaagaacccatcagcggcggacagccgaacacgccgccaatccccgccatcgaattgtcttaccccgtctccgtcatttactgtggcgaatgttcgatgcccgtcgaatactgcgagtacagtggcaaatttgagaggtgtcagcagtggttggaacgcaatttgcccgatttggcggagaaacaaatgaaaattggggcaggagatggaaaagcggcggaggaagggaatggggaagagacggaggcaaaaaagcaccaaaagcgaggcggaaagggattgccgaaggcgagtgggggcgggaagggctcgaaagagcagtccgctgcggtgccgcggattacgctgaagacggaagtgcggagcaaaaacaaagcggtgaccgtcgttaaaggcctcaccacttgcggtgtcgacttgaaaaccgcctccaaattcttcgcaaatcgtttcgcctgcggctgttc

SEQ ID NO: 97395 - DNA, 402 bp, Heterodera glycines
aatcatattgtgcttttcgagcttcgatggaatgcgttgaagtcctaattttattattcggaaaagctcgggagatggcagaatgccaagaaattcgccagattttgccgaaaagtttgaccagcacggaactttacaaccacatttttgagaagattttccccgctttaatgccaattcgaaattcgtgtattttgacagtgaatcatcgctattgttttgaaggaagagacgccctcggagggacagaaaatcgcatcgaattggaagaaaactccgaaattgcgataattcccccaatatcaggcggatgaaaaagcatcagctgggtaacaactgctgattggacaggccgacttttgcggattaagtaaattgaaataaatttttagaccagaaaag

SEQ ID NO: 97396 - DNA, 549 bp, Heterodera glycines
aaagctggagctccccgcggtggcggccgctctccaactagtggatcccccgggctgcaggaattcggcacgaggatttaagcatgttttcgttttgttatcgccgcgctattcgcaaaagcctcgcaaatcctcagacaattgaagtgtcgtcttttcatttttctcgtgttcttgaacagaatttggacgccgcaagcaaaagggacgaaaagggggaggaagtgccattatggaaagacccgtacaaacatgcaatgccggaacaaaagaatactttttcggaatttcgagaggccaatgtgcattgggaatacgttcgacgactgctgccgcgccgtttgattccagaaataccgcaaaatgccgctgagggcgtaacaccgagcggatggagggcaccaccggaaaaagcaccgaaccttccctattacatcagaagaaaggccaaccatttgcctagcatttttttggaacggcgacgcgacgaactgaacccaaagacaatggacttcgaatatgtggaattggtcattctgacgggcatcg

SEQ ID NO: 97397 - DNA, 439 bp, Heterodera glycines
gtccttaatagaaaaaataaaaatatttattattggaagggaactctagaacgtgggttgctgaatttgccctttcacttacattcttcgaacagttcgaccttccgaccttaatgcgcaattggtactgaatgcccgccacgacttgtgacttggcactgagaacctccaaggggaaaagactgaagcgatcgtttgactcggagtttattttggccactgagcgagaagcgagagactgaacaaagcgagagaattgagcagaagcgaacggacatttgaatttgtaattggcatttatgaacagttagccaaatttccttttcattgccttgattttttcgtcgttcacattttgctctgtccatcccccgacaattgaattctgctgatcagtcattgccaatttgataagcaaaagtaaaagaatgaaaatttg

SEQ ID NO: 97398 - DNA, 418 bp, Heterodera glycines
ccgccctgcccccccggcgagccgggcaaatgctatggcagcgggtccaaagagtccaaagaaaaggagtacaaacccagcaagcgcagcattgacaacttcgagcatggcttacgcgtcgccaggggctacaagcaagaagtcggaccccctggccccgcgggaccgcccggccctcccggaccggacggaccgcccggagaatgcgaatgcaaatactgaggatgatgctgaagatggtccacgatgtgagctcaaccgttttgttcctttgcctgattatccatcgatgtgtgaaactgtagcattagtagtactgtattgtcgatggaataaaaattttattaaagaatatttttcaatgttttttttgcgaaattaatgttaagtctcgaagcgtaaataaagcaaaagctcc

SEQ ID NO: 97399 - DNA, 666 bp, Heterodera glycines
caccttagagcattaattcccacttatgttctgctattttctcatttttatcttttgctcgttttggcaaagggattcgaaggctacactttcagttgtttggacgggtgcgaatgtgacactgatgacgaggccatccattgtcacaatcgtcccgatcggcactttgtccaattgcccccgtcgcgtctccgcggtttcactgtgctcgcgctcacccgcaataacatcgatgtgctgcccagcgaagaagtactgctcgagaaactgcccgacctgaaggccgttgacgtcgaagggaatgaacatttcgactgttccacgctcgaccattatcggatattgatggtgatgagcgattgcggaaagactcccgaacaattggaggccgaccgggccaaactgccgacggacacacagccaaatgaggattgcgacttcgaatgcgtggcgaaccgacgcagtcgcgagttgcgcgagtacgtcaaacacttgtgggagatggtcaaagagaaggtgagccgactggccaagaagcacggattggacaaagtggtggacgacgtgggcaatttcttcaacgacgtgggcgaacgcatctccaacatcaaactgaagaagaagaaatgagacggacggacggaaggaacaaaagagaaaaacacc

SEQ ID NO: 97400 - DNA, 254 bp, Heterodera glycines
  unsure (1)..(254): unsure at all n locations
actccttgaaatcattatcagtgccaaatattaaggcaagaaaaacctaagatgagatggaggattcataaaactgtcgaatgtttgtaaacatcggactgatgatgcctaaatgaaattgtttggtggtcgccaatcggtccttggaatgttggaatgccgcatagaaaagcagggagaaatgggaacgaaacgaatgttgaaaagcacaggctcttttgtttgttcattttaacaaattttccacttcaccn

SEQ ID NO: 97401 - DNA, 839 bp, Heterodera glycines
gatctttccctttctcggcagggcatccgtctgaagcttttcccttctacggccatcgtctggcgaatttgaccattgcgaccgggggatttctgtacgtcggcgatcagcgaacgtttagcaaattcccttctcgcctacgaaatggatgccgattcctttttgctattttacattaagcaaagaattgagaggggagaggacggtcttcagtggtacaatcccccctattgtggggaggacgaagaagggcacgtgccggacaattggcggacaattcaacaggccgtcctctattttgagaaggacaacagcgatgaaattgagcatcaactgattgaccaattggtccaacattcggccgtcaaattcagcgcctttaaatatctcgtggatgcttacttcggactgttgcagcggcgtattgagcgaaaagcggacaattttggttgcccttcggtaacaaatttgtgcgtgcctttcctggcgatgatcgcttttaccggactcttcgcgagacgattggccgaaatggacgcatccgcgcgagtgacggaagaagagcaacaagatcggagggatttccgacgcgaaatttaccaagtgtccatctacgggtcgaccatgttgcgctacaaactgtacacatttgcgaacaacgaagacagtacagcggcgtactcatgggatcgcttttgcgccgactctctccaattggttgagcacatttcatccctcaaagaacgggaaacttcgattgcccttccctcggcttctcccctcctcggcgtcgttttgtgcggaattgcagcagcggcggttgtctattttctcatcgc

SEQ ID NO: 97402 - DNA, 313 bp, Heterodera glycines
tcgtcaagaggctttcttctgaccattgctcttctctccgttgcctaacaggtttccccaagtgcactcgcaaagaaaagagcccgccgttcgatgcccgttaacgctgccatgccggaatggaaaattttgtccgctgaagtggaaaacgatggcacagcataagaaggaggaggcaagctttggatcatcggcatgatcgaagaaggaatttgccaaaatgatgaagaataaaccaatgaatgttgtggatttgtagaaattcattcaaatgccgggaataaaaatagttaaattaaaaaaaaaaaaaaaa

SEQ ID NO: 97403 - DNA, 157 bp, Heterodera glycines
ggttcgtacaattcctgagattttcaatattgtctacgctttccacctatagagcatccgtttgtcgcgctcctctaatttctcaataacagccttgtgtttcagggtttcttaaataatctggatttttgtttttaataaatattgttgaccttcg

SEQ ID NO: 97404 - DNA, 435 bp, Heterodera glycines
gtccattaagatagcgacgatttgcgcctttatttttccattcccctagaagatggccaactgttcccattcgtttcattgtgtgactctgatgacaaaattgagacaaactttgggcccaatttcatggccatcattccgaagacgttcaaaattgtgccaacaaatcatgaaattgttttccgcactccgtcgatgaacaaaagtccgtcttcaaatcctgaaaatgttttacgcactccgacgaccagcagcattatttcgccgataattcttgcttcatttgtcatgcttatgtgttggctttttctaatttttattttttttagaattgtaatgtaattttgcacacttttcttctaccattctcgattctccattttatgtaatattacggcatttttttttgttaaataataaagtgatcgatcgacc

SEQ ID NO: 97405 - DNA, 825 bp, Heterodera glycines
atgccatccgcgcacggcgggcccacctttttgctgtggcatcgtgaatacctcaaacgcatggaaatcgctctccgtgccatcgacccatcggtggccatcccattttgggactcggcaatggaccagcgactgcccaatccggccgactccgtcatttggagcagttcgttcatgggcgcactttcggccgccggtacggtggcggacggccccgtcgccggttggattacgcccagcggtggtccgattcgacgcagtctcggcacccgtgggggaaatctgttgaccgaacaggaagtggccagtctgatcggacagccccaaattgagaacgttttggcatttacgtcgagggcacggagcggcgcctgtacgcaaccgacgccaaacccgctcagtgtgctcgagttcatccacaacggagtgcacgcctgggttggaggggacatgttgccgttgaccacctcgccacaggaccccgttttcttccttcaccattccttcattgattacatttgggaacagtggcgactgctccaccaaaatcggcagcagcgcgagacgcaatttccgcccgactcgcaaattgtgccgtgcgctggctcccagaattacctgctcagtgcgacaatgttcccttttcaagaccccgtcgtgctcaaccgagctgggttgagcaactcctacacggacagtctgtacacttacgcgccgaggcccacctgccgtgccgcaggcgactgtcgttcgcgttacttgttctgtgacacgaccagcggccgtccattgtgcacttcccggattaaacccggcggcaattgt

SEQ ID NO: 97406 - DNA, 466 bp, Heterodera glycines
cgccatttgttgctcaaatcccctttgcttgtcctttgttttgtggtcccttcgtccttttccgatccgtgtccctttttcggcgattaccaatgccccgagggctttcactgtgcatttgacaaatgccaagatgagcaggggatggagccaccgggcgattgtgccaaaatcagatgtggcaaggaatcggagtgtcggcaaggcaaatgcgttctttatgtggggcgaccgtgcggaaggaatgttttggtggcggagggattggcccgtgcggtggtatccgattgtgggccccaaggcaaatgcattggcgggcgatgtgccattgacagatgtgcggacacagtctgtgaggagatgagcgagctttgccgggatgggatgtgcatgcaattgtcctccatgttctgcttctcgcccttcgattgcggccctccgtcacttttcgagtgccatcaaaaca

SEQ ID NO: 97407 - DNA, 935 bp, Heterodera glycines
attcgtttatatataaatgaacgagaaaccgtcacatcttttcattttcccatcgaaatacgaatcttctctgtttctctctcacatatccacaaaattgttccccaatgctgcaagctcatcagtaccaacttcagcaaggtcatcgtcgcgtttctgctcgcagcattttggcccatttcggtttcgaattctcgaacgactaccgacttggctgcggacattacagtaaagtgtacaaaggctatttcaaggaagcgcaacgcacttttgccatcaaagtcaccgacttggaaagcgtttccgagaagttcaagcaaaagtttctgccacgtgagctggaagtttggcgggaattggaccacccgaacctcgtctacttgtacaacgatttccagtggagcgactatcagttcgtagtgatggaattggctgttggtggtgacttgctttcgttcctccaaaaatgtggccccgtcagcgaaacgacctgtcacaattggatgctccaaattgttgctgctttggattatctccaccgtaagggaatcgctcatcgcgatctgaagctgaaacacgtccttctttgtgaaaacggcgtcatcaaagtcactgactacggattctctaaacaaagttctgatttgtcttcaacattttgcgggtcgcgttcctattcgtcaccggagattttgcttggcatcgcttatgacatgttcaaatcggacatttggtcattaggcgtcaccgcgttcatcatgatcacaaacacaatgcctttccatgaagacttgcccaaccagcaaatcgttgactcgcagcggaagcgccgttacaaatacccgtcatggcttaacattacgaagcaatgccgcactgccatcgatgccttgctgacttaccaacccgcttttcgtccgaacatttccgaatgt

SEQ ID NO: 97408 - DNA, 445 bp, Heterodera glycines
gacccttaaagcaccggctgagcaattaagagaggcaacagacgcttatatggctcggtggccaaagctgtggaggccaaatatcaccagcgtgaggagcagaaggtcaagcagtaccaggaagaacgagaggaatgggagcgaaggatggcggagacgagacgcaaatttgagacggaacgccacaattttgagcaaaaaatgcgcatgaaaagggaacaacagacggaggaattggcacaaatggaacaacaaatggacgaacagagtcaaaaacattgccgagagcgagaacaacaacagcaacgataattaataaaataatggcaaatttgatacttacaaaacaaatacaactaattaaataatggctaattggttgatggaataatttttacaatattattcatctattttaataaaataaataaaactatttttttgc

SEQ ID NO: 97409 - DNA, 292 bp, Heterodera glycines
gttcattaaaggaattcctttgttttcgttctttcttttcatttgcatagaaggacggattggaaaatgatcaccgatatgcaattgggtatcatggccaatgttctcggcgtctccattttcattttggtcattttctaccattacatcgtcgccaaccaaaagaaacagtcgccgcagtgagcgaaagaagcgaagaaaacgccgaagaaagtcaaatgatttgatgggttatgattaattaattaatttatgtattaattgagagggacggcgcataaatttgtaattg

SEQ ID NO: 97410 - DNA, 378 bp, Heterodera glycines
tgcgtggaagaagaccgaattcgcgatcacttcacgtggtgtgcgtagagagtagccgtctggctcagcagacgggatgaaagttttcgacacgattgccaatcacttcgtgttgtctccatgtattattgcggtctcttccccgaataaccatgcgatgacaatgggtggaggaagcgattggctggcaatttgatgatcagtggaatcaaattgaaattcaaatcgatagtcagagtgaaatcggggatgggcttctcaacgaaactaccgacccaagtgatcagcaggaatgaatgagtgatttgctgagaaatgatcggttatggaactgggaattgacgtgaaatgttgaactttgttgaaaattgaattttc

SEQ ID NO: 97411 - DNA, 480 bp, Heterodera glycines
gtggatccccgggctgcaggaattcggcacgagggcaattatggcggttcaaaatccgacacagcagcagcaaacaccgtaggccgtctctgttgcagaaattgccaatggcgttgaggaggttcatggccaaatctttgaagtcgctccccgatatgtgaatctgtcatatatcggcgaaggagcctatgggatggttgtatcagcactcgacacagtcaccagggagcgagtcgcaatcaagaaaatatctccatttgaacaccaaacattttgtcagaggacgctccgcgaaatcaaaattctgtcacgattcaaacatgaaaatattatcaacatacaagcaataattcgggcgccaagcattgagctgatgaaagacatttacatcgtccaatgtctgatggagacggatttgtacaaattgctgaaaacccagcgcctttccaacgaccacatctgttactttctctatcaaat

SEQ ID NO: 97412 - DNA, 470 bp, Heterodera glycines
atcagtatacttttgttgcaatgctgccatccaatcttttcttcttgctgatgaccatgctcagcagttccctcctccatcagacattggcaaataaattttcagcagagaccgacgcagtaaatccgacgcgattaatccagagacggcatttgattcgaagccgcgcaattcacaaagaaaaaatgcactcgaacgattttgccgaagagttcccgatctctgatggaccccaagtttttgggatcggtggaaccgcggcttttgaaaacatcggcggatgggacgcggacaaaaagcgattcggaagaggaaaagtggcggaattggctgcgcaggcatttcccagctgcgagaacaatttctgatcagtgatcactgatcacttttcattttatcaaatgcaaatgatcgctcatctcacctttttgaattggatcggattttcaatcttcaataaactttattta

SEQ ID NO: 97413 - DNA, 351 bp, Heterodera glycines
actagtggatcccccgggctgcaggaattcggcacgagggaccattaagccagaaaaccattgtttttcttaatatttctccatcatatttattcgtcatatggcgtacgcaaattacggctacggatcctatggctatggtggtgaagatttttccgctggtgcttataatccgcgctaccattatgcggctgcccaaaacgcaggctttgatctgaagaccgatgatggacttccgaggaccatatatgttggaaatcttgacgtgtccgtaaccgaggacttcatcgccactttatttggccaaatcggaccagtcaccaagaccaaagtgatcttcgattcgggctc

SEQ ID NO: 97414 - DNA, 411 bp, Heterodera glycines
gacactacaagatggtgcagcgtttggtttaccgacgacgtctgtcgtacaacaccaaaagtaaccggaggagagttgtaagaactcctggtggtcgtcttgtataccagtacctgaagaaacctggcaagatccccagatgtggacagtgcaaggacacactccgtggcatccagcctgccaggcccatggagcgttcccgtatgcccaagcgattgaagactgttaggcgtgcttatggtggagttctctgccataagtgtgtgaaagagaggatcgttcgagctttcctaattgaagaacagaagatagttgtcaaggttctgaaggcacagaaggcagcagtcaaaactaaagcacccaagaagtaacctgttaattttcgtaatataaaaaatttaaaaacgaaag

SEQ ID NO: 97415 - DNA, 417 bp, Heterodera glycines
ggagaatgacgcaatttggagagcaattgacgggcgaccttaaagaagaactgcacgacgcatcaacaaatattgcaggagacaaacgaatggattgaattggctgtgttggaggaaattgtgcaccaaagggtgaagacgaaaccgaaaggcagcgaagtgatcagaacattcatcgaaagtgacaacatccgcacttttgtcgagcagggaattggcctaattgggcagtgattgtaaatttgaaaatcccgaaaaaaaaaaaaaaaaaaaaaaaaaaaaaaaaaaaaactcgagggggggcccggtacccaattccccctatagtgagtcgtattacaattcactggccgtcgttttacaacgtcgtgactgggaaaaccctggcgttacccaacttaatcgccttgcagcaca

SEQ ID NO: 97416 - DNA, 634 bp, Heterodera glycines
agtggatccccgggctgcaggaattcggcacgaggttccctaataagagaacagaacaggcgaatggcgagtcaaaatggcgttttggagaaccaactggaaatttgccaagggttggtcaacgaactccgagcggaagtcgattcattgcgcggcgaactgagcgaatgcaaattgcctttccgaatttccaacagcgaacttcaaaatatcaccgttcgtcactctcgcactggcgacgccgtggagcgaattgggccacggaaagcgaacaccaaaagtctgctgaagccacgtgcgcgtctctgttccaacactccgaaaatggctgtgccgtctgaaaagcgtgccaagcgtggattgaccaaagacagcgaagatgacgacaatttccgcaccgcggaatttgtgccgaccactccccgtccgcaatttctgttgcctccgcttgtgctcaccccgctcagcagccgtttcccccctcttccgcggcgttcattttctgtcgaaccaactccaactcatatacagaaaaacgctgaacagcaactgacaatgattcgggacggcaacggcgacatgccgtgtccgtccagtcaaaagcggctgaatgacaacggcgaaattcagtgtc

SEQ ID NO: 97417 - DNA, 518 bp, Heterodera glycines
gtggatcccccgggctgcaggaattcggcacgagggccgtaaattaatccctaaatttgttaatgaaatttaaatttacttgtaccactaaaagcgttagatgttttttaattagccatttttgtcctgttttctattttcggcacttttagggacagtttgaatacgggggcggctgttgtacgacatgcacaagcgatgctgattgtacgggcgggaagacggcatttactcggtgctgcgcggctgtctcagcgactttttcgacttcccaccctccaacggagaggagggctgcacctgggggctgtcttcggagaatgcgctgatcgccaccagcgaaaagggcgaattggtgcaaaatgtgcgagtgggcgttaatctgtgcccggcaaaagaaggcactcaatgcaattcgttgttgagaccctccgtggaatacgcccagggcaaacagcaaacggacgcttcgacgagcgccgccggcaacgcttggccgtacagctgccgaaaatcga

SEQ ID NO: 97418 - DNA, 650 bp, Heterodera glycines
gccgatcaaaccgacgtttttggggttgcttcgtcaagcattggaaagccaatcagagttgaacttgggacagggagcagaaaaacaattatttccggcaatttactaacgacagacccggagagcggctcaatagttttggtagagaagcgtcagcaaaataaaacatcggatcaggggaagtgcagccaacgattcattctgattcccggcagttctgttcactctgccaaattggatggacaattggaggaagggacgaagagtaatgccgaactgcgcgagaaggcggacggaattgagtcgggggacgaagcgacaatcgaaagccatggaaaaagaaccctgtccgaaactgtgagaatctttgacgaattcgcactttcgaggcgcctttgtctgattgatgcactaaacaaatatggcatcaaattcagcgaaaagccacatgttttagtacaaaatattgacaatggacagactgagggacaaatgccatcgacggtaatttctctgcagagcggcggcatcaaaatctatccgccgtacggaaagaatgatataatcggcggtggttcaattgtagtcaaagaattgttgcacaaactctccacagaaaatgtttttgatgagtgaatcagccgaaagac

SEQ ID NO: 97419 - DNA, 768 bp, Heterodera glycines
tgcctaatttatccatctcaacaaataaaaccgaatttccttatcttgtgcgttatccggcaacaatggctttggttgaatttaaggtaaaattggagcttgtggtaggaatttattctgctgatatgaagcttgaattgcgttcgcacgaagggaaatttatttcagaattaattggcgacgaccgtaccttagaagaattgggagtccgagatcagtgcattgtgaatgtttgcgataccagtgaaacaagaaatgataattccacgaatgaccccaatgcattttatgtaattcccgaagagagatacgccaatagaaaagacacagctcgaaaatggaaacaacaacttatgacaactgcaacgacaacaaccgatgtcgaacgatccgagcagcaagtgccaaataaaattgggcctgggaagcgctgtattgtccaactccgtgatcaacctccacgaaaagcccaaattgcttttgtcggtcctactcattttggcgaaaatccggggactactcaatgggttggcgtaatttatgacgaagcaactgggaaaaatgacggttcacttgatggacacaggtattttcgttctgagccttcacatggcgggtttgttcaaattcgagcaattgtaaatgttttggatgacgtggaacaagccgccaatgacaaagagcaaatacaacagcagatggaaattgaagaaatctaatgaccattcattacatgaaacaaggagaaatcccgtttatgtctgcatt

SEQ ID NO: 97420 - DNA, 825 bp, Heterodera glycines
attctttcgtatacctaattcctttttaaccacactgtctcggttcttataatttgttagtttgtttgcccttattgtcctcttttcccctccttttccctatttccgttgggcgaatgcttcatttcattcaatttagcagatggctttccatcaataatgttttaggaagatggggacaaactttgcttgggttttgcttatgctcggcgagggaaaaagaatgcatgggaagggagtggaagagcggcagagattgccttgggcatggcaatggaatggccagagggaataatgggcggctcttctcttttgttgggccgtgcctttttgagaatttggtaaaatgccgggaagaaaagagagtgtttaacggaggcaatgagagagttttcatctcaccataaaaacattctatgcccaaaaggatggaattttcatcttagatttctctcccatcaaaattaaatcagaaaaaatctgaaaaagtcgtagtttcttctgttcgaatggatcgtctctcgtggtatcagacgggcgagtcgatggaggaaattctctgccaagcgggcagtgttggcatttacgacggggacctcaaacagacgtcgttcgaacagggcaccgcttcactgacttatcagcgaatcatttgggccgattcgactgatccggtgggaagagagaccggttttgagtttcgacccccaaaattaaaggattgtcgccttgttcttcaccattcgatggtccacaaaatagaaaaacagcacaaaacaatgtttggacgtggcggcaaaatcattgtgacggtaaaacccgtga

SEQ ID NO: 97421 - DNA, 486 bp, Heterodera glycines
atcaaaacacccaacaacttgcacaaattgccttcctttgccttcttatccgtcccagcggtgatcagagcctcgagaagtttggtggacattagcattctgacaacagaagaaaagggtgaggaattgacggacaaaacaatgctacatctgaacacggaattcacatggaaacggcagaaattcaaagtgatgttgccccttccgagcaaaccgcaggaaaaggaggcggaagcgacatgcaacacagtgcaacaggacagaaaatattacacggaatgtgccattgtgcgaataatgaaatccaggaaagtgatgaagcacggtgcactcgtggaataggtcataaagcagtcgcagctgagatttgttcccgatgttcagttcatcaaaaagaacatcgaatcgctgattgacaaatactacctacaacgaacagaccaaaacgacgaatacgaatacatttcttaagtgcaatattgaaaa

SEQ ID NO: 97422 - DNA, 529 bp, Heterodera glycines
actagtggatccccgggctgcaggaattcggcacgagggttcataaaagataatcgaacttattcctttgcattcgacctaccctacagggttatttactaaatttgaagtatggaaatgcaagcatcgcccggtcctgactgtggctttaccaccccctcaagaacatccacaaacagtaaatttatcgtcgatgtgcctctttcgacaaaacgtgaaaagcttttgcgtggaactccgactcgttttcgacttcctcctgtgcgtcgtctgatgaagtccgctccgaatattcaccacagattctatttggcacgtgaccatatcgaaccatttgcgcaaatcgtttcattcaagcgatcagaagacaggccttcacttagcaaccgatatcggcccgaattggaggagacttatctccaacaatgctttgtacttcagggcagattgggccaaggcgatttcggagaggtggtcagtgtgcgttccaaagacgacggcaaattgtatgcggtgaaaagctctttgg

SEQ ID NO: 97423 - DNA, 618 bp, Heterodera glycines
gccatgaggcgttatttggacaccgaaaaggccgttgaggaatttggacttcgggaggatttaagagctgctttggagaatttcctagtcgagtccgacattcgttctgaccattctctgttcactttcctccacaatctcctcccttacattatgcttctcaatgtcattcttcttatacccgcggcgctgttttttctccgctcgacagtttccactcgaaaattggtcacatttcttttgctgagcactttttgttggtcatgttacgcaacttacatgcgaaaataccaggaaattttggctgaacgttttctgcgcactgacgctgtgtttcgtcgagggggaggcgtttgttctcctcaaggcttgttaagcgaggcgtttgatgtgatgctaagttatgtgagaataaaacaaaagagcgagtgtctgaaggcgtatgaggacgaactaattgctcccctctggcaagtcgacccgttgcaggtgatcgccgaagtgttgtccaactttttcctgggcggtcttcccgcttccggcacccatctgaaccttttcttcaataatttcttcgtcgacacgccctttcatttggcattggtcaaaatgcttttc

SEQ ID NO: 97424 - DNA, 527 bp, Heterodera glycines
gactagtggatccccgggctgcaggaattcggcacgagggcccgttccagcactgaaacacctggaccgcctggacccagcactgttacaccaggacccgaatcaagcacatcaacaccatctgagggaccaggaactccgagcactgagacacccggacccagcactgaagcgcctggaccgcctggacccagcactgaaacgcccggaccgtctggacccagcactgaaacgcccggaccgtctggacccagcactgaaacgcctggaccgcctggacccagcactgccggaacttcctctacaaagacctacactgttccaacaactccaaaaccacctccgtgttgttatggctgtgactaccctgtcgactgccacacttctgggaaggattgcgactattccccgcttcagccgccttatcaaagcgacccttacccggttgggaagtgcgtcttcaaaaatgtcacttgcgccgctccaaacaccggcaaagtgctcttcatgaagctcaacaatgaccc

SEQ ID NO: 97425 - DNA, 364 bp, Heterodera glycines
actcggcgacgtgagggagggcattgaaagcgccgaagccattggcgtgtcccacgggcgacaacgccgtgaaagtttgcttgggctggacgtgccgtacaaagcgcaatcgacggaaaaccaacaacagcaaaacgccgaggggcaaatgggggagcaaaaaggcaaagacggaattttggaggaaagagcggcgggaagagaaacagagaaacagccggtgaaatgagcaaatggcgagaagcatatgatgaattctgtgaaattcacaagcaatcacttttttctgtcacataaattatttaagacaatttattattaattaatggggctgtaaatttcacataaatatttattttttcct

SEQ ID NO: 97426 - DNA, 490 bp, Heterodera glycines
caactatgaaattactcaatgacccgtaaaaggaatcgtttaaaaccctaaaggcaaaagtgttgccgattattccggatctaacggatttgtcccagcgaatggcggtggcgcagtgcagaaaaaccgaccggaccggcgacaaattctgttttggaggagcccgttcaggacactgctgtatttcgtgttggaacttgtgcacatcgtttgggatttcggcggaagattgttcgtccttcgctttctcctcccctttctgctcgccttcggctcccttctcttccttttcttcgtccccggtgcgcacagttcgtatgtgaggcatttcgagaagaaacttctttggtgtttctattggctcggtttgggcgttctctcctcaattggacttggcacgggtcttcacacatttctcctttatttgggaccgcacatcgcccgagtgactctcgccgccttcgagtgcaattctttggactttcccgaa

SEQ ID NO: 97427 - DNA, 525 bp, Heterodera glycines
gcaaacctgaaaagggcattggacgaaatcatcaaaacccaggtcacccttcaggtgcttctgctgctggtagaagtgttggttctggacgccgtcttgccggtgcgactacaaactctcgttttcgttttcttcagagaggatttgtttcgggggatgttcctgccggacaatggaagcatgacaagtttgcagagctctatggaggtggcaagaagcgcatgggtggagctagcctgggacctctcaaggcggtaaagggcggtgcggggagttccattggagcacgcattgcacggaatgcaatcgagcggaattctgggggtatggtgaagctccaagtttctaacttgcccggatcggtggtcactttggatttggaggaacttttccaagacttcaatgttttcggagtcgctgttcattatgatgagatgggcaatcatttgggaactgctgacttgttcacagaccaacaatctgccaccaacatccttaacgaattcaaaaacatcgctatcgatg

SEQ ID NO: 97428 - DNA, 542 bp, Heterodera glycines
cgcggggcggcgctctagactagtggacccccgggctgcaggaattcggcacgaggcttcattcgctcataactccgtttatatagaactttgaggttctcttcagtgttcgaaactcacaggtgccaacgcgccgaacacgcctgagaaatcggccacggcgcctgaaaaatgaaggctccgcgccgacttggccgcaaaaaattgactcccccctaaaaaaaaaaaaaataatttttctgttagatgagttttttaaatttcgacgcacggcaccggattctcacttttcactgaatgcgccgtgatatataggcaaaaagtcaatttgcccactaaaaaatcttctatggcccctaaaaatcgagcttcatgggccacatgactccttaaactcgaaagttagtttcgaacactggttttaaaagtggttcaattggtttcctcgagggggggcccggtacccaattcgccctatagtgagtcgtattacaattcactggccgtcgttttacaacgtcgtgactgggaaaaccctggcg

SEQ ID NO: 97429 - DNA, 484 bp, Heterodera glycines
ttcccgtcaacgtcggaaaccaccgactcggaagagcaccaccattctttaggaagagactgaccttgaggcattttctacaccattggacgaccaaggcgacaataagccatgtctgaatgtgtttgttttgttcaaacacacattggaagaaatgaatacccgcaattcgcctcttttggtcagcatttctgatcagcaacgaattggcgaggcacgagttgcaaagcttaaccatttgatggaaatttgcacgagagaggaaaatttggagaggtcaaagcgcttggcgcaggccggcggctattcttttgacgccaatgcgccggtgccgacaacattcatcttcagctgatcgaagagagagaaagaattctaatccattcattcgtttgtctttgatcactttgggtgtaaaataattccattatgccttttacaccgcaccacttttgaataccgctcaatgttccaattattttta

SEQ ID NO: 97430 - DNA, 413 bp, Heterodera glycines
  unsure (1)..(413): unsure at all n locations
tctttcaagagatttactgacttcaagcccccgggagtctatttcttaaagcccccccccccggaatatggactttatttcagggggaggtgttctaattcagggttttaatcaaggctgtagtggcacccaggatcaacccgtggttttgtcaggcgtacatcttaacttaagcaaatattcaaaatggctgatgttttgttggcatttgttctccaaactgcactcatcgcagcggaggcgcaacttagtttcagcgcgtgcgttccttctctgcgcgaccgagaaacagtgaatgccaaaccaattcagaacatatacaaaacatggcaagatgccgcagggtgtccatgcgtgacaatgattatgtgaaggaagaaagaaacaattaataaattaggatggatttccnn

SEQ ID NO: 97431 - DNA, 521 bp, Heterodera glycines
gtggacccccgggctgcaggaattcggcacgaggaacctctctaaaaccgccgaaatgcctcccaagagtaaaaagatctctccaaccccaagaggccgtctcctacggtcctcaagtgcgtgagggcgagctcgtcttcggcgttgcccacatcttcgcctcgttcaacgacaccttcgtccacgttaccgatctttccggccgcgaaaccatcacccgtgtcaccggtggcatgaaggtcaaggctgatcgtgatgagtcgtcgccgtacgccgccatgttggccgcccaggacgttgccgtccgctgcaaggagctcggcatcactgccctccacattaagctccgtgctaccggtggtgttggccccgccacccccggccccggtgcccagtcggctctccgtgctcttgcccgtgccggtatgcgtattggccgcattgaggatgtgacccccatcccgaccgattcgacccgccgcaagggtggtcgtcgtggtcgtcgtctctgagcgcgcacg

SEQ ID NO: 97432 - DNA, 251 bp, Heterodera glycines
gaatctttttgtgtgcaacaaattccttggttttgtcagccctttctggccggcacgcgtttcaacatgggcatcgacccatggagcggcagccccgaaaggggaaacatcggattcggaaacaatttggctgcctttttttacgtttgccacacatgcagcagaggaagaagataaaaggagcgatcggtagaaaaacggcgttaatttttaaaaatttcatttgtttacaataaataaaagttgaaggc

SEQ ID NO: 97433 - DNA, 425 bp, Heterodera glycines
tgccttactcgtcgaaaagggaggaacgcagcgggtgtttaccttcgaagaggccaaggataagaattcgagtgccttgtgcgattacatgtgcgacatggtcacattcacggaaaagggcaagccgcaaatccaagtggcaccgcaagaaatggagacggagggacagcatgaggaagaggaggagaaagtgttggaacggacccatgacgacgacgggaaactgaacttcgacgattaaaagggcagagacataatttgagaagtttgagacggcactttacttcattcctcacggattttactcaatgatatattatcttcaatgtttgtttgtagccccacccaatgaaagtgaactcacataaaaccgaatttggaataaaaatgaattttgatttcattggaataaaacggctcccggt

SEQ ID NO: 97434 - DNA, 1074 bp, Heterodera glycines
ttctttataagaaagtgcatttgcgccatttgattttaaatattctgctgaaaacaatgtcaaacattcatactctcggcggtgacgacgataacaaatctcgacaaaggtccaactcaagtgacgatgaaaacagcgatgaggggaggcagggcttttttgttggcggaagtgatcacagtggacaggaagtgctggggccgaaccgcaacgaaaacatttctgctgaccatttctttgatgcaattcggcgggctggagcggaacgaattacgcaggaacagaacgaggcactgaacatgccgagacaaaccggcggaggtgctggccagtcgcatgtggcatttcgactgggcggacacggaatggagagcgaacgaatcggagggacgtcggcgaccgcggggggtaccactcgccagcaggctccggttgttgttcgtctcgtgttttggaacaatggctttaccgttgacgatgggccgctccgacaatttcaagacccacagaaccgggaatttcttcaggccgttgtgacaaagcgtattcctgctgagctgacaatggctgcgccgggccgtgaaattgacttgcgaatcgaaaagaaaggcacggaatatgaacagccaaagacgaaggcattctcgggccagggaaaccaactcggcacaatcacgccgaacgtgggagggtcggcggacgttgtttttgttgatgcgccgccgaagctttcggcagaggaaactgccaaattggtggaacaagctcaggccgaactgaaggaggatgacaatttgccaaccactcgcattcaaattcgaattccggacacggcacggcccatcgtcgcgcgccttaaccaagggcacacagtgaatcagctgcgcattttcattgtcactgccgacccgagtttggcctaccgtcccttccgccttatgacttcgtaccccactcaaccgattgacgacgagggactcagcgtcaaagacgccggactgctcaatgcgacggtgttggtcaaatttgaatgaatgagtgcctgacgaatgattgaattaccaacttcaacgg

SEQ ID NO: 97435 - DNA, 114 bp, Heterodera glycines
aaatgttatctcaatattttgcacaaaaactttatttgtgtccgcataatcgacaacgttttgataagaaactcttatactgtgaaaaaaaaaaaaaaaaaaaaaaaaaaaaaa

SEQ ID NO: 97436 - DNA, 703 bp, Heterodera glycines
  unsure (1)..(703): unsure at all n locations
gagcattttcagcagcatctgctccatcccctttcagaaggccaagncccgacaaatcagaatccactttggatcgaacttgtcaagcaaccccaaaaaaacaatggccgcctcaacaccatttgcaacctccgctgccccagcgccatcccggtccaaggccccgctcggccaagcgactcactcggttgacaagaacgcccttggcttcgacttcaacaagcttgtgctctacctctaccaaaccgtcccgcaattcattgcccccttgcgcatcgaaaagtttgccctgggccaatccaaccctacgtttttcctcgtcgatggccgtgagcaaaagtacgtcctgcgcaagaagcccgccggcgcactgctctcaccgaccgcacacgccgtggagcgcgaatacaaggtgctgcacggtctcggcacttgcggccatgtgcccgtaccgcgtgtgtacacgctgtgcatggactcgtccgtgatcggcacgccattttacgtgcggatcatggctgtatcgaggtttatgtcatgcagagcgttctcacgcacgatccctcgttgcggcacatacatactaggtcatggaattcgtcaagggccgcatctttccctcgcccgcacttcccgaaatcccggccacggaacgtcgcgcatactgggaagccgccatccgcacactcgcgcgcctgcattc

SEQ ID NO: 97437 - DNA, 716 bp, Heterodera glycines
ccatgggtgctatttttgagaacattgctttgcatgactttctcgtgaaagaagtgataaacagtttcccggacaaaaagagcatttttcttttacttgcgaaatccgatgagaaggctttgctcatctgcaacaaacaagcttttgaagaggaagtggcaaatgtttccgattggttggtcaaatcgaaattgcgttacattgattcaaatgatcgttttggaaactttgaaatggcattgccttctgaatccaatcaaatcaaagtcacgttcatttatccggctaccgaatgggacattgagaaatattcgcgtcagacgccgttcttcatttatgagacgccgggagactaccaaaatatcacttttgattatctttccgagaatgactaccttaaaccactccaatggggttacaattttttgagaaaaaaagtgagtcggagcgaattgggttttgaggatgaagacaaacagaatgggttttggtcttgcgcccaatttaaaatggaacgggacctatgttggatgatctttattttgttggaaattggcaattccccttgctttggttcagtgaggggcttgacttcccaacaatttcccctttttgggaaattttcgggaccaatccgccaatttttccagaagaaatacggggttgggccaaaatcacttgaaaatggctttccctatccgccgaatttttaccat

SEQ ID NO: 97438 - DNA, 318 bp, Heterodera glycines
gtcctttggccactgcttccgacgatgcgaccgcgcgcgtttgggacttcgcgcggtgtgcggaagagcgcgtcatgcggggccacggagcagacgtccgatcggtggattggcacccgacaaaaggacttttggccacaggttctcgcgactcgcagcaaccggtcaaactttgggacgtgaaaacgggccaatgcttggccactcttcatgaccacaaaaattcggtgatggctgtccaatggaatcggaatggcaattggctgctcaccgggtcgcgcgaccacgtgatcaaaatgtacgatgttcggatgatgc

SEQ ID NO: 97439 - DNA, 326 bp, Heterodera glycines
gtctatataaggtaatttggaatggattcttcaattgcattgacctaggagaatgaacgtcattttcgaaatcctttccttgaaaatgtggctgatggtgctcgagctgttagcagggaatggcttttgcaaaaactcgaaactctgacagagcgaattgcgtcacgaaaaattcgagcggaagagaatggaaaagttggtccttatgttggcccttctggaattgcttattctctcattaaagcgtcaagaaaactgaaccaatctcaaagcaatttgagcgattacatccggacacttcttgcgactgaatctgattatgatgc

SEQ ID NO: 97440 - DNA, 161 bp, Heterodera glycines
  unsure (1)..(161): unsure at all n locations
atccgttggggaattgcgaaagagaatggcgaaactgcgcgaaactggcattgaatatgagttcgactttgagaagaaatacaacgagtttttaaattctcaaaataccgagtgatttttgcctccgttgttttatttttttataaattttgttggttcnn

SEQ ID NO: 97441 - DNA, 562 bp, Heterodera glycines
accattgaataattatcatttaatctttttgcttgtcgcactccttagaggatttggtctgatagcgccaatgaaaattgaagaattgaatgacctggacgcggaaaattttgtgtccaagttgggcaaaatttttgaaaattcagcttgggtagtccaagaagcctatggagaaaggccatttgaaggtgtggaccaattgttcaatgcaatggaacgggttttaatgaatgctggacgagaaaaacaactgaaattgatccaagctcatcctgatttggcggggaatgaaatgtttagtggaaatctaacgcaacattctacgagcgagcaggctaatgctgggcttaacgcattaacggctcagcaattgtccgagtttaattcgctgaactccgcttacaagtcgcgcttcaattttccgtttattattgcgcttcgagaccaaaaagaaggcattgatggcattttggcggcatttcgtctacgacttaacaactcggaagaacaagaaatcaacgaggcactctcacaaattggacgaattgctcgccatcgattg

SEQ ID NO: 97442 - DNA, 770 bp, Heterodera glycines
caccgtcaaggaggtacggggcaaagaagggcggtggaaagagccttgaggatgccacgaaggcggctggagaatttttggaggagcattggaatgcattcgagaagcgccaaacgacagcagtgcgttcgggtggctgaacagcgcattgtccggatcgctcaatcaatgcactttttggtgttcccaacaacaaacgctgaacaaacggcggttgacaaaatgggcgaagtgcaattgagcaaatgcgctgaacaaacagcgaagattgttgaccgtgttcgtgtccatcgccattcgttgtgtgctggtggtgctgctggtccttcttctttctgttgcccatcatcattttcatcgttatccatttccaatccgccgattgctcattatcataatcatcatcaacaaccgaaacaacattttcatcagcaacagcagcagttgtccttcatctcggccccgtgtgcgttgcattcttcgcatggcccttcaacaacaacggcaaatgccattccggcccagttgtttatgctctcaaaaaatggtcgcgaatgttccaaactccgtgagatggtctcttctctcggcgaacaattgaatgtgccgtcgacaacaaaaatttcttaaatttacctatgcttcaaactcgttaactgtctgttgatgatctgctgtttctctctcttatggaattttaaaaatttcttttttgtcttctttttttctttattcactttgatcaaagtgctgctatgtcttttttattc

SEQ ID NO: 97443 - DNA, 526 bp, Heterodera glycines
actagtggatccccgggctgcaggaattcggcacgaggtttctgttgacccaccagcaacggaaaatgggcaacgaacacagccctggtcgctttggtggcaacggcacaaacaaagaaaagggggacgacgatggcggtcaaacatctccgagcacttccactggaattcccgcctcattttcttttctcgctaagaaacgaaattcgacaaaaagtgcgctgatgggcagcattgtcgtggtcaacgagggggccagctgttcgtcgtccgctgaccctggcaaagacgtggaccttcggaggataaaggaaattcctcgttttttgcctttactccgcggagttttgcccggtcacagagacatccccgaagcgcagcagaaaatcgacagcaaaagcattcttagttttatgcatcgccttcagcaacattttaaaagctgtgctcaaacggtggcgactgagcagggccgaatgttcgcccgaattgtcgaaattgaccaattaatttcgtcgctgttcaa

SEQ ID NO: 97444 - DNA, 486 bp, Heterodera glycines
ctctgtgccgaattcggcacgaggatttttattaaaattatccgcttttctccatactaaaaaatgaattctgcgacaatgttcactctgctgttgatcattggcactgttcttgcactgacaattggcatgccaacccccggcggatctgatgaaagtgttgcatcgatgcgccaaaagcgcggctacggaatgagcaacggaggcggaatgggcaatggattcggaggcggaatgggcaacggatttggaggcggaatgggcaatggttttggaggcggaatgggcaacggttttggaggtggaatgggcaacggttttggaggtggaatgggcggctgaagcggcggtggctatgggtacggtaaacgtcgctgatgaattactgtgttttacattatgacgacgacatttcattatgctcagattgtcttttttttacaaaaatgaaacttttttgtatttataaatgaatatttaaaattt

SEQ ID NO: 97445 - DNA, 331 bp, Heterodera glycines
  unsure (1)..(331): unsure at all n locations
gtgcctcaaagtaatcttgatatggtggcatcgtttctttcgaactttgaggggttccatgtgagcgccaacgcggcagggcatcgggcaaacgatgttgagacgagcgaagcgattgtccgtcgttctgacgcacagattgagcgactccgtcagcttgagatgcgtttcaacactttcatcgaagatttggagaaagtgcgcaaccacggcgccgaatgagaacgaagtgcagcagtaaattgacggaggatgaatttgttaaattgattctcaattgttcgatgaatcataatgtatttttgctttcaacgtaaagagcggatacnan

SEQ ID NO: 97446 - DNA, 669 bp, Heterodera glycines
  unsure (1)..(669): unsure at all n locations
ggngacccgnntaaaatgggtgcttttgaaaggaaaacgacgggaaggccatgggacgntcagcaaacgggtttgttgcattcggatgcgagcgcaaacggatgggcgaagaggaaaatggtggcaaagtgttttatctgctgctgaccactcggctgaacaaaggacacccacgcaaaattaagttgagccatttctaccgactgtttgacaaaatgaagcgcaatgggatggcaaccttccaatttgctgacccgaacttgacagtttacgtgtcgcaggcagaccctaaagcactttgccagtttttgctgcatctgtatggcttgttacgacatgccgttgatgccaacattagatgttccgccccatcatgttcatctcccgccaatgtgccgtcatcgcccccgccaatcgcaacagtttcgactgtccatcgccaatgcacttcagcaattgcgtcagcgaaaccgaccaaaatttgcattcaatcgcgacaggaataccagtcgatgatcagacaagcttcatcggccaatctgcaacgcctcgacattgtcgggattggctttcgtgccgtggacattcgttggtttggcatgcgccgcttgcaacaactttcgttggctgccaacaaattgggctcggacgaatggtgcactgaacgca

SEQ ID NO: 97447 - DNA, 700 bp, Heterodera glycines
gtccttctgccttttaccctccgccaactttttggatgcctcacattgaaatcccaccattgagaaaatacgaatacacattcgaacatgaaaaggcagccatcttcagatgggaaaaagaaagacgaagcgaacgggtcgaagaagagacagagcaaactcagcagatgagaaaacaacggcaaaggcacatggaagagaaagggacgaaaaaggacggggagagggaaagagcggaggagggacagagacggacagaaaggcgaagggataacacattgaataaccctgagtatcgaaacggagaatgtttcaaaattgaatcgcactccttgccctcttccaatgtttcaaagcccaaccaaccgccacattttgcctcttcgtcacttctaaagccagtcccaatgtcgaagagttcgtccaattctttgcacgttggcatcgcatcaactcaaaatggaaatatgttgcaaaaatcgaccaataacaatacattgaacgggttagaggaatttgagccccgacgcgacctttttgacctattagaattgcggtcgttagacgcccgaaaagaattggagaagttctttgacttgtgatacgattattttgaccaactatcatcatgttgtttttatgtaaattttattatacctaaataatatggaatcttttgcctttttaatgtaaattttaa

SEQ ID NO: 97448 - DNA, 547 bp, Heterodera glycines
cacctttgattgtgaacccaattagaaatatattcgtgaggaattttgcctgtcaattcggaccttctgaactcgctcgttcctatgtcaccgatggcccactgacagtgagcggacgcagtgcgcctgtcaaaaagcgcacaaatgccgcagacgaaattgcgcggacaaagttcgagcttttggaacctatcgctgttactgacttgccacgggcgcaacaacgttttgctcgtcaaatccacagatccaatcggactcgggtgcaaaaaatatttgccaagaatatcaaaatgatcaaaaacggcctggccggcattgcattggtggtcgccatttatttgtacacatttttcgtgatgcgaaaggaaacattcttggaagaaattgacgaagaaatggcaattgaacggggcgaaatgaaactcgatgaccaagggagactggtggcagtgaaatgagcacttttgttaatttgattttagcacttcatttgtctaatttgttttgttttattttttgaagagaaattaaattgttttgttta

SEQ ID NO: 97449 - DNA, 451 bp, Heterodera glycines
tcgtaagaacttgccgagctggagcagtacatgaagcaggacctttaaagaaggccccactatcaattctactctcgtgccatgcgtgtccgggcatatcagcaatttttgtcaccgtacaaaacggtcggtcttgatgtcatggccaaatgctttggggtcagcaaagagttcatcgacaaggaactgttcatgttcatctccttgggtgcgttgaagtgtcgcattgacacggtgaaagatgtggtggaaatggggcaggccgacaacaaattctaccagtacaaaaagttgcttcatgacggggacattctgttgaatcgtgtgcagaaattatcgcgggttatcaatgtgtgaaatgaattggaaaggatacgatttgctaaaaatgatttttcttttttgttatgtgtgattaaatatagaccaataaaaaggattgtcagcggtt

SEQ ID NO: 97450 - DNA, 439 bp, Heterodera glycines
gtccatagaaggaaatttaccagtgagtgcgaaggtcaaggcgggctttcatggtgctacatttgcaacacggacggatgtaacaaaagttggaaaaattcaactttctcttccactactccgacgagtacttcgaccaccaccaataaattgtcctctacgcctctcgcggaaatcaaaaataaattgcaatgtttggcatggaatatttgcaatttgagcacgaaattgaagcagtcaaaggtttcgcgacggttttcaattggtcaaaactgcgaggaaatggccaaagactggggacagattgaagaagatgaaaaaatcggagatgaatacgaccaaagtgccgacgaagatggccaagtgtttttggcggattttttcgttgggcgaattaatgcaaagatttaattgattttctaacaaaaattccaatttg

SEQ ID NO: 97451 - DNA, 815 bp, Heterodera glycines
actcattgttccccaacaaccaaatttgttccgcttattcaactccttttgcattgtgaggaccgacaaaagtgtggcacagtgcgcacattcgaattcactctcccggaggcccgtcaatttttactcagtttaaaagccgaggacgacgacgacaaaaataacaacaacaatcgccaactgtcgcactgatgttttcgaaaaccgcctccccctcctctgtaccctacgacaaagtgtcgggactcaaattgcccaagccgagacggttggtgtacacgcgcacgtcgttgaccatttcagtgctcctctccggtggcattggctattacatgtacaaaatattgcggggcgacgagcgcttgcacagggaatgggttgttccgatggtccaccgttggtttgctcccgaaagtgcgcacattctcggcgtcaaggcggtcagattgggtttcctcgacgattttgtggagagtcgcaaggagtaccccgagttggcatgtcaaatgttcggcaaacagttgaacaacccaatcggtttggccgccggctttgacaagaatggggaggccattgacgggctgcgcaagtcgggcttcggcttcatcgaaattggcacggtgacgccaaaagcgcaaattggcaatgatcggccacgcgtttttcgcttgagagaggaccaggcggtgattaattcgtatgggttcaacaacgacggcattggcacggtccttggccgtgtaaagaaggcatttgtgccggacagtggcgtgccgttgggcgtcaatttgggcaaaaacaaaacggcggaagac

SEQ ID NO: 97452 - DNA, 580 bp, Heterodera glycines
gtccataatgggcggcgctgctcccggcacgtgcgttctgttgcttggaggcaaagacaatccgcgctataacactgacaccaccgactcgcccttccgccaggaatcttactttttctgggccttcggtgtccatgaaccggattgttttgccgcggttgacgttgaaagtggcaaatcggccattttcccgcccaaaatgagtccggacagtgcaatttgggacggaaaaattcagcccgaaaaatggttcctggacaaatacaaagttgaccacgtgaactttcaaacgaatggcgccgaaattggccaatttttgcacaaacttttcaacgccaaaaaattattgcttttgaaggcagaaaatacggacagtggaaatgttttggagcccgcaaagttcccgggaatggacagtttctccaccgatttggcctccctttacccgacgatggccgaacttcgcgtcatcaaaactgaattagagttggctgtgcttcgttatgcctcaaaaattgctaacgaagcgcacaaagaagtgatgcgacacgttcggcctgagatgtacgagtaccaattg

SEQ ID NO: 97453 - DNA, 527 bp, Heterodera glycines
  unsure (1)..(527): unsure at all n locations
gnggcggcgctctaaactagtggatccccgggctgcaggaattcggcacgaggcttcataaaaggtgaaaatggacgaatcacttggaaataaacggcctatnaacagcacagtcaaagaggatgattcagtttcattgtgcggaagtgtcgcaacaacggccgccggggatggctctctgttggactttgggcttgacgaagaaacattggcggtcgaatccgacacggaattcgagcgaaaattcttcgtaatgaaagagggctcttttccggggaaggtttttgctttgcctcaccccgcctcgagggaacgcgcgttgtatttgttgaatgaacatggcgaactctttgaactgctccgacttgacaatggaaagcgttcttttttcttttttgattccgtcgtggccaatggctccgttcatttgtttttccctgtccatccttttttcttggccattgaatgtctccagcggaatgcatctgaacattttttgactgcttctgaactgctcgaagatgacg

SEQ ID NO: 97454 - DNA, 227 bp, Heterodera glycines
agtataaaagaatcaaagaaaaaccctaccttatcaccaatttcataagatcaatatcattgatgaccaactaccttaatagtcaagtctgaactagtgttagaaaaattaaaaaaaaaaagtaaaaaaatagaaggaataatttgagaaatcaagaaaaaaattggaataaaacatatccaaaactccaataaaccaaatcctaaattaagattaaagaaaaaatt

SEQ ID NO: 97455 - DNA, 314 bp, Heterodera glycines
ggcaatacaggaagctgaaagggaatggaggagaacggaggaaccgaggaggatgggagagggggaagaaaaggaagtgagagaaaatggaggaagcgaagagaaggcggaggaggagccgcaccgcctggacaagctcctcttttggttttacttcttccgcaaaatggtgcccgcgaggatatttcggatgaaaaaataatgtgccaaagtgcgttgtgcccttccctctgtttggcttagcccgtggcattatctcctctcctcttttgttctgtttttcactttttgttttgtcataaattatgttttcg

SEQ ID NO: 97456 - DNA, 809 bp, Heterodera glycines
agtcctgaaactttgcatccttttgatttgctattatttttggtatgttcctcagcaattttgttgcacaaacactgcccacaatgactgaagaatggaaggacgcggtgctttacgcgccgtaccaaaaggagcaagcgctgatgtaccaatatgccgacacgttggctgtccgtgcctttcttatgatggccgatctgtccttcgttttggagcagaggccaaacgcggaatttatgtccccgacgggagaagtgccctttctgcgtcttcagaacactctggtcgctgaattcttccctattgttgatttggtcggcaaaaaaggaattcgtccgtcaaatacgctaagcgctgctgaacaggcggacattcaggcattttgctcactgattgaggaaacgcttcgaaacgccgaaaaatatttgtcatggcttgacgacgaatcctacgaattggtgaccaaaaaaaggtacggcagcgtttacttgtggcctttgaattggctgctgccgacgctcaaacggcgcgaaatgcacaattatttggcggacatcggctgggcggaccttccaatagccaaagtggcggagcgatgcgacaaatgtttccacgcgctttccatcaaattgggccagcagcaattctttgtgggcgaccaaccgaccgaacttgatgcactcgcttttggccatttgtacactcttctgaccacggaaatgccaaacaaagcaattgtggagacattgagcaaatacccaaatttgatcgctttttgccagacaattgacaaggaatattttagtcaa

SEQ ID NO: 97457 - DNA, 519 bp, Heterodera glycines
gtggatcccccgggctgcaggaattcggcacgaggctacattatacattcgcctaaaacatacttttggtcattagcaaactttgctaattatttgactatgtcaaatttcggctacggccagcagcagggccaagcctaccatccccagggggccaacccataccaacaacagccgggttggaatgtgccgccaccgccccaaggacaacagccgtataatgcgcaacatttcgcggagcaaggccaggccgggatgccgaagaacgagttgggcttcaacgaccagacaattcgttcacaatttgtgcgcaaagtgttctccaccgtgggcattatgttggccgttgtcgctgtgatgagtgctttcccgttcatgcatccgcccatgatggcatttgtgcggcacaatgtcggactttatttgttgggatacatcactttcttcgtcgtttacattgcattgatctgttgcgagggcgtccgtcgatcattcccggccaatatcattttgcttggc

SEQ ID NO: 97458 - DNA, 328 bp, Heterodera glycines
  unsure (1)..(328): unsure at all n locations
attcatcaaactaatcccaacatttccttttgttattctcgacccttacacaatgccgacttatttttgacactttcctttccgtttgtaagcgccttatctcttggattagttgtttagtccgcctttgttgttacgcctcaatttgaattttattcttggccttaacattgtatataccatcttattttcttttgtcccttccctaagcatcattagtccctcctcgtttcccatttttattgtttttttttctgccggtgcttccgtttattctcgtcaccgactttttcaatttctaatcacatgcataaaatacttaatttcn

SEQ ID NO: 97459 - DNA, 230 bp, Heterodera glycines
atcaaaggtttcggaccgactttgtttcccatgcttttttcttctcatttgccagcctttgttttgtttcacaaagtacaaagccaatgaatgccccaggggcatttgtatgtttcccgtatccatcaaattggacatattccttgctgtattgttcgactgtacattcttaaacgtaacatgtaacattttgatagttactttacgattgataaattagtgttgctgcc

SEQ ID NO: 97460 - DNA, 234 bp, Heterodera glycines
  unsure (1)..(234): unsure at all n locations
gtanccccaatgatcgaacattaatgggttgttgtgccgaaggaccctttgatgggcggtgagtcttccgccgaggctaatgttctgattttgaaaagttgagcaagatacccactccaacgtgaacaaatgccaaagaaagacaaaacgaaagccaaagtaattaatgaagcaattaaagcaaatgacatttattctgtttcctctttatacggtctgaataaacaaatgtat

SEQ ID NO: 97461 - DNA, 491 bp, Heterodera glycines
ctccttcaagagaacaaccgtccgcaatctgcccatttctcgctcctctccgcgaccccccgcccgacacttcaaacaacgaccaccccccaaatacaacaccatgtctgccattgctgaaaaggccgtcaagattgtgcactgtgaggaggcggaggtcgaggaagtcgaagaagtcgagatttccgaccccaaggagcaaatcgccgaggagtgccgcgagcttccgtccaacgccccgctccgtgaggcgcttgaggcgtgcactgcccgcgttgaggccggtgccgaggagacctgcgttgaggagttcttcaagcttcaaaaggccgtcgaccaatgcacctcggcgaccctcttcaccaagctcaagtaatcagccagtgtcgaccactttcccccatcctacattccgatgtcctctactctctaaacttcttagccgccttgttttccctccgttcctccatgtatttctttttcttctctta

SEQ ID NO: 97462 - DNA, 461 bp, Heterodera glycines
atctctcaatccctttgtcagtttatcattctttgttccattccttaaagatataatggaacaatatttttaattgatattttttagaatgcgttttttaccgtcgtgattatttaaaattttcttaaaagcaaaattaatgggaggcaaacatctgaggcgcaatcatagtcactagaagtaattggacgataattatcgcctagaacaaagcctgcgggtgttctattttccaattccttcaaaatgtcaacccttttatatgcgttaattaatatgtcactttacattgtcaataacataagtgatgcgcgtgtacaagcaggtggcattcacattgacctggaaaatgaaaaattgatttgcctaattattccttaattaatttttacataatcgcaagtgtcacagatgggacagatcaattcatggctaattcgtccttggcatacatcattgct

SEQ ID NO: 97463 - DNA, 698 bp, Heterodera glycines
attcgttaaaaacagtttttataatgaagccagacttaaaagacccttactttatgtacaaattaattgttggccaactcttttacgatggtcatcaacaattggcactgaacttggcacaaacgcttggtctttcgctacgaccgcctcctccatctgacaaactttttcgtcttgtggcaatagctaaacaatttgtggaagatcccgagtctaaagaacgggagacaatcttgcaggtcggtgggtttgagtctgctgggcttgacttggaattcgatgctgatgttgtcccgacaagccctgaaccaagtttgtacgaaactgtgtacctcaccacacacaaggccccgtgtcgggcggctgctttctctccagatggagctcttgtcgccacggcctccaatgattgttcaattaaaattttggatgtcgataaaatcatttccaggattgacgtgactctgagtgagtccggccccgacgcccatcacccggtcattcggaccctttatgaccacctcgatgaagtcacttgcgttgctttccatccccgcgagtccgtcctcctttcgggcagcaacgattttacgctgaaaatgttcgattattcaaaaactgcgggtaaaagggcaatgaaaaccatcacggaggtcaaggcgatccctgcggtcagttttcatccgagcggagagttt

SEQ ID NO: 97464 - DNA, 390 bp, Heterodera glycines
gcggcactctgttgcgctacgtcgcctcctggctccagtcgctggtgacctttgagctgcccggcgcgtactccgccgacgatcggctcgacctgaacagatacgagccctacgagttgttggcccgctgccgacactttgtgcagcagaaagacttgctgaacgctgtccgagtggccaatctgatcagaggcgagtcggctcggattttcagcgattggctcaacgacgccaaagcgcacttggaagtgcggctgctggttgagctgctctttgcccatgctcaggcgacgggaattaggacgacctattgaaaatggacaaacgaacgaaggaatcaatcattttatttgatgtgttttcaaaataaattatgtaaattacctaatt

SEQ ID NO: 97465 - DNA, 340 bp, Heterodera glycines
aataatcgacaatgatatgccggaaggaccgggcagaaggcttcggaaaaatgtggccaatgttcggaaacacatagactacatcgcaaacgcactcaatcacatggaggggagcctttgggaggagccggaccgaagtcaattgcggtgggaacggaggggcattaagggggacattcgctaccaggggaatgggttaaggccgagacttacgacaaaagtgccggaggaacggcggttggaggaaattagggcgcggcgggacgaagcaaagggaagggaacgaatcaagacagtaagctggaccaccggagggcaaacgagcagattagcggcggct

SEQ ID NO: 97466 - DNA, 408 bp, Heterodera glycines
gaccgtccaaggaagcatctttcaaaatttatttattttttaatctttagaattatttttcttaaaaaaaattaaaagttggcgtggaaaggagccgaatctcctccaaaatattttccgttcataaccactgacaatgagacaagaacttgacaaaaacggaactgtcaaaattttcttaaatggaataaatattcttaaattaatttccccccccccccgaacaattgagcacggcgtttacctgctgtccttttgtactgcgatttgctgaccaatcgctgcttttcttctcgtcggcgcgttcttctactgccgattggaaccgttccgactcagccatttgttgaggagcagtgaacgccacacaaaagcagaagcatgatgatgatgatgatgagagcaaac

SEQ ID NO: 97467 - DNA, 708 bp, Heterodera glycines
ccgcgggcggcgctctagactagtggatccccgggctgcaggaattcggcacgagggttccttacggatgattctgaaagttgttcagcagaacaggcttttactgccgatgaggttgagtcgtccagtaggaggtccagcacagataacttgggaggtgattccgactacggcgatgactcggtgtctgacacagattcggatgacgaaaatgaaaagagcaaaagttcgacgctgagagaacgcatgaaatatacggactcgaaaatacacgacggaaaaacaaatacacaaagtgacactgagacgaaaaatttgctggatgacatgggcgaggaaatggacgacgatttgtcgatattgcacgagatgaattgtcgtagtaaacagaatgggtcgtcagagttagactcaaaactctttgagctctccgatgaacagttgaattattacaccaattgctttctttttcttatgcagaaatcgcaggggttcttttctctgcaaggggcgctccaaggcaatgacagaacaattcttgacttcttccgcaaaagttccctcgacgattcaattctttccaaaatttggtctctcagcgatgtgaacgaggacggatttttgaatttgacggagtttattttggccatgcatttggtcgttttgcacaccaaaggttctgttcctatcccaagtaggctcccttcc

SEQ ID NO: 97468 - DNA, 386 bp, Heterodera glycines
aaagggccgaaatcgcaaaaaaatgaaactgaaaagccgccccagcagaagcagcctcaagaaaagccgggggcgcaacaggacgacacggagacggaggaggacagcaaagaagacaagcggaagccgataaagtgtcaggaggagaggaaatgctacgcacactcggagtgtggcgcaaggagcaaatgcaaaccggcgacgctggacaggaagaagaaggtgggcacgtgcgactgcggcgtgtgcgggggattccaactgttattgctgtgcagtctcaacagtggcgccctttcccttgacaaaaacattgtgccgcgggagtgtgccggactgaaagatgcttgtgtcgaaaagccattattcgtgggcagcaaatccaa

SEQ ID NO: 97469 - DNA, 153 bp, Heterodera glycines
agagagaaaagggagggagaaagaccttataagaatataaaaaatgattaatgattcattttcctatttttatatttaaaaatgcttgccgcaaacacataaaagagaaaaattgttctaatgaaattttaaatgaataaacaattaaacatt

SEQ ID NO: 97470 - DNA, 198 bp, Heterodera glycines
tatggcccaatatccggccccaaattccgccccccctgggcaaagatatgcaaattcactataggagagaggagagaaacagagaaaaagagtaaaaaaatatgcgcgagaaaacaaagaaaaataccacttaatcctgtgtaaaatccttaattcgttgtaaacccttgccccccagggcagagaaaagcgcatttg

SEQ ID NO: 97471 - DNA, 474 bp, Heterodera glycines
gtcttacatgctcccgcacttgcacaatgggtggcaggttgaccaggccattttggctgaggaggaccgtgtcgtgctcatccgatttggccacgattgggacccgagttgcatgagaatggacgagacgctttacaaaatcgccaacaaagtcaaaaactttgccgtcatttacttggttgacatcagtgaggtgcccgacttcaacaaaatgtacgagttgtacgacccggtcaccgcgatgttcttcttcaggaacaagcatatcatgatcgacttgggcaccggcaacaacaacaaaatcaattggccaatgcacgacggccaagaactgatcgacatcatcgagacggtgtaccggggcgcacgcaaaggccggggtttggtcatctcaccgaaggattactccaccaaatacaaatactgagcaacacaaatggcgacggagcagaaatcgggcggccgcatgttgtc

SEQ ID NO: 97472 - DNA, 231 bp, Heterodera glycines
  unsure (1)..(231): unsure at all n locations
gaagggagttggggcgaagtttttcgggactttttatcaaagttttcgccgttttttcggtttcttcacagaaagggttacataacttcggttttgtaacccagtttcgcgttctgtgcgccgattacatcttatcgcgtacgcgataaacatgtggcaagcatcgttgcaggattcagatgtttcctccttacttggncggctaaggnatggatttttttttttatnccc

SEQ ID NO: 97473 - DNA, 219 bp, Heterodera glycines
atgttccaatttggatccagctttgattaacgttttgttggacgatgtccaattgctaacagactctcaaactgataatgatacgttgctgtttccaattgtaaaagcttttagacaacttcatgctcaattgaaggaggagcttagttgcgttttaagtggacaaattggcagtgaaccaaaaccttttactctactttcgattttggaaaaacaacc

SEQ ID NO: 97474 - DNA, 528 bp, Heterodera glycines
agtggatccccgggctgcaggaattcggcacgagggaaccctaaagctcataatcactattccataaattcgacccaaaatgagcaaagcaattataaaagtgcgaattgttcagattattgaagcagacgaagctgctgggcaacctaagcaagtggtggctgagtatgtggacgacccgagcagacgagttaccatgaaagcaagcggagaggtccgaattggccaacttgttgctttctttgaaggtcctgacagaaaccgcattcagcgatgcttcacgaacaacaacaacaactgatttgaaggatttgataaaaataaatttgaaaaacgtacatatgtaatcctttttgaaagcgcaataaaaaaagcacattaaaaaaaaaaaaaaaaaaaaaaaaaaaaaaaaaaaaaaaaaaactcgagggggggcccggtacccaattcgccctatagtgagtcgtgttacaattcactggccgtcgttttacaacgtcgtgactgggaaaaccctggcgttaccca

SEQ ID NO: 97475 - DNA, 299 bp, Heterodera glycines
  unsure (1)..(299): unsure at all n locations
atcatcaaaagttccgtttataatccatgtccattcaacgtccctgaaggaggactgggacaatcgcgaactgaacagcattatatccgacaacatccgccaaatttccgagtttttgagtcatttcgacgagacctgcaaggcaaaattggccacgctgaatgacaccatcacatcgatggagcgaaaggtggaatttctcgagtcgacggtgaccagaggagaaacgctgaattgattttccttccttctcatttttatttatttatttttgtaattcaataaacgtttctgaaacn

SEQ ID NO: 97476 - DNA, 289 bp, Heterodera glycines
  unsure (1)..(289): unsure at all n locations
tttggcttctttcgccctctgctcgcccaatgctgctgatctgctaaaatttaaacgagaagcggcgatcagcagttgtggagctggacagtttgaatacgggggcggctgttgtacgacatgcacaagcgatgctgattgtacgggcgggaaactatgtgtgccaattctcaacttgctcagcgtcagtctgggctttgccccatgcggaaattaagacagaaaagaaagcagcagcaaaagagggctctgatattttttttttttgataggattaaatganagaatg

SEQ ID NO: 97477 - DNA, 426 bp, Heterodera glycines
cgactttacaagtgatttcaaatcgctttgtaggacttccaggggcccgaaaattaggagatgagttttccagtgccttctgacgatgatttttatgatgaaacaacagactatttatatttgaccaatgacaatgcaaatccgactaactgtgaacagactttggcgaatgaacacagtgccgtggcactttcgtcggcaatccccggcaatgatgaaaattcctcgtcgcccgccgttccctctgaacgaagtttagaattgctgaagaaatatttcggttattcgcgctttcgccctttgcaatacgaagtgatcgaagcggctctaagcaaacgcgaccaattggtcgttatgtccaccggttatgggaaaagtgtgtgctaccaattgccctctctcattcaaaataatctcactttggtc

SEQ ID NO: 97478 - DNA, 255 bp, Heterodera glycines
  unsure (1)..(255): unsure at all n locations
cgacgatgttatttatctagaaggacaaacttttttaatcggctcccttggagcgaattatggagggtcggggagcgcattgatcacccccgaaggtgcgctagcgggaatccttgtcggttcggattcgaaaatgaccgtcaatgatgcacttagtgaatggctcgattcactacatgaacaaaggcactcaaaaatggtcgatatcggtgccatactaatttcctatcgaaacatgataaacaattaggttcn

SEQ ID NO: 97479 - DNA, 645 bp, Heterodera glycines
cggccgttactgatgaagaacatttggcagttggacaatcggtgccactaggcgctgatgctgacgctgtccgtacagccaacccccgtggtgcgcttcactcggtacatgaccacgccggtgtttgacgacgagttgcaccacctgatctggactgagatgcattggcttcgtgatcgcaattacatcatgtgggtccgcttggtgctggacggacttagggcactgatcgtggaccggcacaacactttgggcattggcccggcccagcagctggcggcagccaacaaaaagtgtgccagccatggcttcgtcattttcagtgcgttcattgccgtcctctgctccatcgttggcactatgtgcgcaccgctgctttggcataaatgctgtgaacgttttgggcccattgttggaaagccttcactgccattcccgatggtccgctttaacaatgaacgtgacatcggcccttacacaacgacaaacaatggccaccaacagcaacaacaacaatgaagcaattacaaatggactttttaagaatttaatgcacagcgaatgctcgatattaataaaataaagttacaaagagatattttaataaatattaacccattttaaacaaatacatattaatgtggt

SEQ ID NO: 97480 - DNA, 440 bp, Heterodera glycines
gacacaatgatgagaaggtatggagaggtatgtactgtactgtagactgcacacacttttgaagtgcacgtttgtgttgtgtcgctgtccttcaccaaacacaccgtttcaacctaaccaaaaaccatattaatcggttatcacgtgattaaccaacggttttgtttttgtaactgaatcacgtgactacttcttgtctccatcctttccaaccgaaccgtaccggttattttcagccgcaagtgcctgactagttgggtctcaaattttggatataaaacggagtgaatagtgaaagcccagcccaccaagtggcataatacattcaatataaactttatatagtaggccttaccaaagtatcgataagtgctatcacgaccttgcataagtttctggtagataaatccctggaatgcccattccaccagtagtagaca

SEQ ID NO: 97481 - DNA, 718 bp, Heterodera glycines
gaccgtttgattatttttgtcagagagcatctgcggaatggctgccgaatttgccaagccgaaatttgacggcaaaatcttccaaaaccccgacagcttcacaacatgaaaaaacccgccttcggcaggagacccgagaagttggcgggacttcattaaatggaaatgggatgcaaagagcacgaaactgcccaatttgaaagtgcttgaccagactttgccggtgttaaagcctcggttccaaacggattctcggctttcggccacttggctcggccatgccacactttttgtgcgcattgacggcatttcagtgctcacagacccatgtaaattccgccaaaatttccaaaggtttgggcgatgtttgccactccttcgttccttcccttcttcaaattttgcccgcgttttcgtccaccgccgtgtaaaattgaggaattgccaaagattgacattgtcctcatctcccacaaccattacgaccatttggacgtcgtcgccgtccgtgagttggcacaacactttcctcacatcatttgggttgtgccgttggggcttaagcaattggtgcaacacgagacgaactcaaaagcagtgcacgaaatgaattggggtgaccgtctggaactgcaattaaacgagagaacctttgaagtgttcagtgtgccggcacagcattggtcacagcgaaacttaattgaccgaaacacgtcat

SEQ ID NO: 97482 - DNA, 703 bp, Heterodera glycines
gttccatattcaccttcaaaaagagcgttcctttgccgaaccccgccttcgaggttacgccgccgaagtcgcaagtgctctcggctatttgcacgcgaaggatatcatttacagggatttgaagcctgagaatttgctgctggacagaaatgggcacgtcgttctgacggacttcggcctgtgcaaagagcacgtcaaaatgcggcagaccaccagcactttctgcggcacccccgaatatttggcgcccgaagtgattcagaaaaagccgtacgatcggacggtcgattggtggtgtttgggctgcgttctgttcgaaatgctcttcggattgccacctttctacggtaagaatcagaatgaaatgtaccacaagacgctcacccaaccgttgtgcgttccctcgtccgcttcgactttagtgcgcaaattactcgtcgaaatactgcacaaagaccgttcggaacgattgggcgcaaaatccgattttgaggaaatacgaagccatccctttttcgcaccaatcgattgggacaaactgctaaacaaagaagtgaaggcgccgtttgtgccgaaagtgcgtgccgaaacggacactttgaacatcgcgcgcgaattcactgacattgagccgaaccctgcttctttggtgcctttgcaaacattcgtcaacagagaaacggaattcgccggattcacttac

SEQ ID NO: 97483 - DNA, 520 bp, Heterodera glycines
gcttgtgcatccttttttgtaatttgtgcctttttggttctccttttcggcattggcgttgtcttttcgtcgctctgttcgatcgatccgccgacgacacttccaatttcgactccgaattcactggcgaagcgcccaaattgacgccggtcgaccgattgttcctaatgaatttggaccagaacgaattcgaagggttcacttttgtcaacgcggaatttacgccccagggcgaaaataaaacggcggacaaaacaatttgaaggggcggaggacgacgacgaaacgaaagatgacgaggacggaccaacagcagcgagtgttcattggcactgatcaccaaaatgccattggcagttccaaagtcgccctctctcttctcgcacattcactcacccaagcgaaatgttcgcattccctcaccactcgccatttcttcccaattagctgctttattattggaaagtttgtatttgtgttttagaaatgtctatgattaattgatacatttcatcatttt

SEQ ID NO: 97484 - DNA, 485 bp, Heterodera glycines
cttgcctctgagctttgcatccgacttttccaaccccgagcattccactctgctgtctactctccgccatgtccatgtcatcaacctctgctgcctcggcctcggccaccgacgccgaagctcaagtggaattccccattgtctgcgaaccctgtctcggtaccaacccgtacatgcgcatgacccgccagccccaaggcgcgcaatgcaaatcgtgctcgcggccgttcaccaccttccgctggtcgcccggcccgggccagcgcactcgccgcaccgaaatctgcacctcgtgcgcaaagctcaagaacgcctgccagtcgtgcatcctcgacctcgagtttggcctctcgacccgcgtacgtgacgctgtgctcgggttggattccggcgcaaacacgagcaacgatcataatcggcaatggttgttgcgggccgccgagcagaatttggcaaagacgggttcgggcatggtggattacggt

SEQ ID NO: 97485 - DNA, 384 bp, Heterodera glycines
accaattcatttttcttttggcacttctgccatttctgttggtcccaatttgttgtgaacaatgcagttgggacgacgtgaataacatttgcgttggagattgttcatcactgtgtgtgctgaaagattttgacaattgcaactgcaaccgcttaccaaaaaatcttcaattcttcaaaaaccgtcgtaatttcggcaacttaaaagcattggcaaagaaagaagaaacaaacaatggcaaattgatgtacaaaaaataaattttcgaaaggaggcggattaaaattcaagatcaaatgggatggagaaaaagaaagtgcaattaacagatgaataaataaatacattcagtgattgaattaattgataaaagataatttaata

SEQ ID NO: 97486 - DNA, 475 bp, Heterodera glycines
cggaaacgagcgcttccgttgccctgaggcgttgttccagccatctttcctcggcatggagtcggctggcatccacgagacgtcgtacaactccatcatgaagtgcgacattgacatccgcaaagacttgtacgcgaacacggtgctgtccggcggctcgaccatgtacccgggcattgcggaccgtatgcagaaggagatcaccgcgctggcgccgtccacgatgaagatcaaaatcattgcgccgccggagcgcaaatattcggtgtggatcggcggctccatcctcgcctcgctctccactttccagcagatgtggatcagcaaatccgagtacgacgagtcgggcccgtccattgtgcaccgcaagtgcttctgattgagcggcggtgatgtccgcagggaggcgaaagaaggaggaaaatgttggaggataaaatttgatttttttttttttttgctgttttgtcatggc

SEQ ID NO: 97487 - DNA, 528 bp, Heterodera glycines
ctaccactagtggatcccccgggctgcaggtacaaaaacgagggtcttgtttccaaagcaggctcgctgatggctttggcaaagtgtcccccttcgacagttcaaattttgggggctgagaaagcgctcttccgagcactcaaaactaaaaaggatacgccaaaatatggaataatttatcacgcgcaattggtcactcaagccggacaaaagtcaaagggaaagatagcacgaaaattggcagcaaaagtttcacttgcgacgcgagtggacgcactttgcgacgaatcattgggcaacggacagggaattgaggcgagggtgtacatagagcaggcgataaaagaggcggacgcgcggggaggggcgaaaaagcaacgcttttctggcgtgaaacaggcaccgaagggcgcgtacactttcaaaaagggggaggtgcatcattatgacgcaaagttcgacatgacgctaaaaaagggaactgaacaggccgaagaaccgcaacaggaagaacaacagagtggaaaa

SEQ ID NO: 97488 - DNA, 479 bp, Heterodera glycines
caagattattcaacatggccgacaacgctcccaagaagcgcactttccgcaagttcacctaccgcggtgtcgatctcgaggatcttatggacctcacctctgagcagctcgttgagctcgttcactgccgtgcccgccgtcgcttccagcgcggtctcaagcgcaagcccttgaccctcatcaagaagcttcgcaaggcccgcaaggagtgccccgagaacgagaagcccgctgttgtcaagacccacttgcgcaacatgatcattgttcccgagatgattggctccgtcgtgggtgtgtacaacggcaagaccttcaaccaagtcgaagtgcgccccgagatggttggccactatcttggtgagttctccatcacctacaagcccgtcaagcacggtcgccccggtattggtgccaccaactcgtcccgtttcgttcccctcaagtaaggatcacatctctcttgtttgtgtttcgcg

SEQ ID NO: 97489 - DNA, 706 bp, Heterodera glycines
  unsure (1)..(706): unsure at all n locations
ctcccttttcgtcctttctatttgagcagtttttcccatggttgctttccttaattgctctgttctctataattatttggttgcgaagcaaaacaaatcgaactttgtttgtgaatcacgaaaaagggagaagactaatggccgtgcttggttctggcggacatacgaccgaaatgctcaaattgcttgctgcccaggacgaccttttccctggaaggctgtacgtaattgccaaatcagataacttgagcatagtaaaggttgaggagtttgagcgaacacatggcaataaattctgtgtcagaatcgtcccaagggcacgtgaagttgggcaaaatttgctttcttccctcgggagtactgtcgttgccttcttctactcctttaaactcgtttatcaagaacgagcggacgttgttatcagcaatggacctgcaattgggcttgggatttgcctttctgcctgtttattcgattttctccggttgtatcgttgccgtgttgtctttgtagagtcaatttgtcgtgttcaaaagctttcactaaccgggtggctaatttactatttccgaatttctcacgcgttcatcgtccaatggaagaatttgcaaaagaaatacccaagaagcgaatatatgggcaggctcatttaattttcatgcttgctgtaatttttcagctaataaattggtactcatgcaaaaan

SEQ ID NO: 97490 - DNA, 556 bp, Heterodera glycines
accctaagcagcaattgtgcgcactttttcgtagttccattcctcttttagagcccagaatcggctgttattctgtgctcgctcaaatgtcaactgaggttgaaaaggcgcagaaagcgaagccgggcggagacacaatcttcgggaagataatccgcaaggaaatgccttcgacaattctttatgaagatgacgaggtgctcgcgtttaaagacataaaccccgaggcacccgtccattttttggtcattcctaagaagtgcatcactgctctgtccaacagcgaagagcaggaccaagcagttctgggcaaactgttgctgacagcgaataacgtggcaaaggcacagggtctctccaacggatatcgcattgtgatcaacaacggtcgccatggatgtcaaaggacttctggcacttttctacacactttgttggagaaatttggctattttaaatgattactgaaatgacattaatttattattgcatcatactatattccccagataaaaagtgcaaaaatgaataataaaatcggatgatttgtaaaaaa

SEQ ID NO: 97491 - DNA, 374 bp, Heterodera glycines
aactcttttaaaatggcaataaaattggaatttgccggagggccttcgcaatttttaatgggaaacgcgagaccgaagctgaaaatgacaatatttcgactgttcgtcaattgttgcggtggctttcggacgggcccttgcggggcaatgatcggtcggaaatgctcatccaacgcgacaccgtcagaccgggcgttttggtgctgatcaacgacacggactgggaaattctgggcggattggacgctcagctcaacggcggagacaaagtgacattcatttcgactttacacggcggataaaacagcaaaataattgaaaaataattcattcgttttttgtccatttttgcagaagcataaattataattttt

SEQ ID NO: 97492 - DNA, 489 bp, Heterodera glycines
ggtttcgttgcaggcggagcgcgaatacatcacacgacgggtgctgacttttgtggaactgaaggagacggtctgtgccggtggagatcaaggatttgtggtgattaatcaaaagggcattgatccgccgtcgttggatttgttggcacagcacggcattttggccctgcgacgtgccaagcgtcggaacatggaacggctgcagttggcctgcggcggcgaggcggtcaattcggtggacgacctgacgcccgatgtgctcggctgggcaggcagtgtttatgagcatgtgctgggcgaggacaaatacacttttgtggaggagtgcaccaatgcgttgaaagacggtgccgttttgcccggcgccggtgcatttgaaattgcgggatattgtgcactgaaaaagcttgccgacaatgtgaaagggcgtgccaaactcggtgttttggcttttgctgaggctttgttggttattccgaaaactttggc

SEQ ID NO: 97493 - DNA, 466 bp, Heterodera glycines
cagcaaaatttcacactgaaaatgtcttcttcgtccaccatttttgttcttctgctgataattgccatttgcctttcattaacaattgccatgccagcagtggacaatcaaattgaaagtgttccacttcggcaaaagcgttatggctacggcggcggtggatttggcggcggatttggcggtggaatgggctttgatggctgatttggacgctgagccgtgaagaacattaatacgcattgtgaatgatcagaaatcgatcaatataaatgatgtgcgacagaactctgtttttaaagactttcaagtttataaaataaattagttagcggaaaatttttttaaaaaaaaaaaaaaaaaaaaaaaaacctcgagggggggcccggtacccaattcgccctatagcgagccgaattacaattcactggccgtcgttttacaacgtcgtgactgggaaaaccctggc

SEQ ID NO: 97494 - DNA, 569 bp, Heterodera glycines
agtaaattgaaacccaacattttcaccaaatcagcaaatgtcaacgaatgacgttaaggaagcggctgcctccactgttcttcctccgtcttcaagtcaaagcatttcaatggcttcttccgcggatgggtcaccgcttagagaggaaaacttcgtacattcattgaaatcgcaggtggacggagaaaacatcgaggaaatcattcaaagccagaaaaaagcgttggaacgttttgagaagaccaacgaaatgctggcgacgtgttcttcgctggcagaaaagcgattggatcgggcgagaaaagactttgccattggaagggaaaagatttgccgagctaaatccgacttggactcaatcttccgacggatcgcctccttcaaacaaacattggccagcaattacccggccgaatttgtcgcagcgcaaactgactcgcctcacaatcagaatagtgactgcatcaatgaacacaaaaagcaaacggatgactaaatgacgtaatttccgatatttaactcttttagaattattttttacgaaaataaattttctttcgggtaaaaaa

SEQ ID NO: 97495 - DNA, 127 bp, Heterodera glycines
  unsure (1)..(127): unsure at all n locations
ggggggganggncggggggggggggncggggggggggaggggcggnggggggggaggggggggggggggggngganccnnggggnggggggggggggcaaanggcggggnaggnggggcngnagggg

SEQ ID NO: 97496 - DNA, 180 bp, Heterodera glycines
atttcttgcttttggccttatggacaaatgttccatttttgcaagcttcatttgtaatatttgatcatttccaatatctcccagcatttgtctctttcacgcttttgtccatgttttaaacacagacgatgcctttcactcactcagaattaaatttttaataaatcagattctcgactt

SEQ ID NO: 97497 - DNA, 189 bp, Heterodera glycines
gcctttaggaattggacaacaatcaggtcaaaatggaaacgatcctagaagagaaaaaaggcaccggcggaggagggaaaaacagcgcatgaattgatgatatatgttgaaatattttcttgtttatttggagatttcaaatttatatcttttatttatcaatgttccgaaaattgatacggaaacagc

SEQ ID NO: 97498 - DNA, 291 bp, Heterodera glycines
gtcatccagcgatgccggacagcccggcgagccaggcaacccccgtggagcgggcgagcccggacaacccggagagaagggagagcacggacactgcgaccattgcccaccgccacggactgcgcctggctattgagcattgggaagccaattttggagatgacaattgggaagaggagaagaaaagtgggagaaaaagcaatgaaagacgaacaaaaacaatttgggaggaaaattcattcattgacaatttaaaaagcaattaaaaatgataatgataaaagcaattcc

SEQ ID NO: 97499 - DNA, 529 bp, Heterodera glycines
gtttttcataagtggcgtcagggcgtgtcaacggatctcaatgcacccttacaaacatcagctggctgctgccaatgagtgctgcttcatctatccgttcccggcttatgggctgtcctcccgccaactgatgcgtgtcctctccgcttggctgatgccgtctttttccgccgacgaggagggcccgtcgatgaacgtgccctcctgcttttccgatattgactcctcgtttgaatgcgcttcattttctgtacccatggtcttctcccacgacgaatggtttgtccaatgtgtgcccgccctgggcgaacagcttgacaaacttttgctcctgtcccaacaccatttttttataggaaggaaactcatgcctccaacaacgacggaatacggacgacgacggggagtgtcatgtgcgacgggtgctgcgccatttgctcgcgttgaccacccgaattccgatgcggacacagcccagggccgaaatgcgactgttcattgcggttttcggcactttgctccgctggtc

SEQ ID NO: 97500 - DNA, 765 bp, Heterodera glycines
caaaaccgtttaattggcaaaagaatttccttcacctgtcactttggcgacaggtggatgattgatgaccttcccgcggcgctgcgcggcgcgggaaaaaaacacccgcaacaatttgggaaatcggatttggtcaggcggcaacttcaaagtggtccaataggttttggttttgaaacacccctcccccatcgtggattttttatggggcggcaaattcaaagggctgcgccttcccataggcacgggctcgtgcgggaaacacccgcaaccaacccgcaaccttttgggactatatactactcccgccctcacattttcgtcctataaaaagggcacccttttcattatatgctcacttccacatttccattcattcatttctgctgctgcccaagcctcaacagctgcctcttccgaggcccagtgcttctgccagatttggcaggcatgcttcttcggttccgttgcgtcgtcagctcgccattcattttggcggcgacactccgccatcacttgcaacagttcgactccccactgtccagggagatttcggagtccatttatgtggacaatgtactcatcgagtgcgagacggtacaggaggccttagaaaaatacaaattttccaaggacttcctacaacaaggatgcttcaacctgagggaattcatctctaactcaaaagtgctgatgaaacaaatccctcaggaggatcagcttgataagccgaaggccaaagtccttggccttccttgggacacc

SEQ ID NO: 97501 - DNA, 494 bp, Heterodera glycines
gtccaattaagccgtttgaatttcggcacttttcacaatgattgcggcattttgttcgacaaggacggcgggcagtcgaattgtgaagggcattgtttgctcctccgatttctcctcccattcgctgtgcggtccgccgctgatccgttcgccctttgacaatccgttgcgccgttttgaaccgcttacacccaacaaaagcgccgacggcacggccgacggtgttgcgtcattgtcagccgagcaaagtggcacgtcggcccagggcatcggtctgaaggagttcagggagacgaccacagtgcaggcgctgcgcgccttcggccaccaattggcggacgcgatgctgtacttgcggaacgccgtgcgtgccaccgcgtacatgccgttggtcagcgggcgacggaatgcagcggtgattatgacggcacaccaaagcacagcaacggagacggctgttggaagcggtggcacggcgccgccgacgacggggg

SEQ ID NO: 97502 - DNA, 489 bp, Heterodera glycines
atttatcttttaattccgcaaaatgtcaaatttgaattttgaagacaacccttaaagcgtacaagtggaaattcaatggaagcaatgcctttataatccgatcgtcgctccgtttgccgacgtcggctcttacccaattttcactgacgaattcaaagggacgcgcaagtgcactttggatgtgtacgttcagggaaacttagagcatttggacgacaaagttgtgagttatggcagttctcatggcacttttcgtgccatcaattcatttgtctcgagaatcactcaattgagactcattgcttccatctcgtcccccacccaaaggttttcctcaccgttcatgacgttggcaagacgtatttgtcttgcgtggaccttgccaacagtccgacgctctctccgctggtcggtcagcgtgccgttttcctccacgtttctgtgccagggcaagcgcccggcgctgaaaattttgtcggagacttcccc

SEQ ID NO: 97503 - DNA, 185 bp, Heterodera glycines
attcgctctccccataaatctgggcgcatcgcttcggggggacggctcgtataagccaaaaaaaaaaaaattattttgaaaaaaaattattaaaaggaaatgactagttactatttgaataggttatttcgcgtccgttcaatgtccctgcaaagtttggtgtgcgtgcttctgatcagtttctg

SEQ ID NO: 97504 - DNA, 671 bp, Heterodera glycines
agccatgaagtcgggctaccagcgagagctcacttaccggcgtcctgacaattcgttttccgccttcggtgagtccgatcaacatggctccacatggctgaccgcatttgtgctccgctccttcaagcaggcacaggcgtacatttttgtggacgaccgagtgctcgaggattcaattgccttcctgatttcgcaacaactggacaatggcgcttttgttgagcgtggcgaagtgcaccacaaattgatgcagggcggcgcatcggagggcggcttcacattgactgcatatgtgctgattgcactgttggagaaccacgtgcagaataaagtgacggaattggcacgaagctatttggagtcacacctcaccgacttcaaggaggacccgtacgcgttggcgttgtgcacttacgtgctccatttggcgaacagtccgaagaagggtgacgtgctgaagatgctggaaggccttcaaatcaccggcgccacagatggcatggtccattggacgacgaaggtgtcaaacggtgccaaagatggcactggtggagcagctaaaaatggtggcggtgcggcccgggacaccaaccagtacttcttccaaccccagccggccgacgttgagatgagcgcttatgccctgctcacttacatgctgctggacaaca

SEQ ID NO: 97505 - DNA, 823 bp, Heterodera glycines
gctaacatttattgggccgttctgttgcagctttggcccgcattgtccttggaagacaattccgagaacaaacaaagcatcatccaactcactgatttggcccgtgatctcattgtttccaacttttcatcttttcaaattgaatattttgttcgttttttctgatttttctgtatttatttatatattttagcttcccgactccgttatgcctttggctgaacaactgttgtccgattaccccggcatttgtcataaaccggcgtggccattgcccgacaaacaaaaattgggagaatttcgggaaagggaagcggagatatgcggacgaaatcgcgaaaattttcttgccttggccgagaagttgctgacaatcgcaaaagacgagaatttgcactggcggcaggtcgactttgccgaaacgcttctctcattgctgcttcggaaggactgcgacctgccggacggtgttgtactgcacttctttaagcgacttactgctgccaccataaacattcgcaaaattgcaattgacttttgtagttcatggttgaaaatacacaggcaaaaggcggttaaggaggacgtcgttattccggattgccctccgggaagggggccgggagcgcaatggccaattactttcggcatccgtagcgacaacaaattccttctcttcgacgcagcaaatgcaccctccaatgccgacaaatgggacagtgccaatttccactcgaaggtctatccgggcttttacacttggccaagcaaattccgtgtgtatgcgccaccgagtgaacaaaaatgggcaaatcgtgaattc

SEQ ID NO: 97506 - DNA, 672 bp, Heterodera glycines
ccgggctgcagattcggcacgagggactgttccatgtcccgctgcaatgagggtcttttctcctaaggactcttgaggtggcgattgggaattctttgcacacacggtcgatgacctctatcaccgtgctgtgaagcatggtgatttcatcaatgatgatgagttgtgcctcacgaatccgtcggggaaagaagctctcaagcggaatgcttggaagcctgtccagtgacacatctctgaccaggctgaaggtggaatgggctgtcttcccatacggcagcaaaaaagctgcacacccagtggatgccttaaggataacgtccatcggaccacaagcagggctcggcttgtttccagcggaaacgctgatgcgaaagccttttttgaacacgcaaagaacgccctggtggcgttttcggcctgagaaatatctcatcgtcatgacaggagcccgccgctgggcatcttttaaccgcaactgttgaaaccgtataggaacggagccaattctccgtttttggcacacagaccattgttattgagctcaaacgtagccgaactgccctgaggagctcgtcctgggctgacctcatcagaaatgagttaaccggatcggatggcaacagagtcaggatcgtgcccgcggatcccgagcatttgagtcccgatggc

SEQ ID NO: 97507 - DNA, 767 bp, Heterodera glycines
gcagaacctttaggaattgggtcagtctggggggcgggcgatgcagcgctttgcagtgactcgtaccctccagcgatgttcgtgcaagacccgtgcacgcggctggagacctctgccgagggcgagttggtcccgcaacgtcgcgagcgttacgtgttccgacccgtgcttctgcgcgttctcgagacgtacttccaaaaatgcccatttccggacatagcgaaacgcgttgagatcgcaaatgcctgcaacgcgcacttgcaggtggacaaaagaggtgtccaactgatgccgaaggaggtggtcactccacaagtaatcgccaattggttcgccaacaaacggaaggaaatgcgccgacgcatgggagggacggaagcgggacggagtcggctgaacagtttgtcggcgggccgctccaactcgccatcgtcgcccaactcagccgcacactctcgggagggccccttcgagttgcgccagaataaccaacagagtggcaacgtggacgaggcagtgctggcacattgtgattttctgcaggcaatgccaatgtctgtccccactgcgtccaatcagcagcaaatgcttctgatcagtgatcagcccgagtcagtgccatccgcagccgacctggcccttgtgctgcccccgctggggccccctcaccacccaaactgctgcccacccgcaactccgctgctgcccccaaatgttgtgcagttctgcccttccgtggaccagcaactgctccatctgctccaggc

SEQ ID NO: 97508 - DNA, 481 bp, Heterodera glycines
cttgagagattgttacgtgatttttctttccaaatttctttgccttgaaaatgacaaaaaaatttctgttaataatcgaagcttaccacaacagaatgacactttccttcaaattgagcaatgcgttagggaaatgctgttggaaaaagaaagcagaagagatttgtttcattgttcccttcgtccggcacttggtcatttcgtcgctcttttgcttcattcttttggcaatgattccgacgttaatttacggttgagaagtggcgaatttctgtgtttgcttactcagttggattttgccgatgaatccgctgattttgttgcttttgttcttcccggggttttttcgggctgtcgtcagattctcttaaatgttctgcccaatttgcattcaattgacctcgtaaggtgcgcttgtgaactggtcaccaactccatttgcatttccttctcaaaaatcaatgtcaccgattgtttgagt

SEQ ID NO: 97509 - DNA, 479 bp, Heterodera glycines
gaaattcaaaacaaaaacaataacatttaaaactctttggtgcctaaatcaccagctctaccaaaatgaccttaacgatggatgaactgagaaacaaagtccaaaatggccaaattagcaccgttgtcgttggctctgtcgatttgcacgggcgactgattgggaagcgattgacggcacggcattttgttgaaatggcgcaaaaaaaggacaaaatgtccatgtgctattatttccttgcgatgacaattgaaggccacgtggccgaagggttcgaagtcgcgcggtgggaaaacggatttggcaacggccttttgcaactcgactttggcacgctctgccgcaccccgtggatggaaaagacggcactgataatggcggatatgcatgatcaccgcgatttgcctttcttttgtgccccgaggacaattttgcgtcgtcaattgcaaaaactatccgagaagggctttcgggcgaag

SEQ ID NO: 97510 - DNA, 151 bp, Heterodera glycines
caacactcttcaacgttgtcatgcgattttgagaggcggaaagcgggcttacaacagcgatggggtcgacgagtgttcgaactccggccggaggtctttatttgttgttatataatgcccaagcttttctcaaaattttgagaaaattaac

SEQ ID NO: 97511 - DNA, 185 bp, Heterodera glycines
atttcctttctgtgacaacaaattggccacttggaaagaaagcgaacttcaggtaaaaagaaaagatttggccgactgatgggtcaccaattggctaacagatgatactgtgcccgaccaatgagactacggtatgcacaagtgttgatgggttcatatgatcaatgaatgattgatgattattc

SEQ ID NO: 97512 - DNA, 487 bp, Heterodera glycines
tgagacattatcacttcactcttcttcaatttccaattccgatttttctttgacttttttctccctccttttcatcactttttcgccatccttcccctcgtttgcgtcaaataatcccatcacgcaataaattgttgagaagaccctccttttggtcacaggaaaggatttgagggacggcaaggtgggaaacggcgggaactccgacccctctccaatccgatccatcgttcggcgtcatccgcccttctcggcgcgctcgaccactcctcctcccttttctcgtcgtctcggcttttcggcgtctccgctttttgagcgtgtctcgttcggtttcctccccccccccccagtttgtcccctcccttttcccgacaaactttttggtgccacgacccgggaacacaaacccttcgccgtccgccgaccatcttaagcctccggcactcaactcaagtcgccagccgccccctcttaggctcccgac

SEQ ID NO: 97513 - DNA, 790 bp, Heterodera glycines
ctgttcgtttaaatgccgatttgtgcccccgcggctgtgccctcttccttctcatctctctgctcggtctcctctccctcttcttcgtcctcctcttcctcgtattgcaactcctccttcaatttcttgcgcatattcaccgccgcctttcgcaggggccgccccgtctccgtccgctcgacttccctctccactaaatgctgtcttttaatgactttggcctcctcttttgtcacctaatgtctcctcgtcttcgtcgtcttcctcttctgaagaactcgcttttggcccccattttctgtggtgcatttggcttttgggtgcctttgacttttttctgctcgaaggcccagcttcgcagtcagtgtcactcagttgcaactcattttcatcatcgctactgctcgacatttgtctaattttcatttttggccggttattaggcgggaaaagtaacctcttccgtttttttgctcgtccgattcgttttccgacaatccctttcttttttgctgaaggcgtgtaatcgctgtccgaatcgtcgttgataaattcgtcgtcacttcttcggcgtccctggaagccaatgccccttaaaaatgttttggtacttttttgtggctctttgccaaatcacctcgcagatcgcctttccgagggaagatactcgtcctccgatggttctgggtcctcttcattttcatctgcactgctcgccttccattcgtcctaatttgctatgtctccggaatggcatttctcactaaccgtgtccgactcggacgcattg

SEQ ID NO: 97514 - DNA, 714 bp, Heterodera glycines
cccctccgtaaatttgatcaattgtccctcattgatcatttgtcccccatttcaagttgatcaattgtcccttattgatcaattgtccctcattgatcaatttcatttattttgatcaatttcaccccattttatttgaccactagtcccaattaatttgatcaggcccctccctctaatttcaattgattaaattgtgcaaatttcttttaatcagcgccacctcctcctttttgtggtcgaattgcgcttttccttttgatcaattcccacatttttttgatcttagtgcgaacatttcttttggtcaatgccattctccattttattgtttgatcaaaattgcgcgcaatccttctaattatttacatcctttcccaaatttatttttgatcagtcccactctgaggggctcacaaatggcacctttcagtcaatcagtgccatccctttttctgatcaaatgcgcacattctcttttgatcagtgccatttccccattcttctcttcatcaaattgccccaatttattttggtcaatcgtcttttggctatttcttttgatcagtgtcacccctctccatttatattgatcaattgacgcatatttcggctgatcagtcccatcgccatctttgatcaaattgtgcaaatttatttgatctgtcccattttccccatttccatttgatcatttgtaccatttttcattgt

SEQ ID NO: 97515 - DNA, 487 bp, Heterodera glycines
ctcagcttctgggttggtttacactgctttgcttaattacctattctctacgctattgccgtctaaggaccgtttactgagtatgtgaatgccaatctcacactgtcaaatccctcgcgaaaggacgtttatttcaaggtgaaaacgactgcacctaagttttattgtgtccgtcctaactctggtgttatcaaggcgaatgataaaacccaaatcaacgttatgctgcagccggttgaatcgcctgagactctcgagagtgagcggagccggcacaaatttatgattcagactgcatttgcgcctgatgacgagcagcttcctgtggaccaattctggaaaactgttgacccaacattagtcatggattcaaagctccgagtggtgttccagcgaccttttggatttggcgatgaaaacaatcgggacgaaaccaatgcgactggtccgtttttcaatttcaacaaaacgggcgaaccgaaaaacg

SEQ ID NO: 97516 - DNA, 668 bp, Heterodera glycines
gctgaatcttgtcggcaccgacgcattggcgtcaaaagaatagccgccgccctgcgggaagcgctttgacctctccaaattttcctctctcgtgcaaatttccatcaaatggttaagctttgcaactcgtgcctcgccaattcgttgctgatcagaaatgctgaccaaaagaggcgaattgcgggtattcatttctgaaattgttaattaaagttttcaatcagtcaaagaatgacaaaggaccttccaatgtgtgtttgaacaaaacaaacacattcagacatggtttattgtcgccttggtcgtccaatggtgtagaaaatgcctcaaggtcagtctcttcctaaaaatgccgaattaattgaaaaggatatttctgtgctttttttgcgttgaataaacacacctcaaaatggtggtgctcttccgagtcggtggtttccgatgcaagggaaaggatgtcgcccggtgctccctctgtctgatcgtccatgcttttgttggtgctcgacttccttcgcgtcctccgttcttttcgctcatttcgttcgtgctccaatgccatcagatattgcgagttctcttgaaatttgacgtttctcttttgctaagggtttcctcaatgtgctcaccttcgtccacatcgtcgtctgagtctttcaactctc

SEQ ID NO: 97517 - DNA, 340 bp, Heterodera glycines
tctaaccctttcgtagcttcatttacaaaaaaaaaaaaaaataataatttcctctgtcgaaaaacggctttggttttaaaattttaaacttttcctttgggctatcgaatgaacagaagagcatttgattggttgtttcttggccaagttatggagcattgaggaattcaaaaatttagagtttaacattttgaaaaaaagccggatttactagacaaaaaatccaggcccaggaaaaatccatgttccctgaaaaagggcctagaccttggccaggaaaactacaggcctgagtacaggttcaaatcaaactcaaaaaatttccttttgatttaaaatt

SEQ ID NO: 97518 - DNA, 662 bp, Heterodera glycines
atttactgtccttacattccatcctattgtttagaaaaatttaaaagctttcattgatccaatcggattaaagcatttggtcaaggaaatggaaaaatttatgctagaaagaaaagccacccaaaagaaaagtgatgatgatagtgcacaaacagactaatgatctaaaaactcttcacttcgtttcctcactctgatcaccattttgacttgtgatcagtcttttttcatctccgatcactttgctttgtcattgcgtgtaccggttttcgacttctgtttcctccattttgatcagttcgttctgtccgcctttgtcagttttggtcactccatctttttcctttttgtccaatgatttctgtacatctttcatcagtttgatcactttcagtttggcctcctcacatgggtccgttgctaccatttgtttttgagttttgtattccattaacaaaacgccaatatatctttcaagtttcagagaatttccttggtcgaattggcgcaataaaatttctttcaatgttacaaagtcttttttcaaagaataatccggttcattagtaacttttttctcgtgatcctttccaacattgcaaattgttgaccaattttcaggttttaaaatttttcaaaatttaataataaatcttagcttt

SEQ ID NO: 97519 - DNA, 156 bp, Heterodera glycines
gtgtttccgttcaatcaaactatttttaaaacccaaataggggttcaatcttacaattttggaatttatgaaagtgtcgtcgaaaaaatgctaaaattggcacgattttgtggatcagcggtcgcaaatgtagggacaattcttaggaggacgaag

SEQ ID NO: 97520 - DNA, 511 bp, Heterodera glycines
ccaagtttgagatgggcagtaaacgccgtttcttacttcattttagtcaggctcaccagacttttagacgtgcggagttcgatgccatttgtcagattaagggaatttctgtggtgcccaactctccttcggatgggatacacattcaatcgtttgagtttcaaaacgacgaatttgacgtctttcggctgttggaaagggctgtgttagtgaaagcggcgtacgaactgatcgccgagggggacgggcatgagcaagtgatggccaaattggcatccgatccgagttcgtcgcttgcgcgcttcgactccgccgatcagtcgtggtctctgctcgttcgtccccatcaaaagaagcgcagcggcgattacgcccgatcggttgttgagcgttacactgccattccgcttctgactctcgcgccagttgaccttgcgcatccgagcaatgtgttctcggtgatcgaaatgtacgaggcgaacggacggagggaaacgccggacaaagttta

SEQ ID NO: 97521 - DNA, 304 bp, Heterodera glycines
cctcaccctatcttgcaaacattctgtttacatacagatacgttttttcctgctcgatgaggccgattctttgcttggtggccaaagcgactcggcccaaattgtgcacgaattgcactcgcgaattcccaaatattccgaattcggtgagcgtttccaaatgatcgtttgttccgcaacacttcacaacatggcagtacaacggctggcggtgggtcgataattcgtatattcccaaaacataaaaatgaatttttttacaatcagactcagtatatgtacttcccccaatggattgatctga

SEQ ID NO: 97522 - DNA, 235 bp, Heterodera glycines
gtttgactccgtttcatttccattcacgggatttgccttgccattttgaatcgaaacgggcttaaatttaaacagcaaataggtaataattaacgatagcatgtccgtacattagcggacgctttggccggctgtgccttctgggccggttttttggccggcacttcgtcgtcgtctcccgaactgctcgactcggacaccgtcggaggtatggccttggtcacaggaatggtct

SEQ ID NO: 97523 - DNA, 473 bp, Heterodera glycines
aattttcaatgataaaatgctattctaaaaaaggtcaaacttcacagctctttggtctaaaaaaaacccaaacaaattaaatatattcaaacgaaagaataagcaacaaatcaatagatcagccaatcggagggaagggccgcccctcccgttcactcccggggcccctctttataagcccgggaattccttcccaggcagttcagtcgcgacgatcagctatatcatattcaattccccatccatcgatctcgtcccccttctccagcccagggagagctcaacgcgcgggctacggcccgggatggacaagaggggatccgtgggaccggcacaactctaactggtagcaccgatggttctgaccaaatcctgggcccaaggatttggttcggagtggaattgaatgggtgctgatcaccccggggagggctttggccctgagctcaacattccggccgatgccggccaac

SEQ ID NO: 97524 - DNA, 251 bp, Heterodera glycines
cctttctctaaaggtaaatgaccatgtcggaggtgccgaaagcagaactttattgagcagagtttggccaacgtcgtcgacaaagttcgggtcaacctgaaaccacgagtctttgagaattacggtttttagcaaccgttccattttcgacggcatcaattaacgcgtccgtgtcacgcaatcgaattgcgtcaattaaattgcgatgcgttttgtcaaaagcgggaggagcaacttaaaagaatttggat

SEQ ID NO: 97525 - DNA, 808 bp, Heterodera glycines
gaggccgtcgaaaccgtagggacggatggccaccgtacgagcccgccttcgtggcaggagccgagcgggcatcagccgacttcgtccgcgtccggcgccgcccatgcgttgcccccgtcttcctccaaccgacccatccgctcgcaacggacgccaatgaaggaaatcatcacgctggacgacccaaccgagctggacgagtttatggcccggggcgaggagcagtgcattcacgcgatgcgcgcgttcatcacgcaattctctctgcgacagaccacggtggccaccatgacgggcgtgtcgcagccgtacatctccaaactgctgaatggaaaccacagggagctgtcgctgcgctgtcgaaagaacatctactgctggtacttgaactgccgcagacaccccgagaaattggcgatgttcgtgcaagacccgtgcacgcggctggagacctctgccgagggcgagttggtcccgcaacgtcgcgagcgttacgtgttccgacccgtgcttctgcgcgttctcgagacgtacttccaaaaatgcccatttccggacatagcgaaacgcgttgagatcgcaaatgcctgcaacgcgcacttgcaggtggacaaaagaggtgtccaactgatgccgaaggaggtggtcactccacaagtaatcgccaattggttcgccaacaaacggaaggaaatgcgccgacgcatgggagggacggaagcgggacggagtcggctgaacagtttgtcggcgggccgctccaactcgccatcgtcgcccaactcagccgcacactctcgggagggcc

SEQ ID NO: 97526 - DNA, 580 bp, Heterodera glycines
ctcagagactagctaacaaaatcagcataggcttggacttccgtaccaattattatttttataatgggtttgttaaatgcaaaacaattcacaaaagttgttttaactccattcagagatgagatagaaaaaaaacaaaaataagtttgaagagccctcgaagagctgcaccggatgcgagtgccgccgttgctgtacgctcaacggttgctgtgcaaagacggaaaattgctaaatcagaaaaaaccaaatattatcaggaatacactctcccatctcacccgtagacaaaccgaatggtatatgttcgaacggcaagttgactaccgtacctaattaatatttttgggatgccaattgttaagtgcgtaactgttatgaaaaaagggtacgaaaaactgtgataaccccattcagagactagctaaaaaaatcagaataggattggatttgcgtaccaattattatttttataatgggtttgttaaatgcgaaacagatgacaaaagttgttataactccattcagagatgagatagaaaaaaaacaacaataggcttggagagcccttgaagagctg

SEQ ID NO: 97527 - DNA, 498 bp, Heterodera glycines
ccaagtttgagatttattcgtttcgtttttgacctgtatttccatcacaatcaactgaaaaacggcaatggatgattcgttatcctctcgacggctcccttccgacttctccttctaaaaatttcatccaatcttctgtataattttttctatttccgtatgcttaacagctgtaaattcccaaaaatcatcctccaaggtagaacattttggccgacgaccaaatgggaaggaaactcccagccgaacttttgttcgaaattgttctctgtgttcgaagagaacatgcccacgcgagcatttgcctctcgtcccttgttttatgcaaattaatgctacctcgtgcttcattatggcggaaaatttgggtttcagtatgattttggatgtttccgctttttttttttaattttcgttgttgctgtttggacttgtctttttatttttgcactaacaccattttctgagctcgtgagctttcttcaattctattatttt

SEQ ID NO: 97528 - DNA, 287 bp, Heterodera glycines
cttcttcttttagtcagctaattaaagtaccataaaaaaaaaccacggccttctttgaggaaaattaggagaggaattgccacgacacgagacaaatgacggaagcgaagaggtgattagagtaactgtaaaaacaatatacgaagttacggtatgccataaaataaattggcatttgctttacgtgagatttgccaagaaaagcgcggccatacaaagcaaaaaaatggtcaaaaggcaagtggactcgaccagcacagcgttggctttgtattgcaaaaactgtg

SEQ ID NO: 97529 - DNA, 745 bp, Heterodera glycines
  unsure (1)..(745): unsure at all n locations
gtttttccctttcaggcataaagcggcgggccaagcactgtttgaggaactttgtaggtatttgaatctgttggaaagtgactatttcggcttggagttcatcgacagctatgggaacagatgttggctcgacaaggacaaaagcattttgcgtcaaattatggtcgcccaatcggacgcccgctttttctttgtggtgaaattttacacgccgaacccggccgagttggaggaggagtacacgcgctacctttttgctcttcaaatccgtcgcgatttgtcccgtggtgagctaatctgtaccaacgagaacaccgctgcactgttggtggcactgattgtgcagtcggagtgcggcgacttctctccgttggactatccggacgccggcgcctatttggccggcactcatttcgtgccgcaccaaacgcccacttttgcacaggccgtgttggagcagcaccggcgactgattggcatggagccggccgaggcggactttgttctgctggagacggcacggcgctgcgatttctacggacttcggctgcacccggcgagagatatcgaaggcactgaagtcgctttggctgtggcgcatatggggattanagtgttccaccaaatgaattgtgtcaccacattttcatgggcaaaggtgcggaaattgagcttcaaacggaaacggatgatgatcaaagttcatcccgacagcttccattctacaaagaaacaatcgaatttt

SEQ ID NO: 97530 - DNA, 171 bp, Heterodera glycines
aaaagcgaaaatgattccaaattatgagttaaaatggcatatttggccttttaaactttgcttagtatcgatatatagattcaaatcagatcataataacaggcatgtatgttagttaaaatgacaaaaatgtgatctgaaattgttcgtttttcaaaaggcctgagaaac

SEQ ID NO: 97531 - DNA, 688 bp, Heterodera glycines
  unsure (1)..(688): unsure at all n locations
gtttcattgccttcttcctccagaggttgttgagcacgaacngtgaccctcagaaggcctgatcggagcgtaagcgcagcagaactcgaacagaagcagcagagaatctgtagctcatccatctcttctcatcttcatcctctacttttgtccttctccccatcgccatgtctgaagaggaatcgcaatattccgacgaagaggttgaggaggaaagcattgccgcggatgaagtgagcgtgcaggaaccggcaccgcccaaagaagaggagccggcgccggaagccgaagcggaggcaccgccggcggaagaaaaggaagaggaggaggaagaagagccggggtcatccggaggggcaggcgatgcgccgaaagaagaatttcgtcgcaccagtgttacggagtccgtcgcgccgacggagcaacttcggcgcgcgccgccccctcaggcgaagccggcagaagagtcaatgagggaggcggaagcggcgatgctggcggtgaagaggcgccgcggagagggaggggaaggcggggcgcgcgacaatgacnagcgagccccgccgggagctggctggaggtgaggagggaacccgcccctttggcggcaagcggaacgggggaggggagcggagcgcgagaggggaggggggaggatcggggggggccgggggcaagccgcgggcgc

SEQ ID NO: 97532 - DNA, 249 bp, Heterodera glycines
tgaatcctcttaatttgtttacctccaatcaaggattggaagaaagtcgcaacattgtcttagattatcgaaaaggcattttttccccagaattaacagttgagcgtttatggaaggccaaacatctgtatggtaatttatttatgtattttttccttataggactttaggattactgaagattatcatgcattctttcagaatcagcttatcatccgatgtctgaccaaaaaatgttgccttttggtc

SEQ ID NO: 97533 - DNA, 548 bp, Heterodera glycines
gaacggcttccgttgcgcgccttcaaaaagatcggtcgcgttggcactctgcctgccctcgcgcacacttccgccgcttcggcggccattcagtcggtgatgagcagcggagacgaagcgacgacgccggcactgaccagcggagggggcgctagcagtacacggacggcgggcggaggcagcgcattccaacgatggggaggcaatcggagaggaagtcatttggtcggttgggactccgcgcggcctcagtctgctgcgcgacagcagcagcaaatgctggagagaatgtacagcaaaagcgaactgcacgaatatcagcagctgttcaaaatgttcgacacggacggaagcggcgccatcggatgcgaagaactgaagggagcgatgctgtccattgggttgcaagcggacgacgcggaaattgaacgactgatcaaagaagtggacgacacggaaatggttcgattgatatgtgatcactctttgccttcggattgtctctttctcctcccgcccattagtgaaattgatttccccgaattctg

SEQ ID NO: 97534 - DNA, 894 bp, Heterodera glycines
ggctgcaggtttccatgatcggattcgacccaacaaatgaacaaaattcggggcaacagcttttcatgggcgaaattggacaacgaatcaacaatctcatcaaattcaacatcggccccaaatggatgagtttgaactttgccgctttgtttttccgattttttggctttccgtcggaagctgctaattgtttggaagctgctttaacattcccccaatttttggacatttctctcactcaattggcccaacttttgctccatttgaatccaccgatggaaaatgccaaaaaggaaaatgacggaattgaaaggattttgcgtattgcgatgcaaaaaggagaaaatgagcccgtccctttccatttgatgggcattttccatttgcgccaaaatcgctccgttttggcctaccgtttcttcagagaggcgttggaccgcgacccgaacttcgaacccgcgctgaacgaattgctacggatgaaatgcactcagagagtggggaaaaagccgcgactgatccgcgacatttacgcaccaatttgctgttggcccaatgagcagaacgtcgtctgtttcgagcggagggccaaagggtcggtctggagggaatccgtccgttgtttccgcttggaatcgccgcctgtttcctccggcggggaattccccgccgttcactttgtgtatttccgctgcaacactccttatacgggtcgcagttaccccccgcctccattcgcccctttggtcgccccccttttacgcccggcaggtcggaactgcgtcaaattgaacttcgtcgattcatccaacaaatcgaggctgaggaatcattgaagaccaaacgaaatgaaaggacgtcccatcgtccgtcggtgttggcactcgattacgg

SEQ ID NO: 97535 - DNA, 155 bp, Heterodera glycines
cccccgcctctgggggggggggggtgccaaaatatgggggcggggggaaaaaaaaaataaaaaaaactcccgccggaaaaagggggcggggaaatggccgaaaataccggccgcgtggacccggggaaagtgaaaaaaaaggggggggggggggg

SEQ ID NO: 97536 - DNA, 352 bp, Heterodera glycines
  unsure (1)..(352): unsure at all n locations
aggttcatantaggccaagcagcgaaaggtgtacaggaatttcatgcatataaagagtttgttgtccctctcaattaatttctaatttcattcaaatggacatcgaagcaataggcccactctaccacgtcgcaatccctcgtccgacgcaaaaagcgatttgaaatgaacctaaaaagggagggacacaaaaatatgtgaaatcggagagtaaatatcgcaaaatagcgaccaaagtgcggttgcaatggcaatgccaattccgatgcaatcgatgaacacaacccaaaggaaaaaggcgcaaaacgaagaaaaggacaaattgagcgctaatgcaaacagaactttttat

SEQ ID NO: 97537 - DNA, 519 bp, Heterodera glycines
cctgcttcgaggaacaaacgttggaggcggtggtggaaatgcctcacgttcaatcggtgaagtgatcgtcccaagaacttcagtcggaataattatcggaaaaggaggagaaacaatcaaacgtttggctgctgagacgggtgcaaagattcaattccggcccgacgatccaaacctacaagaacgttgtgcggttatccaaggaacgccggaacagattaaccgtgctacgcagatgatctctgagctggtcactcgcagttccggtgggggaggacaacaggaaaccttttacatgcatgtgccggcgaacaaaaccggattagtcattgggaaaggaggtgacaccataaaacagattagcgcggagacgggggcccatgtcgaactgtcgcgagactcgccacccaattcgactgagaaaatattcgtcataaaagtgggcgatgttgcaccgggaacaccactaccatcttttcacggcaatgctggcattaccaatgccacaacgcctttggc

SEQ ID NO: 97538 - DNA, 478 bp, Heterodera glycines
gagacaagacagcaaaagagcttaagagggcgtttagggattggtacttacgaattggcgacggatgaagcgccaattggcaataagaagagtggaagtgaaaggtgtggtggcatttgcattatcgacccaacggatttgttacccattgagcggtacattcgccttcccagtggcgtttttcggcttgtaaaagtgccaacaaatgcaattactcctcttcttacgagtgaagttaatgataattcagcagcagttgctacacttaccgatggacgacttgctctttttacgactgaccactttgattcgattgccgatgtttcggctacatttctgcctttttccacgactttatccagtggaatgatgttagattgtgcagtgaattcggatgggcgactgctatgttctgacaaataggggaatctttttgtcctccgttttgctttggatggttttcatccacccgattttc

SEQ ID NO: 97539 - DNA, 666 bp, Heterodera glycines
tcccattaaatgatttacaatcctttaaagaatagacctgattaatttccattttttgcattttatttttagggtacaattagttataagacaaacgtttcgcataaatatttgttcaatttcgtttttgttctcacaattagcatgacgtggaaagggatcagacggtggctgaaaatgtgctaaaacttcaccgatatcgccctcaaggcgaatcggttggtgccgttcaggttttcggaacggctatggaagtacgaacgacatttgatgccgaaaagggggacagtcatggcagaatggaagtgtacgagaatattagggaatggacggcggtggaggaagggcagaaaattttgagcacccaattcatgcgcaaatacatccacacggcccgggatgtgaagccaaaactgacggatgaagcgtccacattcatttcggaacgttacgcggaactgcgatcaaccgatttgatcaaaacggactgcgaaaggacaatgccatttacagcccgacagttggagacaatgattagactttccacagctatggccaaggcacgactttcgaaaacggtcggactcgaagacgcgaagagtgcgtacgaacttctggactttgcatgctttaaggaaaagccgagagagcgattggaatatgagg

SEQ ID NO: 97540 - DNA, 797 bp, Heterodera glycines
gtctctgttaacaccaatggataggttcgtctcatttgttaacactcaatcgtcgctgtctcggggggaaccggcgccacatatttgttgtacacttacattatgaaaatccaagccggccacagatatgaaatcggtgaccaaaccggcaaaacgtacattgttacgggagcgacgtcgggaattggtaagacgatagcgacggaattggcaatgaaaaacgccgaagttgtgatggcatgcagaaacagaaacaaatgtttggaagtgcggcgtgacattgtgctgaatacgaggaacaaaaaggtcttttgtcgaatgtgcgatttgtcagacatggaaagtgtacacgaatttgtgcggaaaatgaccaaaggaaaatacgacttcaaaaaaattgatggagttattttgaacgcggccaccaaaagcaaaaagtacagcaccaacaaagacggagtggagacgaacttggccaccaatcatttgggctccttccttctcgttggccttttgcttcagaagcttctcgaccaggacggacaatcgcgcattgtttttgtcgggacggacatagcgacgaaaaacagtctaaaattggagcttggcaaattgaatactgccaaatacacaaataaatttctccgttccaccgaaaaattggacatcgaaaaaggcaaatacgacatgcatggagcatacaaattttcaaaactaacgcagcttgtattcgcacgtgaattggccgaacgtcttgaaggtaataataaaatccgagcggtggtggccgacccggg

SEQ ID NO: 97541 - DNA, 336 bp, Heterodera glycines
cttccttaacctcctctgatgaactctatggaactaattaaacgattgttaatgcaaggaatctaaaccctaagaggataacatttagggaacccaaatattctaattttagatgcagatcgaatcaattaatctttaattcatctataattcgaaaccgaatctaattgttagtgtcgatgaagcttaccatcgtcgtcgcggttcgtaacacatgatcttgaaaggggaaatcaatttcaaaggcgggtcgatttggccttcaaactgcaactttcaaatctcaaattggagtttggaaatcaaattcatgaaacctttggcctggttttgggg

SEQ ID NO: 97542 - DNA, 728 bp, Heterodera glycines
gttcctttagccccctgtaccgtatcccctcgcttttcccactgaccgttcagctaattgcccagcattggatggccttggccaaaaagcattcttattgactgagtgctaatgcgaattgccaattcccctgagcccaaatcgcccgccaatttcgactcccgcgccgacaacgcccgacgcgactcgcttatctttctcaacgattggacttctctgtcagtgatttgtttcggcgtttgtgagttggaaattcactgttcgtacgccgagaaaagccagtgaaaggcgcccgagcatagcccacggaacccccggcacagattgaaaaaagtctcttctcctccgctgcttctcctctcccgccgatgtccgcttttcctcccgcgtgcaatccctcccacgcgcgtgccatcggcgaacgcgtgctcgccagaatgggaaatatgccgcaaacggacgaaggcgcaaaaaggcacgcccaaacgacgacaaattttgagacgccgacggaggccaaagaaacgtcttcgtcttttgcgcttttccgtccctccgattgtcccccgtcggccgattgtccgtcgcttaagccatcggtcggccaattgtccgtttcatggccaccggccggtgaattatttttaccattgttttcgttttataaatttgttttctccgttgttttttaacccgtcgactaattaaatcaattacagccttaaaaa

SEQ ID NO: 97543 - DNA, 295 bp, Heterodera glycines
gcgcttcttctttcttctgaccattgctcttctctccggtgttcttctcctttccccaagtgcactcgcaaagaaaagagcccgccgttcgatgcccgttaacgctgccatgccggaatggaaaattttgtccgctgaagtggaaaacgatggcacagcataagaaggaggaggcaagctttggatcatcggcatgatcgaagaaggaatttgccaaaatgatgaagaataaaccaatgaatgttgtggatttgtagaaattcattcaaatgccgggaataaaaatagttaaatt

SEQ ID NO: 97544 - DNA, 275 bp, Heterodera glycines
aacattatgacgttatctttttggctgaaatgaatttgccaaaggaatgcgacggcggtggcaatgcccaacggcgggaggacgacaatgttgagcagcagcaggaggcggcggcatgcagcaacagtgaggcgcaacagcccgctaatgatgaggatgaggacgatgatgatgatggccaaaccaattttgtgtgcaaccggcaataatgccgtcgatgtaacatgatggattgtttaaatgcattaacttttgaagtaaataccgcatgaatt

SEQ ID NO: 97545 - DNA, 120 bp, Heterodera glycines
ccgcctacttcatcagatattataatcggagaaactgcccgtaacctaatttccattttggacttacttgaggcctggataaacgaattccctcctgaagatatgggattgcaacgcttt

SEQ ID NO: 97546 - DNA, 150 bp, Heterodera glycines
  unsure (1)..(150): unsure at all n locations
ttcttgccgaggcaaaagcctagaaagaactttagcgaggggcactactttagatgaaggatttgttttttcattaattaaatcactcatttccgtttcatttatttggcgttctgtttttattccatgataaattcctctttaccnnaa

SEQ ID NO: 97547 - DNA, 395 bp, Heterodera glycines
gttcatcgcggttaatgaactcaattggttgcccttcctcctccaatggtccttcctccgctatgccttcttcttccgctgattgttctgctgatcgctctcttccgtcttcctcttccgttatcttccaacaattcacgatcgatcagcgacactttgtggacgaggattacttcagtctcgagagtattttcgccaccaatacgaatatttgctgcactttcgagtctaaaacgccccccggtgagtttggtttttttcggtcattcaaatgtttcagcgctttttcctctgctcggccggaaagcgcctgaggtcatttctgagaagggataccgtgccaatgtccccgcttggctcgtccccgccgtcgaccacatttgctcgtttgccgt

SEQ ID NO: 97548 - DNA, 299 bp, Heterodera glycines
gatttcattgtaattcatcgtccgcgacggacatctcttcgaatttgcttcgctccaaaaattccctcgtgattgtgggccctccactaatgagacccttttgttcgacgccggaaatatttgccaggaactgatggatcacttgggggaaatttcgtgcagtgcgattgcgctttgtgctaaggagaactgattttgagatcgacttttgccacattggatgattttttgtgaagttatttgccaaataatggcgtttatttatttatcgtattgttcaaaatacaattttaaacatt

SEQ ID NO: 97549 - DNA, 225 bp, Heterodera glycines
cttgcttcctctatagtagtaatctgattagctaactgccaatagagtaatgtaaaaactatcataggccataactcccccattacatagaagcataccaacgtccacttgctccacatcataaaaaaccattttaattggggataaagctggatgtactgatctataagcagcttattgggatgccaataagcttggtaagggaaaagaatcaagccaaaaaag

SEQ ID NO: 97550 - DNA, 449 bp, Heterodera glycines
cttttcctaaaattcaatttacaaaaatggtttccaagcttcttccggtcattctctgctgcttgtttttggcttctttcgccctctgctcgcccaaggctgctgatgtgctgaaatttaaacgagaagcggcgatcagcagttgtggagctggacagtttgaatacgggggcggctgttgtacgacatgcacaagcgatgctgattgtacgggcgggaagctttgtgtgcccatcctcaacttgctcagcgtcagtctgtgctttgccccatgcggaaattaagacagaaaagaaagcagcaaatgagggtgttgatagtgtgataaattgataggattaaatggaaaatggggagttaataattacttaaatgcatttaaatagtgattgattgatcaataaatatttttcggagccgaccgattcccacgggggagaaagaaggaa

SEQ ID NO: 97551 - DNA, 154 bp, Heterodera glycines
ggccaatctgccgattttcattcccccaaactgctcaatgcgttgtgtaataatggcgatctaatgattagcctgccttagtttacacttaattagcttattcattctcatctcattgtgccatttttgtattgcaataaaaattcatgtaatt

SEQ ID NO: 97552 - DNA, 629 bp, Heterodera glycines
atgtggatccccgggctgcaggaattcggcacgaggcttctttgaaaattcggcacgaggaaaaacatactattgtataccttataaaatatgtgcatcttccatttctcgctttttaaataaattgttttgaaaaatttaaccgacctagacagatttatacaaatgataaatgaccttaaacagaaaagagctcgtcaacttgagacacacattgaagttttacgccgcaaaattgaattattgcgagaacagaattatcggttgttggagaaccgtcttctgagagaccagaaccaacttctgagcgatcagaaccaacttctgagagaccggaaccaacgtgtgagcgagcagatccaacttctgagagacgccgctaacgagcgccggcaggctggcggtggcatcgacgagggtgccaacgtcggtggacaggccgaaccaagtgaccgtgatgccactagtgccgaaggacagcgcgagccgaacggtggtggcaacgatcgtgatgcgggtgccaccaactgactggcatttacaagaccgagagaagcagtttcctgttgatgtaagaacataaacaaatgaaaaccatccactttttgttgcagaaaatgtattagtaa

SEQ ID NO: 97553 - DNA, 252 bp, Heterodera glycines
atgcatgacacaacaacgtgaaaaagtggtggtgaaaccgaggcccatagcagaggctacaaggcgactggaaagatttgccgttcctttgatgttctccgctcccgcgtctgttcgcttggcttctccgcgcagacgacgcccttttcgtgctcaaatttattcaatgcgttgctctgattgcgttcgccgttttcctccagtcgcgcgactttttcctcgcctccgccctttgcatgggcatcgcctggc

SEQ ID NO: 97554 - DNA, 562 bp, Heterodera glycines
cttcacctttccgtgcactatcttctcttgcattaagattgtccagcaatacgaacgagcggtcatttttcgactgggacgtattcgtcgtaaagcgcaaggacctggattgttcttcatccttccatgcgttgatgaatatcgctgcgtggacttgcgcaccgtgacttgtgatgtgcctcctcagcaagtgctttccaaagattcggtcactgtcaccgttgacgcggtggtcttttaccgtgtgttcaacgcaactcaggctgttatgatggggaacatttcgtcgtccaccactctgctggcacagacaactcttcgccatgtgttcggcacaaagactctgagcgaaatactcggcaacttcaacaagatcaaccgtgaaatgaagttgtccatggataagccaagcgatgtgtggggcgtggaagtggagctggtcgagctgaagaatgtgcgtttgccgcacgacatgcaacggtcgatggctgctgaagcggaggcgggacgcgaagcacgggcaaagatggtggcggctgagggcgaccacaagcggccaagg

SEQ ID NO: 97555 - DNA, 243 bp, Heterodera glycines
ggcactgtttgctgtccgagaaaatcgctacatggttctgaacaccgactttaacaaagcatataagcaagtggtgaagaaagacagcgacgagttcgctttctacaagtgatttgtgatcgaatgacccccacccatcgtcaaccatttgctttttgttgtttttgcgcttatatatcatcatttccccgttgtgtactgtctttttcattgcgtgtcatcgaataaagggaagtgaaaagg

SEQ ID NO: 97556 - DNA, 486 bp, Heterodera glycines
gtcgtctaagataaccaaaaatgaccaagggtacccccagtttcggtaagcgtcacaccaagtcgcacacgctctgcaagcgttgcggtcgccgcgccttccacaaccaaaagaagacgtgcgcccagtgcggctacccctcggccaagctccgctccttcaactggtccgagaaggccaagcgccgcaagaccacgggcactggccgcatgcgccacctcaagaacgtcaaccgtcgtttcggcaacggtttccgctctggcacccccaaggccgcctctgcctaaagcaaccacaactctgtgattttcaaacatgtgtatttgtgtcggtttgggttgatgcaagtttcccgcgccgtcatttcgtgaaaaaaaaaaaaaaaaaaaaaaaaaaaaaaactcgagggggggcccggtacccaattcgccctatagtgagtcgtattacaattcactggccgtcgttttacaacgtcgggactgg

SEQ ID NO: 97557 - DNA, 511 bp, Heterodera glycines
ctagtggatccccgggctgcaggaattcggcacgaggggcacgtggaggaccaattgttcgacttttacacgcccagcgagccgaaaaagaaaaagctcctccaccatccgtcggccgccgcttcgcccgtcggtgcgcgttcctccctctccggcactcgcattggttcacttgcgctcggttcgctgactctcaacgcggcgcccgacttggaattatattctcccgctttgccaccctccgcttctttgaacgccgttgcgccatcgaaatacggtccctcgcccgcagcgaactcttcggcacggcaattgctcggaggaggggcaaggggcggagattctgttggcagtgttccgtcggcagttgcgcctgacgaatgtccgctgaagaagaaatacgcgaaggaagcgtggccagcggaaatgagaaggcgttcgggcagcattctctgagcaaataagcaaatgaactcgaataaaactgcaaagtttctgcgaaacaccccat

SEQ ID NO: 97558 - DNA, 267 bp, Heterodera glycines
cattctttgtccaaattttgttgacttccaattcataccaaaaaacttcattgtttgtgtctgtatcgatcattgttatttaattgcccatctcaaaacagttcgtttttcaatcacttatgtcgcaattcctttaaaacctttgtcctaattgcttttttgaatcgatcctcaaagtgtgtgcctcagcaaaatgacactttctttctttacttttttaattcgactttattttaacatttttttgtctgataaaaattttattgg

SEQ ID NO: 97559 - DNA, 615 bp, Heterodera glycines
gtcaaatctcgtcaaaatgtcgctcgttgtctccgaaaagggctcgttctcttacatcttgcgtgtgctcaacaccaacttggagggtaagcagaagatcatgtacgcccttacctccattaagggtgtgggtcgtcgctacgccaaccttgtctgcaagaaggctgaggttgacaccaacaagcgcgctggcgacatcaccgccgaggaactcgagcgcattgtgaccatcatccaaaacccgctccagttcaagatccccaagttcttcctcaacaggcaaaaggacatccgtaccggtgagtacgcccagaacgtgtccaacgctgtcgacaacaacctccgtgaggatctcgagcgcctgaagaagatccgcgtccaccgcggtctccgtcactggtggggcatccgtgtccgtggtcagcacaccaagacgactggccgtcgcggtaagactgttggtgttgccaagaagaagtaagctccattttggtgccgaaaatttttttgtcgtaccgactgctctctgcctcggatttcatgtctttttgtcgtgtgtggcgtatgggttttcacatcacaatacatccgcaaatggatcatgcctgaaaaaaa

SEQ ID NO: 97560 - DNA, 960 bp, Heterodera glycines
ctccttctcaagcttatccaggcgggcattgtcgatgattgggatgatcctcgtctgttcacgctgactgcccttagacgtcgcggagttccgtccgagacagtgaacaagttcattgcccacctcgggctcaccgtggcccagtccagcattgacccggctatgttcgacgcctttttacgcgatcatttgaacgttactgcaccgagaacaatggcagttctcgagccgcttagacttcgcattaccaattatcgagagttgggttttataccagcgaaaagcaccttacgggtcaaacaattcccatcctcaattaatgaaagtacggacgaatgggaaattgcatttgacgagtttgtctacattgagcaggctgcttttagagaggttgccgaaaaaagttatcgtcgactgacattggaacagccggtgggactgcgtcatgtcaatttggcagtcaaaattgacaaactggagcgggatgagcacggaaatcccatcgaattggtggtaactgcgaatccggtgagtagtgagtgtaagccgaaagcattcattcattgggtggcgagaccggtgctttgtgaggtgcgtctctacgacaaactatttgtacacaaaaatcctgaggaccctgccgaagtccctgggggttttttgactgacataaacccgaactcgctccatgttctttcaaatgcaatggttgacggaagtattattcgcactattcgtccgttggatcgctttcaatttgaacggaacggctttttctgtttggatccgaatgattcgtggtcgagtgagaaaaaattcgtcttcaatcgcatcgtttctctgcgtgaggatgcaggaaaagacatttaaacttttccctgcttttttctgtttatttttatttattagtgcattttcattgttttgttgttgatagataaattgttgactctctaaaaa

SEQ ID NO: 97561 - DNA, 386 bp, Heterodera glycines
  unsure (1)..(386): unsure at all n locations
attcttttaaattttttaatttttaattattttggctctgtcaccttcaatttgggaatgccttctcatacacttctaattctttgcttgctcttttgctttgccttaaccaatggaaatgccaacagtgacaacgacgccgaagacactgacattgaatcatttgtccgcgaaaggtgcgactcggcttgtgaggaccccggcgaaacatcggaggagtgcgcattcgtttgtctgaactgtgtccaaacagaatgccaacactgcaccaatggcaccgaatcgaatggtggcacaaaggaaaaatgccaaaaatgttttgaagaaaacaaagcaaagtgtgtacagtaatattgactaatcttaaaaataaatgaccaatggcn

SEQ ID NO: 97562 - DNA, 485 bp, Heterodera glycines
atttctcaaagcgtatcagccgctacaaatattttaaaaggccttcgacaagcaagcaacaaattcttcacccaacacacaccaccaacgatgagaagcgtcaacacaacaccgttccgtcgccgacctcttccgcttcgcattgtgtcgtccgtgctggtgctgctgctctgtacgttcgatgtgtcactggcagcggagaagaacggcgccagcccgcctatatataatacgctcaccttcattttgctcgttccgctagtcatcgtcatctgcgcgttcatctacctcctgttcatgaagccaaagaatgcggaaggcgacgaagaagacgaagaaggcaaaggaggagctgacggcgatgtcgagaagggagcggacgacgataaaaaggagactccaccttctgctgctggtgacgtcgtggcggtgccatcggaacgcgtggttgatgagcagcaaaaggaggacgagggtggcgacaa

SEQ ID NO: 97563 - DNA, 804 bp, Heterodera glycines
gccccttcgacctccctcggcgcgtggctgcaaactttcaatttgctctcttccctcgtccaaaggatcaaagtgccccagaagcaaaagagcgtggcggaagaccgcgccatgtccgaccaaatcttcaccatgctccaacacccggcacggctcgacttcctccgggtggaccaccccgagttggcagctgcttatgagaaaaacccaacggacaaagatcttttttacatcgccttcatgaagaacaaagaagaacagacgcgacgagttcggctgatgtacgaccatagcagtgaggagggacagcgatacatcgcccaggaaatcgaacgggagcgaatcactcgaatgcaggagttggccatggagcacatgccggaggcgttcatcccggtgcatatgctgtacattcggatgaagattaacaaccaccttgtgatcgcttttgtggactcgggtgcccaggcatccattctgtccgagagttgtgctcgacgctgtgacattttgaaatacgtggaccgccgttaccgagtgcaggcccatgggattggcgggtcgcaaaagatggtagggagaatcttcgcctgccaagtgcaggtcgatgacaatgtttttgcgtgtccctttgaagtgatgagcgacagagacgtcgacattttgttcggcctgaacgcaatgcttcgccaccggtgcaacatcgacctcaagaaaatggtccttcgctttggggacggcacggagacgccttttctcagtgagcaggaagtcaagcgggagaaagaagcgattgcaatggcc

SEQ ID NO: 97564 - DNA, 570 bp, Heterodera glycines
atctcttttatctccgactcatctgctgaatgaaaccagcctgaaccttagatgcccatattgcccaaagaaattcctaaagaatactgaagccatttctcacatggatccgtgtctgaagagtcggccttacccttgtacgaactgttctaggcggtttaaatctgcgcaaaatttgagccaacatgagaggattcacacaaatgttcgaccttataattgccagtattgtgagaagaattttactcagaagtcacatttacaacagcacgaacgcatacacacaggtgaaccggccttctcatgccgttactgtggcgagacgttcaatatttattcatccaaaatacagcacgaaaaaagtatttgtggccttcacgaggccttggacaaacagaaagaaaattcgagtgaaaagaacggtttcgcaaagattgtaagggaacggtcgcctataggcagtgccaacagtcatttgaaaaaatggccctatgacaaagtaggcaccacttcctcaaccgagcaaaacgacgccgaccgaacaatcatcgtcacggggaccagcagtaa

SEQ ID NO: 97565 - DNA, 245 bp, Heterodera glycines
gtttatttacaaaaaaaaaaaaagacgcggcgaactccctgtgtgggtcgtgagaatgatactttgccttatggatggacaaagtattagaaaaaccaaaaatggggggggggaaagacgggaaatcggagattgagtgatcactgatcaacccgatttggttggtataaactcactcgctgcggtggccaacaaaggcggcaatgaggcggagaaacaatagccgaggcctgggatagacattt

SEQ ID NO: 97566 - DNA, 596 bp, Heterodera glycines
tacagtttgaagatgaattagaattgatggaaaacaccgggacggcggatgaatccgccgatggtccgttgggtgctttttgggaatggcatcggatggtcgctggggctgacaaattcggctccatctcgcagcgaatgcttcatctgcgtccttctttgaaagtgccttccgtctccaagcgaattgccttcccttcgaccgccttcccaaatccaaatccgaacaatgccatccctccgccgaatgtcgtccgtcgccgtgcccataacattccaagggacaaacccccgtgccttcgaccgatggacagaccattccgagaacatcggacgtacccgcgcagttgggaaatgcccggctttgaggcgaccattccccgccagtgggactggcgaaatgtgtccggaaccaacttttgttcgcccaaccgtaaccagcacatcccggtctactgtggaggctgttgggtgtttggcactttgggctctctccaggaccggtttaacgtggcacggaaaaatcgttggccaatgactatgctttcaccgcaggaaattattgcgtgtaatggccgtggaagttgcaacggaggg

SEQ ID NO: 97567 - DNA, 646 bp, Heterodera glycines
gaaaattgcaaagatatataaaatgccaaattttctcattctgtcctgccactatggcacccccacaaagtgtccaagccacgaaatgtccaaaagagtaaaaacccacgaaatgtccaaaatttttcaaaatttataaaaacaaaatgagtctaatttaggatttttagggttttcggggtcgctgaatacgaatataccctttatattaccccttgcctaaccttaggcccatctgaataataaaaaactcaaattcgagacttggacatttcgtgggctggacattttgtgggtcagcggccactatgggtcaagcccagtgttagacaaaattgctcataacgccaaatagcgtaattggcgtaaatttttgcgcgctaattcaaacacactgatcactgccatttctgattgtttattttgatcagccatagctttgttcctctccaactaaattgacctaaattggtatctaaaataagaatttgaaaaggagaatctttttctagttaaaataactctacagttggccttatttttgtattaaatttccttattaatcgattcagaatttttttctctatcgtgtgcaaaatttggtggggttttaacaagcagaaaaaaagttaaacagcatgaagta

SEQ ID NO: 97568 - DNA, 157 bp, Heterodera glycines
cggcgatagtaccagatgggttggcaccgaaagcggtgaatgaacgaaggagcttttggggcctgaaaagcctatggcataagagggagtgccgagttagaaagtgatagaaaagcattaaaaaatgagaaaagactttgagcaggaccatttgagg

SEQ ID NO: 97569 - DNA, 507 bp, Heterodera glycines
tgccatttttactacgtattattttatttgttgatgaataatgtcttctcgaagaaatgaatatctcgatgcgaagatttatgttggtggtttacctgaggatgcaacttctgaagagttggacgatgcgtttcatcgctttggacgcatacgaaaaatctgggttgctcgtcgtcctcctggctttgcttttgtcgagtttgaggatgcacgagacgctgaagatgctgtgcttgcactcgacggaacgaggatttgtggcgtcaaggcccgcgtagagctttctcatgggaacggaagagggggcggacgcggttttcgaggcggagggggacgttatgacgaccgttatggtcgtgatcgttatgaccgtgatcgcgaccgtcgttatcgttcaaggtattaatgaaattaattcgttgaagcttttttcgaaacttgaacattgcgcggatgagtggtcgaagtttataaacttcaatttgtcaaatttagcttttcttcatc

SEQ ID NO: 97570 - DNA, 564 bp, Heterodera glycines
caccattattataaaatgggcaattttaaggctgcacgtggcacgggtgcaaaaagtgctacccaaacgacaacatgctgctccccagtgggaagactgcggggcaagtgcgcgaacgggattccaagcggatggaatttctgagagagaaggtcaaccgagtggacgtctactgggaatgcgaaatccatcggatgctggagaggagcaaggaaatgcgcaaggcatttgaagactatgtcgatgatggcccgctggtgatccgcgacgcgtttatgggagggcgaactggaccgctgaagctgctgcgcaaggctggaccgggagagaaaatctcctattatgacttcacatcactctacccgtatataaagtgagcactgttaaatttgtaacaacttttaacattgttttcttcacagcttcacaacccgttaccccattggcactcccaaagtgcatgttggaaagcggctttgcttccccctgtgcatcacttgcgccaaagagcacccgacaggaggagtggacaacgactaccactgcgagcacaatgacagacag

SEQ ID NO: 97571 - DNA, 300 bp, Heterodera glycines
actttccaagctccactaaatttgtttttttgtgaataacagtcagcaaaaacaaagcaaaaatggacgccatcaagaagaagatgcaggcgatgaagatcgagaaggacaatgccatcgaccgggcggacgccgcggaggaaaagtgccgtcaaacgcaggaacggttggagcgtgttgaggaggaattgcgggacacgcagaagaaaatgatggcgacggagaacgaattggacaatgcgcacgaggaccctgacggctgccaacaatttgttggaggagaacgagaacacagtgcag

SEQ ID NO: 97572 - DNA, 610 bp, Heterodera glycines
gcgtaccaaaacgagatgtctcgtttagcgcgaattattcaatctcaacaatggacgatttcctctcaacagaggaccatcgaaatgttggtctcccgactgcctcggaatgatggagcggcggctccgctcaatggcggcgaacgacgggacatgggaggagcgcccaacgaacagcagcttggccaaccgcccattcttcaaattgatggaggcggacatgggcaacgcccaaacggaaatgccaacatcgttcgtggccaaaatgtcgtaccagtggctcctcccccatttgtggctcaacgacaacaagagcaaggacaaaacgaaggcggaaatggacgacgcccacacggaaatgccaacatcgttcgtggccaaaatgtcgtaccagtggctcctcccccatttgtggctcaacgacaacaagagcaaggacaaaacgaaggcggaaatggacgacgcccacacggaaatgccaacatcgttcgtggccaaaatgtcgtaccagtggctcctcccccatttgtggctcaacgacaacaagagcaaggacaaaacgaaggcggaaatggacgacgcccaaacggaaatgccaacatcgttcgtg

SEQ ID NO: 97573 - DNA, 281 bp, Heterodera glycines
ccccccccccaccttcgatatctctcgccgggtgcagccgaagtccgtagaaatcgcagcgccgtgccgtctccagcagaacaaagtccgcctcggccggctccatgccaatcagtcgccggtgctgctccaacacggcctaagaagaagggcaaatgaactgaggaaaaatcctcggattatgtaagttcacatggtattatttcaaaaagtgaatgaagggcaccgggctatcaagtttaacggagtgatcagttggaaattgatgatcgataagcctg

SEQ ID NO: 97574 - DNA, 255 bp, Heterodera glycines
caccaagcttatggaaatccaatgagttttggttcccgggaaatagcgaattccatgaaaatccgtgacgaggaaaatcacgacgaaatcccgggctaaaatcttgtcaagaacccggaccaaatcatggtaaaagtatgacagcaaatggtaggaaaataatgaaatgaacttaaactgaaaacgatggatgaaaattaaaaattcacatgtgtcaggcgtccaaacacgtgcgcgaaaatcactccttaaatt

SEQ ID NO: 97575 - DNA, 607 bp, Heterodera glycines
attttggccctctgtcagcacattacgaggaagacgatgaactgcttacaccgacaaagcgacttcgcgaattgcggctgaattctgacgaaaaatgtgcgatgtccgattcaatcccacgggctgttgagctgtttatggagaagaaacgagcaaggatttcaaaattcctgtacacgtacaacggcaacttgcaattgaatttgccacaattgcacgcatttgcatgctcaacgggcggactgattgatgacgaatttagagaaagaatttggccaattctcgtaaaaaatcttccacaagcaaaacgatgtaaagatacgcaatgggacgccctccgctcggaggaatacaatgaccaaacaaatcattcgagcgacgaattgcaacaacaacagcaaacccttttcctatcagattccgactttgaatctgcattttccacgttcaccccgtccatttcgggctgtgatgatcaattgatggatgcggaggacgacgccgagggggacgacgcccaaagaatggccccccaaaacgcaacgaaccgatgacattcgagtgagtcaaggtcttcgacttctctcctgaccagctgcgtgcccac

SEQ ID NO: 97576 - DNA, 548 bp, Heterodera glycines
atttattcgtttcgtttttgacctgtatttccatcacaatcaactgaaaaacggcaatggatgattcgttatcctctcgacggctcccttccgacttctccttctaaaaatttcatccaatcttctgtataattttttctatttccgtatgcttaacagctgtaaattcccaaaaatcatcctccaagtttgtgggaggggaattcaaaaattgatatggatgttgaaactgaaacacagggtagaacattttggccgacgaccaaatgggaaggaaactcccagccgaacttttgttcgaaattgttctctgtgttcgaagagaacatgcccacgcgagcatttgcctctcgtcccttgttttatgcaaattaatgctacctcgtgcttcattatggcggaaaatttgggtttcagtatgattttggatgtttccgcttttttttttttaattttcgttgttgctgtttggacttgtctttttatttttgcactaacaccattttctgagctcgtgagctttcttcaattctattattttatttttg

SEQ ID NO: 97577 - DNA, 565 bp, Heterodera glycines
taattaaatccattccttcgggggaccgtgccgggtgccgcggggtaagcagtgctggttcgtttcatcacggcaccgaaccttttggctagtcagcaatcgttgcttaacttgccagatcggacgggtgcgcatgattccactgttccaagcaccccaccaaaagcaaaacgatataaccaaaatataaggaaaaattttttctccatcttcctttttgatactaaagcatcagagtgctaaaattaagttgtaaataaaattttggtgcactttagagcactttctgaaaaaaatatttatgaaacaaaaaaatcgattttttcaagtgtccgtttggggtactcaaacatttatggggagcaaaaatccaacgcagaattaaagtacaggctatagggaagctattcccgagggattcggtcttcccataaatctgggcgcatcggttcggggggaatgccccgaaaacaaaaaatcgattttttcaagtgtccgtttggggtactcaaacaattatggggagcaaaaatccaacgcagaattaaagtacaggctataggga

SEQ ID NO: 97578 - DNA, 361 bp, Heterodera glycines
gctctaccaaatgaaatgggctcacaatatgccgcatcttgggcaagtttggacaggggtaatgcaaagtgctggtgcgtctcggaaagcggtctaatacaacgacagaaaaccggacatcgacacgaagggtatatcgtctcccgacaacctggacggacgaatcgaattccaaaatgtgcatcttgacaattgtacactgtcggacaatcccattcttctgggcccctcattcaccgtggaaccaggcaaaggggaggcattgctcacagcaaccggaagaggaaacactccgcgcattgcgcgttgagaacacttttactcgcctgatggaagcaaagatgtggcggaccgagtggcc

SEQ ID NO: 97579 - DNA, 624 bp, Heterodera glycines
  unsure (1)..(624): unsure at all n locations
ctcaatggccgtgccggctttctcgcctctttgcttgaacttcgtttactttttggtcaacaattactttccgacgatgaaattcgttctgttttggatgctatggtttcttccggcagaaaatactccaaaaagcacaaatctccggcccaactgatgttcgaatggtacaacactgaataccttggcgcggcgcacggcgtcagcggaatttaccaaatgatgttaagcttttgggacttgttggatgcttctgcaaagtcggatttgaagcaaagcgtcgattggctgttgagcacccaattttcggatggcaattttccctcgtcgtccgatcgaatcggattgtctgaggaactcgtccattggtgccacggcgcctccggcgttttgcatttgctcatcgtcgcctctttggtgtttaaggaggacaaatatttggagtcggctgaacgatgtgtcaatctcatctgggcccgaggaattctgcgaaaaggacccggcatttgtcacggagtggccggcaatggctacgcttttcttctcctcttccgactcaccanaaatgacaaattcctgcaaatggcccattggttcgccttcgtaatgatggccccctctttt

SEQ ID NO: 97580 - DNA, 298 bp, Heterodera glycines
atttccacggttccattcggtgagcctccgtccgccttcgttttgctctgtcaaactttgctcggcgctcgttttgtccaaacggcacacttttgcagaacgtgcgcagtgccatcggccaaaaagcgttgcaaagattacattttactgttccgtcgaatgccaacgatttgattggggcgttcacaaaaagtgttgtgaggcaataaaacaaagaaattttgaccaaaattgtacagcaacaaattttgaggaattaaatatttcatgagtttgtgcagatacactctttattatt

SEQ ID NO: 97581 - DNA, 439 bp, Heterodera glycines
cattgagcctgatgttgggtgccgtcttcatttatccggtctaaattgggaatggcacacattggacactttgcgttctcattttggccaatttggcacgatcgaacagctggaaatggtggcttacccccgtggctgtggttcgttggtgttcgattcgcttaatgctgcccaactttgtttggctgccggtgaaaaacattcggtcaacggacattcaatcgaagtcaaaatggttcccgccggcttttccccgctcttttccccggctcggcccaattcctccgattcggcactttccgccgcttcctccgcacctccgccgccgaatgcccctctgaacttactctgatctgtccaccttctaatcattcgttgtttcccaacttttttctcggttttttttgccatttccgttgtataaaacaaatgtccattt

SEQ ID NO: 97582 - DNA, 195 bp, Heterodera glycines
  unsure (1)..(195): unsure at all n locations
ggaatctatgaaatatgcgccggtgacttcttgtgacgttgaatgcagtttttcaatttacaaatcaattttggccgataatcgaatgagttttacccccgaacacctcgaatgtatccgatttgcaattgttttcgcgaaattgatagactgttaaaaatttgtattttttcgcataaacacacttgatttcnn

SEQ ID NO: 97583 - DNA, 485 bp, Heterodera glycines
gagaaattaatttcttacaaattttcgcttcaaatgactttcgcttttgctgtgctccttttgcttttcattcctccgctgacattggcaaaaaatgcgcgagcggagggacccgtgccggttgttctttggcatggcatgggcgattcgtgctgcaacccgtacagcatgggcttcatccgcaaattgattctcaccaatatgccccatgcttatgtgctttcgctgcagttgggctcctcagttgccgaggacattggccgcggctatttcgccaatatgaacgacgaagtggcggccgtgtgccaacagttggccgaggacgcgcgacttgcgaacggttacaatgccatcggattttcacaaggcgcactttttgtgtaagcaaagcgcgagaaagaaaagataaagtgatcgaagcgtcggggttgtgactctgatcagttgaatgttgtgactctgatcagttaaatgttgtgactctg

SEQ ID NO: 97584 - DNA, 274 bp, Heterodera glycines
gtcagggcaaaattcaagaatgatgatggggaaaagcccataaaatggcgattttggcgtgatcagaaaaaacttaaattgatttgtctgattttgcatttagactccgtccgatcgatcgctcctcggcatatccttcccctcccctcccccaccaaataatccccttaattcatactcattcgcatttaaatattattttgtatgctaaggttaccaaattacgtaattaaaatatttagtttcgctagaacatcggaagaaaaaacaaagg

SEQ ID NO: 97585 - DNA, 481 bp, Heterodera glycines
gttatgctcaatgacaccaaattagagtcaactttgagcacgacgattaaatcaatcgaccttcagattgaattgcctaaatgtttggattgcctggctgacggattgaatgtcacggaagaggccattacagagaatggcggcggcacaattcgtttcctgcgttcttccccgccagtctccgtccccatcttgcctccttacattttgctgttgcacgaccaaacaaatgatgccaatgtttggcggaaaactcttcagattctgtcggcctccggcttttgctgtgttgcgcctcacctctcaaattttgtttttgacgaggaggaaaatgtaaattttttgctgaacttaacttcacatatcggagcacgtgaagttgtgcttgtggccagttcgatgtccggcatttacctcattccgttcctttctcgtggaattaagaaaaaggacattcatttccacgttaaagcattcattg

SEQ ID NO: 97586 - DNA, 971 bp, Heterodera glycines
ggagctccccgcggtggcggccgctctacaactagtggatcccccgggctgcaggtattcggcacgaggggccgaacactggacgaagtgatcagcgaaatggacttggccaaagcatacggagcaccgtacgatttggtcgaacaaacgcttaacaaacggcggaaaatgctgcgaaaaacggcgaagggaacgagcagaaacattgggcccaaaaatgcgaaggatgccgcgtacgaccacaaaatgatacggcacaaaatatttccgatggcagccgcttcttatggggacacggaaaatgtgaagaattgcattcggaacacttttcgaaatgccacgttgtaccgtaattcggtggtacagtgtaacggtaaggcttatgaattgtgttcggcatttacggcagtgtcccatgaggacaaagcgatcattttgtcatttcgtgggacggacacgggatatcaattaattgaagaaacgattcaaattgcacttttcaaacgatcccaatcacctgacgaagaatgggggaaagttggaagttatttcctgaagattttcaatcagctcgtcgaagagggaaaaatcatcgattatttggccaaattagtgaacacgtacaacaactacgagctttgggtgaccggacattctttgggtggcgcaatggctgccattgccagtgccaccattgttgacgcgaaactgatcagtgcgcagcgactaaaactggtcacatttggacagccgaggacgggcaatggcgaatgggcgacagcgatggaccaaaaagtcggccccttcaattaccgcgtcgtgaacaaccgcgacttggtgccgcatatgccgcccctttggttcgaagggtaccgccaccatatgactgaagttttctataacaacgcaaagaacaaaaccgaggaatttgtcatctgcgcggatgaagccgaatcggaggaatgtgcggg

SEQ ID NO: 97587 - DNA, 386 bp, Heterodera glycines
ggcaattgatgatgaattcgaccctgacattgatctttcacagaggtccagctccgacggtttatgcgatgttcaacaacagcgtttggacttttatgcttgtttacggcgtgacaggccgatttatttccgcaagtgttgtaagtttactcacgatgccagccactgctgctctgtgggtttgggaggctgatcgcgactacgaacgctgggaagggtcgcgggtgttacgtgagcgccgagttccaaaatttgtgctcccgcgaacgattttcgattggtctgactttgattatgctcaacagatgagaaaggctcctaccggttaaggaaaaagactatttacctaatacatatttgaataaagagcattgtttcaaaaaaaa

SEQ ID NO: 97588 - DNA, 314 bp, Heterodera glycines
  unsure (1)..(314): unsure at all n locations
ctaattatctgtcctgcagttttagcagaatgggcattttaactgcttcgaaagtgtgcactttgccacggctttcttccgctcgctctatgacttggtggtggggcccggagaaaaacaatgggcgcgaagttgttggccccactttccacggggatgaattntnntaccaagaatcgntnncttgaccggttgggtatcccggtcccatttcgatttcgcaaaatgacgaagtgatcacgccattcgcacaaggaattgggaaatgggaaaaattgggccttgggaagaaaaattttttttctcggttctct

SEQ ID NO: 97589 - DNA, 408 bp, Heterodera glycines
  unsure (1)..(408): unsure at all n locations
caaagacttcgttatctcttccagcagcgactcggagcaggaggacgccccaacgaaaagaagacggcatcggtgccgggaaatatcgcttctgctccattggaagagccctccgaggggaagatttacatggtggagaagggtagcacagtggacactgtgctcggtgtaaggcgcgatcgtccagccgttgttgcattggtccgctacatggacgagcagtacgaattggtgccaacgcctctgttggtgaagcataacccggcaaagttgatcgaatactatgagaagcatttgcgctttttctgatgggggcgaacttcggcggtgatccaacgacttgtgttatggcacttttctgtttgttttttttgacggcatttgttggataaaatgccaatgaatann

SEQ ID NO: 97590 - DNA, 552 bp, Heterodera glycines
ccaagtttgaggtcatcgatgttgatccgttccaggcagcaattgtgcgcactttttcgtagttccattcgtcttttaaagcccagaatcggctgttattctgtgctcgctcaaatgtcaactgaggttgaaaaggcgcagaaagcgaagccgggcggagacacaatcttcgggaagataatccgcaaggaaatgccttcgacaattctttatgaagatgacgaggtgctcgcgtttaaagacataaaccccgaggcacccgtccattttttggtcattcctaagaagtgcatcactgctctgtccaacagcgaagagcaggaccaagcagttctgggcaaactgttgctgacagcgaataacgtggcaaaggcacagggtctctccaacggatatcgcattgtgatcaacaacggtcgccatggatgtcaaagtgtgtaccatttgcatttgcacgtgcttggcgggcgtcagttgggctggccaccgggttaaacacttggaaatgtcaatcttatcgattgattttttgaagggacttctggcactttt

SEQ ID NO: 97591 - DNA, 544 bp, Heterodera glycines
caggacacggcggtgacacacgaattgcccatcagtttggaggacctgtgcaaagggtgcacaaaaaaaatgaagatcaccaagaaaattgtgaatcctgacggcacgtcgcggacggaggacaaagttttgacgataaatgtgaagccgggctggaagagcggcacccgcatcactttccccaaagagggcgacgtgttccccaaccgtatgccagcagacatcacttttgtcatcaaagacaaaccgcaccccaaattcagaagggacggctcagacattcggtataaacaagtggttccattgcgagacgcactttgcggcatgtccataaaagtgccaactttggagggtgacatcatcccgttgaacatcaagcacgtgaccaaacctggcagcacacaacgaatccacgatcgtggcattccgaaccctaagacgggcaaacgcggcgacttggtggtggagtttgacgtgcgcttccccgattcgatagcgcctgccgcgcgggaactaatcgccaatgcattgccaccaaactgat

SEQ ID NO: 97592 - DNA, 654 bp, Heterodera glycines
  unsure (1)..(654): unsure at all n locations
atttcgcttcgcattttctgtttcccccagttttcgctgcccgaaacagcaaaaggaaagaaaaaagaggaaagggagggagagcaacgaccaaacgcttcgacaattcctccgacaatccctccaccctcccaattccctcatttgtcagcccctgtccaacatcagaccatccattccatccgtcgcgcataacgcagaaggacaggcgagccgatcgcagcgatgacgacgataacgccccaacaaaaaccaattcttaaagcggtgattttagtcggcggcgcccaaaaaggcactcgttttcggcccctctctctccaacttccgaagccattgttccccgttgccggtgtcccactgattgagcatcacatttcgcagctttgcgaacagttggaaaacctccacgaaatttttattgttggattttacccggccgaacaatttgcgaactttatttctgattgtgagaaaaagtatcgacgcgtgccaatccgatacattcaagagaactgtccgttgggcactgccggtggccttttgcagtacaaagacattctaatcgacagaaaacctccggatgcactctttgttctgaatgcggatgcttgcggagaattccctttccttgaaatggtgcangagttgaac

SEQ ID NO: 97593 - DNA, 507 bp, Heterodera glycines
caattaagtaatctgttcgactcattcaccgcttttgcggataattatgcgcaagtgttgcgcgaacgatggcatttgggcgaatgtggcgaagacattctgattttgattgtccaaacaccgccacaaatgcagcccaccgatgggcctcagtcgtccgcgcactcgcagcccaacggcccatttccgatgcttttcctctcgcttggcccactgatcactagtcggcttcaccccgactttgccggccacgcgcttcggcacattttgtttgatgctaatgcgcaactccaacacgacgcacgccctctcttcaaagtgctcaacgaaatgttgctgcgcatggacgccgaagtgtttggagcgttggcaccggcagaattttcagcgggcgttggcacggcaccgtcctcctttgtgtccacaccgcacgcgcggcaccggcacagttatgccgatgggccgacggtgccgtcacgcagtcacataccgccatgggcatgggcg

SEQ ID NO: 97594 - DNA, 383 bp, Heterodera glycines
gaaaactgaaaagtcaatttttcgataccgttaaaccgttttggacttgaaaactcctggagcaaaaatgggcttcctgacttatgcggttgtttcggtagttggcggtgcggtcgccatgactggagtgggcttacccattgcgggtttactaggattttcagcggctggacccgttgctgggtccttagcggcaggggcccaggcgtacgtgggaaacgtcgcagctggctcagtctttgcagcagttcaagcattagccatggccgctccaacgccttgaaacggtattgcttgctgtctgactggaaaagggagtatatttttaatttcagcagattttagtcatgtacctgccatcttcataaaaattctacctatct

SEQ ID NO: 97595 - DNA, 409 bp, Heterodera glycines
caaatttgttgattttcaaaaacgtttttcaaaaaattattcaaccatcgaagaaaagctgacgcgattttcaatttttgttgccaatttcgaacaattggaaaagatccgaagggaaggcgaagtgtacggaattacgacatttttcgattgcagcgatgaagaattgaaagaattgataatgccacatgaatactttgaaagcgttcccttttcttgggctaagccaatccgcgaatttcgtccgatggatgcgaattttaagcggccgagcgaattcgattggcgcaaaaacggagtggtcaatcgcgtgaagaatcagaggcgtggctgcgcgtgttgggcttgtgccaccgcaagattgggccaagtcacagcacccaattcacagcggaacacggggtcactc

SEQ ID NO: 97596 - DNA, 256 bp, Heterodera glycines
gacagaaagatggcacagagagcggagttcggcaattgctctttcacggcattggcgatggttgcgagcgatgcgtttcgtgtgttgaagtgctcaaaagtcgtttggccagtcagggaaaaaatgttttccaatggaatgcattgagcaacaagaaaacatcatcaacaacaacagaaaacagttcaaaatgtgatgaaatggaggccttgaaaatttcggaaaactcgccaaagttgtaaaatgtcaaccaaac

SEQ ID NO: 97597 - DNA, 265 bp, Heterodera glycines
gtcaattggtctttcgactcgctcagagggaattggcgccgctcgccactcaaattgaccgtcatgaccaattcacaaagctccgcgagttttggcgcttactcgtccaaaacggacttttggggatcacagttccggcggagtttggcgggtcggaacgcaattattttgaccattgcattgtgatggaggtgcttttaccaattgggcccaaaagcggcggcatattcaattcggctcatttttgccataaattaaactcaat

SEQ ID NO: 97598 - DNA, 605 bp, Heterodera glycines
cggacattgggccggtgatttcacaaaaagcgaaggagcgcatttgcgagttggtcgaatcggcgctggaagaaggagccgatgtgccattggatggcaccaatgtgacagtgaaaggctttgagaagggaaactttgtcggaccgacggtgatcactggagtaaagcccgaaatgctctgttataaggaagaaatctttgggcccgttttgtgtgtgctcgaaacggaaacacttgacgaagcgatggatttgataaacaaaaatccctacggaaatggcactgcccttttcactcggtcgggaattgccgcgcaccgtttcgtctcggagattgatgtgggccaagtgggcataaatgtgccaatccctgtgccacttccgatgttctctttcaccggttcgcgtggaagttttcttggcgatgcaaatttctatggaaaggctggtcttaatttctacacccaaattcgaactgtgacccagttgtggcgttctgaggatgcctcgacagaagccaaaccacaactatcttttccacaattcaaatagtgccattttatgcattttaagacagacactgttttatcctctttaattccttaa

SEQ ID NO: 97599 - DNA, 334 bp, Heterodera glycines
  unsure (1)..(334): unsure at all n locations
ccttcttgtcctgcctggcatatggaaagcacggaatgacggcagtgacgcggcaagctgaagcaattttacatgcactgatcatgatcaacagctccatcagcttcaccttttatgttcggcattcggacgttaacaagagacccagacgcagtggaatgctcgccttcgctgagaagcaaacttccggtagggctagacgttttggaaggatgataaaaagaaaaatgcactgaagaaatatcaacgagggcactacgagtcgaagacaaagatttcgacaaatacctcaacattgtcctaaatgcaattgaacttagaattaacgctagcn

SEQ ID NO: 97600 - DNA, 479 bp, Heterodera glycines
tatgatgatgaactccgacaattcgagtgctatcaacagcaaatccttcgatcaaatttcggagattggatcaatggccacggacggactgcttcaggacgacggagtgccggattatgcaaaaatcataatcaaacagcagcaggcactcattgccacgcttatgaacatgcaacagcagcagcaggagtctcggtacgcgtcgaccatctcactttttcaacagcatcagccgcactttctctccaacaacgattcgtcctttccccctcctggcatccccacccatccgtctcctccgcccggcatccgtccacccgtctctcccgcgccagtgtcggcacctccgccgcctccaccgggctttcgtgcacccccaggcttcaacgtaagcgtcagttcccgcaagttcgaactcgactccaccaaatccgacaccggcggctcccacaaattcgacatcagagaggagctgaaga

SEQ ID NO: 97601 - DNA, 347 bp, Heterodera glycines
tttgaattcaatgccaatgacaaattaatcagcaattttctgatggacactgtgattaattttgtgaaaacagctaatccgtcatccgaccacagtaccgtccaatggcttccaatggctccgaaggacccatcagaaagttttatgcatttgttgatcgaaatgccaatgccgaaaatgaacccgaaaatggaggaggaaattggcagggcccaattttggacgcaaatgcgaacaaaacacccgaagattgacttaatcaggggccaattttgaccaagccaacgcattttcactattcaatttttactctctttccctatttagaacataaagggtaatatttt

SEQ ID NO: 97602 - DNA, 299 bp, Heterodera glycines
accagctgaagatcccgagcccggaaacgctgaaccggcaaatcccacctttgctgcatggcatacgcctcccaatgccggcgggggcttcgtcttcgtctaatgccttccaagaaacactgcgagaggaggaggaagcggccgcggcactcgcatctttgaaatgatttaaaacacaacttcgacggcattcactttgatagtctcacaataagtcgattcattaccatcccatttacattctcaaattatcctcatgtttgccattttaaaaaatatttagtaaatctatttgtttg

SEQ ID NO: 97603 - DNA, 361 bp, Heterodera glycines
  unsure (1)..(361): unsure at all n locations
ctcgttcaatttgagtgattcttcaacaaatacatattaattaaccaattgtccaattctgtgcttatgggaacggatgtcctccagcggcagacatttgttcacattgtccatcgccatcatttttttgtgtttcgcggttactgtcgtccaaacccgctaccgtttccgggaggaaccgatgccggacgaggggcttcaccaagactgggacatccgattcaggcgcttttctgaacacatcgctcaccgcattcaaagcactctgagatgagacggtgaagtgactgacgacttttttgacatcgatttgtcccgtgaccgttttgattatgatctcgctattaaacgcaaaagaccn

SEQ ID NO: 97604 - DNA, 478 bp, Heterodera glycines
ccaagtttgagcacattttcaaaataagttttcaattatttgtgccgatgaccttcttcaaggaggtggactatttgtcgttgcgtctcgacgacccggtgtccgcgttggccgattatctgcccaattccatcatttacaccattaattattcgttggcccttccgcccaatttggtgctgctttacatgggcctgaggccaagtctgatcacttcccgagtcaaattccccactttgggaatgacttgtgccaatctgttcggattgttcggctttcttcttctcaacattgtctatttatacacagtcttttccgacgtcagactgtccttgttcatgtgcagtttattgcgcaccgttttctacaacaccacttacgtgtgctatttcctcttccccgtccttgccgttgaccaatacctttacgtgtgccaaaacgtcgagttgagcattcgctctctgaaggcggtgattgg

SEQ ID NO: 97605 - DNA, 614 bp, Heterodera glycines
  unsure (1)..(614): unsure at all n locations
caatttcaaatcgtccagcaaccacgaacgtcttttcttttcagaatatgccgatcttcggcgatccttcctccccttatgacgaagccgtagagaaagcgactgcggagacgatgacaaatgagaactggacattgatgtttgacatttgcgaccgcgtagcctccgaaggtccccgcgcctgcaagcagtgtttgttgtcggtgcgcaagcgtctcaaccaccgcgacccccacgtcgttctgctggtcttgtctctgttggactgtctttggaacaattgcggaacgcactttcgacgcgaagtgtcctctaaagactttgtcggggagctcaattacaaatgcacaaatagtaatcgcgttgttgcggaaagggcccgttcgctggtgaagaaatgggcggagaacgaatgctcaaaggacagntctctttcgctggttgaaagtctttacagagatcttcgagaccaaggactgagctttgagctcgattcgacaaccaacaatcattgtcagaagaagaaggcgattgtcagcaacgatccgaatgtcgtgtcgagtgagcaggaagaagcggacattgcgaaggccattgctttgtcattgcaagag

SEQ ID NO: 97606 - DNA, 513 bp, Heterodera glycines
gtccaattaagcatccattagcattagcaaatgtgcgacgtcctcctcatcctttccctctccatttaactttagagagaagcttgttttcattaacataaaagaagatgtcaagcatcagcccggccaatcccaaaaaattctccataccttcagagaccaattgtgtggtctgtgtagacattgccacgggaaatcattattcagtcgcatcatgcaacggttgcaaaacatttttccgtcgtgccattgttaacaatcggtcgttcatttgcatggggaatggcaattgtccaattgacaaaggggttcgctgtgcgtgccgtgcctgtcgtttggagaaatgtttgcaggtcggaatggacccgaatgcgatacaatccgagagagaccgaatcggttacacgaagagaacacggcgagaaaaacttgtgggatttgacgaaggcattggccacgagaggggcgacctttgcgcggagtcttttgcttcgaacgatgccgatttggagg

SEQ ID NO: 97607 - DNA, 346 bp, Heterodera glycines
gcgtcaaaataatgtttttaaaatttttgattctggccttctgttttcaattggcaatggctaacctatttggtcaaaaacaatctgtagctgttgttggaatgctcaaatgtaaagggaagccaagtgctggtacaaaggttaagctctacgacaatgaccattttacgactgatgatttgatggcacaatccaaaaccgacaattatggacgtttcaaattgagtgggattttttaaagaaattacgaaaattgacccaaaattgaatctgtaccatgattgcaacggcgatttcccatttacaccatgcaaatggaaaattacaattaaagccttggatggga

SEQ ID NO: 97608 - DNA, 597 bp, Heterodera glycines
aacaatttgtcgtcaaaatttttgaaaaacggaccgttcacaaaagtcgcacttccattttttagttgcttttgtttttcaaccgaagcatttgagaaggcgcaaaaggacatgaaacagctgaaggacgagccggacaacgacaccaaattggagctgtacgctttgttcaaacaggcaaatgaaggcgacgttcggggcgatcgtccaaaaatgctcgaatttgtggcgcgtgccaaattcgacgcctgggaaaaagtcaaagggatgccgaaggcagatgctcagcacaaatatgcggagattgtcaattcgttgttgaaaaatgcggggattaacaacgcgaacacttcggaaacagaatcggacggaatccgacggacgaaggagggcaaagtgtacaaaattgagctgaaccgttccgacaaatacaatgccatcacttgggagatgtatgagggtctgatcagcgcacttggcgatgcaagcgccgacagagaaacgagtgtgacagtgatcacaggcgttggttcctatttctgggccggcaatggttggggcaatttaacgcgcggcggcaaaacgagggacgatttg

SEQ ID NO: 97609 - DNA, 348 bp, Heterodera glycines
ttcttcttttcccttcctttaaccaggccaacaatgccgatgagtccaccgccgcctgttgccacaaatgctacgtcgcgttcagagattgtttccgcgagtgtttggacaatcggtcggagaatttggtgtgcgtgccgaactgcaaaattgccttgggaaattgctcgaccgacaaatgcggattgaaaaatataatttgaatgataaatgggatatgtggttgtttatgtggagcaagcagtctatcttcaattaattacggaaaagcaattatatgtataccaatcaacttttaacaatttgcaaatacaataaatcgcaatagaatagtaacaggaagccacg

SEQ ID NO: 97610 - DNA, 541 bp, Heterodera glycines
agctccccgcggtggcggccgctcttcaactagtggatcccccgggctgcaggtttcggcacgaggcttttcgacatttttgaacacataaacactaacgaagacgttcagtttctgcgtagttctggaaatgctggtgccttggcaccacagccgttggtccccaacactgtctattcattgtccgatctgtgttcggcattcagctctgccgcttctctttctgcccctcctatgggcatggcttctaactccgatgcttttgggctgcgttcgacaattctccccgcggctcctctctctgcccctcccgtgggcatcagtacgaactccgatgactttgggctgcgttcgacaattgtccccgcggctcctctctctgcccctcctatgggcatcagttcgaacatcgataacactggcgcaactcgcgaacgcaaccaccaatacttttttggccatgactttacgacggaatctttctcgagcaattccgggacgacgcgcataagaaaaccgcagccgctgaacttctcgttga

SEQ ID NO: 97611 - DNA, 398 bp, Heterodera glycines
ctggtcactatccaaggcactgcctacacagtggccgacatggccaacttattggcattggccaatgtgccaaatttggcaaccatttaccaaaactcggcatcacaaattaacgcacagcaatacacacccatgtattgcgtgcatgggaattccgcggacagcacaccgcagcaatacgcatatcctaacggaattaactcaaccggcacagtgacaaaaggggcgggggacggcactgtgaacatcgactcgttgagagtgtgccaacaatggaaggaccagggcaaattggtgaatcaagtggtcgaaattgcaaatgtttcgcacgaaagaattttgcacacccggcaattttacgatgtgatcgactcaattcttattgcctgagtaaatga

SEQ ID NO: 97612 - DNA, 491 bp, Heterodera glycines
gtccaattaagttttgttttcatttctttcggcaaaatgtctctgtcagcgctcaaaaaacagttcaacaaggccaaccagtacctgaacgaatcaattggcactgctgaggcgacgaaacttgacgaagaatttacggagatggaaagaaaggtggacatgacaaacgaactgatcacgcaggtcatcgcgggtaccaacgaatatttacagcctaaccctgcggttcgtgccaaaatcgccgcattgggcgcaatgtccaaagtgcgcggttccaccaaaaatcaatcgtatccccaaacggagggaatgttggcggacacaatgcaaaagtacggccgttcgcttggcattcaatcggactttggaaaggccctttgtgacgcggccgatgccttccgtcaaatggccgacgtaaaataccaattggaggacaacgtaaagcacaactttctcgacccgatcagcgattttcaaaacaatgaactcaa

SEQ ID NO: 97613 - DNA, 253 bp, Heterodera glycines
cttccaccaccgcttcatctccgcacattcattcggcgagtaacggcggaaactgtggaaaatgtggtagtcattggctccaagaactccaagtactcggacccaaatttgaacattcggtcccgcaaagtgggctccagcagcagcagaagcgattagaagagattaaattgaaatttttgcctgaatcgccgaatcattcattcattttaaattcatttaaataaatttgttgaacacttaaaaaatattt

SEQ ID NO: 97614 - DNA, 481 bp, Heterodera glycines
atggaattacgacttttatttgcttccctatttgccctctgggcagtgacagcggcgatgcgcaagcagggggttgccatcagcggaaaattcgtgtgcggccacgcgccggccatgagcaattcgaccaaagttcgcattgtcgacattgacacagggcccgacccggacgacactttggacgaaaagtttgtggacgctgccggtgcatttaaactcaatggctacacacgggaactcactgacattgatccggtgctgtacgtgtggacagactgtaacgacgggcatacgccatgccatcggaaaatcaaatttttgatcccaaaaacaaagatcattggtgaagacccgaaagccaatgattggcttgacatcggagtggtcaatctccaatccacctttgaagaagagaaaagagaatgcattttttgatcgagtcgctcatttaacagcagaaggaaagagaatgaatgaattg

SEQ ID NO: 97615 - DNA, 474 bp, Heterodera glycines
  unsure (1)..(474): unsure at all n locations
gggacaaagcaaaacaatcgccgcattctttgctttccatttaattccaatttatttcaacaaaatttgaatggataccgctgngaaagacaatcaaatgccgagcagcggtcgcttgggagccgaaaaagccattggttatcgaacaaatcgaagtggcgccgccaaaagagggcgaagttcggattaagataatgttcacggccatctgtcacaccgatgtttttcaagtcagtggcattaatccaaacgtcaaatttccaacgattgtcggccacgagggtgccggcgtggtcgaatcggttgggccgggcgttgaaagtgttcgggccggcgatcatgtcattccaatgccgttgtgccagtgccggaagtgcgaggagtgcgctgacccgaggacaaatctttgccaaaaatttttatatttgtaaaaatagtattttttaaattaattaatttaattgtcataaaaaa

SEQ ID NO: 97616 - DNA, 287 bp, Heterodera glycines
agcagcagttgtcctccgctttgaacttgcaggcgttggttggggctggagcagtgcaccaaccgccgactcccatcacttccgccgcggcatccaataatattcccggcatttcgcaagaacttttattccaagcgactcttcttgcggcagcaaatttgaacaatcccggactaattacgtcgaacacaacaccacaacagcaacagagaccaaaatgataagaaggagagacaattaacaaatgttgtcgtcacaatttttagaaaaaactaaaatctaattat

SEQ ID NO: 97617 - DNA, 342 bp, Heterodera glycines
ctgtttatatgcaccgctaatgtaactgactccccacagagagggttaaaagaccgaatggagatgattgaagttgcgggttatgtggctgaagaaaagctggagattgctcgcaaatatttggtcccaaaatgccgtgagaaatgtgctttgcccgacgaaaaattggttataaaagacgatgcaatcgattcgttgataaaatcttattgccgtgaatcgggagtacgatttttgtttatagccattgaaaaaatttgcagaaagagcgcttatcaattagtaaggggagagggcgcgggaacacaagtactgccaattggggtggagaacagcgaccat

SEQ ID NO: 97618 - DNA, 306 bp, Heterodera glycines
atgcttaaagtgataggcaacaaaaatcaattcgaagcattcgtttcgtccaccgaaggggaaagcaaaagatcgctttttgtgcacttttccgccccttgggcctcctcttgcgcgcagttggacgatttgctgatggaacttcagagggaatacggacagaatgctttcgatatagccaaagtcgacgcggagtcattgcccgaagtttcaatggcacaaaaagtctgtgccgttccgtctgtcatcattttcaagggcggaaaagtcgccggccgcgtggagggatttcagcccgccgaattg

SEQ ID NO: 97619 - DNA, 597 bp, Heterodera glycines
gaaaaaacaaaataaaatattcgttttgaatggattacgccaatcgtcacacatgttgttggggaccgttccgcaccagaattgaaacgggaaccactgtgatggcattgttcggatttgggctcggaattctttctgcaatttccagctatgttggctttcacaacatctatgccggaatggtgtacctggcttcgtctcttttctatctgtcggttattattgccatgaaaaagaaggagccgtcactgttcctgccttatctgattttcgagggtatcggcttgttatgcgcagcggtgatctcattgactatgtttatctttggaatttggtctccacagcaagccttctctactaaggaacaggaaatgaattttcgttccctcatgcttttctttgccgccaccgtgggcattgacgtcgctttgaacgcctggttctactccatcatttaccgcacctacaatttgctcaaaaagacaacaaagttggtggcatcggcttccgccgtcgcttcggcacgcgtgccgccgcccgtgtgatttatggcgagagattgatttgatgagtaataacaatggatggatgtgatcg

SEQ ID NO: 97620 - DNA, 498 bp, Heterodera glycines
ggaagttggagccatcctttctttttgaactttgtgttgagtctgttctgccgacaaagaaccaacaacagattttgtcttctctcagtttacgccaactttgtcttctcagttgcttggtaaagttggaatcatcggagtataaacagcgcatcgatttcacttaccaagaaatcgcaaaagggtatattaaattcacaaatgactatgagaaatcgatgcgagtgtgcagttttgtgctgtatagagacttggacgaattggccgctagtggcgcactgagtttggcgaagggatcggattttggacaaatccaattcaaaaaagccacatcaaatgtcgaattggatgccatcattaagacaattgggagagggaaaattccaacgaaagtcgaaaattggattttatcaccagaattataattgtatttcttttatatatttgaacgcaattttattttttattatttagatttccatttttgtgttttgggat

SEQ ID NO: 97621 - DNA, 925 bp, Heterodera glycines
ttcctaaattgttgttgcatctaagttctgttttataataatagtaatgtcgctgctgcccatcagtcgctgctcctcccttttccatgccgcccgttctttggcgtgccgtcgtcctcctcccctggcgtcgtgtcattgtttgctctcagtgccatccacggcaccgttttcgtcccatttgtcgtcgtcgtcgccagtcgtcctccacagcctcacaactccggtgacctccactcactggtgccatcgtcgtgcatttgcctctcaatcgacgccatccgcaccggtgccaaattcgacaaacaatactccggctgctgctggcggtggtggcattgggttgtatcagcgctacgagcaatggttgcagaactatccggccctgtacaaattgcatcgactcactgttgacggctccaaatggtgttactccgatctcaaaacgttcttttggttggcctacggactgcgcaaagggcgcatcacactgaacgatctcaacgcgcgcgaactgttcatctacatccaggccgggtcccaattggtcaaactgagtttgctcgccgcgttggctgtgctgcctgccggatttccgctgataatcatttcgatgcttgtgtcgcccaaattggtactgacccggcacttttggaccgattggcaaagccaacagttccaaatggacgacctgcggcgcaacgagcgcaaactgttcccccgcattgttgacgcgttgcggcagcacaacccatcgtcagcggccgcattggcagcgcttgagcagcaattgccactgactgttgaccaattggttacgctgcaaaagtcggcgaacattgtgcccgcctcgttggacgcgtacacgcagcagcaccggttcttcctgaaaagggtgcacaatttgccgttttggaccaccgac

SEQ ID NO: 97622 - DNA, 171 bp, Heterodera glycines
ctgaaggcggtggaaaggttaccaagtcggcgcagaaggctgctgcccctggtgggaagaagaaatgagaaacgctgataattggaatggattcgatttttggatttgttgttttttttggccgtgaaataggcccgttaactttgggttttgttggataaaatttgtttt

SEQ ID NO: 97623 - DNA, 350 bp, Heterodera glycines
tccaatccttccaggcggcttctgtccatttcgggcctcaatttacctgggggcttggcctcgcttttggtgtttatatttcggcacaaatttcgggtggtcatttaaacccggccatttctttggttcagatggccaacgggtccatctctctggtccgatttgccctgtatatttttgcccaattgtttgccgcttttctgggcagtgctgtggcatttcttggccatttcgagaattgcatgcaaattcaaacacgaaatggcaatcaagaattctcacaacttttcgccacttttccaagtcctaatttaagcatttggggcagtgttgctgatcagctgatcggt

SEQ ID NO: 97624 - DNA, 473 bp, Heterodera glycines
ccaagtttgagtaaaataaaaccaaaaaaatgcgaatttggccttcccctttcgttcctccgtcccttcccttcgcacttttgctccccttttgcttctgtgtcgctctgttgttgcgctttggcgccggacgcgacgacgccgcggtcggcgaattgcaacacaaccgactgcacccgccggacaccaaagagattcagcagtgtttgtcgcccgacttggaggccgaggaaagcacttcgggccgtttcttcgccgctgtgatcgacgccggctccaccggcacgcggcttcacctcttcgagttcagccacgagttagagcaggagccgagcgcgttcaagctggaggccgagatttacaaggagattaaacctggcgtttcgtgcttcgccaaaacgcccgaattggcggcggagaatgtgcgcgaattgttgctgaccgccaaacggcaaattccggccgaactttgg

SEQ ID NO: 97625 - DNA, 431 bp, Heterodera glycines
gtaaaaacctattttcgcggtttccatcttttcatagcttttacatataacagaaaggcacaagttgccatttttactacgtattattttatttgttgatgaataatgtcttctcgaagaaatgaatatctcgatgcgaaggttttaggtttttctacaataatttttcgaaaaacagttaagatttatgttggtggtttacctgaggatgcaacttctgaagaggtttttactcattccaattacgcatccaatgtcttttaggcgtccaatccgctagtaaagtttatttattgactgaaactgtatatatcaaactaaaacaaaaataggctgtaattccgattgagtcgtattggacgcacaagctagatattgtttttataattggattttaattttatagttggacgatgcgtttcatcgctttg

SEQ ID NO: 97626 - DNA, 341 bp, Heterodera glycines
aacgatcgaatcggacataatattcgacaatttggaagaacaaatgctctttcagcattcttccgactttcctttcttccaataccccgtcgaatcagaaatcgaaaaatcttcgaaattccattctttgcgccgcgacggtcgaatatttcgccctttccgtcgcgtttgccttctctccgtcgaccaattcctccaattcgcttcgtccgtcgttcgttcgttctccgtttgaccgccattcattgcgtaattacacaaaaggtggaaagagaaaaacaaacgtcaattgttatttgcatttctattataatttttttttggttaaaatttaacagtcc

SEQ ID NO: 97627 - DNA, 276 bp, Heterodera glycines
ttaagccatgcatgtgtaagtttaacctgccatacagggaaactgcgtacggctcattacaccagctataatttacttgaccttgacttcttacttggataactgtggtaattctagagctaatacatgcaccaaagctccaatctccccagagcggagcgcatttgttcgccacaaaaccaagcgcctaaacactagacattaaaattcaaatatttaatttgtggtattcaccatcgtataaaattttagagccaaatatgaagagagaaagaa

SEQ ID NO: 97628 - DNA, 180 bp, Heterodera glycines
tgagcttgtaaaatccgagctcggattcgtgatctgcgcattttttcagcccagaaaatgtgctatataaatttttaaatttaattttcgaagaaaccacaaaactttaccattgccccataatatcttattttgcaattggaaaatctattttttaaaatatcataaaaaaactattcg

SEQ ID NO: 97629 - DNA, 493 bp, Heterodera glycines
gcgatgtcaacccgacggacgacccgaaaaatcgtgctaaaatactcaccgagaaattcgaaatggacgcgaccgactcgcgcaaaatttggtgcttcggaccagagggcactggtgccaatttgctgattgacgtgacaaagggtgttcagtacttgaacgaaattaaggattcggtggtggccggtttccaatgggcaaccaaggagggtgtgctctgcgatgagaacatgcgcggcgtccgttttgacatccacgacgtcacgctgcacgccgatgccattcaccgtggcggtggccaaatcattccgacggcgcgtcgtgttttctacgcttcggtgttgacggcaaaacctcgtctgcttgagcctgtctatctcgtggagattcaatgtcccgaagcggctgttggtggcatttacggagtgctgaaccgtcgccgtggtgtcgtctttgaggagagtcaaattgctggcacaccgatgtttatcgt

SEQ ID NO: 97630 - DNA, 292 bp, Heterodera glycines
ggctgcagcgcgtggcaaagcagacccagacaacgacaacaacaaaccgcctccgccaaaagagaaaaaacaatcaaacaagccagcaccaccggaagcagaacggaaaacacgccgcaaaaaaccaactaatgtgttggctgttccatccgccgtcgaacaagaagaaggcggcgcattcctcgaaatggttgattctctttcgacggctgtcaattcgctttcggaggcttctcactcgctttcgcaagcttctcactcgctttcaaactcggcggcgcaggaaatgcac

SEQ ID NO: 97631 - DNA, 388 bp, Heterodera glycines
caagcggaaataatgcgcgcgggccccgtcaccgccgccttccgcgtctacgaggactttggccactacgcaagcggcgtttatcagcacgtggcgggcaaataccgcgggggccacgcggtgcgcgttatcggctggggatacgacacggacagcaaattgccatattggctggtggccaattcgtggaataccgcgtggggcgatggcggcttcttcaaaattcggatgggcactgacgagtgcggcttcgaaacatcgggcatttgctttgccgacccggaccaatccaactgaaatgcgccctctaaatgaacgctttaattatggagaaaattaagattaattgttataatctaatggatggaataaaccacataattagtta

SEQ ID NO: 97632 - DNA, 374 bp, Heterodera glycines
agaattcgagccttactttactattatattatccaccatcacatagcaaatgctacaatttgcacttctgctgctctttatggtgtcatcatttgatccctccgctgaatttatggccaatgaccaaattagtgcggtgcaacagcagcaagctgtaaaaccaattgttggctggcatttttggtgggacggacgaaatcgaaattggatagcaaaaaatgcggaaaatgttgaaaaataaaagaaagcaaatgaacaatcgaaaatggacagaaaataaatggcgaaacattttataaaaatggcagagataagtgaatttttgtggctttcttggaaaacgacgaaagattggataaatacatatatttgtt

SEQ ID NO: 97633 - DNA, 346 bp, Heterodera glycines
agaaaaatttattcggagataaacgttcctgagaaatatctaccagataatgctcagtcattacaaaaaaaacaacagatagtaaaattaaaagaaaaaaaaataaaaactaaaagctttaaaatttttatttttacagaataatattttaatatttaaaataaaaacttaagaaataaaaatattcaattttttttacctattaatatgaaattaaaaattctaaaattaaaataaaaaatttttttttttatttaagttctcacaaatctaccttactacaacttatcccaaaatataaataaggaactgatggacaattagtactaaaaataataaaaattac

SEQ ID NO: 97634 - DNA, 230 bp, Heterodera glycines
gctagaatcaactttattgggcatgaatcccgattttctatttcatttcgtatacactgcgactcacaattttgggctcccgatcgaatcgccgaaaagctgactgaattgggcgcggccggaacggaaggaaagtgagggatggaacttttcatcttggaaaagcagttcctcaagaaattcaaaaatttatttaattactcattttaaaaacaatcgaaataattggc

SEQ ID NO: 97635 - DNA, 176 bp, Heterodera glycines
gttttcctcaaaactcggcggatggaacaaagcgcaaacggtgttcgattttgtgaatgaagaaaaaatgtcgcccaatatttcttctatgcttcttcagatgcctaattcttctgattgactgatctcacaaatcaatgcatttttaaaagcaatttcataaacttttttttgac

SEQ ID NO: 97636 - DNA, 638 bp, Heterodera glycines
ctaattcgaaattgtcccaaatgagcaaaagcagcacaagcaacacaagttatagcagtagcagcagcagcagcggctttttggaagcaatcagcggagaagaaaatgagcaaaagctgaagaagggggaggaggagacattagcaacagcagcaaagccaattgataaggtttcgaggcttttgcccccttcgccgacggcagtgccaatggcggggctgggagagcacccgcaattggacaacatggtcaaggcgtacgagagcatcatcagccatgtgggcgaagacgtacagaggcagggtctgctcaaaacgccagtgcgtgccgcgaaagcaatgctttattttacaaagggatacgacgaaaactttgatgatgtgctgaacgaggcggtttttgatgaagacaccgatgaaatggtgattgtccgtgacattgaaatgttttctttgtgtgaacatcatcttgtcccttttcttggcaaagtccacattggataccttccaaacaaaaaagtgttggggctcagcaaattggcacgcattgtcgaaatgttcagtcgacgtcttccggtgcaagaacgactgaccaagcaaattgcttcagcaattctccaagctgtgcacccgacgggg

SEQ ID NO: 97637 - DNA, 178 bp, Heterodera glycines
aaaatctataaaaaatttaaaaatgagaattcatgcgagattttctggaaataagcttaatagggcctagttaagctgtaaaaaaaatttggggcgatttgaatgagaatagaaagagccaggttcgatgaagttttggtaagccaaaaaatccaaacatttaaaaatctataaaaaa

SEQ ID NO: 97638 - DNA, 262 bp, Heterodera glycines
attttaaaatgcgatttttccttttctttttgctcatccttgcctttttggccccagcagcacttggcaaaagttttaagaggcgaagtgtgtctcttgacactgtgcaaaattggaaaattgaatgggcagcaaatgcaaatgacgggccaatggcatgagagaaaatggcacactgactgaccaatgtgatcgatgatcattatgagcaaagccaaaattgtgaatggatggatattcgtgataaaatttatctaacctg

SEQ ID NO: 97639 - DNA, 396 bp, Heterodera glycines
ctcgttatggcttggctgaagatgcgaacttttctcgtcaagcattaattctttctcagaaagttcccatctcagcatccaataaaaacttggagccgcgacaacgttcgttgtccgattattggctgacgaattcaattgcaagagcctctccgaccatggcccaatgcgtcaaagcttcgcgcgactacgccgttcagcctcacacggacccgctgagactggcgaacccccacgcctaaggaagggagcgaagaaggaattcgatttaattaggtcgcttgtaaatgtcttatttaaattcgttttgattctgttttccatgcgaatcaaaagttgtaaattgaaaataattctctattcgtgtcaaaatgacaataaatatttgttgtgctt

SEQ ID NO: 97640 - DNA, 273 bp, Heterodera glycines
aaatttttaaaaattttccagcaaataatggaaatttttttcgaattcccccccccccaaacgaaaattaaaaagtttaataggcaaatttcgtaacaggtagcactcaaattgccaaaaatttttcccggcggcgcctatcggcaccgccggacctacattttccactatttttacaagttttttgccttaaaacggccaaaatttggtcatttttagtgaaaaagtgcagttgttacccagcagtggaaaaaaagttattggttaaatagc

SEQ ID NO: 97641 - DNA, 587 bp, Heterodera glycines
ctcgtccatgtcgacagtcgatttcttcgtcaaactcaaataaacaggcggaaaacaatactttcagccgaagcgacggaggacgcttttccatgagagggactcacaatcagtcgaccaaaggacaaccgaaggcgagcgcagcgaaagccgtcgttcagcagcaaagccctgaaatggtggcatggctcagacggaaagagtacgacccgcggaaggcggcggcagaccaaagccaaagggaagcgcagcagagacagcagcagaactctttcatggcttgtcggtttttctccacctcggccaatgccaaaacgcccttcgcccgatggcgtcaaaatcgcaagagtcagcagacgatggccgaccaacgaagcaaccgttcccacgacgacttgagccgtctaggggaaagtatggacgacgagtcgcttcatggcgtggctgtcgatccctgctcgaattcgctccaacggacggtggacgaattgacgcaaaagtgccacaagtcgattgaacttttgaaattgtgcaaccaatccggcctttcttcgtccgtagagcaactgctcgaaaaggtcgtcgaa

SEQ ID NO: 97642 - DNA, 209 bp, Heterodera glycines
agacgacgacgttgaagaatgcgcttgttcgcatgatcaaaggcaacaaataagcatgatcagaaaaaaacaaatgatcactttgacactttcgaagagagaaattccataatagttatgttggaagataattaagccttcgctaattgcttttttaaaaatttaatttgcttatttttttgtaatgttgataaatttggcttgctttt

SEQ ID NO: 97643 - DNA, 385 bp, Heterodera glycines
attctgctatatatttgtgtgactcgaaattcaacagcaaattgtgctaattgccaaaaaatgaacagacgttggatttgcaacgacgtttggatggacattttcccctcttttgaccgtcctcaactcggcctcaaattggcacttctttcgccacgtttcaatgcgttggggacaaacatttcgatggcaaaagcgaattgactatttggagaacgatcgaaattcgcaaggacaaaggaccagaaccgaagctgtctgtacaaatggatgacaaatgtgtgccatttccattgcccgaccgtccgttgcccagcaaaatttgctttaaatggcttcggattgagtaattaaaaaacagttttatggaaataaaagcggctct

SEQ ID NO: 97644 - DNA, 627 bp, Heterodera glycines
cgcttcgaataggggatcccccgggctgcatgacctcggcacgaggtgcccttgttgtgctcggcgacaagtgccgcaaccagcttgcccgcgagtaccgcgacgccatcaagctcacctactcgcagctcggcaagacggtcccctcgttcctcgaggcgtccatcattgccgacgagattctcgccatcaaggacttgcccgccaaccccaagatcaacgtcgtctacaacaagttcttgtcggtgattgcctacgagcccacccacatgcacaccatctcgtacgccgacttgaaggccgcgcccaagctcgccacctacgagatggaaggcgacattttgtccaacttgcaccagttcatgtttgccacgtcggtccactgggccatgaacgagggccacgctgccgagtttgccgcccgtcggtccgccatggataacgccaccaagaacgccggcgagatggtcgatcggttgaccctcttgtacaaccgtcagcgtcaggcttccattaccaacgatctcgtggatatcattaccggtgcttcggccttgtaagttgttgtgtgtgctgtttggcgagtttgcgtgcgcgagttggcggggcgagtgtgagttggaaatg

SEQ ID NO: 97645 - DNA, 267 bp, Heterodera glycines
aacgtatgagattgtcgagaatgaggacggcacaaagacaacaattcacaagagcatagaacggaattttcccataaatgacggaccaacagcggaggatgaggaggaggacaagacggatcagcaacaacagttgctgcacaatcaacagatggacgcatcaatgagtggataaacaagacatatttaatgatcattttctattaaaaaacccattctattgataagtttttggtgactttccgagcatcactttttcggcacgac

SEQ ID NO: 97646 - DNA, 481 bp, Heterodera glycines
cttcgtcctcctcccccttccccaactgtcgctgcttcctaattttgttttccgtctgctgctgttgctctttgttctgtcccttctccaatggcgaaaatgtttactgcacatactaccgggattccaacgagatcacttgcggtacggtgacttgtgagacgcattcgccgttcactcccgacaattccgagcttgacggtctcgacacgaaattgccgaggggatggtaccgtattgggacactgtcaatcagacacgacagggcgtagttcaacctgtacaggcgacgggccactggactcggctattgggacttttacacacagattccggagcggaattgcatcggtcaattcggcttgcacgcgggtgaaaacattgccggatctgtggcagtgaaagacaaacgatgttttgatcgcctcgtcgtgcaaattgagcgcaaatcgaccaccgaaaagttcgatgttctccaatg

SEQ ID NO: 97647 - DNA, 493 bp, Heterodera glycines
gtcgtcttgcaattttggtggtacaatgtcaaagggcaacaaaaatgtgaaggccgtggccgttttgggattggatgacacggacacggatgccacgatcgacttggaataccacgaccgacttgtggaggcatcgaaggacttcaaaagcgaaaatcaatacaaagaattgctccgtctccgtttcaaattggtcgccactggcgtgctgaagctggagcgttcgttggacggtctgcaaatcccgcctccaatactcgaaaaaattggcgaactgtttgactgtttggactgggctttgtctgccgacgacgaatgaaacaaattgagggatcaaaggccaagccgaaactttggacggatctttcacccacccgtgtcctcccaaaaaaagccatttttaccccgtaatcgaatttttgtattatttttttgaccgaatgatatcacgcgacattcatttatttttgcccaatttatcatcctcccaaat

SEQ ID NO: 97648 - DNA, 391 bp, Heterodera glycines
cgaggaggaggacccgacaatggtggcagccaaatacggactgggggagcgtaacgacgacgaagcggttgaggaggagccactaaactcgggagacgaccaaagtgacgacgaggacttggacacgttgttcgacgcggagaatgtcgttgtttgtcaattcgaaaaggtacaccgagcgcgtaacaaatggcgattcacgctcaaagacggggtgatgcacatccgagggaaggactactgcttccaaaagtgcactggcgaagccgagtggtgagggacaaatgcgactgactttaatgggaggaagctgatctccaaatattcatttaatttattctaattttacacatgtttttgttttttaattgcaacaataaaatctctgaac

SEQ ID NO: 97649 - DNA, 299 bp, Heterodera glycines
cttcaaaagtgcaaaaaaaaacaacctaattttataatttgaagatttttcaaaaagttttttgttccttttttaaattaaattttaagtgttccacttcggcaaaagcgttatggctacggcggcggtggatttggcggcggatttggcggtggaatgggctttgatggctgatttggacgctgagccgtgaagaacattaatatgcattgtgaatgatcagaaatcgatcaatataaatgatgtgcgacagaactcttttaaagactttcaagtttataaaataaattagttagcgg

SEQ ID NO: 97650 - DNA, 498 bp, Heterodera glycines
ttcctatcaaaatcataggacaatggcaagtattgcgatcacacaaattgaccgtttgacggatctcaaccatttgccggttcatcgattgaatccgaacaacaccgaaatatgggataagctgaaagagggaaagttcgctgaggtcaatttgtgggaagagccaatgccgaaaagtggtgaaaaaagtttcgtcacttcgcaagacaacgcgcagacgacgcaacaacagcagcagcagagacacctcaggggaaaaacgccgcaaccgatcaaacggagtatgccggtgcccgtgacgaatgtgttcatgagactgaacgacgatgcatcggtgaaacgacagcaacagaacgggacgggcaaacaacagccaaaagtgaatgtggtggaagtgaagtgagtgatgaacgatggatgctttagtcactgagaacagagctttatttcgatgtctcaccgtgtaatttatttacaaaatatatttatttgacggtg

SEQ ID NO: 97651 - DNA, 310 bp, Heterodera glycines
atttaatctctttttttaataatgtgtataaaaattcgactattttcgcaattaatcccttttccattcaatgattgacaagtcaatccaaggacaatccctgcgcaaaacggataatgtcctcgcccaattctttggggcattcgaatgccgcgaaatgacctccgtcttcaaaaagggtcatttgggtgaggttgtactgacgagagaccatttcacggggcaaaacaccgcccaaatcgtagggaaaggcggcgtacgccgtgggcacagcgacgtattttctgaaaataatgaaaaaataaaattc

SEQ ID NO: 97652 - DNA, 292 bp, Heterodera glycines
ggaagaagcaaaccaattagcctagaagccgagaacgaaacaaatcaacagaaaaaaggcttgaagcagggacgcaggatgatgtttgccttaattttaacttattacatagagaaaacggcaattttaataaatttcacctctacatttgaaactttttcgcccctatttcgcgaattttttgcccctatttaagtccctaaattggaatttttcgcccctaaaaatccgcaccctaatgatcaatttcatattcaatgtaaaaagctcgttgaattaaacaaaatcattt

SEQ ID NO: 97653 - DNA, 580 bp, Heterodera glycines
gtccttgtgattgccaaatccactctctgttttattaagacaatactcccgccgacaacgatgcaagcttaaagacatggcgccggctaaattcgccctctcattatgttcatctaccaatggaattgaccgaccacatttatgcgactgggatgccgagacatcgcactacatccgagacaatacccgcatatggttgtgccgacgtcgaataacggtcgctggtgggaacacaaccgtcgcttccaaggcgcagccggtcgaaattctcagagagcgcccaactcttctccaaccttccgacaatgaaaacaatgtcatgaatggcattccggaaatgcttacagcaaacgaattgacgcacgaggacagcacaaacaatgcgagtgaaataatggcagcgcaaggcaacgaaacgacatcgatagttgttgacaaggacccgctgaaggagttgaagatgatgcggcggcgattgattcagctgacgaaacgcgtttccgaattggaaacgcaaaatgcgcagaatgccaatgaaaggactttgctgctgggtattgtgagtgcgtctactttgcta

SEQ ID NO: 97654 - DNA, 618 bp, Heterodera glycines
cggcacgagggttatcaccaggttcttatacaaaccaaatgttgctcccttatttttcataacacttccatttgtaagtcaaattttatcttaaatacttagatttgattcgttaattacctaattcatattttctccatgacaaaaacttgttaaatgcttgagacaccacgaacaattcccgggtttcattcggcggggccgcgtcgactcagtttggccacgtctcactacagacagtttggaattgtcagttctccgttggcgacttcgtctccttctccgatgcttttctcgtctgctgctgctgccactctcccggatcgcttgccgttacgccgtccaaaaaagccaccgcaaaagttgcctcttttaatgccgcaattgcacctgcagtttccttcgagtcgaacgaacacaattcgcagcaccgatttgtcttccatttacacggtgcagccggaggaggcagcgttggacgagcgaaatgcacatttgcttcaatgtatccaaatgcaacaagaactcatcaatcaggccaccgctgcaattgcgctttgtcataaaaagttcaggttcagtgggactcttcaagagctcagcgcacagcgacttctt

SEQ ID NO: 97655 - DNA, 614 bp, Heterodera glycines
tgagctttttcattcgttttgctaatgggtcctgctgctttgctgcttctcctcccctccctccttctgctttttctgctcatccgtgctcttcttgagcttatccccgtctcgcggttggataagcgttctgtgctaatcaccggctgcgattcgggctttggcttcgacttggcattgcgatgtttgggtgccgggatgcgcgtttttgccggctgtttgactcagacaggaattcagtctctaaagaaaagtgcccaagaaaagggaattgccgtggaacttttggaaccaattgaattggacgtcacaagtgacgaatctgtggcaaaggcattggaattcgtggaacgaaaattaggaccgggaaaaggtaaccaaaaatggagaaaagcatttgaatgtttcgaaagggcttcacgctttggtcaacaacgcgggaatcagtggcaacgaggcaaatgccgaagtcggaagtgaattttgcataatttgttcaatttcagagttgggacgattggctgattccaaaggactacgaagatgttttccaggtgaacactctcggcacaattcgcgtcactcacgcattcaaacgactcgtaaagcgcgag

SEQ ID NO: 97656 - DNA, 286 bp, Heterodera glycines
aaaaatggctcaaatgacacattgttgtgatgccatcccaatgttcgttgagtgaatggggcaatgtgtcattcattggcacgtcacatcacatcaaaaacaaaatggcacggcatcacttgtggccaagaccaaacatcatcaggccaatttggccattgtgtattaaggcttaagtctctaccaaacaaaattactgatggtctgctattgttgaaagaaataaggaagtgaatattcaattcacatgattttgagaagcacttaattagtatgaggtggacgc

SEQ ID NO: 97657 - DNA, 579 bp, Heterodera glycines
ctccgttaataatttttggctaaaaatggtgaatattttggccgatttggtcgccttgggcgacgttgaaaagcgcgctttggactttttgccaagggcagcgcgcggctattacgaaagcggagccgacgatgagcagacgcttcgggaaaaccgcgaggcattcagaaattttctgatccgtccctttgccctgagagatgtgtcccaattggacccttccgtcaccgttcgcctttccccctcaacggccaacccgaagtgtcgtccgttcgctcgcacttttgcctgcccaattggcatcgcgccatcggcattccaccgaatggcgcacgacgagggcgaaatagcgacagtcaaggctgctggcgagacgggcactctgatgatttgcagcactttgtccaccgttccgttggagaaagtggcagaagcggcgcccgaggggagcactttgtggtttcaggtggccaattggcatttggagaagcaatctgcgactgactcaatgaatgaatattttcagctgtacatttacaaagacaggacattgactgagaaaatcgtccgaagggccga

SEQ ID NO: 97658 - DNA, 380 bp, Heterodera glycines
  unsure (1)..(380): unsure at all n locations
ttactaataaattattcataatgaaaaggccttcttcggttgtcgcttttggtagtcatttatttgtcggctttattctgttgtcgcttttcattggcactttgggcactgagaanaaagagacgaaacctgccgctgctcattctcccgccgatgccaaacatccgccgccagtcgccgcccacgcggccgctgggcgcggccacgccttcgatccgaaacccgcttctccttccccgctggggttgctggtgcttgttcccaggcttattcgcccaatgggggggccgcccacgggggcggaaccaaaaatgggggggggctcccgctttaaaaaatatcggagagggccccacaaggtttttcttggggtggtgggg

SEQ ID NO: 97659 - DNA, 476 bp, Heterodera glycines
gtcactaattggccctcgggcgttaaacgacgactgacagagtaattaaatttttccgacgccaaaacaatggcagaactcatcaccaaattgtgtacgacaaaactggccattttgaaatggcttcaaatgctttgtgccgtcatcaccgtcctttttctgattgacggtcagcgccagtcgtggttctacactttggtttttgtcgtttccattgtgttcggcctcatctcgttgctcactctgatcgccaactttttcctccactcgcgcaatcagtcggtccctctgcccgcctttgaaattggcttcaatgcgttggctgcctttgtctgtttggcatttgccgttttgctcaccatcgattcagtccgaatgttcggcgacgacttcagccaccaccgctttttgccaccagcgaacattggcaaggacgggtggcgcaatcggactttggtggtggcgattgtccaaat

SEQ ID NO: 97660 - DNA, 451 bp, Heterodera glycines
acaaatgatttatttgctgtttttttgcataattaaaaagcatttttcggtaaaaaaaatctgacaaagacaaaagtaaaaagcctattgtaataataacaataatttataatcactttcattaaatgttattttattattattattggcatgtcaaattcactgggcaattgaggcgacggacgccgcgccgctggggaaatggtggggcaggcaaattctgtcaagcacatcccgcggaatgtgttctcggagaatggcattttccgcctccaatcgaatcaccgtcgcctccaaatggacaattcgcgcacgtaacagttcaatctcatcacgaactgcgtagatgagatggcttttcacaaggtccattgcctgctcaatttttgagtctatggccaccactccgtcgcccttttgagccgtcggaacagcgccagtcgaggcggaa

SEQ ID NO: 97661 - DNA, 570 bp, Heterodera glycines
cagcaaatagtgttgtcagcggtttccgtctccaacttacggtcatcggtaacggagtgtctacggacaatcgcctttcattcccggcaagcaaacgcctgacattgccagtgcttacttacttcttcaacgatttgatgtctcaacattcgggacggtttccagtggcggttccgccttcgccattgcatttggctcgctgcgagttggcggcggagacggtccccattccgaaacggtgcacactgcaaatagtgctcttacgtccgtgcggttcggtcgttaagctgttcatggtcgcggtgaatgtgctcgacatgccttccaattcgaggacgtttattcgtcaaagggttttcagtggtgacagtgccaaaggaacgggtgaaaaggaaaggagcggaaatgaaaacaaaacgggtgggtctaccaatgttccgaatgcaaagccttgctccaattcgttgcgctttctaatccatctgaggctggcttccgattcatcgggaaaagtctatttgcatagcgacatccgaatattattttcaaataaatcaaaagatttggaag

SEQ ID NO: 97662 - DNA, 411 bp, Heterodera glycines
gcaagagactcacattgttctcgggattgcctcggtgtgctctctgttggctatcatcgccacagtcgtcactctgccatctctgtactcggagatgagccaaatgaacagcaaagtgcgcgacggagttgaggccttccgcgtcaacaccgactcgggctggactgactggatggaagtgcaaggggtcgtgaacccgccgttcaagcccccgggaaacccctttcaatccattttttcgtggcaacgtaaatgggccggaaactgccaggggcttgggctcccaaagccaaattgtccctttgggccccccgggccttcgggaaccctgggaaaccccggaaaccccggggggagagaaaaccccgaaaacctggaaaagttggggaaacccctttttctggggcccgc

SEQ ID NO: 97663 - DNA, 485 bp, Heterodera glycines
gcttcttcttcttcttcatgtatgtggaacggcaattcgttcgaattgtcgcggtcattacaatgggaggcagttccctgcgttccatccgtcgcattagctctttttatccatccctttccgtcaaccgaccacaacgcttttcatacgttgtacaaatgtcgtccgactcgaacaatgttcggcatggcgttgcgctcctttgttggcattgtggcggagattcaatgacaccgtccgacgacaacgccggcactgtccttttgtgctcgcgttgcggccgcctgcagccgttgcccgcgcgcatcgactttttctcctattttggcttggatgaccccgcaggcgcaacaattggcgaggcggagctgaagcgacgtttccggcgcatgcagtcgctggtccatcccgacaaatttgccggacgggacgaaaacgagcgcgctttggctgaacaacactccgctttcctcaacaacgcttac

SEQ ID NO: 97664 - DNA, 345 bp, Heterodera glycines
tgcccttccccctttccctcttcgtccctctctctctccccctctccctctcaccctttcacccccttccctcacgcccctccttcctctcgccttctccccttctccggaacctcccccaaatcccttctcatctctcttcctcttctttgcacgctcactcaaataagctgggtggattgatatgcaacatgtaaacactcgaattattgggcacccaacaatcggtccctttgtcctatcatttatttcctttacttttaatcatttttaatattctttcgtaatgttctggggataacatccccactaatcctcatttttcgcttttttggccttccaatg

SEQ ID NO: 97665 - DNA, 252 bp, Heterodera glycines
  unsure (1)..(252): unsure at all n locations
aaaaaaatttaattttaatttatttcaattgaaaataatacaaaattaaattttgattttttatttaataaaatccaaaagttagagctaaattaaattaatgaaaattttcaaacaaattttcttcaatcgggatcgacccatttccatatccataggtgnccanntgtaatcccgacactgggtaatttcgacactgacaaaggaaggtccccaggtgtccgtgggatttcaaatgaaatttggtgggtg

SEQ ID NO: 97666 - DNA, 557 bp, Heterodera glycines
catcagttgaataaagaacagtggtcagagtcgttttcgtacggccttttccgtatggaatttgttcggaccgggacaaatggcgatatggatcaaggtcacagattaggacgacctgctcattgtcagttaccgtgtacaaaaatagcattcaacgtgaaatgctaattaaaaatggcaaataccggtcagtctccaaactcaaaattatttaatgcggactaaatcgatgaaaatagaatttggggcgcgcttgcccttttttaggctgaaaaagtgccgggactgaagtgtccaaatccagccgttacggtaggggtcaactccgtctggccaactccgtctcagcaatgttcaaaaagctataacttttttctttgttggccaaacttcacaatcatgatgattgcacgtaattgccgaaaaaattcgagaccaatttccgaatgttgaccgactaattgcaaaacgaaagccgtctttgtcaaagcgccttaccgagtcaaaaaatttggaaatgtatctcatatgcaatttaaaccaatgaatttgaagaa

SEQ ID NO: 97667 - DNA, 640 bp, Heterodera glycines
aagcgattgaaccaaaagcgattggttggagcacaacaaaaattgggccattgcccgcatcaatcggaaagcggtgcccgaaaatgcatgtgatccgaagacgcaacgtgaacggttggaggaagcaaaacatacggccgagctgaacattgcgtcgttgaagcgttttgaggacatggaattggagcggcggaagcgccatcagaaaccgacaaagcgactcgcgttggacgggccgcgtgtgcgcgagctgtggacacgggacggaaagcatttcatcacatttgtgcccgaaccaccgccagccgagcaatgctttccaaagctgaagccaagggagttccgcgtgtgcgcaatcagtggacagcgcgcgcgttacattgacccggtgacgcggctgccgtacgcggacatggacgcgttccgtgtgttgcgcgagaagtaccgccaattcttggagacggaccatgaccatattcaacagagacagcagcaacaacagcggaagaagtcggcggcaaatgattaaattggtcattatttgatttttttatttaaagaaatgtaccatctttttttattcgattgtcttcgtcgtccattcatttcatttgtttgaattattaaaacattcaatttg

SEQ ID NO: 97668 - DNA, 628 bp, Heterodera glycines
gtttgaccaactccttcgtggaggcactgcggctggccggttcattcatcccgtcatctccatgggcgcccaggccgcgtgtcgtccagtgtaccagggccaagaaccgtcgctgaattgccaaaatcttttcttgaacaacatcatcttacggtggcgttcaaagttctaaaggttcaccgctcggccattcatttggccatctgttccaacccgatcaagccaattaagctgtactggcagtggaatgagcgcgttatgggggtgtactggcgacagggtaaccggaaaaaaaggctatgcctgagatcagtcaaatgtgcgaccggggcaatgtgacggtggagaaatcgcagcttttatttgttctatttgttgccttcaacctttgcctatggcttcaacatcgactgtcaatgaaaagcgagcaagatggaaacaggattataaatgccgaaaaatgggccgtctccattgtgagatgcgttcattggtccgtacgcgcaataattttgaggttgaacgcatcaaactcacttgtgagcaaccacttgcccaatcagtcgccgatgcagtggaagaaagcgaggagcttgtcaatgtggaacagaagccgaaaaaaattcca

SEQ ID NO: 97669 - DNA, 506 bp, Heterodera glycines
cagcgagtagggggcgaaggcgggcggggggcgggcgtgcgccgattgggtgtcgcgaccaagggccgcgtcgacaggggcggcccgggggagcccgggctgtgccggtcgcacaatgaggagagcaacggctcaggcccgcgtctcctggccgccccgggccccagggacctcctggacccgatggacagcccggcaaccccggagagtctggccaacccgttcttttcggcaaactcacccagggcccgcccgtcgttggaccgcctggcccatcaggaccccctggccagcccggacagcccggcgagaacggacagcccggccagcctggaaaccccggcccgcaaggataccctggcgacggcggaagccccggccaacccggcaaccccggaggcagcggcgagcccggacagcccggagcacagggatccagcggccaatgctaccattgcccaccgccccgcaccgcccccggctactgagtgtgatcagtcgaccat

SEQ ID NO: 97670 - DNA, 585 bp, Heterodera glycines
cggacagtgtggacgggtcaatttttaaaaatcaaaccgaataacggaatacgctccccctgacaagccgaatttaaatatttaagccaaatcttccagaattgctcacgaactcgtcaccgccgaactcatagatggccatgatctcgtcgtagtcgcggccaaccttcagaaactgatcgacttggcccagaaaaaggcggaaagaaggacgatcactttcgctctcaattccggcgttgcatccaatgaaattcccgacgaacgttctttgaccggttttgctcagctttcactgttagattaattggttcttccatcttctacaaccatccttttttcacaacaaatccatccgttaaaccaaccgatttcgcttgacttaaggaaaattaatcaccggcggaaaagtgcgattcgtttcgctttattttgctttctttttgctgatgccttacgaattccatttatttatgataacagtgattatttcgagttcgatgtttctggcccaattgttggttatcggaaaagtcactttttgggatttagcaaccgttagctgacaaataatcgcatccaaat

SEQ ID NO: 97671 - DNA, 633 bp, Heterodera glycines
gcggaattcccaatccccgccaacaaaaacggcgactgcttcagtctcccgcagagtccccaaatatacaaacaattgctaatgtgtggctccatcgaccgttattaccaagttgctatttgttatcgtgatgaagatgcaaagcccgacagacaacccgaattcactcagctcgacttggaactttcattcacctcacaagagatggttttgtcactgattgagcaaatgatcgtgaattcatggcctgatgaaattactcccaaaccgaccatcccttttccgagaatgtctcatcgtgaagccatggataaattcggcactgataaaccatgatttttaaggacatcggctcagatgcctcttttcctcgtttcgattttgtgtgggttctcaaattcccgcttttcactcgaaacgactccaccaattgcttggaaagttcgcaccacccattcactgcgccaattcccgaacattttgaaaaactttgtcaggggaaggatctcgaccaaatcgaagctcaacattatgacctcgtcctgaatggcgtcgaaattggcggaggctcgattagaattcataattcaaaagtgcagcgatatgtgatggaacaaatactcaaattgaaga

SEQ ID NO: 97672 - DNA, 609 bp, Heterodera glycines
gtttgagcgaagatcactcaaaaggggacgcccatggagagcagcgacgccaacaataacatcaacaacagcgagggggaggccgaaaataccaccaaaaacggcggagaggagggcgtcgagaagaagatcttgagcaaaggcgtcagcggggtggtcaaatggtttaacgtcatgaatggatacggcttcatttgccgtgatgacaccaacgacgacatttttgtgcacaattcggcaattacagcaaataatccatccaaaattcagcgatcattgggcgatggtgaaaaggttatgttcgacattgttgatggtgctaaagggccagaggcggccaacgtgactggtccggacggagtgcccgtgcaggggtccaaatatgctgcagatttgagccagcgtcgacgttttgcgggtccacgacggaattatttcttccgcggaaatcgaaaccgccgtccccggcatagcgaagaagcggcaggtggcgaagtgccggtgggcgaaaagaaagaaggcgcagaagaaaacaatcgtcgaaacgtcgcgggctcaacatctggtggcacagaaaatgaaggcgaacagaaaaaagaacaaacgcag

SEQ ID NO: 97673 - DNA, 479 bp, Heterodera glycines
cgcagcgaaaaatttgtttgattcccatctccgcccatggcacaaatcccgccactgcgcacatgtccaatttccgagtggtcccagtggagtcggacaaacacgggaacatcaattacaaggacctctcagcaaagtgtgaaaagcacggggcggagttggcatgtgcgatgatcacttatccgtcaactcatggagtgttcgagtccaacattttggatgtgtgccagaaagtgcatgagtttggaggtcaaatttacttggacggtgccaatttcaatgcccaagtcggcctttgtcggcctggcgattacggaagcgatgtgtcgcacttcaacctccacaaaactttctgcattccccaggggggaggtgggcccggcatgggccccatcggagtaaaagctcacttggccccctttctgcccggccacccaattgtgccgatcaaaggcaatcgttccggcgctgtggccgct

SEQ ID NO: 97674 - DNA, 335 bp, Heterodera glycines
cttaccacaaaatgttgggccacttttccaaacttagtgttcgttgctacgcttctgccactaggtttcgtccggtcttcgaccgggtgctcatcgagcgttttctgcccgaacaaaagacgaagggcgggattatgattcccgagaaggctcaggggaaggttctcaagggtactgttgtcgccattgggcccggttatcgcaatgacgaggggaagacaattccgatgcaacttcaaattgttttccgtgtcttgttgccagagtatggcggcgctaagatcttggtccgccacaaggagggcgggggtgtccgcggagcggacgtcatcggg

SEQ ID NO: 97675 - DNA, 474 bp, Heterodera glycines
aatactcacttttcaaacgggtctcagcgccgccggcagagcacaaattctgaacagcgactcttctcttccttcgactttttcttccgtcctttcaattgcattgagcgatttgcacgtccgaatgcaaaatgtgcaagaagaccaagtccgagccttgctgcaagaaacaagtggtggagctgcgcaatgacattgccaccaacggatgcatcgccgggggcatcgaatgctgcgatttgacggcgcacactgtgcagcgaagaccccaaacgactggccaactgtttctggaggagctgtacttcgtcaagcacgtcgacaacaattcactcgctgattctccccgcgagcgtgaaattctggccgaatatcgcaatttgctgtactccatcattctgaatggacttcgccaatggagcaagtcgggcgtactggcacaaatcacgaacggagaacagttcgaacacgcgc

SEQ ID NO: 97676 - DNA, 528 bp, Heterodera glycines
gctcgccgcggtggcggccgcttaccaatagtggatcccccgggctgcagtaactaagaacgaggatagagtgtttgcacctatgcttgcaggcaacgtagcgtgaaaagaagcacgtcgcttgatgttcgcacccacatttgtgacgtgaggctgactcgccctcgattcaagttgggacgaaagcctatgaaccgagtctaagctcggcagagaccactagtgcaatgtagccattcactgataacaggatacatttgaagcacaaaggccgactggaccatcatcaccattgcatcggcagcatcttgtcactttggacccgcacatccgtcattgtgattctcgtgacatccctcccgctctctggctacctgttggttgtgtcatgcattcacttgtacaagtctggctcgcgatactttgcaagcagcggaggcacatccaccccggcatcgtcgctcgctggcggctcgtcgactggcgacgccttgattcccatggtcgtagcaggcgcgcaagtcttgg

SEQ ID NO: 97677 - DNA, 526 bp, Heterodera glycines
gcctttaaacataatttccaaatgaccaacgaaattacgcccaataccacctttggagacataacatcggaccgagtgttttatcgtcctacttttgtgaccggtgatcagatggatttgtccctggccgcgttggcactgcgcgaggggagcaaatcgccaacggaaagtgtgtgcagtttcgacttgatgtccgctgttggggaggacggagagcaaaacatcgccgacgaattggcttccaatggaactgctggagaagtggaggagcagcagcagcacactaagcagaacaacaagcagaataatgaaaagaagtgtttcgccattctcaaagttcgaccgattagcgtcaattcgaccgcggcgcattgtccgaatttgaaattcgaattcgtctcgaaaaacactgctgacaatggcacaacgcagcagcagcaactttccactgccgcttcttcgtcttcctcctcagctgctgcttcttccgctgacgaagtgccaccgattgcgccttccgttggcc

SEQ ID NO: 97678 - DNA, 158 bp, Heterodera glycines
gcaagcaaagcgcgggagcggaggggaagctgacctgcgctggagagccgttggcggatgtgaaggtgaaactgtatgatgacgaccgcggggtggacacggatgatctgatgggtgagacgagaacggactcggagggttttttttttattggaggg

SEQ ID NO: 97679 - DNA, 272 bp, Heterodera glycines
gtttgagcgctaaaatgcaagagactcacattgttctcgggattgcctcggtgtgctctctgttggctatcatcgccacagtcgtcactctgccatctctgtactcggagatgagccaaatgaacagcaaagtgcgcgacggagttgaggccttccgcgtcaacaccgactcggcctggactgacttgatggacgtgcaagtggtcgtgacgccgccgtcgaagccccgtgataaccccttcatcctttcttccgtgccaaacgtcaactgc

SEQ ID NO: 97680 - DNA, 251 bp, Heterodera glycines
cgatgtgaaaaaggaaaagccgaggagaaggcaaagggaaacggcgaagaaaacgatgggaaatgaccaaaagaaaatgcgcagttcaatgatgaaaatggacaattcaaacattagaatgcttttttaaaggttttaacggaatatccttccctttcttttggctcttctgttgttaaacaatttcaaaaatatttatttccgaagaattgtttgtatttgcgcagacaaagcaagaaaattacaaaaaa

SEQ ID NO: 97681 - DNA, 205 bp, Heterodera glycines
actttatttcagtgcccattggtgtccgccgtgccgcaatttcacgccggtgctcaagaaattttatgacgagttgaaaaagtcgccggagacggcgccctttgaaattgtttttgtgacctttgatcgctccgccgatgatctgagcaacctatttcgccaatctttttttttttggctgggaattcctcttggaaaggccaca

SEQ ID NO: 97682 - DNA, 184 bp, Heterodera glycines
taagatcagagatggcagcggttgatcaacaccagcaacaactcgttgaacgcattaaacagcttgacaccctttcaacaacggcggatgaacaatttgacaattctttaaatgtgccaattggcgatttgtgtcgtttgctgttggccgcgctggcgggcgacgaattggccgcgggggaggc

SEQ ID NO: 97683 - DNA, 476 bp, Heterodera glycines
cgctaatttgtgggactcgcgcgcggacaactgtttttacgcggcccgctaccatggcaatgtgtccgaccaattccatgaaaaagtcaaatattgggagattgaggatgtgcaaaatgtgagcgaccgtcggatctccaaggattgttcgggctcattctatgggtgccagacccacgcgtgcattgatgcaaaagggaaccccgtttttgtgttcaacttatgtgcttcttcggctgctgcttccggagagaacaacactggtcactgctctcaccctgaattggaagaactttgcgccatggaggggggcaaatcgaaatgtgccatttgcgagaatggcatgtgcaatgaggcgaacattgagctgcaaaatgtgatggggctggacatcaacggcaccattggcacggcggttggtggagaatggcacgaaaagtgccaaaacgggcgagaccggcggagacacgacggac

SEQ ID NO: 97684 - DNA, 525 bp, Heterodera glycines
ctacaacagtggatcccccgggctgcaggtatctggcacgaggtccttctccccagttcaaatctttaacgacgaggccagcgaggagcgtgccgagaatgcgcgtctttcgtccttcattggcgccattgccgtgggcgatctcgtcaagtcgacgctcggacccaagggcatggacaagatcctgcaatccatgtcgacgggcgaaatcatggtgaccaacgacggagccaccatcctcaagtcaatttggttggataaccctgcggccaaggttctcgtcaacctgtccaaggtccaagacgacgaagtcggcgacggcaccacgtccgtgtgcgtgttcggctccgaactgctgcgcgaagccgaaaagctcgtcaaccaaaagatccacccgcaagtcatcattgagggctaccgcattgcgtctgccgcggcgctcaaggccctcgaggcggccgccgtcgacaatggcagcaatcccgaaaagttccgtcaggacttgatcaacattgccaagaccac

SEQ ID NO: 97685 - DNA, 478 bp, Heterodera glycines
acttatcaattcggggcgttatccagcagagaatttgatggcgagttgtccaaagacagatgagtcactattggagcaatgcaaaaaattggggattggaacgacgagtgacaacacgagaatcgctcgagagaatgacgtcatcattttggcggtcaaaccgatgaatattagcaaagtgacgtccgaaattgcacccaatttccgaagggagcatttgctaatttcaattgccttagggattacacttcgctacatcgaacaacttttgccttcaaagtcccgcgttgttcgcgtgatgccgaatacccccgccgttgtcggggccggtgcctcggcttattccatgggctcggcgtgcccagatggcgactccaaagggggcccagagttgggctgcccccggggatatgccgcgcggggggccgacggtgcgttggagcccactcaggcggatttagcgggtccgggcccgggt

SEQ ID NO: 97686 - DNA, 382 bp, Heterodera glycines
cgggacggttgtgatcacacgcggcaaaacgttcgaagagttcaagcaggagtatgagcgtgagtcggtttcgaggcgtgcggcatttactcgcggcaccattttcactgttcttttttatccgggcatttttgttggcattttggcggtcatcagtgtcatgtctcatcgctggtacacttatgtaaattttttgtacgagtaacgtttagagaaatccccaactgatttcagggatggtcccagtctctcctccccccccaagacccctggacacccaaaattatatttttgctcaaaactttatgattttttttttgctgggacctcctgcaagacctgggaccgtccctgcctgatgattgtcccctgccccatttta

SEQ ID NO: 97687 - DNA, 249 bp, Heterodera glycines
ccgacgacaacgaaagggcagaaacgattaacgcatttggacgactgatcagattcatcgtagaagcaatgatcgaagggtatggccaaagagtgactgagttgagaacggagcgaaggggcagcggagagacgacggaggaaaagggcaaatcggacgacgaattgaaaagtgatcgaaacgaactacaaaacataccatagattattcatacaaaacaaaaacatacacatataaatatgtagcctt

SEQ ID NO: 97688 - DNA, 260 bp, Heterodera glycines
  unsure (1)..(260): unsure at all n locations
atggtcgtggcgttaataatcctcgtccncactttggctaggcatcactttgcncgttgtttacccnacatttaactataattcaaattttgtttggttttttccccntactttcccttttttttnntttcccttttnttttccnttttctttttttttttttnnnannnnccncnnnnnnnnnnnnnctttttttcccccccccccccccccnnccccntccnnnctnnnnnnncnntnnnncccttntcccnnttttt

SEQ ID NO: 97689 - DNA, 172 bp, Heterodera glycines
gggcgacccaatgaaattggagggttcactccgtggccacaacggatgggtcacgcaaattgccaccaacccattgtataagaatatgttggtgtcggcctcaagagacaacaccatcatcgtttggatgcttgatgatagtgggtcggcgttacccgcaaaccgataccac

SEQ ID NO: 97690 - DNA, 630 bp, Heterodera glycines
taatggtcgagaggcgcaaggaatcgcctaagcgtcgccgccgttcgtcaagttcttcgagttctggaagctcttccagtactggttctagctcatcaggttcatcttcgtcctcttccaccactgcttctcgttcaccttccccaaagaaacaaagagcagctgctcgtccttctgctcgtgacgatcgtactacacgtcgttctccaagaaggtcgcgttctccccatcgtgtccaaccgaaaacagagaaaagcactgtcagctctcgccgttcaccgtctccccgtcgtcgtcgtccgtcgcctcccagccgcggcccgcgtcgccgttcgcgctcgcctcgtcatgaacgcgcggctccatcgccaccaccagtgaaaagggaacgtactccggaaccaccgccacgccgactttgtgttcgaaatctaagcagaaatatcacaaaagcgccacatggaggaaatcttcgctctgtttggggctctaaagtcctgtggagtgccaatggaccgtgtgcatgtgcatttgccccggggatacggcgagggtgatatgagagaggggaggaggccgaggaggctgctgaacataaggaacggaggccagagtgagagcctggaaatt

SEQ ID NO: 97691 - DNA, 542 bp, Heterodera glycines
gtccaattaagattcttttaaatttgaataaatttgaaatgacgacaatagcggcgaacggtggcggcgaaacattttcacgaaaagtttttgtaggtggactgcctctggacatagcgcagcagacggagctggaactttctcgcgcttttcgacagttcggcgaacttcaaatagaatggcccaccaaacgggtgaaccagggcaaaacgacattggacggcaaaccggcagggcccggctacgcgttcattgttttcgctgacccgcgttcggtgggtcttttgttgagcaaatgtcgccgtgaggtgacagcgcccggggagaagacgcgtcgttacttcctgacactgtccagccgaacggtgcacaacaaacccgtacaggtccgtccttggcgtcactcggacgccgtgttcacccctcgttcggggttgcccgttaacatccgatggactgtgtttatcgggggccttccccgtcccaccagagcgatcgacctttgccgagtgctgatgccccccatccgtggaggcgtttgc

SEQ ID NO: 97692 - DNA, 488 bp, Heterodera glycines
gaaaacatggtctacgaggtctcctttttcagtgacgaaacaggcataagaaactacgagttagtaaagccgggcccaacagttcaaattcagcttgaagaaataatcaaacgtgagctatgcaaatgcgagacacgtgttttcaatttgcttagcgcaaaaaaggaaatggtaaaaaaattggccaagtgtttggccgagaaggacaacaacaggatgggcgaagctgaaatttccgatttcttctaacaatacaacgcggacaaagtcgcaaccggtcaaaaaaccgatggaagtgatgggaacagtaaagtgaccgatacaatggaagtgtagacccgatcgatttgcatggaatgcataacatttttaaaaaaatcttattttttgttaacaaatctcaccaattttcacattgaaaaatttttatgcgtcagaagtgttttttaaaaaaacttatgcttcataaatatgtattttggtaaaaa

SEQ ID NO: 97693 - DNA, 643 bp, Heterodera glycines
cttacaattttcgcttcaaatgactttcgcttttgctgtgctccttttgcttttcattcctccgctgacattggcaaaaaatgcgcgagcggagggacccgtgccggttgttctttggcatggcatgggcgattcgtgctgcaacccgtacagcatgggcttcatccgcaaattgattctcaccaatatgccccatgcttatgtgctttcgctgcagttgggctcctcagttgccgaggacattggccgcggctatttcgccaatatgaacgacgaagtggcggccgtgtgccaacagttggccgaggacgcgcgacttgcgaacggttacaatgccatcggattttcacaaggcgcactttttgttcgtgcgctcgcccaacggtgtccgtacccgcccattcgaaatttgatttccatcggagggcctcagcagggcatttttgggctccccttttgccccggttccttttacatttgctcgttcatccgtcgtctgcttgacaatggcgcgtacaccgaatttgcacaacacaacctcgtccaagcgcaatattggcatgacccaaatttggccgagggctattgccgcgcaaacattttcctggcccacgggaactgtgaacggagctgccaccagccc

SEQ ID NO: 97694 - DNA, 647 bp, Heterodera glycines
gtctatgcgtcgtccaaatggtcgactgcccccagcaaaacggacaccgccagcaattgcctctgttcaatgcttccgagcattttttcgaaggggctgagaaactatttgaaatttggttcgataatgaccagcagaagcgagaaaatggccacaaaagcacactgagaaccattcccgagaacgaactgcggcaacttctgaacacggccgggtgccacattctccaggtgcttagaacagctgaaatcgatgcgtatttgctaagcgagagcagcatgttcatctcggatcgacgtctcattttgaagacgtgcggacagacgcggccgttgcttgtgatcggaaagttgttggagttggcacggaaacattgccaaatggacacagtgaccaatgtgtattattcgcgtaagaatttcttccggcctcatttacagccccaactccacgccactttcgacgaggaagtggattaccttgatggcttcttccagggtggaagcgctttttgcatgggtcctctgaagcacgaccgatggtatttatacactttgactacgccccgtgctccgctggactgttccgaccacactttggagcttgcaaatgacggaattcctgtggagttactcagtgcctacagt

SEQ ID NO: 97695 - DNA, 339 bp, Heterodera glycines
catttcccacttttcctatttcctcattccgcttcccccatttcccacttttcctattgcccatttccgcttcccccatattgctccccactcgcccaaccacctgtactgattgtgctcgctctcctgcgactcgccgccgtctcctccgcccgactctttcagtgccttccttttgcgtctcttcgccgctctcagctcaatttgacgttttgtgcgcggaattcgaatgcgcacaaaacatttttttatgacaatcatcaccaatagaacggaggagaccaggtctattaccatccacagacgaagggccggcgcgacgaactgatcgagcaaatg

SEQ ID NO: 97696 - DNA, 582 bp, Heterodera glycines
cttaagtgtcggtcaataatgaaattatttttgttattttctttgtttttaatacaattttcttccgccatcgataacatggaacatcttatgccagaaaatgacgcagacagtttgatttcgtatttagaatttcagcgttggcataaagcggtgatgggagcagagccacgggaaagctcaatcctttttggcaaaaatgataaagacgcagatggcatgctaacggtggccgagtttgttccattggcatttgagcttagccgaaagcctccggaacgtcagacggacaaaatttttaagaaatttgatgtcaattcggacgaacaattggaccgtcaggagcttttgaaaggcgattccatctccgaggaaattgttgatggtctttttcaggtcgccgatgtgaacaacgatggtcgcatttcatttgacgaattttcaaccgtggccaacactttggaaagtcgcttgtccaaggatgagaaaagcgcgggcatggccatgtcattgttggcccaattggacacggacaaagatgaacgaattaatggcactgaactgtttgaatatgctcacaaa

SEQ ID NO: 97697 - DNA, 422 bp, Heterodera glycines
ggaatgctaccgtaactttctgttaagcgttaccgttacccaccaaacattcaccaaacgacggcgactgcgtccgctttcccaactccgcccgtcagtggcgcagcaatgcctgtgccgggctccggactgagtctacaggtgtccgtgctggccggacaacactcagccgcacatttgcacaatctgagcaccaacgaatggggcggcacttcgacggtggaccatccaagtcagtattggccccaatgaccgaacgaagggacaaatagcgaacggagaaagcgaaccgaccgatccatggacaaatcacaaatcaacagttgtttaccaaagattttcaaaaggtcatcgattcattcacaagcgtattgtgcttttcatatcaataaaatttgaaaatatattaatttaaatgtgtt

SEQ ID NO: 97698 - DNA, 552 bp, Heterodera glycines
  unsure (1)..(552): unsure at all n locations
gtccaattaagcaattttcaataaactccgtgttggccatcaacgagtcgttcacgcgttttccgctggagaacagcgagagaaaacggaacgcgaatctgcgtgagcaaacgaagaaagacagaggcattggggagagtgaagcagctgagattgagaacaaagaggataaacggcagaagcgctcgcgcggcacgcaatgattcaaggcaaatggagcgtgaccgtattctcttccaacgccaacgctttcccaccgtcgcctcaattcaccatcagccggcgacttcgtccgcctccggcgttttggtgccaattccgacgacggacggcgccgccgctgtgcccggcagtgccggagggtatcagaggcggtattcgacacatcgagaacagcagctgcagcagaggaacagaagggacagcaaattcagcaggcgtttggccgtttacacttcaccgccagaagacagtgccgccggggccatttcacttcggccgctgaatactacaataatcagcagntcgcccagaacggggagcagcagtgac

SEQ ID NO: 97699 - DNA, 475 bp, Heterodera glycines
tggacaatttccttttttggacccttgcgccttccaaacggctttcaccgccgcttctgacggaaggcgcgtcttttcaacagcagcaggatgagagacaaatgcataccgttgacctgtctcaacggttcatcgactcacttccctcttctttttttctgggtgaacatgcaacttacaaagaccatgccgccatttcactgcttaatttggctcacaaccattttgtcactgtccccccgttggtggcacagttcatcaatctgatcagcctcgatataagcaacaatcacttggcattgttgccaaaagagatctcttcgttgaaaaaccttcgcgaactttcacttagaaacaatttgctagagaatttgcctaaagaatttcaacgactgcaatgtctacgggaattgaacatttccggcaatttgttggagcatttcccgcgagaactgctccaaatcaaatctctccg

SEQ ID NO: 97700 - DNA, 389 bp, Heterodera glycines
gaattcattccgccatttgagcaagagggccatgacagagaggaggaggaggagaacagcaaacggaggagggcactgaaaatctgtttcgatttgccgtccggcgcctacgccactgtggctctgcgcgagttgatgcgcaccgactttggcaaaaaggcgcaaaagcaattggaggaagaaatgatgaggaagagaaggcggaggacggaggaagcagaaggcgaatagggaagaagcgaaaacgagcaaaagaaagacgacaaaacggaaatgtgccaaattaaaacttaaaacatttttttgttgttttgattgtttcctttttcaccacttttacttgttaattttatgttggtattcccgatatgtgtgattgaaagaataag

SEQ ID NO: 97701 - DNA, 473 bp, Heterodera glycines
tgagaaatgaattgaggagcgggggaacaaactccaatattaccgtttttctgcgcttatgtcttatggaggtcggaattgaacggatggaaagcgatgagaatttggaaaatttaccaaaagtggattggacgataacaccagaaccaattgtcatccgtggagttggacacctaaccctgtttggccttaactcgcattttccaacggaatttccgagcgctctgataggaaaattggcaccttaagagtttgacgacacattgcgacgtgtgaattacgttcttcataggaatgttagcagaaacttgcgctggttgatctgcggattgcttttttgctgctgcagcttcagcatttcgctatggccggcggcctgactgaacagaaggactatttccgctctccgcaaaacgctggaccgtggaaatcccaatcgtttccccaacccggcatcgcaatggcagttagcc

SEQ ID NO: 97702 - DNA, 449 bp, Heterodera glycines
  unsure (1)..(449): unsure at all n locations
taagttttttatccttcctttgaaaattatgttttgcaatttctacagaatttaattgtgtcctcatttggcgtacaatgacaacaggtggcgcaaatgaaccgagattccatgtgctggcccaattggaacatcttcagtcaaaatacacaggcacgggccatgccgacagttctcgctgggattggatcaccaaccagcatcgtgacactttcgcttcaatcattggccatcccgaccatttgagtatgatggccatttgtgagaatgagacgcgtgctcgaacgaagtacaacatgctctgtcggatggttcagccgtgtggtccgcccccggaaaaatcagctttagacgatctttgacagctcacaatcggtcgcgaaaggatcatcatcttttatttgttcaactataaaatgttttcatcgactctttcaaannaanaaaag

SEQ ID NO: 97703 - DNA, 392 bp, Heterodera glycines
gcaacagcaacaacagcaggatcgctgaagcggacaatggcagcagtttcgacatggacaccgacggggcgcgccaatgggacgaaaatgaggacgacgacatggacgacgatgagctgatccggaggcaggacatgctgctggacaccgagcccgtcaaccaccacgaggtccattgtccctactttccgggcgacaaattcgagtggtggtacttgtttttgttggagcgcaaaacacgccgactggtcaccatggtgcaaccgtgcaagacgcttgaccaggagaagacgcacctccgttgagacctcagcacactgaacacaactgcgcaccatttcttcagccttggtcatcacatattccggctgaaaaaagcgcaaatttcaatc

SEQ ID NO: 97704 - DNA, 356 bp, Heterodera glycines
gcgtggtgaacatcggttcgtcgctcggttgtattggacaggcggccgtttcgcctcggctgagtccgtatcagaacgtggcttatggcatgagcaaagtccgtccccttctccgtccgcccctttctttgatcagtgcttaggctgctcttcatcacttctccaaaatgatggctttggacgagtcggacattgtcaccgtttttattcatcccggttgggttaaaacggaaatgggcggtgctaacgctatgatgagtgtttccgactccgttgcaaaaataatggcgcggatttgcgcactcacaaaaagcgactcgggaaaattgctataccgagaaaaggaattgttgccc

SEQ ID NO: 97705 - DNA, 614 bp, Heterodera glycines
accaaacgatgttaagcgaaaccgtgaaaatcggatttatcggagccgggaaaatggcacaggcattggcgagaggacttatcaattcggggcgttatcctgcagagaatttgatggcgagttgtccaaagacagatgagtcactattggagcaatgcaaaaaattggggattggaacgacgagtgacaacacgagaatcgctcgagagaatgacgtcatcattttggcggtcaaaccgatgaatattatcaaagtgacgtccgaaattgcacccaatttccgaagggagcatttgctaatttcaattgccttagggattacacttcgctacatcgaacaacttttgccttcaaagtcccgcgttgttcgcgtgatgccgaatacccccgccgttgtcggggccggtgcctcggcttattccatgggctcggcgtgccgagatggcgactcaaaagggggccaagatttgttctccaccgctggatattctgttgaggtgccccaagttcgcgtggagccaaccgcggagtaagcgggcgcgggacccgctgatggctgttcggtgatcgaggcggtcgcggacggacggacatcatccggcctcgcccaagag

SEQ ID NO: 97706 - DNA, 284 bp, Heterodera glycines
ggacaattgcctggacaaacgggctgatccggataatcgccactactgccgggttgatccggatacgctactggacagccgggctgaatgcgggagaagcgccaagacaaccgagctagatcgcgagaagcgccaagacaaccgagcaataatgtattaagccattacggatgacattagattttccgacaagaaacgtctactatgaaaatgtttcaataatacaccgaaccttattatgtaaaatattcttataaaattttacgaaaaagaagaacaaaaaa

SEQ ID NO: 97707 - DNA, 200 bp, Heterodera glycines
ttgaaccaattatcagaaactcgcctgcatttaaaagcaactaagacaagggttacacgcgaagatggctcagtgatcgaagaagagaaaactgaaaatggcgagtttgttgtaatttttgagcgagccaatggaaatggaaatccgagtggatttaaacaatccaagcgaatgcaaaagggtcgtggctatgtcattga

SEQ ID NO: 97708 - DNA, 396 bp, Heterodera glycines
gctgaaggttttaaaaataacacatggtgccacaaaatttttttggcccggagcaaaaaaaaaactcttcgggtgccctcccgaaatttttttctgtatacgggcctgaactcactcgaccacccagaaaagtgtgttcattgtcagatggatgttgcgttgcttttggcacgttccggggccagcatcgaaaagaagaatcgccagaacaaaacgccgattgatttggtcgacggcaaagaacataaactgaaactgatcaaagcgagtgaatcggtgaagccaactgccggaacatagccgaattcctttgttaaatcaattctattgtttttcaatgtaattgtaatgaatcttttgatttcacttgaccaattaaaaattctgaattattag

SEQ ID NO: 97709 - DNA, 590 bp, Heterodera glycines
  unsure (1)..(590): unsure at all n locations
atgatatatttattctgaagaatgcctgtcgtaaaaccacgaacggacacgccgaatttacgaaatttcttttaaacgttgggactgctccgtgtattgttgatttttttgctacttggtgccaaccatgcagtgcgatcgctccgggttttgacgaattatccaacaattatcttaatttgaaatttgttaaagtggatgtcgacaaatgcgaagaaacgaagaacacatacggcgtcagtgcaatgttttcattcattgttctcattaatggtcagcgcgtggaccttttgcgtggtgccgacaaaactgcacttcagaatttggcccacaaatggtccaaaaattgtccaactcaaatggtctcaccgattcctggccaatgcgaattgtcaccgcttttcaacaaaatccaatgcnaatgtttgaacgaggacgattccaacaatttgaacaatttgctgaacggagttggtcccctgatcactgattgtgacgagcaactgctgatcagcggggcggtacaccaacccgggcaaggggactccggcctttttaacggccccagaagaaaaggcgccgaaaaactg

SEQ ID NO: 97710 - DNA, 163 bp, Heterodera glycines
gttcgaaacaattctggcaataatttggcttctccgccaaacggaaccgcaacagcctctaagaatttgttggcataaacactgatgcattttgatgaaatgatttgataataatgattttattccattaaaaagaaattgcagataaaaagcaaaattatgt

SEQ ID NO: 97711 - DNA, 258 bp, Heterodera glycines
aaattgttcggttatcgacgcaaaaaagtgacaaaaaaggactccctcaccggacggaacaattcatttccagtgccgtatttgtccaaattggaaggcaatcagttgcaaccggggcaatccctaattgtacgtggcattatcatttcttccgatgagtttgtcatcaatttaaccaatggtccgcgtgtcgaattggacgacgaagtgcggacactcgacgatcggccgccgcgcctgtttttttttatggggcaa

SEQ ID NO: 97712 - DNA, 273 bp, Heterodera glycines
  unsure (1)..(273): unsure at all n locations
gaaaatatttttttaaaacctatttctattttatactcacgatattctcatcaatgagtactaaccgaggacgaggacgtgtgtctttaccgagtggagaccattctcaaacttctgaatatgggggtcgtggacgtgggatgtattctttcgccaccagacagggacgtgtaaagcatagttccgcgtggccagtgggacggtggaaactttctttttgccgggaggagagagaannnaagagataagagacccgctcggcggagggagggg

SEQ ID NO: 97713 - DNA, 379 bp, Heterodera glycines
cacaccggcgccaaattcaacaaacaatactccggctgctgctggcagagggggcattgggttgtatcaccgctacaatcaatggttgcagaactatccggccctgtacaaattgcatcgactcactgttgacggctccaaatggtgttactccgatctcaaaacgttcttttggttggcctacggactgcgcaaagggcgcatcacactgaacgatctcaacgcgcgcgaactgttcatctacatccagtgcgcccctgaagtggtccacattacgaccatcttcattttgctcgcaattcctgtcagcggagagctcgtcactttgttggcgcttgtgtcgcccaaattggtactgacccagcacttttggaccgaa

SEQ ID NO: 97714 - DNA, 384 bp, Heterodera glycines
  unsure (1)..(384): unsure at all n locations
tcctcggcgaagcgatcatttcgctgcatccgttgacaaatgctctgatcactctgttccttcttcggccttatcgcgaggcgttgaaacgaatccgtccgccgttcgcccagcgaattccgctgctgctctgttccaactcccagcggagtacgacaacggccaaccgaagcgtatacgacagcacaggaccaacgaccatcgacgacttggctatttttggaggagtggccaattgcgacgacactccgccagtttcattgtgacaaggaaacgctatgccttgccagaaatacgaacaaaagtgccatcatttgttcacatcatttcattaatttgtaaatatgtatattcctttcatcgaaaaaaacaagtttattttan

SEQ ID NO: 97715 - DNA, 232 bp, Heterodera glycines
  unsure (1)..(232): unsure at all n locations
cggatacggtggaagggacggatatgagcagagcggatacggcggatatgcgcaacgcggatacggtgaaaaggacggatacgagaagagtggatacggtggaaaggatggataccagaacgagtaccatgattattacaaaaacaatcgctgatcaatgacttatttatcttccgatctttgcagtgattaaagtgtatttttaaataattaataaataatctttatctcn

SEQ ID NO: 97716 - DNA, 553 bp, Heterodera glycines
gtccttaagctttaaaaatcttctattggatggagctgttgcccgagttcgacatgctcctcgccatttgtggttccgcccgccaattggccgtcatccatctccaacaaatccaccgcgcattcaaagttgcacaacagccgacggtgtcctgcacaaacattgccaacatcgaacaatgccatattgcggttgtcagcaactcggaacatcaccgcgacaaacgcaccattactgatgaccgcattctgttcaaatgtcgcgcggcgcatcgcacgggcaacggactgaacgccggcgaattactcttcaccgtttccagcgaagaccgagtggaactgcacatttttggccacgccgacgcggcacatctccaacagccgcagcagcatcagcagagtgtcaagtcaattctcaaacggaaaatcttgatccatgcctttcgacaacttttatttattctttcgaacttaatttttgtttaacttttgggattgccacttggcgcttgccttttatgatctgattttgtgcgcataaatctgcttgctat

SEQ ID NO: 97717 - DNA, 344 bp, Heterodera glycines
ctgacctgacccaccattcaccatcattgatcacggatgattttgagaccaaatttggcattttgatcatcattgacctttttttatttatgtttttgtccgttccatgagccagcaattgttgatcatggatttagcccaatgtatgtgactagtatgactgcttgcatttacataaaatttaaagttatgcagctaattatttactctcacttcccccattaatgaaatgatgtaattaaactataccaggcttgatcaacctgctgatttaaattggtatggatttgaaactttgcattaaacgtcactctgacacatttacattttaggaaaacaagaag

SEQ ID NO: 97718 - DNA, 311 bp, Heterodera glycines
aattaaacaaaattattcaatgcaatccaacggggctgcgaccggcacggcatcggcggcggacgccgggcgggcgaacacggcacaaatggcgcaggcgaatggtggcattgaacgtgagcggaagccgttggagagtcgtcaaattgttgcacaatacatcaaatatgcagtgaaattggaacggatcatttgagcgaaggcacacggctggagaaaatcggacgagtaaacgaaatgttataacgaaaattttgtataacaaatgttgtgttgcttcgttttactttgacaattcaattcaatgcaat

SEQ ID NO: 97719 - DNA, 474 bp, Heterodera glycines
caatattttgcgcaggagagaaccgatgtccagactaagcaaatattcctcgcaatttgcaggtcatttgtttcgcccgctgttccgctgaccgttccgctaagcgaagatcgtcaggggaatatttacgtcagttgggatgttttgtccttcgacggcattcgccgctccttcgctggtgctttggcctggcagaaaagccaattcgaggcatttctgaccatcatttgtttgattgcttcttctacgctttctcaggccgtcctccaaacggcgtcggaattacgtcgcaaattgcgcttaattgacgaatttttcgccgatccgttttcctatgcccaagagaggcaaaaacgatgactggcaaaatgttggagacggaaagcaaattttcgggtgaagcgataattctggcaaatttaccgttgtgtatttcaggaattcattgctttggcgaatttttacaaatgttga

SEQ ID NO: 97720 - DNA, 365 bp, Heterodera glycines
catcagccggtgaaatggaacgcgagaatcggcgagtgcgatcaaccagactcagccagcaaagataccgcgagaagggtaatgaagcacgcaatttgttgcctcagctgtacagtcgaattgctgagttggaacgggaaaacaatttgttgaaggatttgttgtggagagaacgcgaccccaacagtttcgcggtggcacaacagcagaaaatggtggaaaagaaattacgaaaatgaaaatgttttaatcgaattctcaaaatgcaattgtaatttttaacaattttttttactcattttttatttaattattcgtattttctcgattatttgaatgtttccaaaaataggaatggaatcgtg

SEQ ID NO: 97721 - DNA, 593 bp, Heterodera glycines
aaatgtgctacaaaaatgttttattatttattgtaactacagtagcaatttttgagacgtcatttggagctgaaaacaatgcaacacaaccacaaaaaaagcaggaattgacttttgaaaagacgatggaggaaatgatcatctcggcaaaaacgggcaaatttgtgcggcaatgttcttgcgatgaacaggagccatgtctgaaggacattttgacggattttcaagcctgtttcgagacatgctgggaacagaaaaactcgggaaaaattgcccctaagccagaggtgttaaagcaatgctttgagagccgtttgggcctggtcaaccagttcatctcgtgcattaacactaccgcaaaaacctgtttcccgaccaaatcaggcccgcaaattgagtacgtgtctgtacaacgaattgttgccgctggggaacaacgcatggcggcacaagcaagcggctttgagcgcgcaatgggcccagcaaataaaccggtggttcaggctgccgaagaactcgccagctgtatgaaggattgtttcttagacaaggacgctggccaaaaatgtttcggcaaatctgggtgtcaacca

SEQ ID NO: 97722 - DNA, 547 bp, Heterodera glycines
cacgacttggaaggactgtttgcaaggctgaaggagcttggcatcaaaattgccatttgcacagcggacagtcgggcgggaacgacgcgagttttgaagactctaaaagtcgaacaattcgtggatttgatcgtttgtggtgacgacaaaggatcagtgccgaaaccccagccggacaatgctctgttcatctgccgtcaattgggagtggaccctaagaatgccatggtaatcggcgacactcctgccgatttgggaatgggacggtctgccaaactcggctcaatcgttggtgttctgtcggggattggagaacacaaagaactgaacgaagctgaccatttggttgaacatgttggagaacttcttcctctgattggctgagatttccacgttgtcgtgggactgcgcataacccaaagtcggattgaatcaatcctttgttctgtcgatacgtcgtgcttttccctccccccccccaaatttccccctttttttttgtttcccctcccatttttgccaacacattccgaatgaatgagcttac

SEQ ID NO: 97723 - DNA, 584 bp, Heterodera glycines
aaatggccgattgttgggacgatgaagactacgacccatccgcgcaaatggcggacaaaatcgccagcctcggcttggacgacgtcattcggcaacagcaaccgaaaggggaaaaagtgccgacgcaagcgacgaataacagccgaaaagagggcacagcgaaagagggggcgacggaactgagcgaaagggaaaagagagaggcgcaaatgagggcggacggaacggcggcgatggatttgttcggcttggccgtcgagcgcaaggagcccacctttgacgaccttcgcacgaaggacgactttcaggcatttgcggataaattgggcgaacaaatcggggcgaggaatgaccacgcgaattactcactgtttgtcagtgctttggttgaccatatgacaaagccaatgagcaaattgcaactgcaaatcgtcatggcaaaaatacaggcccatttagacgttcatttgaagcgcgaggaggaggagcagaaactgcaacaggaaaagaccagcaaaaaggagacgaaaaaggccaagaaaaaggagttggaggaggacgtcattgaggacgaatacgacgac

SEQ ID NO: 97724 - DNA, 569 bp, Heterodera glycines
atttgtctgtcatccaactttgtgtcacttacggcaacaaaaatttggcttttcgcctcatggaccgactgaatgcgtacgaggagcaagtgaaggcttatctcatcctcggagaagtgaaaaaggcagcgacattggcagttgaaagggaagacttgcaaatgttacagagcatcaaatgccgactggcgccatcttctgccaattgggaggaagtgaagaaaatcacggacacattgctgaagaaggcagcacatgcctaattgcgcaatgattttcatactttatttacttatttttattatattattatttatgggtacgcgggtcggttgagccaacgattcagtccaaaacccataaagagaaaaacaaagctttagtcatataatcttaatttgaatcacttctctttaatgaagtggttggattaagcaagaaaaaccaaaaaagcattggcacttaactgacatagtcagtcaattttattgtttcccaatatttccatttttaaatactgcaatattattataatttaaatgattgtcaaaaagtgatggctgataaat

SEQ ID NO: 97725 - DNA, 561 bp, Heterodera glycines
ctcaaattgaccgtcatgaccaattcacaaagctccgcgagttttggcgcttactcgtccaaaacggacttttggggatcacagttccggcggagtttggcgggtcggaacgcaattattttgaccattgcattgtgatggaggaattgtcacgtgctagcggttccattggcctcagttacggcgtccattccaacgtcggagaatgtgcttggcgaggaagactgcggcttgtacattctgatgtccggtcttgattcggagcgattggtttttgcggcggcacccctcggattgatgcaatctgcttgcgacatcgctttcgagtacgcccattgccttcggcaaaccgatcggcaattttcaggtaccgtttcgacttctgttccgcatttcgacgcccgctcagcttatgcaaggcaaattggccgatatgtacacgcgtttgtgcgcctcccgggcgtatttgtacgcagtagcacggaacgctgtttcggctgaatgtttaaaggcaaaagattcggcagcggcaattctttttttggccgaaaaggcattgga

SEQ ID NO: 97726 - DNA, 316 bp, Heterodera glycines
acaataatgaaccatgaccagctgcagttggtgaacagggaaggctgggccaagctcgctttctacctcgtctcattcttcatctacctgtacggcatgatctacacaatggtgaccacttaactgtgaagagccggacgattttcgcgcccttctcaaacaattttcatttattgcccctaaaaatgtgccagattaataattaatcacaaaacatgttttgttttcgtgtgccagtattttcacctaatatgcatttttttcattaacttttgctgtaatatgacaaaatattggcattaaaaaatttttgatt

SEQ ID NO: 97727 - DNA, 373 bp, Heterodera glycines
agggtccccaaaactcacacagccataattgacttaattaccttttaataccctcgcactaattgctctcaagatgtcgcctctccgttttatcattgcctttcttttggtcgttttgtgcgctttttccgcactgataaccgcgcaagaagagagagttgacaatgaacctgctgctctgcgcgccagacgcggaatgtacggttcgccgtattgtggcggaatgggcggcggcggaccatggggaggaaatttcggaaagaaatgagaagggagcaaaatgtggtgatcaagacgaacagaacaagccatttgattgaatatttgtgaaaatagtcaatgtaacaattagaaagaaataaaattacaattt

SEQ ID NO: 97728 - DNA, 361 bp, Heterodera glycines
tgtctgttcctttgacttttttcatgctaattgtcccttaaattggtccattctttgctcattttccctcttaaaaagactttgtgccgtacaccactgatcgcaatttggtggacgaatggatcaaaacgaatgatgcgaatgcctttctttttcgcggcgactgatcagcggggagggattgctgtgcgggggttcttccggcgccaatgtttgggcggcgatggaagtggcaaaacggatgggcagagggaaacgcgtggtcacaattctgccggacggaattcgaaattacatgagcaaattcatcgacgacgaatggatgagagttaagggatttgaaggaatttgaaaaagggga

SEQ ID NO: 97729 - DNA, 272 bp, Heterodera glycines
gacaatgtccatcgttggagggcactcgcttcgtgccgaagtgattcaactttacaagacgctgtaccacttgggcaaggactatccgcaaggctcgcgttggttccatgaacggctaaaaaacgcattcgcacgcaacgccaatgtgcaggaagaggccaaagtgcgcgagctgatcaaacggggcgagtacgtggtcaaggagttggaggcgctttatcggctgcgcaaatacagggcaatgaagaacagatattacaatgattaaatgt

SEQ ID NO: 97730 - DNA, 195 bp, Heterodera glycines
gcttaaacgggaatgattatcgataggatgggaaacgatggagaagccaaaggaaaaggaaatgcaaaaagacgggggacaattggccaaccgaaaggacacccaaaacggcacctgtaccgcacaaagtcatttctcatcagaagggccaaacgtttgtaatgattgttgaagaaagcgcgtctaaaaacaatg

SEQ ID NO: 97731 - DNA, 870 bp, Heterodera glycines
ttcatttttccaacctaacctagattttatttaatttcctaatatcagtggacctgccaaaatagtcaaagattgaatccgcgttgttttggaattgtaacaggttcattcttgctctcaaaaggttgaaagcaggttgaacctgttcaacccttaaaaatgagagtgcagtaagactgcgaactgcttgcaaaaacgcgtttctggcacctattattgcataaaacaaatacatttgattacattaccaatttcgaaatccaacatgagggtttgtggtgcaatttgaatgtgattgtttaaagcctatttatgagttttttttgcaaaatttgttctacaccaaaacctgaaaagctctgaagtaagtattttgggccttattttgcattaaaatgtaagcgcttgcaaaactagctgtttcaattaaaacatttatggtataaagttgcaatagctgattcggtacaactaaagcagaattttgtattattattcattattgttattattatttttattatttttttgattttatttttttgattttatttttttgattttattcattattgttattattatttttattattattatttttattattattatttttatttttattattcattattgttgttgtgagcaattgccacccaattgctaccctttaccaagccgccaaaacactaaaaactctaaagagtgcgcatattttaacaagcgcgacaatcggtgccctcggtggagcaataactgcacaattaatcgaggacttaatcgagatgctagtcgaaaaatttgaaaataacggtattataatcataaataaacaacattaggttaggtattgtttcagacgacatg

SEQ ID NO: 97732 - DNA, 344 bp, Heterodera glycines
agtccaatcaattggcttagttgctatggcccattatctgtaggaatctttgacctaatcgatgttaatccggataaatattatagagagggaaaggaaaagagacataaatcatacatttttgtttttaccaatgatcatatatttcctttgtaaatttcaagctaaaatagttttcaagtaatcacagcttaacctcgatgaaaagtgggccgtccaccggatcgaccattcaatcatcatcgtcaagagcgagcgataagcacatcacgacgactgcggcctcatccactgatttcattaccaaacggcgaaggtgcaatagttgggacttcaagacaatg

SEQ ID NO: 97733 - DNA, 126 bp, Heterodera glycines
ggttttgtttcttttaatttgtttacaaaaaaactgctattggattttttggcgaattatttattttcccatggtctgtctgatgctttaaaactgtaaattttagacccattgaatccacaaatg

SEQ ID NO: 97734 - DNA, 511 bp, Heterodera glycines
ggagttgggggttggcgcgacagaattggccgcctcgcttctccccgccccgccccctccaaataccaacgcggcattttctcacaaggcataacgcccacttccttctcgtattatttggaaaatgattgcttcagggatcacgccggtgtttttaaatttgcgaatttaaaaaccaaaaaattccataaaataatttttatcataaatctctttaaaatttatttccctgtttttcgaaattttgaaaaggtcatttaaatttttctctttttattttttaaaattggccattcattggcaaaaatttcgtagttaagaaaaatgacagctaataagcaattcaacaacagcttccttttccccattacaaaacggcggattggtgccacggcggaaagggcacaaaaatggcactttaaaatgcggagaaacatttcgcggaagcgtttgttgaagattgtgtagatgatcgggttcaccttgagagggaagaaagtgtggtcaaatg

SEQ ID NO: 97735 - DNA, 605 bp, Heterodera glycines
acaatttaattattcattaattagccaaaaagtacaacatcgttggcctggttgtcccatctttgcaaattccaatttcaaaactgcacaatgttttctttgcctatgcccaggctcagctctttgaattagaggtgggatgacagagcactcaaaagcatcactctttcaatagattaaattgtttataaaatttttatattgaacaaattcagaaaaggcaaaaattatgcatcaattattttgaaatataaaaatttaaaaattcagtattgggtattgcgagtttcggaattttaaggaggtcggattatggcgattttttcatgcgaaaatatcgaaatattaattatttagttttttgagttaagaactttgcctatcattgtttgttttatattgatgagaatgcggacactttgctcaattcggtggcatttttgcaaattgaccaaaaaacgttgtgtgaaattttgagtcgtgacgaattgcaaatcagtggagaaatttcaatttggaacgcagtatgatattaatttatctaagaaaattacgttgatattttttggctatccgttgggctgacggaaagtgccgtgaaaatg

SEQ ID NO: 97736 - DNA, 137 bp, Heterodera glycines
aattgtttgtcacttataaaataggtcaatttgtgaatatttaaggtttccaaaatggaattcattgtaattgctacatttgttccatacttttcttccaaaaattttccatcccattctattgttgatagaaaatg

SEQ ID NO: 97737 - DNA, 1003 bp, Heterodera glycines
tttaatcttgaactattttaaatgcaattttcattttacaccgaaataaaggaggcttttacttttggcctaagcctttagctttggttcgagataccatttaacatgtatttgtttctttttggtttaagcctgttctcttggttagaatttaaacttcccaccatacttaaagttttacaaaaaatatacgttctgtaaattttattttggcctaagcgtttttgtaccagtttgaatttaatcgtcactcatagagtatcatgcgaaactgacgttatgtaaatttacttttggcgcaagcatgttgactcggtttaaatttaagattccgccatttttggctttccataaaaaatggcgttctgtaaatttatttgtctaacttttttgtaccagtttgaatttaatcgccactcatggaatatcattgcgaaactaattttatatgagtttttggctctgtttaaaatttagcgcaaaactcgaattgaattttagcgccaaaaaccctgttattgaaacgaaattggcgttgtgtatagcgtattgtaagacaatttatagtaatttgaatttaattttggcaccaaaataagctggcgttgcgtgttaaacaaattattgttcggctatggtcttaatttgaatttaatttttagcgccaaaagtatgtattgaaacgaaagtttgtcacaattaatataaatagccgtcatttcttcacctagtaaaattagccattcatttgataaattaaaaaaaaataatttatttaaaaccacatcaataattacactgattattatttaattactctcgcatatttaccccacaattatctctaatttatgcactattttctttcttcttttcagtttctctgactattattgtgtttttaacgaaaatttctattgctccccatatattttcattataaaaatatataaatccatccatcacaccatagcaaattttaaaatataattcgatatcaatg

SEQ ID NO: 97738 - DNA, 126 bp, Heterodera glycines
tttgattgaatcttttttccttatttatatactttccgacagatttgattgtattattttctttaattatatctatttttaataattttgttattattaaattatttttagctcttctaagaaatg

SEQ ID NO: 97739 - DNA, 314 bp, Heterodera glycines
aaatagctttggtactaattaattttgtatcccattttggtcattttttatcattttaaaatattcttttaactggattaagaattataatgctcgatttttgtttttaataaatatggcaatttaaacaagattaactaaattaaaaaatggacacataattaggaattaagcaatgggatttaatggaattaaatgtcgagttttataaaaatttttgttgattttttaatttgcaaaaaacaatgccaggttcttcttgagagcactgaagaaatgaaaaagggaccagattataaattctttcaccaatg

SEQ ID NO: 97740 - DNA, 129 bp, Heterodera glycines
aaatattttgaattttttttatttacaataatttataaatatattttttcttttttttaaataaatattttagttatttttcggtcggatgaggaaaaaattgaaattgtgagaaattttctgaaaatg

SEQ ID NO: 97741 - DNA, 484 bp, Heterodera glycines
tcgcgtccttgcgctcagaagcacatattttttaattcgtaatatcactagatgtttttctattagcttacatagtttacaaaaaacttttgacaaaaaatgttagataaacaaggttttttggtttatcttggtcacaatttttttgaatcaacaaaaatttctgaattttgaaggagaaagttttggtagaaataaatggaaatggaatcaaaattattaaagttaaaaaatttaaaaaaatattattttgaatatttcacaatataattttcccagatgaatgcactttaaaattctgataaattgtacaatcatagagaattattttgcttcggaattttctctgatgagtaagcatccagtaggccctgtcagctgcctttcatcgaacacactaagagaaatttgatttcatttttaattcagttaacagttaccaatgtattcgtaatatttaataaataatttttagttaaaaatg

SEQ ID NO: 97742 - DNA, 188 bp, Heterodera glycines
cctaaacaattgaaattttggccaattctgtctaaccccaaccaaacaataagtcaaaacaacttagtttttcaattttgaagaccagcgacctcaaaaccccatatttttatcatccacccaactgggagcagttcgtttcccaccccacccctctccggacagttttttaaggggggaccgcgatg

SEQ ID NO: 97743 - DNA, 846 bp, Heterodera glycines
attcttatataatatttaattaattaatataaataaaaagtctgaattaatattagagatcagcgcgagggatcggtgcacggtgccgggtcgcgttactcaaaacccatcaaaatgggcgttactcaaaaaaccatcaaataaaaatttttgacagaaaattcttcacaaatgcgcataaaatgaatcaaattttaaaatcttgatattattagagatagcttaagtgttttatgttatactccaaaatttcaaaaaattcgtcgtttaaaaaagtcatgacttgagaaactcaatgaaagcaagttttcttgaacatttttgatcataactttcttcaaacttaacgaaacttttgaaattttgcatgctaataaaaaacaggtagggctatcgaatgacataaaactttaaaatatggttgtttttgagcaaagttttagcaaaaaattttttattttgatggttttttgactaacggcctttttccaaatttattttcatggaggctgcgacggtgccgatttccagtcgtaaaatttaaatttaaggaaaaattttttgacttcgagataagtcccggtttttcaacctgaaaaggtcccgcccggtcccggttttgcccaaaattcccggtcccgctcaactctagtttaaagctatatttttcattcatttgcttttttaagcaataacagcaatgcgacacacctcaattgtgtgcagtatttgctttatcaccatatacaaaaactcatgtggcgtcttgaaagcaaatttggcgtgaattttggcgaaaatgaggagaaaaattcattcttgaaaacttatactgacaaaaaaatg

SEQ ID NO: 97744 - DNA, 218 bp, Heterodera glycines
tttcaaaaaacaaataggcgctctcttgtttttttcatcattcatttttgcgattgttgcgaaaaaagagtatcgttttctttccctttacccgtaggtttgaatttacagatttaaacagtctagcaattgctttacattgatcttaatcttttttttatgcatctgttccttgttcagcgatcccttgataatattcaactgttaatttgaaaatg

SEQ ID NO: 97745 - DNA, 374 bp, Heterodera glycines
tgtatgtcgttttcggttgccgtttttatctgacccaaaaattttaaattgataaattttttgattttttataccaaaaaaacaaatgctttcaaggtttgcgattgaccaacgcttttggggatataaatgccaagggcgtagccataccattggaagtggctcaaaaacgcaaaatttggtcattttgtggactatccaccataaaagcatatatacgtcacatcacatgtctttcaatttgccttataaaaaatatttcttaatgcatattgccattcattgaattgatttgattggctttattaagatttaatgcttttatgtatttgctaatttttaaagattttcagaaaaaaaatatttttaagatg

SEQ ID NO: 97746 - DNA, 86 bp, Heterodera glycines
tttttggccaatcggagtcactccgtaccgtaagacttgacgtttttgtacggtatttggacagagcgaaaaatgtgcgcaaaatg

SEQ ID NO: 97747 - DNA, 233 bp, Heterodera glycines
gaacaacaccactacacattaccacactaatcactcattaaacataattatattatgcactttggccgagtcccttcccaaattcccattgctcattgtcttgtcgtcttaaattgtgataaatgacttaatgattttcttttttgttttcatcttctgtcatagtttttatggacttatttatttttgaaaatggaaaatgtcatttttaatgcaagtaaaacacagaaatg

SEQ ID NO: 97748 - DNA, 972 bp, Heterodera glycines
caaatggtgaacttcagctaagtcttgcttaaaattggctaaccattttttgtcattagcattagtctgaacagaaaatatgaaattgaaaatttcaattttaatttatatatttgtgaaaacaaaaaatgttgattaaaatggacggcggttagttaaaaaattaaagcattaacaattatttaatgagaaaacgagctctgttcgcccccccccccaccctaatcgttcgtcgtaaatcactttcggtgtgtgaccggaaatgggccggtggaaaatgcggagttaatcagaatttcttgaaaaaaacgagatacggtaatggaacaaggttacacgaatctaattacagtatgtattgtttatgcattttggtaaatgcttattttttaaaaaaccgaatcaccaatccaaaaatgaaaactcttattcaattttgagtttttgtattaatgtgttaaccacgacgccaggcgcccagctctcgatccccatatattttgggccttctctttaattttcaaagaaaatttagaattttttctaggaaaaaatcaaaatattattagaaaaatttaaaaaaaattttaaggttgattttacaattatttttcaaataatctttttgaagaaaaaatcaagaatatttgtttttctagcagcaaaactaagtctgttgttagagaaacaccatggttaatttgaaagaataaaaaatttcaccggctcccaaaaagataaataaataattggaatttacatttttgtggataacattttttcgctaaaattggttccaatttttggaattttcctaaagcattagtgtggcagtgttaacactaagtgaatgggcgggaaaggttaattaattaatacaaattaccgattttctgatgcgattaagtcgtacgcattcctttggttctttaaatgagccatcatcattgagaacggcgcaaccacccaatg

SEQ ID NO: 97749 - DNA, 231 bp, Heterodera glycines
aaagatcagaacctttatttttggattttcctgcagaagcattttgatttgattaatgcattttcaatgtattaatcgccgagtaaaatggggaccggtaaattggacaccaagcggaaaactggacaccaaattaaaaaaaataaacccaggaattaggttgaaaaataattggtgtggataaatggattaaggcatttagagtggatcaaacattaaataggcacgatg

SEQ ID NO: 97750 - DNA, 211 bp, Heterodera glycines
aattgctaaattaaaataccagatttaaattaaattatagataaataaataaaaacaaaaaaaaattttttaagacatttgattttataaaaaaatataaatttaattcattttaataataaataaaataatttatgtaataacaactttaaaatttttttaaatatgtacaaattaaatgtaaaataaattttgcttttttcaggtaatg

SEQ ID NO: 97751 - DNA, 193 bp, Heterodera glycines
cctgattaagcaaataaaaattaatcacagcaaaaaaatgggaaaaaacccgaaaaattttagttttcgtctcaatttttgcattacacccgaatcggatgtttccacgtgtttaatcagtgtaacccattcattttcgagaatatagcaagaatcaagcaaaaaaggtgtgaaaaccgtttgagcgaagatg

SEQ ID NO: 97752 - DNA, 497 bp, Heterodera glycines
  unsure (1)..(497): unsure at all n locations
atttgttgatccagcaacattantgatggttgttcttctggcaaagaaaaggacagcaaattatgcataaaagttgaaaatagatcaaaacgggtagagggggggggggaggggattgggatcacttccatttattttgccacatgcagtggtttcccttcatctgcagtgaatgtgaaccggggttggtatgctaccatcccggtaactaccgtaaacccatcctctgtttacattccagtattaacaacctaaccgagtttttgagggagggcaagactgaaacgacatgtccaaccgagactacagaaacgaccagcagcacaatcatctgtcctccgcctccaccaacgacaattcacagcattctactgttgttcatcacttctctgcttcttttggtctttttcgcgcaggtccaccccccccccccctcccccgtctaatcattaattattttttaaattttttttttcaatttacaggctttcaaaatg

SEQ ID NO: 97753 - DNA, 335 bp, Heterodera glycines
attcgtgagcctaaacagcgacttaccattggggaaatgttggcgcattcgtcactgaatccgcctaatttgaaccgcagttttattgatggaaacaatttgcagcaattgtttgtttggggttttgctttgttttccctcaatattttacattaattgtagctcaagaagtgcttcttgtcaacaatttacaacattagcgaagactgtggtactttctatttaaaaaatatttataaatgttctgattgttaattttttatcctcaacaaccgacagtctccaaaaatagtcctccgcctaagcagcccccgtccgcccacgactcgggcatg

SEQ ID NO: 97754 - DNA, 328 bp, Heterodera glycines
agtatttttttgtagataatcagagctaactgattgtgagaaccggtagtcaaaaaaccaccaaatgaaaaatttttgacagaaaattattcataactttgcccaaaatgaaccaaattttaagctcttggtatcattcgatagccctaaaacttgtatgaaaataagtacaatttctgccataacttattttaaatttgatagttttatttgaaattttgcaagctaatagagaaaaagcttggctattgaatggtgccaagaatgtaaaatatgtttgcttttaagcaaaattatgccatgttttgtctaaaaaatcgctaaaatg

SEQ ID NO: 97755 - DNA, 1003 bp, Heterodera glycines
ttttggaacatttgtgttaccttttgtctttatcttattatgtacgttgctcttctattatagtactataagctcattatacacgaacgtgcaaaatgaccttattaattcgcgcaaatattatattctgaactacattatttagaaatgaaattttttttgttattacaaaaaccaattgaatttttccgatttgaaacttatttatttaaaattttctcgttattcaatttacaatatttagttagaattcattcatttatgttaaatttcatgtataacaattttagaatgttttttaatgatacattttcattagcttgtctcgatacaaatttttgtcactatttctacacttttgccatttttcattactattttagttaactatttcgagatttttcattaatattaaaattaaggtaaaaatagatatttttagagagtgggtcaatttttgttataagcattgttttattattttctatttattccactcatttttatttaaatatccatcggatggtccaacttttgttcttttttcgtcattttgtaacaaatttgagggtttttagttttgcatattttatatctttattaattcggatttcaatggcatttgtcattttaattttagtacaatattgcatccattactggtgaatattcttatgcatagtataaaattattctgcttaatccttacgatgcccttttcgtctttaattaaatcgtgcacaaattgcttatttatcactcctttgaacaatgagcgaggattaatcgggaacaaaatttgcatgttccatcatgcaggtcactcgctgactaagccatctgatcagctccatctcttcccggattatgccacaaatggtgaccatctgctgctgctcacaaagaatgagaagaagactatgaaggaggggtcggagatgccatttgcagaaattcctccgttttggcacccaaaaagaacaaactcatcaaaaaggccatg

SEQ ID NO: 97756 - DNA, 240 bp, Heterodera glycines
tccgtcgagcacatcccaatgccaatgtatgggtcaaactgattttgaataagcacaacataacaataattagtttcatagagatatattatcccattaatgcgaggggggggggaagaagcgacgaaagactgtgtgaaaacaagaggatgtacagttagagaaatgatgagagagtgctttgcgccctccccccgctaatgggacaagtgctaccgcttcatctcttaaatttaaatg

SEQ ID NO: 97757 - DNA, 593 bp, Heterodera glycines
acaaacacttattaattgagaaatcctgaaatatattcatctcaattattcaaaaaaaaatcaaaaatttaatacaaaaattacggcccatacatattaattggaaataaaattaattaatttaattcgggctatcaaataaatgtacatatcattagggttgacaggcaaaattctttttggaaaagcaaaattttgggattaatactgaatttttcattatttgatattattgtagttgtttagagaaaaactgcaaaaaaaaacaaattaaaaatttttaattaggcaatttgtttaatttaaaaaaatttgtgaccgaaatatttgtttttatttgtttttatttttttgaagaattatcaaatgccgatcacttggaattgttggccaaaggatgtgaattgttggggaaaatcaacgaggaaaagcatggcttaattggtcggcttgcagaaaaagtcaacaatgaagcatgcttaaatcgcgcggcaagcttcacagaccaattgattcacactttccaagagagtggcccacaaactttggcgcagattaaagcgaaggaaattgggcaacaaaatgccaaaatg

SEQ ID NO: 97758 - DNA, 378 bp, Heterodera glycines
  unsure (1)..(378): unsure at all n locations
ggggacttgccgcgacgnaggaaaannnnaaaannngaataaatttttaaacaaaattcattaaaaattccaaaatttctccccggcgtcgccttcgtcaccccccccccctgttgcctaaaaattttctggaaaaaatgagccgcaaaaaaatggtttgaaaaataaaaaagaaggacaccgatttacatggccggacctcttctcaaaactcccgctcgacctccctcccacctgagactccaaaaatttcggtagcccccccctcccccgttttttcacatatgtcatccatataaattgcatccatactctctaattatataaaattttaatttttacacattttgccttttcagcatcaccttcctggacatg

SEQ ID NO: 97759 - DNA, 201 bp, Heterodera glycines
cctgaaagtggggaaaaagcgattggaaattgcgccaaatttgggatttgaccgaaaaattgggttgatcggatcaggaggagctcatattcactgatcagacaactgggactgaaatgagtatgaccaaaaatgggactgagctggccgggatcagcaaggcaaaattaattcctcgtcgtgatcagctaacaaataatg

SEQ ID NO: 97760 - DNA, 1003 bp, Heterodera glycines
acaaaattcggcaaaaaatcaaaataaatatatatttatttaatttatttaaataaataaaacaaaaaagtaatttgcatcggatttcagcattttttcttcttcttcataaaccgggaactaagcctgaaaaaggaaatgtcacaaaaaatttgtgtcttcctattcgtctttaaattcaatttatggtagcatcaccaccactaatggcaccgacatccagccgatgtgttctgtcaaaaattagtgtccattttttcggcatttcatcatacatttcactttatttgtgtggggagttggcacaaattttgtttaaaatatgccattttgggacctttttgaaatttaacaatgtgcccaattctgactatgccaccctgtgtcatggccaaatttatcacaaggacaaaactttatgcgtcataaattctatataaaaagattgacttttattcatttttatctatgtgggtatttaggttacgtttttttttttttttgcttttttcaaaatttaattaaatttcgaatttcgttaattttttttaaactttctaaataaaaatattcataaattgtaataggcagtgtatcttttttttctttattcacccaaccattttgatgaattgtgggggttgttaattttttctaattttggacacattttccttctttggcatgttgaagtaggttggacatttgttgttctcggcacttttccatgccattaatggtttttggctttgaagcaaatgagaaaatttgtgcctttcatttttgtctttcgtaattttcactaaattggaaatttggaaaatatttatattccaatttaaccaaaagcaaattagaaaaaaacatgttagcaaaagcaaagaaagttgcttttttttaatattgatataaataatcttaatttagccaacataattgaaaataatttaatatctttttcttaattttagccagcgattttttaatttacattttgccaatg

SEQ ID NO: 97761 - DNA, 223 bp, Heterodera glycines
tgcttctcttcccccagtttatccagcgaaaaagtcctttcatccaaacagatggacaacccttccaacgcattccatacgttcattcattcaccaatccttcccacctcccttcttttgtgtcccaacattttttcacttttccccattttgacaaatcgtttcccatccttttcatattgttcaattagaatgggcgctaaagcgaataataagcgcaatg

SEQ ID NO: 97762 - DNA, 81 bp, Heterodera glycines
cattgtttgattcactaacatttaattgaattttaatcaccaggtgaccaattgcgcgtgcttttcccaccgtcaccaatg

SEQ ID NO: 97763 - DNA, 1003 bp, Heterodera glycines
aaacacaccctttggatttcatttgtcattatggtacattagccaaccgtattatacctattaaaataatgtgcatgaaaaacgatacctttatcttttttagtcgcttcttgcatgaaatttttgttgctttttttatgcgtgaattcattaatttttctacaaaatatcaaatgaatcgcaaagtcggttctaaatggggaaaatatttttttaaatgaaaattttgaaaatatgccataaaattgttgagaagatagtgatcgattaacaacaaaaaaacagccgatcaatgggatttacgcgcaattgatcagacaacttgagcggaatgagcatattttgtgccatgttggaaatttaaaaaagaaatattttcttttttaatgggttttattatttattgacctaaatttttccaaataattgtatccgaaggttttaaatgatacctaatacccattcagccatttctagcgatcggaatttgagtcaaatgaccgtaaaataagttaaaagcgttctttgcaaatagcattttatttgacttctttgcacttttatgacgtttttacctttttaagcaaaaatatttaatttgtctatataaaaaaaaaattttcagagtcccaatttggtttgtaagaataggtgaaagacaaatcaattaataataactttacctcaataatgaatttcttaaaagggccagccaaccatcgacagtatcaacagcgggggtggcacggaattccgattacggcatttttggggtcagaattccgatttttggctgttgttttagaataaataaattttctaagttgtagaacaaaatttcaaattgaaaattttatatacgcaaatcttttttaaacgcttccacgaatatattgttggaaaatgtataagttaagcaaaaaatagaaaagtgagctttttcgtaagttatggatgatgtgagagatggacgtaatgcacaaagaaaacggtagaaaaaatg

SEQ ID NO: 97764 - DNA, 143 bp, Heterodera glycines
ttggggcggaccataatctagaagaataaatttggttttaaacaattaattaattcaaatatttttaagaagtggtcaacagaacggaactaataataaagaaaagcggggaattagagagaagaaaaaacttgcaaatgatg

SEQ ID NO: 97765 - DNA, 208 bp, Heterodera glycines
ttctctcgctctctccccacattttgtcattaagataaaattattattattatttctttgaaattaaacaggatttccttattttattaagtaaataatgatttattcagttttttaatcagaaaaaaaatcatttaaatgcctcaaaaaatgaattgcatttaattgaagaaaaataaaataaaataatttccagacgacaaaaatg

SEQ ID NO: 97766 - DNA, 194 bp, Heterodera glycines
tcacagaaatgttaaagcgctagaacagagttgaaaaattttcattaatttaaaatgttctgctgcctaatttacaaatttttcataggctaactttgaggcctcctatttcgttcaatttttcaattttttttttataaaaatttttttgtaaatttattaaaatagcggcgaatgctttttagttgagcatg

SEQ ID NO: 97767 - DNA, 830 bp, Heterodera glycines
ttctttataattctttggtaaaaacttttaaattagcaattttgtaaattaatttattcaatttaatgattgaatttaggtaattatgctgctttatgaattatttatgaatgtatttaaacgttacaaatgagaatttattgctttgtattgattataaatatggattaatttaaaagtcaggaaattattcggctaattcagattatctaatgcaaattattttcaaaattattattcatagtttttcagatattttttaaggaaaatttcttcaatttttcttaaaatccctcattaaaccctccaaaatctcttttccaaattgttttttccattttgaaatgctctttctatcaattttcatcattttgcaattcccctttgattctttttttggattttctctttttatttgccattatttttacattttttccattttcggctatttcattaccacgaaatgccaaattctttctttaatcttttaattacatcataatttactccaatttcttacaaaaagcggatttggcaaattttatagaaatttataaatttcatcaataaaaaaaatggcataatcccgatcctgtgctggcacaggattcgaggcagtaggtgcattaatttgcaccccgctgactaattatgagtattactgttaggacatttttgtaggagggcttgtaaaaaaaaattttttttaatagaaaaatataatataataattcagatttcaaactcactcattcgtttgttcgttcattcattcattctattaatggccccaagtaaaaaaactccccccccccccccccaaaatg

SEQ ID NO: 97768 - DNA, 212 bp, Heterodera glycines
gtcattagtttatgggtgagttcaaaaaattataaatttcgtttataacctaattttaggacgacgagtatggcgaggttctattattggaattcatgagagaagcggagagccatggcggggagattttgtacacggacacggacagtatttttgttaggcacgatcgggatgtggagccgatcacgacggggaaatatttgggagaaatg

SEQ ID NO: 97769 - DNA, 372 bp, Heterodera glycines
  unsure (1)..(372): unsure at all n locations
tgtcaagtcctcttcttttttctcttccgccattctcttaaaaaattattgagtcaaaatcaaaaaatttgagctttttgtcattttcaaaagaaaaacttgcgaatattttttgagggcgcagattttctcgaaagccgagagaaaatagaaaatcacccccccccntgaaaaatttttttctagggtaattttatgagttgagcacgaaaaatgttattgtaagccatcacgcattttacgtgagttacgtgaaaatttagatgaaaaatttacgtaaaaatttaaaattacatgtaaaacttgaaatttcaaaaaataagacactgagagggatataaatgagaaaaatgagctgggagatcaagaatg

SEQ ID NO: 97770 - DNA, 315 bp, Heterodera glycines
  unsure (1)..(315): unsure at all n locations
aatataannagttgctcattttgtacaaaaaaacttatattaggaaatgaataaattctatggttgaatgaatttttgatgatgagttttatgaaaatttttgccgtttttatatgcaacttttccattaaatatttttgccggaaatacgtggaaattttaaattttgtaaacaggaagtccgttgaaggaaaaaaacgttttcacattagaaagccataaatgacaaatgcataattaaaaatatgaaatcaatcaaaaccaatttctaaaaaaaaaactgatcggaattaaaaaaagtttctagcatgaatg

SEQ ID NO: 97771 - DNA, 442 bp, Heterodera glycines
ggcttacaattagaccaaatctaattccatgttccgttaagaaagggtgacttcgttgacctcgtctcattggatgccacggcgatggaaaagggccgtctgtcgtggctatttaaacaaaaaattgtgcaaagttgcatcgccgccggtctcacttttgagctttgttatggcaacgcacttatcagttcggagcatcgacgacaggtgcctttttaatgccatattctgccaaaagatttattcatctcttgaccagattaaaaattttactcacttgtttattagtttgagatcttttttgttttatagttgaaagacggataaattttctaaatggtttagttccctaaattataatttagaattagacctggacctaaattccaggttgaacctggacctgggttttatggactaaaacccaggttgccgaaaaatg

SEQ ID NO: 97772 - DNA, 67 bp, Heterodera glycines
tcttaaacatgtaattattgtcattaaaaaataattaaatttatttatttattttagaaatggaatg

SEQ ID NO: 97773 - DNA, 238 bp, Heterodera glycines
tcaagtatttcaagactgacgaactaataaagtaatcactttttattgtggcctacaaagaattcaattttccaaaataaagaagtcatcaaattttatgaaaaatcaaaataataaaaaagccgaataaaaagtttacaaaaaaattaaaatatattattttaaaataggcaaaatttatacctttcgccaatttaaatgaataccttaacaaaatgacaaatctcggaccaaaatg

SEQ ID NO: 97774 - DNA, 444 bp, Heterodera glycines
ttctatttaggtaacatcaaaaggcaattaattagaggaaaatttcgtatgaaaaaccgcatatcttgcgcatttttaggagaattttttaaaaagtgtggcattttgtttctttgggaaacaaaaatttgatgagaatgagttattttcttctcattcccaattaataaagtccgaagcgaaactttgagttttcccccattttgaatgaaatattagggaaaaattactgaaattaatctcttccgaacccccgacctaaattcgaacaaaaattaaaatttttttcctacaaaatacgtaaattttgactttttccttcattgcttacctattttctttatttttgttgctctttttcagcatattgaagccccttataataaatattacttccttctcttctgaattctctattaaaatttgattgccgtgcaaaaaatg

SEQ ID NO: 97775 - DNA, 514 bp, Heterodera glycines
cggtcagaagagttcaaaaaaccaaatctttccaactttcttcggccataaattcgttcaaaatcgaccaatttttttgaatttcgcagtctaatagagcacgttaagagctttcgaacgataccaacaacgttgaatttggttgacaaagaaaaaagttatgccaaaaagccgctggggccgaactgagccggtccgatctacccactatgggtcaagcccagtgttagacaaaattgctcataacgtcaaatagcgtaattggcgtaaattattgcgcgctaattcaaaatgtacactggaaaatgccttttttgtattttttattttgatctgccataactcgcttcattcccaactaaactgaacaaatttggtatctaaaaaaagtttttgaaaaggagaatctttttctaagcgaatgctaagcaatttgacatctcagaaaaaaacccgtactcaaacaaaaccgtttttcaataaattcatactttatacttcagctcaattaatg

SEQ ID NO: 97776 - DNA, 569 bp, Heterodera glycines
aagcaaaatatgttcgccaagataacacataaagagcaattgtcgaacagttcaacgaacgcgagccacttgcttatcttcgcgcaatttcatatcactttcacttttaaataataggactttgaaaatggaacagagaaaaattatattaaagaccgaattacatttttttaaattttgattattctattttttaaaaattctctatagtgtcgaaattactcaatgtcgaaatggtccagtgtcgaaaatgcaggaaaacagtgaaagttttagaaataattcagtgtcgaaattacttagtgacgaaaatgtagtgtcgaaattacttagtgtcgaaaatacttagtgtcgaatttactcagtgtcgaatttacccagtgtcgaaattaccagccgcgcttttttgtgccaaaagtttttgaatttctggttgtctacccaaactaaaaaaaataagattctcatagaaatgcctactgttcgcgaaatatttgggtgcctgcaaaacccccaaaaaaaaggcgtcgccattccaacaaaacgaagccagcgtattcaatgaaatg

SEQ ID NO: 97777 - DNA, 128 bp, Heterodera glycines
gagagagagggatggagagagagagagagagtgaaagacaggatggagagaagaagtgaaggaaggaagagaaggaaaaagataggaggagagttgacaagaaggaagagagtaagagataggaaatg

SEQ ID NO: 97778 - DNA, 104 bp, Heterodera glycines
cggtaaagcgaccgaatgaatttacgagaaaaaaaaatgcaaaaacacttttttgttcagcagtttttttcgaggaaggaaaatacgacgaatgcatcgaaatg

SEQ ID NO: 97779 - DNA, 90 bp, Heterodera glycines
atgtacagtacagcggtgccagaaagacctgtaaatcacaaaaattcagagagaatctgatcacatctccgccctctgctgttgccgatg

SEQ ID NO: 97780 - DNA, 95 bp, Heterodera glycines
attgcagaatatccatgaaattatcgaaagtcacgggacttttagacatgttttttgtgtcaattttgaattgtttacaggtccaaggcaaaatg

SEQ ID NO: 97781 - DNA, 282 bp, Heterodera glycines
tgacttataaggaatacatcggaaaagcgcattcgctattaatcattcttttgccgggctgccgacattttgttatttttaatttgatttgttttaaaatgctgacaattgccattcatctaaacgcatttggttataattagtcattaaggcttaattggaactgtagaacaagcactaaaattttggtcataaaagcacagcgagaaatgcttggatttaacttacctcatcaaaaaataaaaataattttaagtttttttaatataaggtgaaaggatg

SEQ ID NO: 97782 - DNA, 119 bp, Heterodera glycines
ccaaataaaaatattttttcacaaataataagaattaaaattcatcattttgtttgattcttatactgacgattttcatttcacattaatttgttttttttggcgcttttgcaaaaatg

SEQ ID NO: 97783 - DNA, 307 bp, Heterodera glycines
tgcaggtccaaaaatctgagaattcactacctgactgtccatttttaatgacttcctcacatttttataaaatttccataaataaaatgatttttcatcatacattaacaaggggtgcgccggcgcaccccccccccccccccccccccccaattgctgccatatgggatcgttagccgaggaatttacgttttatttaggatgttgaataaaattaaataaaatacaactcccaacagcaaaccagtgataaagtgcttacaacaacaattgatggtaaataattttagaaattttagagggaatg

SEQ ID NO: 97784 - DNA, 983 bp, Heterodera glycines
ataaagcgagtaaagcccataaaaattggggcgaaaatccgacacttagccccaaaatcgggcaaatgcccggttgctagggtaaaatgtcacgctaaatttaaacgagcaattatcgagaatgaaatctcggggagaaaatgtattatttatgggtcaataatcattataaccttttaagtaatttatggccattaattcaacaaattgtgcgacaaaacagcataaggggaaaacggaaaaagcattaactgatgataacatttgttctgctgattgagagattaacatggaaatgattaggaaaatttcccgcgaaaaggtcaaatatttataaattatttacccatttcctttgatattattaattaatgggtgggggggggggagttaatttgaggcaaacattttttacacttattattataaatattatataattaattaccaccaatcaataaagagagaaataatttggtttaaaatttaatgaatatagtaatcctgtcaatattttgacaaaattgttcatcaaattcaatcgctcaaaaaacaataccctcatcttttcaacaaatagttctaccagacctccaacaatttcttcaaataaaaatatccctcaaaatttctctaaaaattttacccaaaaaaaaaaaaaattttttttttcctcttttacaacccctaaaaaaacaacaacaattttccctttgttggaggtctgacttttctaatttctgcttcttcattcaaaatttcaattatcttttatcactacctttcatttcacctcatttccgccaaaagtataagtggcacatgcccttcttttggttatttttatttttgaataaataaacttttaaacgtgtagaatttataagagaaaaatatgaaattcattttcgagaattatattattatattatatatttacatataaaaatataaatttgaatttttagaaaagcttagcaatg

SEQ ID NO: 97785 - DNA, 127 bp, Heterodera glycines
tttcgggccattccaagcagacatggacagttttgaagcatcggtcaataatttaaaaaatgaataattaaaattataaatttaattagcttgtgctagaatatattttctatcattttgtcagatg

SEQ ID NO: 97786 - DNA, 257 bp, Heterodera glycines
ggtaaaatggattaattaaccattttcaaatgtaaacgagtccattaattgattttcacagatatatcgactgcaataccatcgcttttctccaccgttttcgtccacttttcgccgcctgtccaatcaatttgtccatcgatacgacgaatgatcgcatttcggagttcattttgcacaacatttggccaatgctcgggaaaaacatccatggcattgaaatgtccgcctcgtttttcaatcttttgcgacaaatg

SEQ ID NO: 97787 - DNA, 260 bp, Heterodera glycines
ttacgattaagaaatagtttatgattataattgttaaaagcataaaatgaacctgcgaaaaaacacgtaattattgattgatagtgagaggggtgttagcgcgcagcgacctccagacgggctgtcccttttaatcgataggtcacgcccatccacaaacacatagacgagagagtagtggttagagaaagatacaaaagggcgccaattcaaatacacagtgaaacccaagccaatttattgattttttacagattatg

SEQ ID NO: 97788 - DNA, 74 bp, Heterodera glycines
tttctgaacggtttattattctttcactgtacttatttgaatagttaattcgtgtcgttcgttattcagtgatg

SEQ ID NO: 97789 - DNA, 844 bp, Heterodera glycines
tttcttttcgtccgtccaccaaattttgcgaccgatggcttttaaaaatattttaaaattattgaaaataaaaaataaataaacttttgtcaatttaaagattaatggatgggggaaatgggcgaatgctttaaaaaaagaaatgttgaagaaaagttgagaaattggaattcccggaaaaaaatagaagaaaataaaatattaggacgaaaaatgaaatgaatgggcggacgaaatggaaaataattggacagaaccgtttaaattttgacaattattgagtttttatggttatgaaaatgataattaatttttttttaaagaaaggatttaattgtattatttttttaatattaaatgtttaattattaaattaaattatcatttaaaattttcaaatttttgttaaatgtttttgcgtcatgttcatataatcttccaaaaaacttctgtgcttccatgtatttttgtatagtttatttgtctcatttattcactgtacaatttttttctttttaattccccgggggtttttgcccaatttccccccccccccctaaaatccgtcgccgattgtttcgtccggttgtgttgcgttgcgttgcgcaattccccccccccccttttccttcatatttggggattcgctgctctcgatgattattcatttgttatttgtctctctctgtataacactttatttttgtgatgtgttaattcaaatttgcccttccctttcccataaatttgttttttcattttttaaattccaatttttgtcaattaaattccgccgtttcctttcctttggctttgttccgctgctttttctcctcccattatg

SEQ ID NO: 97790 - DNA, 1003 bp, Heterodera glycines
gctattttttttttttttgcttaaaaatcccagcccaagtaattaacttataaggtagggcagcaagcactttttaaatttaatatggctcatttgactacaaaaaatgaccaattttactaatagcaaaagttggtcgagaaccatggcactatttattcgagtatgcggagaaatttgatcaaacaccaaaaattccaacttttcaattacattttctaatcaaaacctattttcgactttgtagccatggaaacaaagaaattctccatattaacttgtttataccacctaatttatttaagcagcaaaatattttcataaatatatttaaaaatatataataatgaaataatttaaatttttaaatatttaagaatgatagttaaataatttaaatttttaaaattttcttgaaaatgaagactcttttgaccagccagcagctgttgctcccatttttgttcttcatacacattaattttcgacagctgtgtaagcaatggagtattcttgttcactaaaatttaaaaaatcatctccttattttataccggttttctaaaattggttttttttaatttttctatccatgttacaccaataaattaattttttgttaattcttgagatcccgaatttatttacctttaattaaatcgaattattgaaaattgtttcgcacacacatgattcattaaaaatttaataattcaaaaacagattaatttctctttggtttaacttgagatcttccgttttacttttataatattttttttttgtatttcttctaatttaacatttaataatttcttcaaacttcatcaaactttcatgtttaaaatccgtgcccaatttctcacataaaacaacaaaaattccataaaaattgtttatattatgtcgagatcccgactttgtggtggggatgtcctcatcccatcgatcgatttttccaataaagcaaagaacattttaagcacacaaaaaaaaaaagatg

SEQ ID NO: 97791 - DNA, 898 bp, Heterodera glycines
ttaacggataaaaatttattcgatttcagttaatcatttttgttgtgttacttttttaattttccttttttataaagcattttttactcaatcgatttttctcacttttattaatgacatcagagagtatcgagagtgatcttcatcttcttgaggcttatttttggttccggaaagtaaatgagaaaaattttctgaaaatccttatattacattttaatttttaaagtttggtttattaggaaagttagttttaataaattgttgtaagaattttgataattattaaattatgtctcttttaattattaacaatttaacaaattgccaagtgtattgattggcttttgtattaactcaaaagagtggagggattagtcaaagctttcttcgctgcatgacaaattggaaaagcattccaacaattgcttttcctcgctgctaccaatatttgtcgaaaaagactctatggattttccgaaaagggcaaaataaagaattttttaggaattaatatttagactttatatttgaaatattattcgtaataaagcattcatttacattttaaatggaaacaaaaatataaatgtggattaatttaagaatttacgcttttttaggagtttttatcgcttttaaacatgtaaaatattttaaagcctaattttatttatttttacttcattgttaaaaaaataattagatttgaactgaagtaattctgaaataataattttttttcagtcaatcgttaatttgattggcacttacaaatttataatttttatcagttgctcttcctcattcggctttataaacaaattgagggagtttcataaccaaatccatcttaccaattagaatattctttacttgttctgtttagttggcaatg

SEQ ID NO: 97792 - DNA, 364 bp, Heterodera glycines
cctaaaacagctcaaagatgggcctgcgccagcatcgctgtctgccaaattgtgcattaattcgtcgggttttcctctgttcccaacttggccgtgccgtccgtttgggccgcggcggcacttccggcggaacgaccgaagagagcgaaggaaagggacggatttccaattcatttggcggttcgggaaaatcaaaggctatgttttgagagcacaaatcagtgcaaattggagttggaggctaaaagtgatgggaaaatgatggaaaattcaacgaaataaaaatgcaatttgtcccagggggaagcccttttgaaaaaaacagtaataattttgcttttgaaaattattgcggccaaatatg

SEQ ID NO: 97793 - DNA, 341 bp, Heterodera glycines
agggggaaatttaaaatttacacaatttccttagtgaaatcaatataaaattcaaaaaattttcccggcggcgcctatcagcaccgccggaccgcccgccacccccttccccaaaagccgagacaccccccatgtcccaatcgtccgtcgtatggccattgggctgagtttttaattgatatcaagcaaattaattattgaatttttcatgaattcactactttgctttatcacctttctccaaagttccttccggcgttctgacatttgaagaagtgcttgtcatttatcagtaccattcccatccggatatctatggagtgcccgaattgtacccaatg

SEQ ID NO: 97794 - DNA, 330 bp, Heterodera glycines
tttttttctcaatatttttggacttttctaagcaataatgatatgaattcaaccgaatttttatggcatgacaaagaaacgacacatgttgtgggctcacacatgcttcgaagctttcaagtaaaaatatggcatatagattttagagaatccagtcgatgaatttcatatgattcaaatattcttaaactttttggatttttaaataagggagctcagccatttcaaagtttccacttttatagatggagctcaactgagcactcaccggcccagaaaaggctcatttttttctcaatatttttggactttctaagcaattatgatatg

SEQ ID NO: 97795 - DNA, 346 bp, Heterodera glycines
aattcttaagaatacaatgcttttttaattttcaatttagctaaattaacaattttatacataaatgcgaaaaatcgaaatttttgaagttttttcttaagaaatttttttggcttggaaacctattgatttttgtttgattaagagcattttacaaaacaccaatttggataattaaagtcataaaacctaattcaataaataacaaataaattttactcttcaaattatttacataaaagtcactctgaatactgctgttccggctgctgcttctgtccatggcttttcgccacatttgctgctttcaaaaggctattttgaaatcagtctgtcccgtgccatg

SEQ ID NO: 97796 - DNA, 109 bp, Heterodera glycines
ggtgaactccctcctctaaagaagcccaaatatcgtgccgccgatgcgagaattcttcgacttttgcagggatacaataccatcaacaataacccggctaaccaaaatg

SEQ ID NO: 97797 - DNA, 377 bp, Heterodera glycines
cttttcacccggtcaattcctcccagtcgagggtcggtcgcttcattcccccgagtctcgagagcaccttgagccaataaatgtgccaattagtggcccatagtttgttgaatagaaaagcccaggggagaggaccgatgatatttggcactgttttgttgtgggattatggaaaatatcaatggaaagaaaccctttcatatggcacaaataaaacatttttattttgattcaattatttttattttggtgattataaaattgaaaaattaaattgtttataaaaatgcataataattcgcatgagatgacacctattccgtgctaaaattgcttcacaatcggctgctgatgaccatccatgaacgaagcaaatg

SEQ ID NO: 97798 - DNA, 185 bp, Heterodera glycines
ccccccccccccctcccatcagacaatgtttttttttttgaaatttcttgagacacccacaaatactcgaatttagtcattaacataatcagattttgttggctcggagtagcagcagtagcagcgtaagcaccgaaggagccgacaaattgcacaaaattggtccgccaacggcgcatgaaatg

SEQ ID NO: 97799 - DNA, 99 bp, Heterodera glycines
ggttgattgtgttcacgcctgatcagatcatccgtcgaatttcccgcaggcattttcatcgtcaagggcaaggaggacgcgctgtgcacgctgaacatg

SEQ ID NO: 97800 - DNA, 571 bp, Heterodera glycines
ttctgatcaccgcaatttgctgtgagcacataaaaccaaaatcatttaattccactggaaatcatcataaatcgagagtcttggggttaagcatttcttccgttctttgttttaactttcattcttcaaatttcgttttgatcatctctttggctatcatttcattgttttttttggccgtgaactttctcactttttcgtttttttttggtgtcatgacaactcgtacaatggcttaggctaggcctaagctttagcataggtttggtcctaagcattagactaagcttagacttgcttgggcctaggcttaggctttatttaaaaaattttattgtacgagttgcctttgtactcgggtcaatttctctctgactgtttcgaccccggccatttcagtcctgaaaatggctgccaaaattaattcttcatttggctattgtccataggtgtgatcatcgtcgcattggctttggactcctcgccaacacatcgctggtcctcccggcactcatccgcagcagtggcctcccgttcgtccgacctttttctgtcctcgtggccccacatg

SEQ ID NO: 97801 - DNA, 174 bp, Heterodera glycines
gctgtacaaccgaattgttggtgtgctattgcggtttcaccccaagtgctttcccttgagataagtccacttggatacagcactcctttcgttttgaacaaaaattcccctctcccctcaagctcagagcactacagtatattttacagtatctttccactacttacaggaatg

SEQ ID NO: 97802 - DNA, 955 bp, Heterodera glycines
gattagttgttgttttttctgccaaacaagcgccatggggaacgaatcggctgaacaaatacggagcgatttataaaaaaaaaaaattaaattttattaaataattcgaaatatccggcaatttttgtcccagcggtcaagcgattataaataaacccgatttaaaaaacaaagacatgaatttttcattttcaaaaattcatacaaaatttaatatagttttttaaaggaaggaagtatttttcaaatttaaagaaaattttttttattcatatgacactcttttcttttccttcttattatgaatttgtttttaaaaattatttccataatttcatttttaaaaattaaatttgggttggagtgaagttttttgcgggagttccgtgcgtgttttttctgcaaatttttgatgtttgtcccagtggcacttcagcaagcaacggaaaagagagaagcggacgaaacggcagcggagagcgaattcttttttttggcattttaccgcaatggcatttcgtccatttgccctctaattgggttcattaacactctttaatcgttcctcttttacactttcaattttattctctttttgttcatttcatttagtacattttctattaatgaatattatttttgttcgtttatttttataaaattaatttattcattcgctttttttatctctttttccatcagtggaatttgcacagtttttacaatttgtcatcgctaacacttttccgcttctatcaaaaaagcatccggcaaaaatgggctctgattttgctaatgagtcatttttcgtccattataatgaataaaataatggatgcaaaaaaataattatgttaattcaatactaaattatcgaaaataatgataaataaataaataatattggaattgaaaaatgaagaatttaaaaaatatacagtaatcacgataaatg

SEQ ID NO: 97803 - DNA, 667 bp, Heterodera glycines
agagtctagacttaatgtcccatattttcgagaaatttattttcacatatttgataaaatttaagtaatttataaaaagtagtaataaaaaaagtgagagcatcattatcaaaggtcgaacagcatatcgttttcatttattatttgttttattataacatacataatgccaaatttaaatttaaaaggggaaaaaatgcctaccgctgccgagtaacgactaacacgctggaaccaaaaagacggcggcattaattggacggaagttttttaggctcactacctaattagtaattactaaataaaaagaaacccaaagaagtataaaagcataagtgagtctttcataaatctacaaaaattattttcgttttttgctccatgttctattttgtgtaactttttgttatttttatgaaaatatgttttattagacacctatcccttctattttttacaggccttattttgacttgacttctctgttaaatttctatttaaatggataatgaaaaaaaaagacggacagttattcgacgtgtcaacgaaaccgcgcgtgaaaatgaaaaatggggtacttccgggtttagccagcccctgaaattttttttctacgctaattttttgatgctgatcacgaatctaacgtttatttttagctacaatg

SEQ ID NO: 97804 - DNA, 203 bp, Heterodera glycines
atatgattgccattgccgatttcgacacacttgtttttatttttaatgaatttttttacccatttctttctcctctttttgaaaattactgaaagttttaaattcacaattataaatgttttttcttgtttattgttcttctgtaaaattgttttttgctttgttttgtcgcgtcagaccacatcagttgcttatccgaaatg

SEQ ID NO: 97805 - DNA, 488 bp, Heterodera glycines
ccgatgatgaagattcgatcatttgtctgtcggacggttccccaaaagcgtgcacaatttaatggtgttgttgatcttttacgctgatattccacactttccgccctccctccccccggccaacaaaaaccacacaatttcctgagctctctctctgtacctgtaatttttatgtgcgattgattcgcttttgacctcctctcattgtcagccttttttctgcccccccccccgtttttttgtcttccaatcagtccgcagaatattatactatttttctcatcagatatgtcacacagccaagctttttttgtcactaattcactgaattttatttgagtttctataaaaaaaaataccgaggaatgctgtctaaattattcatttggacattgattaattaattgttatttaatttaattaataaaattttgtgttttcatcatttcatttggtttcacttttgacgccttgccaaaaagcagatg

SEQ ID NO: 97806 - DNA, 88 bp, Heterodera glycines
atagttagtccttttgttgaatttttagaaattctatccgtccaatcggcttttggaattttaatgagtaaatcaggaaccgtaaatg

SEQ ID NO: 97807 - DNA, 452 bp, Heterodera glycines
tgaaaatatgttaacacattgcactgaattttcaaaaaaaatttccggcggcgcctagcggcaccacctgacccccccccaaaaaaaattttttttttgaaaaaagcgcaccgcgaaaaaaacggtattaaaaagcaacaaaaaaaggtcgtaaatttcatggctgaaccatttcgcaaaaaatttggttgacccccccccccgccccctttttcatttgagtgtgcaaatttttcttcaaaaatcatcaaaatttgaaaaaaaatttaaattccattttacatttttcgggagggaaaagaacaataaatatgtttcattttaatagacattgatttttattggttctgtatgaaaatttgaaatttttttaatgggtaaaaaaattaaatatcaaatttacaccgttttacgcaccattttcacataccaccaaccaatccttgcagatg

SEQ ID NO: 97808 - DNA, 1003 bp, Heterodera glycines
cgataaatgtatttagaaattaaaaatggaaattttaatccttcaaatatttttctattatgtcatttttattttttctatttgtttttttactttagtttttctagaataaaaataataatccttcaactattttttttatttaatttaaataaatttttttatttatgagaaatttttcattaaaataaaaatggacaaaaataatttgtttataaaaattttttactttagctttttctataataaaaaagaataacaaaagcttttcgtcgaagctgccaattttaaaatgaaaatctcttgagataattggatgccattcttataattggggctgctgttgttacatttttggcacaaagtattataacgtgttcaaattccccagcgaggtttcattttcggcacaacggcaaacatttggttgcagtaaattatttaaacaatgcccttattattttgaattattacaattattattagaatagtagtagccacaaagataaataaaaaaatgacatcataatatttttaatatatttcttaatcgaattttgctgctagataatttcaaaatttaaattcatccattcttcttttaagtaaaaattttatatttaactcaatttcattttaattacttaatgtttttaattttacatatcattattttattttttaaaataatttttatttcaacaattcaaagtataaagatgataaacttaaaataaaaattgctaaagctgtcaaaaacagattctctttgcactaaaatatgcaaattgcctaaaaatgcctccagacacgcataaattttctaatggaaggcatttgacaaagcaaaaaattgaatttatgtgttaacaagctttttttatactaaaattgctagaataaattaatataaatatgttttttgctttatatttttaataatttaaaaatattttattttgaaaaataaatttgtaaatattaaaacaattttttagcaatg

SEQ ID NO: 97809 - DNA, 306 bp, Heterodera glycines
aggggaagatcaaagattaagatcgacccatgtgtgctctagaggcaattgcgttgtcgccgatttcctcacaaaggggccgtggtggcagaccatccaaaaaaataggcggtcatgatggctcaggcaggagcaaatataatgattccatgagggagagctagttaatggatcataggtgtgaatctatcacagatgtggttgtttttccatctgtcattgataaaataatcttcaccccagtgcaaatcaattttgcaatcacgtgaaattttacctgtagaattaggaagtgggcagcaaatg

SEQ ID NO: 97810 - DNA, 140 bp, Heterodera glycines
cctgttctgtgtgcgcatcccagcataaacaacattacggactttttgagcactgggcagcttggtgaagttgcaacgacaacaacaacaacaaccgcacttccgacaactgcggaggtgtcggcggcggcggcagaatg

SEQ ID NO: 97811 - DNA, 434 bp, Heterodera glycines
aaaatgcaaaaaagacgaaaattgatccttgtaaatgcatttcttttgcctatattcagaaaaatgaagaattaagtccccattgagtttgaaactttttttagcaatttatcaaagtttaaaaaaattaaaatgaaaattttttttctgtttttttctttgtgtaaattaaatgaatttttagcgcttcaaaatattggcgtggcatattgttgctcttaaattcaaagaagaaaaaatgttgaaaaaaatattttggaaaaaaattttaggttagggctggtgctaccttttgcaacctgctggaaaattgtaaaattaaaaattgattttcaaatttttaatgtgtaataatgaattgaattttttttcgttatattggattctattattgtatattaattggttggtcgatcatctgcatttttccaatg

SEQ ID NO: 97812 - DNA, 94 bp, Heterodera glycines
atatttattccaattaatcacaataaatatgaaaatgctaatttataaataaattttatgcaacaaatcaacagaatcagtcactggaacaatg

SEQ ID NO: 97813 - DNA, 1003 bp, Heterodera glycines
tattacttttgttaatgaaaaagtgaaaaaaaggaagcggcaaaaagcgacaaggcaacaagattttaaaataaaactgtattaaattatttaaagaataatgctgggcaaatggttgacctgggagggaatcgaaccctcgacctacgccggtgcagaatcggttaccccacatttgcgcctcagacattcgcgcctatgtccaaaaccgagttcaaaaatcatcaattattcaaaaagcagaattaatgctccaaataactagaagacttggatttcttctttctgtctatacatataaaaaaggaatactaatcacttgggtgaggattaatttacaacaaaatcccaaatatttaagaaaaagtgccaaaatacttaagaataaaaatatatcgacaaaaaaattcaaaatctcttctaaaatgcaaaaaaaaaaaaaaatttaaaatttatccgctgttgcagttgctacttaagtattttccgaggtaaaatttatacggttttcgacatgaatatttttgttaaaagaaaatgctcgtcaaaaataagcacattttaaagcgccattaaagcctaaatttgcatgttactgaacaaaaacaaatgttattaaaagaatgttcttcatatttttcaataatttaattatttcaatatttttgggtgaaaacattttacagatttagtccaaaaattggtcattttcgagatgtaacaacctaaataaaaaaaaattggtcaggcggtgccgacaggcgtagccgaggaaatttcgtgggttttagcctgttttgagaacagattttgcacccaaaaataagtaaaaaaaattcaaaatgccaaaatatttaccaaaatattataaaatgccaaatatttaacaaaatattttatttacgaaagccttaaaaatatattttttatatttactagcggggtcagcgccttcggcgcatcccccgctaggcagtacgattgtgttatagaattatgaatg

SEQ ID NO: 97814 - DNA, 170 bp, Heterodera glycines
ggaatggaccggggaagaaaagcttattcaacaattttcttccagtgatgttgatgaaaaggtcaatgatcagaagcagaagaatgccattccaaattcaaaagacaaaagtaaaacacaacaaatatttgaacagaaggcggtgatcaatttgatatttggacaaaatg

SEQ ID NO: 97815 - DNA, 223 bp, Heterodera glycines
gggcagttgaaaggtatggattaattgttgactttatgatgaaaattccgttaagatttattaatcgataattttatttgacccccccccccaaaaaaaaggcaaaacctattgtaaggactgtacacaaataatcaataaacccaagcctattgcatatatcatatccgaagctttaagtaaattagcaaaaaactccaattcattaaattgtaaaaaaatg

SEQ ID NO: 97816 - DNA, 212 bp, Heterodera glycines
agttagtttcattcgaaatattcgaataattgagttatcaatccagaaaaagggtgtaccttattatagctctgcgcttataatccgattaaaaccgaactaagaattactattaatggatatgttacttttcagggcaaatcaatttttttctgcatttttccataaaattgttaagatcaacaaaactcttccctatttggtctcaaatg

SEQ ID NO: 97817 - DNA, 489 bp, Heterodera glycines
gaaaaattttttgaaatttgagtgctatttcatagcagattttcaattaaaatcggtaaaaacatgattaaaaaatcggtaaaataaagtgcggtcatgcgggatcgaacattaatgcacagaacaaaacaaacctgctgttttcaccactaaactaaaatacttaaataataaaacttattatttctttccaaaaaagtcattcttaagggtgtaaatattttagtcttttttgtaaaatattgctctgacgaaaccgaaaacgaaacgaaaaaactttagtggacgaaaacgaaacacgaaaacgaaactcaaaaagtaccgaaaatttaggacgaaacgaaaacgacacgaaatttcgtccagccctgattccaacccacaacattttcaattgatttcgaagccgccgtttccaatgccatacaaaatgttttcaatgggaattgcgccataaacttttgtttttttcattttgtgcgtaacatg

SEQ ID NO: 97818 - DNA, 416 bp, Heterodera glycines
atttaaaatattttattttaattataatatgtttatttttaataatttttaattaaaaattatttaaattatttttattgaaattgataagttaaaaaattctatttgataaaatcaattttaaagatttttattacaataaaagaaatttttcgtttaaactttaataatactttattgaaattgtatgttaaaataaatataattaatattttaaacaaatttaaaaaattttatttaaaaaaacactcgaaaaaatataatgcaaataaaaatttatatttttctatatatacaaaaattagtaattaaattaaattatttttttttacaaataatatttaatttaattacctttttaaaagtaaaaaataaatttttccatcataaaaattaatttcttaatccaccaaatg

SEQ ID NO: 97819 - DNA, 1003 bp, Heterodera glycines
cgcccttttgtacgtcattaaatgaggaggaatggcgtaaaatcagtgctttggcaggcggcgaagtgtaaaaaatgcacaaaattacaccgaagcggcaaattaagcttcacaccaattcgaggaaatggtggcaaaaacggtggagggatggacggcaccgcggtgaaggtcgaaaatagaaaaaggcacagaggccgaatgaccgagttcttgagtttgaccttttcaatttaaattttggtacggtctcgagaccaattagcacacggaatgaggaagaagagaacgcggaataaagtgtaattcatacagtcataccacaattgtacctttaaacataatgcgagtgaagtcaagcagtaacgaaaaaattcatttgtcagcgaaattggttgtgcttttttgttaataccgtaattagaaaagaacactttaaacatagaataatttatacaggctaacaagttcaaggaaacttttcgccattttttttctaattgaaatcatttagtctgcataaaaccattgacggtccaaggatttaggctgttcgtggctttgggcggggtaccagctggaaaaatgtcattcagccaattttccgcttttagtcattttcttaatagattttaccccgataaatatactgccactatagatggaagcgctttaatagatatcataagatagatttgatcttttctcgctgcgcctactaatcaaatcatatcacgctatagtgatatactgtatgatttaaaattggctaattataaacgccaatctatgtttttttcactgttttaaaccctttgaattttattaaaaaccaaagagaaaccaaaagaggggagcttcttgttcgagtttagtttagggattaggaatttgtctcatttcatgtcagatccatgatctaatttgtcccattgtataaatccaatgtagtcaattttctaaatccataattatttttgtcactttttgaggtttgaaaatg

SEQ ID NO: 97820 - DNA, 321 bp, Heterodera glycines
cgaattttctcactgtacaaactaaagcactaattgcttcctttactttctcacatttcgctttcattttaaaaatttctttcacaacgcatttttaacaaatctcgccaaattcttatgtttcacattattaattatcatttctcattcacttaattcatcatctaatttcacatgtgccgtatttataataaaattgtgtttactttttgctttttctagtttatgttgcatagagaaatgcgtaaaaacggtttacttttccccgtaaattattttaatttcttttttattgtatttatttattattttttataaatg

SEQ ID NO: 97821 - DNA, 666 bp, Heterodera glycines
aaaatttaaaaaaaataaatttattttatttttcaaatttcaagttaaggggattttcctttttccaaggcttttgtcccaatttattttccctttcgtcgtagtaattgtcgttaccatttcataattatcaaactccgctcgcgttatgtgataatcggtgggcagaagcaaattttgaaaaataaacagacaaaaaataaaaatgcaaatttgtaagtgtaaatggacttgaaaacttatcttaaacacattttaatgacatagaaattattgtaagttaccggaaaaataagtcaataatacagtatttctaaattaaagtactgtagcatttataaaaggtcgaaattgtttaaaaacttcgttctgaattttttcaattaagtttctttaaagtctaaagaaatttgaaatttacccaatccctaaaaaaattatactgtaaataggttgttgtaagcttgtttacataccaatcaagatataagtattatactaccgggtctcgttttttccaagatattctgattcactgacccattttccagtgacgcactgtgaaaacgctaattgatacatttagtaaacaaattaactaaaaattccaattttcaaattttaattacaacaaaactttaaggcgagacgggccccggcgaaatg

SEQ ID NO: 97822 - DNA, 1003 bp, Heterodera glycines
gaaatcggaattctgacactaaaaatgtcggaaatcggaattccggccccaaaagaaatcggaattccgacccaaaaatgtcggaaatcggaagtcggaattccgttccatccctggcacaggtccaagcaaatggcacaatttaaatgtaaatttaatcaattaagggattttagttaaattcaacacaaaaaattatgcagcagccagcatttggagtgatttgcataaatttttgtttttcttctaagaaatgctcccccataacctataaaaatgtccgtccgattttggggctcgcacttttgcgcatcagccgaagcaaatttaagaaaacgcgttcaattggcggtgcttttgaacgagtgatgagcaatgcaaagaaatgggaaatttgagtaaatggcgaaatttggtaaaacgcgcggcggtgaaacggacgaaattttggggaggggaggaaaaagggggacagctgagagcggatgtttgcgcaagagaattattataggaaagaacagagaaccaatttagcagaaaaacaaatttaattaaatttttaaaaatatgcaaaaaaacaaagaaaaaatttagtcgaatttgcaaaatctttagcatgttttaaaaattcattaataaaagttttaattttgttcttcgttttaaagcagccaaaaaccaaaaaattagagactattttttacaaaatttttaataatgcattttgaaagttttaaattcggcatcacaaaatataaatttttcttttttttttggggggtggggactgtgccatatttttttttctttgccaatttcacactaatttgaatagtcacactgttggacattggtggggcattaaaattcaatttcaaaatttaaattctatttcgaaagtcggctaatttaataaatgcgcactgctttattatccgcaccaattttgagtgtatggataaataaataaacgaataaattgcgaattttgggcagcaaaatg

SEQ ID NO: 97823 - DNA, 233 bp, Heterodera glycines
atttttgggtatgttagccttagcgctgtttggcccctttccgtcatcagaggtcggacggaggatgacgatagataaaatgtgaatgggaaaaatgcatttatttgtccactgttgtgagacgacgccggcggggagaaagggcgaagaattaaagaaaagcaaaaacggagacagatcgatttggcttggattttccatcggaaaattcaaaattttttcagcaaaaaatg

SEQ ID NO: 97824 - DNA, 441 bp, Heterodera glycines
  unsure (1)..(441): unsure at all n locations
tttgtattgccaatctgatcgcgccctcctctccccgtcttcctctgccgcttccttttccttcatttccttatccgttcttcccacccttcccttttctcttcctttcctctccttncacctccccttcttcttcctcttgttcttccttctcttcttcttcctcctcttccttcctgtcttttcctcttttccttttcgtcccattcgatgtccgtctgtctcttttccttttccaaagggaataactcccgggggaacttaactttctttgttcgaccccagtgaatgaatgttagcgaagtgaaaggaaaggcgacaaaaaaagatattaaaggcaaaaaaacaatgaaaagcaaagggcaaaaaagaaaagattaaaaaagaaataaattaggaggaaaaaaattaggaataaacgggaaaaagcgaattgaaatg

SEQ ID NO: 97825 - DNA, 650 bp, Heterodera glycines
aggctcgccaagagggtgcgcattgggtcgcactgtatattccgcgtttgaacaccatatggtattttgatagtttggcccttcctgttccttttaacgtacagaaatttctgtcccacttccctcatgtcagtaaaaacaaaatggcatttcaatctcccacctcagacgtttgtgggcactattgcatattttttatttatttggcttcaaccggaatgttatatgatgaaattttgaaacaactgaaattgtattgtgtggattataattgtgacattgcaattaaaaactacgtgaataaaattttgttttatcttcttgggggagccttcaattagtaaaggtggatgattccgaatcatgatttaaaaatataccagctagtgccagtctctgggcattggggtcaaaaggcgtcagctgacacatttctcctgtgtctatctcattttgatgcgtcagctgtctagcattttagtccttaatttattagagaaaaagaggcattgagtatcgtaaaaagagaggtattgagtatcgaaacgattcattcataattttatggaaattactgctagtacggggtataaattaagtgaaaaattcaatacaacctcatttattggccaatcccaaaaatcatcatg

SEQ ID NO: 97826 - DNA, 218 bp, Heterodera glycines
tatataataaattttaaaaataatttttatcgtcgcaaatgtcgttttgactgggcgccgtaaatgtcgaccaacagttaatttatgcggtgagaatgtgaactttgcgcgccttggttttttaaatatttatagaaactaaaaaataaaatgtattttttctcgccttattgatcacgaatcaaaaaaattttgtcattaaaattaattccaaaatg

SEQ ID NO: 97827 - DNA, 521 bp, Heterodera glycines
ggaggggaccggcggaaaggaggggacggggcagcacttggaggaagaggcacaacttcggcaaattggcccaacaaccgacacaacgccaagagatgccgaacagacggagatgagttttgttggcaaagtggacacattggactagaagattgggccggaggcgaagcggctgcaaattctgttggaactcacgcacaaccggcacaacagggcgaatctgaacgcaaaacagctgcacgtggtcaatgaaatgttcaacttgttcatgtacaatcacgcatttgttgtttgcctttcattcattcgttattattctttggcaggtcgcggtgtcttaaagttgtggccacaaacagccaattgctgaacacgctggccaacccggaaccgttgctgccaaagaggaaggccaaccaacagggcacggaaaaggggggcagcattgctagaatggcccaacaattgtccgtttggctcagagtgtctgccaaatacgtcgacgaattgccccctcaatg

SEQ ID NO: 97828 - DNA, 410 bp, Heterodera glycines
tctttaattataaattaattattttaaaactgaattagcattcccgttatattttattatctttttgttaataatttgcagaagaaatttctctctgtgcagaattatggcaaagatgggacgcttaaaattcattgtgtattgaatgcgattaaaaagaaaattaaattactcatctaatttataaaacaaataaaattggcttttgcacaaatcaacaaattttttgacttttcgtccgctccattccctatcaaatttgttcgataaaaaatgtgaaacacaggccaaattggcgagtgatgtgttgctgctatataattggaggaagagccaaattccctcacataattaattcgctaattaattgctcatttgtcagcccatcccaaaaactgataaaaaaaatg

SEQ ID NO: 97829 - DNA, 298 bp, Heterodera glycines
aaaacagagtcatgggtcattatttaagaaatacgcattgatattatgctgcagattatgtgttaatgttttgtttctagaattatatgtatatttttgctttaaaatgcgacaaaaataaaacgcagaaattagtaatggtcgatttgacattctttctgctttatctcataatgcaaatgatttattggaacactgagacaggtgcccttttcattagatttttttgattatttattattttttttaagttgagaccaaagcattcttctgttcgacgtaaagggatgtgagaatg

SEQ ID NO: 97830 - DNA, 150 bp, Heterodera glycines
ttaccgttagctaaacattaataatgataattcatattaagacttatggatctttcaaagacattttaaaatttaacctaaaacatttacacttttactaatttgtttagctactgtattaacatcaaagtgtaaagcgtattcaaaatg

SEQ ID NO: 97831 - DNA, 646 bp, Heterodera glycines
tgtgaaataaaatggcgattgtgcacagccctccgtttttacgcaagcgcttttgtgaggtataaaatttctcaaaaaaagagatagccatttttctgggatagagtataaatttaaaaattccctcaaaaataaaaggtaaattgcgcaccgccctccctatcatgctcgagagcatttgtatgtgtataaaatttatcaaaaaaagagatagccatttttctgggataacctctaaatataaaaatcctctgtgaaataaaatggcgattgtgcacagccctccgtctcatacgcaagcgcttttgtgaggtataaaatttctcaaaaaaagagatagccatttttctgggatagagtataaatttaaaaattccctcaaaaataaaaggtctattgcgcaccgccctccctatcatgctcgagagcatttgtatgtgtataaaatttatcaaaaaaagagatagccatttttctgggatagagtataaatttaaaaattccctcaaaaataaaaggtctattgcgcaccgccctccctatcatgctcgagagcatttgtatgtgtataaaatttatcaaaaaaagagatagccatttttctgggataacctctaaatataaaaatcctctgtgaaataaaatg

SEQ ID NO: 97832 - DNA, 353 bp, Heterodera glycines
cttgaattggctctaaatatttaaaatttcaccagtttttcttttttcatttttttgacttctctaaacattatttttttttttttggcctatttaatcccttgcactttttggcacaatcgtcgcttggccaaaataaaaaaatggtcttttttggtggtctcccctttgggccagaaataacaagttgcccccgggggaatctgtttattccaccagcgccttctgaacttttcccgatgcttttgacatcggtcgctgacacccccgcataaaaaagtgaaaaatgggggggggggagggaagggacggcgaacaccgaattttggcactttttgaggaacggaaaaatg

SEQ ID NO: 97833 - DNA, 156 bp, Heterodera glycines
tttcgattttcccctatacttaggcacaatttcgaacgccgcttcccgccacctccgcccgtgttcaacggttcggtgcccattgaggagacagtcaccctcagctgcgtctcacccaccagtgccgacgttgccgtcgtttttcaatccggcatg

SEQ ID NO: 97834 - DNA, 746 bp, Heterodera glycines
cgcgaagcggccgaatgtcccccaaaaatttaaaaaaacgggcgcgaagcgcccgtcctgaggccgcgaagcgtccgaatgttcccacaaaattaaaaaacgggcgcgaagcgcccgtcctgaggacgcgaagcggccgaatgttcccaaaaaattaaaaaacagggcgcgaagcgcccgtcctgaggccgcgaagcggccgaatgttcttaacaaaattaaaaaacgggcgagaagcgcccgtcctgaggcagcgaagcggccgaatgtcaccaaaaaattaaaaaacgggcgcgaagcgcccgtcctgaggccgcgaagcggccgaatgtcccccaaaaaattaaaaaacgggcgcgaagcgcctgtcctgaggccgcgaagcggccgaatgtcccccaaaaattaaaaaacgggcgcgaagcgcccgtcctgaggccgcgaagcggccgaatgtcccccaaaaaattaaaaaacgggcgcgaagcggccgaatgttatcaacaaaattaaaaaacgggcgcgaagcgcccgtcctgaggccgcaaagcggccgaatgttcccacaaaattaaaaacgtgcgcgaagcgcccgtcctgaggccgcgaagcggccgaacgttcccacaaaattaaaaaacgtgcgcgaagcgcccgtcctgaggccgcgaagcggcccaatgtcctcaaaaaaattaaaaaacgggcgcgaagcgcccgtcctgaggccgcgaagcggcccaatg

SEQ ID NO: 97835 - DNA, 227 bp, Heterodera glycines
atgtctgggactcaaatctccggcattccagacactgtggactcaacccaccaactttcaatggcattccaatctctgggactcaacccaccagcagcatttcaatctctgagactcaacccaccagcatttcaatctctgggactcaacacaccagcatttcaatctctgggactcaaatctccggcattccagacactgggactcaacccaccagcatttcaatg

SEQ ID NO: 97836 - DNA, 325 bp, Heterodera glycines
tttcttttaccttcttctttttcaaactatttcttttcatctctttttcttttcaatctctcctcacagcaaatacaaaacgccacattcaaaccatgttacatagccacaaacaatcaactttattatataagattaggtagcagctacggctctaatgcagtttacgcgtccaatcgacttttacgcgtagcactaccacttaaaaaaagatatttaaaaaaatctttccttcgttgagtcaatagcaacccgtaaaaaagcaactcttacaataaaataagcctaagtaataattaccaaattaacttaagagtattaaatg

SEQ ID NO: 97837 - DNA, 94 bp, Heterodera glycines
tctccgcctactgggaccagttcccgtcgctggcacggcaaatacaaatttggcatcatgtccgagtcggttatcaaaacaaaatgacacaatg

SEQ ID NO: 97838 - DNA, 1003 bp, Heterodera glycines
agaaagaattctacataaattgaacaattatttataaatgacataaagaataattattcaccatataaaaaagcacaaattattatatttattaaaaaattaaagatgtacgaaaaagagtagggttaagccccgacccccgacccgagacgttatttggacctattccccgacccgacaacgaaattagccaaaattgtacgaaattgaagtttgtccccttccgtttagttgagaaataatttgttttatggggcagaataacggtgaaagaaaaaaggaaaatctttgcttggttattcttaaaaataaaattttttaaaattcacagcatcctaataaaagcttaatcgttacattaataagataattgaatttcctgggttttttacattgtcacattactttttttccaaaatcctaaattttataatttattttactaattaattgtcattttgctttttacaatatttaaagccaatatttgctgttaatcatcccaaccgttctgtttcctaaaccctttaattcacaaatgtcacattaacaatccctccatttaaaatggattacgcatttatcggttggcaatctttgaaataaacaaaatgttaaaacattcatgaaatttgctataaaaatgagcaatgtgtcacaatgaaagagcaaaatttaacattcaataaaagataaattaaataaattttattataaaataattttcaaattaatttttcccctttttacccaatgaaaattaatacaataaagtaattgggttgtccgtttggttttcggggcgactgtaataatttcgggagggtttcgggattcgcatattcgaaagtaaggaaattttaaatttgaatttagatgctatttttgacgattcttctatttctttttttcttctccaatgctgaacaattaacgtttgttggcggacattcattcaatggtttgtttctcaaatgaatcgtttaatttatttttagaaatg

SEQ ID NO: 97839 - DNA, 1003 bp, Heterodera glycines
aactctcggcatgtcctcaccacacaaggacgtgcgtacgcaaagacagagaaagagagagactgggagcaaatgagggaaaaagggagcgaatatttcttttctggggattgcgattggaatggggtgagaaatgaacttaacaaatgaagagcaaagaaaatttcataaaaagtgcaacgaaagtggggagggaaagttcagttataaatcatttgtttgaaaaggaacatgaatggacagggagaagcggctcatccgaaaaactggaaggaatttgctttacaattttaggtagattcacaaaagtgattgagtaaagaaaaaatttggatttataaactacaaaaaaagaacactgtgggtacactgcactgagaaaagaaaaatccagaacttttctttttggcattatgttcatgaatttaaagtggattctgcggggtccactgcgtttcggcgctcccgtttcggcgccagcatgtttttggctataacttttttctttgtaaaccaaatccaacattgttggtgtcgttcgaaagcttaatctatttagaagctttttctaagctattgctttgcgattagacaattatcaaaacagttatgcatgaaaattgcgaaaagtcgaaatttttgaagttttttcttaataaaatttttacaggcttgaaaaacttttcgtttttgataaggctaatagagcatgttaagagctttcgaatgataccaaaattgttggatttggatgccaaagaaaaaagcttaagtggaaaaacgagctggcgccgaaacgcgtgggtccctcacttaccacaccatcccgaaaaagagctcctgtaaaggtttttagcaactggcaaaaaatttgaaatcttggtatcattcgaaagctattgatgagaagaagctttttcggcgctagttacaagaaggacctttttgaatttttcttgtaactagcgccgctttttctaagcaactgctaaccgatttgatg

SEQ ID NO: 97840 - DNA, 1003 bp, Heterodera glycines
tgcatttgcctaaaaaatccctatttatcacatatatggtagggggtagggatagcacgtaattccgtttcgaaaaaattttgggcttcggaactccaattttcaaaaatttttgtggtctcggaatcccttctctagtagggagggaaacggggactggcgcccagttgattggcgcccagtcggcggcgcccagttgatctggcgcccagttggcgtcgcccagtcggcgtcgcccagttggcggcgcccagtcgacccccaccgagaatagtttgaccccataaaaattttttttctgttatgaaaagactaatccggggtttttgcgtttctgatcatgaatacgatcactttgcaaaattccttggtcttatcattgatttgaaaaccatagattttcggaattcgatcaaatgttcctacctaattatttactggtaataaatatcgtaccaggtgttttcgacagtgattgatttcgacagtataaaatttttaaattatttttttaaaattatttttttatgtatatgcacatatgaattaattttaaatattattttcatatacataaaaaatttataagaaatttaatttaaataaataaataaataatattaaacacaactaaagttgtatggttattttttgtaaaaatataaaatattcttatcgcgttaactttttctgcgcaaacatctcctgctgctgtgctgttctcgacaaacaatttcctagataagattttcgagtaaagttataatatgaatgacctgtggtcattcttcgtccatattatcattctcctcaatccatagttccatttttactcaattttttcttagtcaaataatggctttattgcgttttaatgcggctaaatcatcgcgtgggaaaatcctgctaacaaatgccgggtttgagtatgcatttgaggtccaacaaactaatgtcaaaaatctgatcagtggttttaaggctttatctaaggtcaaagatg

SEQ ID NO: 97841 - DNA, 292 bp, Heterodera glycines
ggtattagtctcgggcctcgggaaatttggctctattgcacagtttacacgaccataaaaaaagataataaaatatttgacaacattaatgtaccttattttttgtagatttattatcaaaaatgttcagaaaaacccaaattttttcataactttttgctaataataaataaaaaatgaaaatttattatttcaatagtcgtcgaaaataaatttttttgaaaaataattttaatgagcacaattaaataataaaaaaataaaaatctaaggtaatgttggacaaacgatg

SEQ ID NO: 97842 - DNA, 409 bp, Heterodera glycines
atctgatcaacttggtgttgctaccttttttgatcagcatccaaagttatgcatacctgaatttttttaggcatttttattgctagaaaatatgaattttctgaagtgttcctaaacatatgaccaccccgaaatttgactatatggaagaaaacacaaatttttacaaaaaggaataaagcaaacgagaaatgtgtggtaccaatggatagcccagaaaaaatgctacaaaatgcattaaaaagattattgattatttttctttcaatccagagaagcaatattttcaaagaatttatttaaaaaaagaggtgttcctaaacatatgaccatgactgtattaatgttataaaagcacagttacctcttaaatacattagaggccgctcttagttaagattaaaaaatg

SEQ ID NO: 97843 - DNA, 1003 bp, Heterodera glycines
aaaatgaattagtcggcaatatcttaaattaattgactttaatacattttataagtagggctgggaatttacctaattcacaaaaaagtcacaaaatgcaaaattcaatcgtacgtcaatcaatttataaaaaaattaattttgtaacaatttctaaaaggtaaatttccaaatttgtcatagaaaaatgatttaaaatgggaaatgaaatgggggaaattttaaagcagcatttttgcctgaaagatccgacaaagttaggcgattgtttcaattctcggattcttctcaacaattgcaaagttttttccggattcttgaaattcagggatttcaattttggctgagggaatctgataaaattgggcgattttaattcccttgctcttcttaacacgaaaaattctgccagattaaagccatttaaggccactttaaccgtagaacaaaaaggcagttggcctccttttaagagaagcgaaaattagtatttatttcatatttcagttgattccttccttttttccaaatatttttgatttctctagcccacactatttctccattttctttctatctgctcacaactaaaattgtcaccataaaaaatcgatatattggtgggagaaaagcctgcagagatgaagacagaaaagaaataagtgatatgtctgtttacaccaggctactttaattaaattattgttttttttaattgattgaatttttgggaatgcgtaaaaatttttagtgaaaattttgtcagcgaggagttcgattaacactttcaatgccatttgttgtgcacaatattcaaattcaagcagttcaaacgaaatgccaaattaggtaattcaaaaatttatcgcgaaattgatgtgctgaagaaattcagacatccgaacattgttcgactttatcaggtgacaaattgaggacaattattactaattgattgataattaattaattgcttaattttgtaattcaattgaaggtgatg

SEQ ID NO: 97844 - DNA, 177 bp, Heterodera glycines
agtttatgcatgggagacatgtggttcagcatgggaatgaggagaaaatgcgcttgtaatcagtcgtaaaaggaaattgagtttaatggaaatgtgggcagtgatgatgtaaggcaaaatgagaagggcaaacattcggtaatgagaaatgcaataaatatacagcagcacacaatg

SEQ ID NO: 97845 - DNA, 599 bp, Heterodera glycines
ttgaaaatttttacaatttggatgcaattactaacagattttgcctaacatacgacaaaattttgtgatttcagttgagagaactaagtttcgagtgaggggaactatgaaattttgaatattttttagcagatattcaccaaaaaatcctattttatgtcaaatttagaaacttttttgaatccatttttaaattaaaggacaattgcggttccgcctaatttgaaaatttagaattgaaattcgttaatgaattttatttaaaaataaccaatttacgggtttatatgaattttaaaaatggtgatttggctagtacggtgtcgatatggcaccgccgggtgaaaagaaattaagttatttttaatagaaaaaaattcattttaagttgcgaagttcatcaaccaacgggggcgagtacaccttgcagaaatagttgaacaaagcaaaaatttaatttcattggagcctttgtgaattttttttttataaattttgatttttatttaattttatttttaactgtttaattcattataattatttatgtgctcttctaaattaatttatcgcaatacaagtttttcataaaacaaatg

SEQ ID NO: 97846 - DNA, 450 bp, Heterodera glycines
attatatttattaaaaggaatatgttttaattgattgaaaatggttgcttcatcgattgatagtgatcaatcaataattaattagtgatgtattaaacattggtgctcgataagcttgccgattcgctagcttattatcgattgatcagtaacgcgatcaataattgattgacaaactaattggattggtcggttgatcgtttttgatcaataggttaaaaaatgcttatccttttttttgtgtctgtctgtctgtctgtgtatgtctgtgcttttctctctctcacactgtttttttttcttttaccgcttttgctattttcgcactttctttttccacgcttttccgcactgtaatctctttcaatgtttaaagtttttttttaacatttcgccaagaaattatatttttaaaatttattctctcgcatcttcagggcaagcacaatg

SEQ ID NO: 97847 - DNA, 555 bp, Heterodera glycines
  unsure (1)..(555): unsure at all n locations
gatttaatggtatattaaaggatttaatagtatattaaagaatagttattaatactanttcctttaaataataaaacaaaaggtataaaaatggttattaaaattaaaaaattaataatcttntaataaaatgttctaattgaactattaattaatttttcatttttaaggagatgaaaatttataaaaacaactccnatattttaatatattaatatgaatataataaaattatttttaattcttcaagcaaagaaataaaattattagatcttaattaacgggtcatctaattttttaattatattaatattatctttttcattaagtttactaataatatttgtttgattgtatatcacaatttgtaaattatattcatcacaagatcttcttataattatatccattgaaataaagtcgtctgaataatatttttaatttgtttgttaataaatggaatagtttcaaaatttcaaactttaactattttattatcaataatttgatcaataaaaattatttcatgtttaggtcttaaacaaggacgaaatg

SEQ ID NO: 97848 - DNA, 315 bp, Heterodera glycines
tgtgccaacatcgcaaccagttgttcgctgtcaccctgctccgggtgaatctcgatcacaaccctaatgttatttataatttaaaaaaatatataatttaaaatttacgggattttgtcccaggagcttgtggcccaaatttctttgctgtcgggcgcggaagggtccaataatttgaaattgacgactttcacatggggtaaatcggtaaaaaatgcaccgcgcagcgcgtcataaatcctttttgagactctggtttaattacccaagtttgagataaaaacacattctctataaaatcgattatcgacaatg

SEQ ID NO: 97849 - DNA, 626 bp, Heterodera glycines
ttttttctttgttatccaaatccaacaatcttcgtatcgttcgaaagctcttaacatgctttattagccttattaaaaaacaaaaaaaaaataattggtatttttccaaaaaaaacccctaacagaacggccccatcaggtaaaatggcctttttgacctctaatgaccggaaaatttttcgaaaaaggcattttttagcaaaattttatcggaaatattaattatatttaattaattttttttaaatgagttcatttttgtcaaaaaataagcaaaaaagcaaaagtttctcttttcaggtcgatttttcgctaaaatgagtaaattttactgtatcgtgttttttcttctaaattggtttctaataccatatatgcaatttttaaaactttactttgcttttagcgaatttgaagaattttgaattacatccatcaatttgggaaaatttatgtccacttttttgcatttttatgtccatatttcgcaagttttgatccacattttatggccatatttcacgatttatatccatatttttcagccctaaccatgaatatatttaatttatacaattcaaagcgatctttcactaagaaattatattttttcaggcggaccgatg

SEQ ID NO: 97850 - DNA, 167 bp, Heterodera glycines
tttaattttcagaaaattttacctccacggcactgctcagctggggctgtagcgaggaagcggacaaaaatggctgcgaagaattcttcgtgaacgcgtccaacaccgcgctgcactcgacgaagcagcgctgcgagtgccaatttggggaccagggcaaagacatg

SEQ ID NO: 97851 - DNA, 601 bp, Heterodera glycines
cctgatcaagaatgtttaacaccgggggcacattgctgtgtcggaaatgttgtcgatcccgtggtcgccgcacatcagcagtgcaaatcagttacgtgcattcccattccaaatcgtccgcaacagccattttacgaactgctatcgacccgtgtttctatatgcatattttcggtaatggttacttttactggtcccataaaaaaggaataaatcaggcggttttttacgattgtttgtcccactcgggggttacttgggccgctgatcacgaatatgacatcagatctgtcatgtgacttcatctaatccgtgatttttcatcaagtctaataagatttttcaaaaagtaatttttcattttttaaattatagttataaaaatcttttatggacatatcggggtcgctgggaaagataaatcggaagcaaaaataaaaaaaggaaccaaaccgaaagcgctcatgaatatgacatccatttcgaccagtttctaaactcggaccagaattcgaacaaaaaatcggaacttcgcatttcaacgaatttcgaatttttcgtctaaaaaatgcttatatgatcttttattacaggaaagatg

SEQ ID NO: 97852 - DNA, 716 bp, Heterodera glycines
tttgcggatcaaaaggctaatcgaaagtgatttattcaaaaccatttcaatagcatattataatatttccatttaatgatttccaccatttttcctacaaacagatgacgaaccaaagcctgaaataaagcagatgaaagagcagagtttgtggaatgtaattgcatacggcgagaacatttccgagtgtcgtcggaaactgatcatttcacattttggagaggcaaaaccgataatttaaaaattaaatatccaaaaaatattatatattctccatcattttttaagaattattgtaaagctttcttctcatcaaaacattgcatgccttcccttttttcagacttatgaccgggaaaattgcattttaacgccagccccttgcacaatttgcgcatacgccgcgacccatggccaacttccggcaaaacttttcgatttcaccaaagaagcggtcgccgtgttggagtccattcggttcatcaacaattccggcgtcgcatacttggccgaattgttcagagggcaattgggcaaaaaggcagtgaagcgaaaagtacggaagcgcaagcaatccaccgacaataaatgaccatgtctttaggtggatgacaatggacacggacgactgccaattttcgcaatgggcagagggttgagtgaacaggtggaaaattcgttttcttaccgccacaatcaaaaaaaatattcaaatg

SEQ ID NO: 97853 - DNA, 569 bp, Heterodera glycines
ttaaattatttttaaaatccggtctctctaataataatgcaaaatttgcaacaacaacaaaatttcaaaaattaatttgtttcatttttgcctttcctcctcctttgctgttgttgcatttgaatttaaatccttccgccggtggcacggcgcactttggcattttaatgccccaccagtgccgacagcaaacattaacatgcttaaaaggcttattagtctaaggtcacttaagccttattttcctgctgttggcatcattttgccatcagaaatttagtgagaatatgattcactttcactttcgttgtttaactgctgctttggattcaataatttgccactatttaataaatattatagcattttgagaccggcacgattgggtttttcgggttcggtttttattcaatattttttaattttcattttctttataatgctaaaccccacagttattcctaattatgttattaggacaatgttgttttcgataattaactttaccgttggcacaaaatggactttctttttagagaattccattgtcgagagtctttactaaaatg

SEQ ID NO: 97854 - DNA, 129 bp, Heterodera glycines
gttcaattggataccatttataatcaagttggttgaaataaaatttgacaatttttggatgaatttttattgaggaaaatattttagggacgaattttgaagattttttaatttcagataatttcgatg

SEQ ID NO: 97855 - DNA, 1003 bp, Heterodera glycines
tcataaaaaattctaattgaagcagaaattttttgaaaaaataatagaattaatatttttaatagggttaaattttaaaattttaaatcaatttaaaaagttaaatgcgaagtaaacaaatatatttgtgtgtatttggttgaaaaattattcagtgatatttaactttgacagcaatatcgtgacacatttttttcaaacttttgaaacttggggggggggggtatgggtccggtggtgccgttaggcggcttggggaaatttttttgaaaatttagttgtgaatgacaaaaaattggatttttaaacatagcggaacacatgggatgtttttgagaacgccgctctttttcagccccggtaccgttcccctgctttaaaaaaccgaaaatcggttaaattttacttaaaaatattaaatataaagaaatttaaaacagatgctaaataaatatatttaatataaattatttaaaataaagtgaaaactaaagtaagaattattattatttttcatcatttcaacctataacaaaatgaattaaaaaattaaataatttttaaaagagcaaagcaaataataaggccaacaagttagccagtcatcggattcaatttaatttgtttaatgaaaaattgttattgaaagggagctgagttaataaaaatgaaataaactaaataatgcagtaaaaagttagaagaagagaggaatattaatgcattctagaaaggctaaataaacaagaccacccaaatggtaaggattggatgcactatataagtaattactcggatagaacaaatatgataatcatttaacgccgaaatgagcgccgtcttcattttactgcttgtgtaaaaatttttattaattgataaataaaattaattaattaagtgcgttgaatttctgtgcaacggctcagcaagatgctgtgcctgctttggtggatgtatgaatgttattttaattaatgcaaaataattactaaatcagatg

SEQ ID NO: 97856 - DNA, 473 bp, Heterodera glycines
atgattatttttgatttggactgtttcgctagttttgccatccctaatactcaaacataacagtgcacccgattcaggagttggggctttttttaacctattttggctaatactaattcaagaatcttttgggaaatcctttttaaatgccaatatttttgaattttctttttcagcagaatggacggagggaatagcagcacaaaacgacaacaccaacacgaattggatgacagaagaaaaaatgaaaatttcctattttaatcaatattttttgcaccttttcatttggcaaataaataaattactattttttgcaatttcctttttcattcatttgctaataaatgatgtagtccaacatttttgtgatttcctctaatttctgtttctttttgcgatcaaacaaatatatgtctccagtttttaatgaaattcaggcctaaaaggcattgttggcaacaaaagtgatg

SEQ ID NO: 97857 - DNA, 347 bp, Heterodera glycines
atacaatttgtatttgtgcatatgcattttatttatacattttaaaatttgatattatgtatatgctgaaatcgttcctctcattaccgaaaaaatttaaaaaaatcttttagaatttaaaaaaaaaatttttttttgaaaatttgtctttttattagaaagttaataactttgaaagcaaaatttttctggtgagatggaggggaaggagcgaaaaacagtgtcccattttgctctaattgttgcaatttaagccttgttgtacaattgtgggatcggtttgccatgcgcgtcctctttgccttgccctgccatcattgttttaaaccgttgtttgctccacaatg

SEQ ID NO: 97858 - DNA, 584 bp, Heterodera glycines
aaaaaatcgtttttgggcataaagcggcgtgcggttgagacgatggaaacaccagcgggcaattagggtgcaactcttcagcaaaatgccacgccagtaatggcgaacattccgacaaagaatgtcacaaaaaaagtgaaaaatcgaattttttttttactttttcacatttttgttttaaagctggtgaagcgagtccgccatgaaattgaactgccgccgccagtgccgcaaacccttcaagagttggaacttcccgagcagtaccgaatctacaaacgcaccgaagaagcgcaggagcttttccttctggcggattctggaacatacaccgagaatgggcgagacggacaacagcgctgtgttttaaggggagcttttcacatattttctaaatttaagaattctgatttttggtcggctttctttcggaaattgggcttccgaaatgaagtatatttacgctgatggaactttcgcaagtgcaccgacgctcttcgcaactttacgtcattttggcgcggtacttttttgccaattttgtttttcaatcgtttttctcctaatttcagtcgtggaaaatg

SEQ ID NO: 97859 - DNA, 238 bp, Heterodera glycines
tatttttgcaaaccatcctggactgggccgctaacaaatgggttttttttgtcccgataaacccccgtcccggtccatttctaaactcctggtttcgggctcgttcatttcaaaattccgggcctaaatttaaattctttccgtcgagaatcctaaacactaaacggagcagtaaatcccgtttcttttcttttttacagtccccattttctcttatttttggattacacacattatg

SEQ ID NO: 97860 - DNA, 604 bp, Heterodera glycines
ttggattaatcaaagttgcttctccttatttacctatttgtaaaaaaattgcattaaaaaaagataaaaaataaaaatgcgaatgtataataatagcccggcggtagcgtgattaccgcggccgcgggaaaagccggccaatgtctgcattttttgtaacttaaattttcataataatctcttagagtgaagtgaattaattttcacaattatcagagataaaaaaataagagagatgtttttttctccgcactctctatttattggttcgtctctcgtttttgactcggtgtgaaaataatcgaaaattcgaatacattcaaaagtaattttttgtctgctgcttttagcttaattaagcctagaaattctagcctagaattcagttatacgagaaattctagcctagaattgactaatttttaagtttttgattgataccaggaatctaagcattgaccaagtaagaaacacataaaagcccataggacgtctaaaaccgaaaaagattgaagcatttaaccccacaatgcttcattattgtataatttcatttaaaaacaaacgaaggtagctaaatacttttctgattttggctaaaatg

SEQ ID NO: 97861 - DNA, 467 bp, Heterodera glycines
ataatttgagagatgtccgactgttttatttgatgataattttgtttgctgttctgatgaccattttggcgatgaatattaaaaataggaatttgagttgggcggatagaaaaaaaaaataataataataattggcatttcattgtttcgggaaaactgagaatgttttgcgggattgacattggcaccaaaaaactctcacaaaaaagaaaattaaataaatgtaagaatcaacaaaaagcatttcttagaaaaaagagagcatcaaatccattttcaattggtgcgataagttcatttccaattgggattatttttcaaacccctcctagactgggggataattggatattgggggattaatggagatttggggataattagagcaaatacggtagtgagatttggccatgcctcaaatataatgtagggagtccaaaaatatggatataaaatcgcgaaatatg

SEQ ID NO: 97862 - DNA, 303 bp, Heterodera glycines
tccaaaaaatttttggaaaaaatgggcgcggcaatttcatattttacccacatttcagtccggtgccgcttggtccgtcctcaattggttcaattcgaacgaaaaagaccgaaaatcggttcctccagcagcagcagaacagtgccaataatgccacggttgtgccaacatcgacttcttcaccggcaccggctgccatcagccaattggtgttggagcaacagcggcgccaggagtggcgccaggcgcgcatggcatcgctggaggccgagtctcggcgggtcaaccaactgttcagcgatg

SEQ ID NO: 97863 - DNA, 229 bp, Heterodera glycines
tagttgagctgaaaatgatttgttgtcctgagctccaactgagtgggaataataaattgctaagtaaatatggaaatttgaaaaattactgatttctttaaacaaatttctttttctaatcaaggttttacaatattttgatttattaaaaattaaaaaaagaattgattggagagactgcccgagaaatttaataaataaaaaataaattacatatacagtaaatatg

SEQ ID NO: 97864 - DNA, 883 bp, Heterodera glycines
ttgccgtggatttaagtaaatttagtctcaaaaatgtctgttttgataaaaagaaggtaatagatttggggaatgcttagttttggggacagaataggggtgggagaggagaggggagaggagaggtgaggggaggtgaggggacaggagagggttgggagaggagaggggagaggagaggtgaggggaggtgaggggacaggagagggttgggagaggagaggggagaggagaggtgaggggaggagaggggacaggagagggttgggagaggagaggggagaggagaggtgaggggaggagaggggacaggagagggtgggagaggagagggttttgtcgtacgcatgggaattgttgttaatttgcacaaacaaacgaaacattcgttcattcaccctcattacggagtaaaaaggaaaaacataaaattgcatcttcatcaatatgtatgtgggaaaatatttttgatatatgaaattagataataatatcgaaataataaatacgctaaaactaatttttattataatgaaaaatgttggtgacgtcgaggaattttataaattgttttttgacaaagattttaaatgtaaaataatttttaatagaatttaatctgctggtggtgacgaggaattttttcgcctaagatttcaaatataaaatactttttaatttaattacacctgatggaggggtagagtaatttttttgaatttttggccaaatgttttgaataattctttgagatttacttttatatatggctaagttttattttaaaattattttactaagatcttaatgccagaataaatgttgaaattagctttataaaaagtatgaaattaaattttttagaaaaaatctcttccccatg

SEQ ID NO: 97865 - DNA, 1003 bp, Heterodera glycines
gtaaaagaaaaattaaatgtcttagtgtatgcatacctataaaaatgaagtgttggcatccaacactataatgatgtcataaaatttttattttcatccacgaaaaatttacaatactatttcgttgtttctctttttctttctaatttctctcatcacttcggcatactatcttgtcatttttttttctaaaaagcactcactcgctagagaaaaaaattttgcaccgaatattctataaggaattaataactttctgtcctgttttttagtaaactaatttaaaattttcatattccttttttctccttttggtgcactattttcaaaactttaaccaatgaaaaaaacatgaattttgttggataggatcaaagatcacttacacctcatcactgttattgacttttcccctccccctttctctgtcttacattatttccattgtctccctctctgccatctcctccacatttctctgaccccgcgtctttataagggtgcccattccctcactcatggctctccgctctattcattcgcattggacacttattattttgttctcctccgccgctgcactcctccgacctcaccatttttgtgcatttatttttatttgattattaataaattgttggtacacaacaattttggcgcagtcagcagcagcagataaattctgcacatcattaagccaaatcaaggctaattctgcaaaatctagccaatttaaggcatatttgcacaatcttcaagccaaatcaaggcataattctgcaagcctaattttggcacttcaaaagcctgggtggctttcaacggacagcgacaaaaactgatcacctgggtggtgtaagttccgctgggtgcggtttctcatcgacaaaaactgatcacctgggtggtgtaagttccgctgggtgcggtttttcatcgacaaaaactgatcacctggggggtgtaaagttccgctgggtgcggtttatcaacaaacaaaatg

SEQ ID NO: 97866 - DNA, 257 bp, Heterodera glycines
aattttcaaattttaagcattgaaacttcaaattttcaaattttttcaattttaatcattgaaaactctaaaaacactaaaattttcaaattttaagcattgaaacttcaaattttcaactttttcaatttttagcattgaaatctctgaaagaatttacattttttatttttttcaatttaatcattgaaaactctaaaagcattcaaattttcaaatttttttaaatttttaagcgttgaaaactcccaaaaatg

SEQ ID NO: 97867 - DNA, 316 bp, Heterodera glycines
tcacggacaataattgcaatgtccgatcccaatcacggcaaattttcaccggtttaccaacccctttcggggaaggacaagcacgctgattttgccagtgtagcgcgcgtgcagccccggacatctaagggcatcacagacctgttattgctcaatttcgtgcggctgaacaccgaaaatccctctaagaagttgtgcccacagaagcaatgagccaactatttagtaggctagagtctcgctcgttatcggaataaaccagacaaatcgctccacgaactaagaacggccatgcaccaccatccaccgaatcatg

SEQ ID NO: 97868 - DNA, 514 bp, Heterodera glycines
ttctcgttaacaatgctataaattaagaatggtataaaatgctctaacacctatactcagcatcagggatgtcattgaattccaatttccaaatcatcactgcttagcgcatgtacatatttttcgaatgctcataattagagcccggaaatttcaatttgaaggatcccgctatgagattggaactaaaaattttgcaggataggaacaccgggattaattctgcaatccctcatttcaaacttgcgggatcccgctaaaatttaacaataaaattcaaaaaagttattataatatttgtatccttttattttctgtcgcgcttttttttaaattttgaagaggaatgggacagacaatccgggaaaacttttttgaaaacattaccccggtttttttagcaattttgaataaatgaccataaattctctaatagaacttcatacataaaaattcataataatcagggaacggatttttaggttttcacctatttttttgcagatagcatatg

SEQ ID NO: 97869 - DNA, 252 bp, Heterodera glycines
atgcaagctgctccattccataaaatcgaccgagactcgggtaatgcagtatcctcagcattagcgttcttcgaaatcccggacactgatgtcagtctatcgcattcctctgtggtagagtgcctaacgctcaacccggtgaacatcacgccctatcacttcaaaatacacgcaagttccgactacatagatctcagcaagtgttatgtgtttaccgagttacgcattcgaaaagaacagggcggagaaatg

SEQ ID NO: 97870 - DNA, 125 bp, Heterodera glycines
agtaaggaaacaatgtttttcagtttaaattatttctaatgcccttttcccttcccaccccatcaacatcaagctggataccaaagccgatgttccagaagatgaaaaacgaccagatcgacatg

SEQ ID NO: 97871 - DNA, 140 bp, Heterodera glycines
cattcgagactggttcggctgcaaccgccgactttttcccttaagcccgaggattggacaacattttgggcctaggcccattgctggaggcaaaattgccggtgcgagtgctcacggaattgcggatcagagaaagcatg

SEQ ID NO: 97872 - DNA, 91 bp, Heterodera glycines
ttttttgttcccccttctcccccccgcggcgtcatatcaatttttttctacaggtcttcattctatttctgatttttttttggcaaaaatg

SEQ ID NO: 97873 - DNA, 53 bp, Heterodera glycines
ttcagtatttttcagtttctgctgatcagttcaaagcgattcgggaaagaatg

SEQ ID NO: 97874 - DNA, 580 bp, Heterodera glycines
acaaaaggcggaaaatgtccgtgagcgaaaaaagggggaaagatgaaaaaaaaatccgttattcattcgcttaactttttaaaaaatctgttcaacgttcttgctctccgatttaaaaaatattatttgtcaatttcgtatttacgccgtaataaatacttgtcaccgggacattttttttgaaggttacggtaggggaaaatttggtgctaaaatttgtttcaccgggaaacgggagattggtccaccagggactttttgaaaacaacatctgtaaaatcaaggggcccaccaggaattaagaagtgattggcaaactctaatttgttccaccaaacaaaggctgattgattgattgattgattttattttgccttttttcaattaaatctttcaatttaaatatttaaaaatatatttatacttcagctttttttgcaattttttatttttactaaagaattcatttctgattaacctagtttgcttattatcagctaataaatgagatgttgttttgttggtcctctcgacgcatgcaataattgttgtaaataaatttccattcccaagaaaaatg

SEQ ID NO: 97875 - DNA, 135 bp, Heterodera glycines
atttcatttttcaattatttgttgtaaatatttagaaattgacgcaaaaatttcccaacaaaaacattttccttcaccccaaggctccatgttgacggtgatttgaaaagagttagccaaattttaaaagggatg

SEQ ID NO: 97876 - DNA, 260 bp, Heterodera glycines
acgtcgatgatagtctctccctcgtcaagaaaaggtacctgtgagaaatttagaaaaattataattcaaattgaaggtcaaattttagaaattgaccaaatagaaggaaaaattacttcggtaagcccgaataaattaaatcatcacgaagtaaaatttgggttcaacaatttgcttccttaaatagaagcacatgcttttcacaaattattctattaaatctaacagacataaaagattatgcttttgtgagcaacatg

SEQ ID NO: 97877 - DNA, 266 bp, Heterodera glycines
  unsure (1)..(266): unsure at all n locations
cctttctccccatcttcaccaatttcgtgtattcatttcctattctttgcgcctttaaccacacaacttttgtgccaagaacaatcatntaattttgtcaaatattctgcgagaagccaattaaaatataattttgcattttttaaataattaacatgaaaaaatcaaggtccagattaggcacaaaaacctgctggacttcttggatattaatcaaaaatttaaattgatgaataacaaaaatttttaatttaaggcccaaaatg

SEQ ID NO: 97878 - DNA, 1003 bp, Heterodera glycines
ttacaaccacatattgccaatctaattcttgcagattgaaagccatccattgcctgccggttctcggcacagcaaagcactaatagggtgtttgactcacttcaaaaaataattccatacccaaaagttttttacaaccacatattgccaatctaatttcttgcagattgaaagccatccattgcctgccggttctcggcacagcaaagcactaatagggtgtttgactcacttcaaaaaataattcattacccaaaagttttttacaaccacttattgccaatctaatttcttgcagattgaaagccatccattgcctgccggttctcggcacagcaaagcactaatagggtgtttgactcacttcaaaaaataattccatacccaaaagttttttacaaccacatattgccaatctaatttcttgcagattgaaagccatccattgcctgccggttctcggcacagcaaagcactaatagggtgtttgactcacttcaaaaaataattccatacccaaaagttttttacaaccacatattgccaatctaatttcttgcagattgaaagccatccattgcctgccggttctcggcacagcaaagcactaatagggtgttttgtgataattgacttcctttttaatttaaattaattaatttgtggcattatgtttcgttaattggttttcctcaattcattttggtttttttctgagttcttcggattgatattttttttgctgtgaatgacttttttgcttctcaatttctctctcctccgatctttgaatattttttggaaataaatctctctcatctggtgaagtcgtttggattgtcgtgttcgtcttttgtttaattttgtttggacagggttttaattgttggaatttgccgcggtgtaattgttggtcaacgagcgaaaatttgtgcctgtttcagtcgaaaattggagagtatttgactcagctgtcaaagagcaaaaacagaaatccaaaatg

SEQ ID NO: 97879 - DNA, 513 bp, Heterodera glycines
atatattttttttaattctcatactaaggtttacacttattcaaactaaatcagaaaatttgtgagtttttcaaaaagcaggtaatcatttctcgaaaaatatcgcattttcaaaaggaatcctcatttactcctccaaaaaccacaaactgaggataaaatcctcatcagattaattcccataaattgatatgtagttccaaaggaaagaaaattcaaaaaattttggtacttttcggttgggcctagatttgatttttttttgtttaaacaacaaagatcagcttaaattgtgacatttatgcccacaatgtaattttggctgacatttatgctcacaatataattttggcacataagtttgcaactttgcgtgtccttttttatttgaaaaaaattcaaatctaggccccaaaaccgaaaagtaccaaaatttgcattaaaaaccaattctttccacctttaaaattttacaattaagcagtgcctttatttattgaatccgacaaaatg

SEQ ID NO: 97880 - DNA, 1003 bp, Heterodera glycines
aaatttgtccttatttagaaaataactttaaactattcatttacatttgaaatatttaagtttttacgtgttttaatacctaaaaagcgttaataaaaaaattttttgcctatttttgtgcctaattgaggatttttatgcctatttaatgcctattttgcgatttttttatgcctttttaggtgcctatttcgcgattttttgtgcctaaaaaagaaagccctattaatgatacagaattttgtttttaaaaaacgcattttatgtaagccgaaattttcgactcattgacattctgtcagttgttagctgacaaatgagttaatttatatattttgtacggtcgagattttgtttatccatcgttttccattttatccccattcatccttaattaaatgcctccaaaaaatttaatggctttttcttatacaatacataattaatccatcaattctttattttactatattaaattatttttttttattattttcagtcaatttccattccattcatttgccaacacttttcccaaacgattggtcgtcggatggtacaaaaaaatgaattttttttgtatggaatattaatccgaaaattgtctaatttgtccattcccatccatcggaaatggcattccatcggccgttttggcgatgattcggcttcccattttcgctttttctcattttgccaacgcttttcccagcgattggacaaaaaattgtgcttggggagtgtaaatttgtggtgatttggccattttcccattttccacctccccccccctcttttttgtctgtccataaataggcaacgaaaagccatcaaaaatcacacatttttcattttcattgatcagaccaatcagctaacattcctttcttgcttcatccattcccatcactttgccttctttccaatcgaaaacggtaaatggtgaattgaattttatatggcaattaatgggaaaaagagagttttaaaaactccaaaaatg

SEQ ID NO: 97881 - DNA, 1003 bp, Heterodera glycines
gttttgttttaattacttgcgtggatcatctttgtagttattaaaaacctaatttgctcaaaacgttaaaaagcaattatttaaacattagtatatgataatttaaatgcaattgtttaattaatttaggtatatatttttttggatatcactcgtacgaaaacgacccccgtacgaaaacgggctggctttatgtcttgtatcggtctcatagaaaaaagtctcgggtttttgagtcttgtctcggtctcgagtctcgggaaattttcgccccaattgtcggaagcaataatagaaaaaaccatcttctaaaaaacatgaaaaatttacagtcaaaaagtatggaagcaattcaatcgaacaaaaactagataactttaaatagagaaaaattgttgaaaaaattcctactaagtctaacgattctgatcaaaaaagtcttttgcaccaacttgatccgactactccttcatggtgacctgaacaccccaaaacactgaaaatcggggtcctaggaggtttggaaattttttctctaaaaaatgagtaagcctatcagaaagagcgcaaaattcgctaattctctaccgaattgcattttgaatggttattcgacgacgaatacccgctgatgatgagacagagaaagggggcaaaatttggcatggcaaaaatgactgctttctacagtatttcaaggggaaataatcaaaattgagtattgctatggtactcaattttttcattcaatcactcatctgctggagaagcggttttgcataaaaaagcgttgcttccatacttttgcaccttactgtatgattgcgcaacaaaagcgcatgaataaaagaaatggaaaatattttgaaagagcgccattataataatgccaataacccatattcctcgagggaattgaaccaagacaaaagctgagtgttaaactgtatacaaattcttaatttattattttagtgaagcaaattgtttttttcaacaaatg

SEQ ID NO: 97882 - DNA, 215 bp, Heterodera glycines
ttcagatcatttgtcaatccaaaaaccggtgctgaatgggtcgacaattttttaaataagccgataatttgctcaaaaaaatccccgatcgcctattttttaagggcgtcttctcttcgaacgtcgatgtcgaaaatttatttccgaccactaaataattaaaatagccactaatttagctttcaattcaaaaatttatttcttcactctctatg

SEQ ID NO: 97883 - DNA, 597 bp, Heterodera glycines
tttgtccccccccccccccgaggggtcggactcaaccctaattttttactattaaaaagttgtagaaaaattttcacaattttgcgtttctatttactttcatttcgcattttatttttcgatttggcccatccctggtacaaaagtacacatacacgcccaaaattatatttattgagcaaaccacaggcacattagtgctcttatgtggcgcataaaaaaaaaatcaaaataaataatgtcaaaaaatacaacaatatgaaatgtaaagtaaaataaaataaaatggaatgaatgtcaatgcaaatgtcaataaatcccttagaactcatacatagcttttagcaatgccctgaattgatttgccttatctgcctgaattggaacaattggtaatttgttccaattcttgtgaatcggttcacaccatatttagctattttcgagatttttagcttaaatttgacgaacttttgagaaatgttacccttaatttggaaaaaattatgaacatattttgcacaattttatgcgcttattttgcaaattttgacggatataattggttgcccttagtgatcagcagcagcaattatg

SEQ ID NO: 97884 - DNA, 855 bp, Heterodera glycines
aaaaaaagggggaaaaaaatggccaataaataagtttgtttttaaaataaattatttcaagaaaatttttttttatttccaggaaaaattttaaagatttttgttggatttttcaggcttggggctcggttaaaaattaggattcggccgggcttctgtacccggcaatccctgacccgtatttgcccaaatccccaggcccgttcccctaattaatatccgattttgagtttttttaaattaacaaataaggctacagaaaaaaattgaaaaactctcgcctctcgtcctctcgcctctcgccaactctcgtgttttgggggactctcgcctctcgccaaactctcgctctcgtctttttggggactctcgcctctcgccaaactctcgctctcgtcttttctgagacaagtcacacccctgatatgcacatatttttatacatattctggactttttcgcattttttttttctacatatttcgcaatttttgaggattttttaacgaaaattcccccccccccccccccccccgccgcctcgaagtttttttttttgagtcagcgattttttgggagattaaaaaaagttggtataaaaaacttattgtttgttataagaaaattcaaaaagaagatattaaataaattcttgcgattttttagacaaattttcaaaaaacaaaagtttcgagattcatcaaaaatttttaaaaaatcgcgggaaaaatcaatataaacattttctagaaagtcttataaaaagcaaaaaatccaactccatcccccctcctggtgaaggtgttcatccacccgttcatggacgggaatgggcgcacctcgcgtctgctgatg

SEQ ID NO: 97885 - DNA, 65 bp, Heterodera glycines
tttttcgtttgttaaattttttactgttgattttgtttttcagaaaaaattagtgccaaacaatg

SEQ ID NO: 97886 - DNA, 159 bp, Heterodera glycines
ttttccggcccgtccattcaattcacccctcaagaatttgttccggaatggtcgtcactctttttccgcctcgcccggaaatttgctcccgaatttgtcgccaggccttggaggacactcttcgttttctgaccaaaaatgttaatatttttcaaaatg

SEQ ID NO: 97887 - DNA, 101 bp, Heterodera glycines
attttccacatgaaattattgtccagcctaaaaatgccatcaagaacgggagaagaaagaagcgtggcggtgacaattccggccaatgcgtcactgccatg

SEQ ID NO: 97888 - DNA, 337 bp, Heterodera glycines
aaaacaaattatgcaaaaaatgatattaattctaaagagattgaaaaagggaggcaggcaattgggatgaatcagcggacagttggccatcttcatgaccaaattcgtcgtcctccattttctgcaaaattccgcggcggtgtactccttctccatgacaacgcacgcccacatgttgcgttctcaacgcaacagaaaattgagcaacttcgatgggcggttcttcctcatccaccatacagcccagacatcagcccgtgtgactactatctgtttcgatctatggagcacttcttgagagggaaagaatttgctgatcaaaacgaggtcgaaaatg

SEQ ID NO: 97889 - DNA, 67 bp, Heterodera glycines
aaaaaaggcaacggatatttgagattgaagggagagcaatgacatgagggcagtgatttttaaaatg

SEQ ID NO: 97890 - DNA, 836 bp, Heterodera glycines
  unsure (1)..(836): unsure at all n locations
tttgcgcctatgcttaaaatcggtttcaatctcagatttaattgcatcttgatgcattataaattatatcaatttacgaaaccgtttctatcataggcgtgaatatctgcacacggttcagttttagtcctgtgaaaattgcattaccatgtggaagttcggcaagttctccgagggcatttcggggaagggcactctcggctgtgccgaaacatacgctgcgcacaccgccgtaatggttcgtagcaaaaattccggaatatggcccattaaaaaattagggataaaatcgaattattggaggaacgagttcgtcccctctcctcccatcattccccctcaaaaaaaagttttttcattttatttcagtttgcatttttttaactttcaccattttctccgtcccattttaggagatgccgcgcacggaaatgtggttcatcaaaatggccgtggatccgtcccgcagagtgagtttaggagaacgttgaatttatgcaaaaacacgagttcgctagctgacttgtcgggcccgcagttgcattattatttattgttccccccaccccatcttttaaatatttctctcatatgccattgtaattgtttgaccagaattggcgtccatttcgaccaatccctcacaaattaatatttncttccgtcagtttctcgtctgcggcagcgaggagggcgaattgcgcatttggcgattggacacagagaaactaccgaaccgaaagaggtgaaacggacggagaggaagaaacacttggggcgtcttttgactttagtgatttttgtttggtcgcgccgaccaaagaattgaggaaatg

SEQ ID NO: 97891 - DNA, 619 bp, Heterodera glycines
aggcataaatgcgtcaatttgatctaagatctcttcgaaggggtctgcgccaaggttttggatatttatgcaatgggagcggagattaatataaaattcttcgcgcccgctgctgatttaaaaaaaaaaaatcaaactttggccccaaaacggaaaagtacctaattatcatcaaactataatttattttaatcacaaaatccaaaaacaaactttttgatagtttctgttcggctgctcctcagatcacatgtgttccttttatgatcagagcggcggatgagtagcaaagcgattgatgaatcaattatcgaaaattaattgcaagatccatcttcattaccatcatccatcccctgtataactcgagaacatcgtttcaaatgtgatccgattacttttttgggatccgcccacattaaaatgaaaaagatttggtgcggctgatactgacattaattaataaggtcataaattggcgaacagttgggtgaatgttattcctaattaggcgttcattttaagaagtaattatgtcccattaattaattgtattctttctttggacagacggcagaaatcaatttgaaaatacaattatattattatgctaataatg

SEQ ID NO: 97892 - DNA, 1003 bp, Heterodera glycines
tttgtctgctctgcattccgtaaattcatcgtccgcaaattgtgaacagcccaatttttgatataatattcaatctggcgaaaatttgaatttccttaaaaaacatgaaacaaaagcttatgttataattctattcaaaaatttttaatttttgcactcaaaatttttttaaaaaggtttctttcataaaacttttcacttttcaaggattttttttattgtcttggcttacattggaaaatttctaaaaaaaaaaatctcggtaaagtttttaaaaattctcgggacgaaacgacacgaggggagggggggggggggggggaaaccccgaaataagcacaaaagcaatcgatgattttacatacatatcaaaaaacagcaacaactgcgtatcgagctgttgctgcttcgacaaattatccgacaacgaaacggatcagaattgaggacgactacgaatctgaccaatcccaggaggagtagccgtcacaatgctggcctctcattgtgaaaagtggccatatggccataaggggcggagcgcgtgccgctacctgcgatttgtcacttaatatttcaaacaaaatttttcagcgcgattgtttaaatcggagcattttctgaaattgacccaccctttcttaacaaaatcctttcaaaattctaattttccccgagggcgcatgtttttactgtcggactccttgcccaaatcgcaaaaatatacggcactgaaatttttaatattgaaaaaaattgtgcaggcgatataattttaaataatggttttataatttccggagcaggacaaaacgttgttgatcgaaacgttgatcgaaaacatcaacaaagcttaatttgaataaaaaaaagtaatggtcggaaaaccatccggcgacgtttcagccgggtatataacggcctatcccatacccatgccaagttcagaaaaaaaatcacttcatccctaacagtttcttcgtcgtcggtctctcgtcctatg

SEQ ID NO: 97893 - DNA, 707 bp, Heterodera glycines
tttttttgtttttaataaacctaaaacagtgacaataaagacaataggtaaatgatagaattttataagtggtcagcaaattatattcattcttttggtgcctttcggttctgccccccccccccccccctccgaaacttatcggtgatttgattttctctgattggtctgatctgatatggttaaggcaaggtgtaaaaaaatcaatcgtccgaattaattttatttttaatgaaattttaattttcatttattttacgaaacgaaaaaaatattagtcgaaacaataaaatatttaaatcctttctttccctgcctctaaaaataagtcaacaacaatccctcttctgtgaaatgaatgctttagctatttttagtctctttgtccaaagcacaaaaagccgcggcccgggcgaaatattcagtgaaacatccatcagctgatgatgatagccaaaaattgagaagaaagccatcattttattcactgtgcttttattttattttatatttttagttttttttattttacatttatttttatggtggacaaaagccatgcgccattcattgtcattttgctgactctcgtcgtcgcactgcttatttttattgcgatttcacgtaaataaattaacttttgaattaatattttaaaattcttctttaagtaaatattatattttattagtttatttggctatatg

SEQ ID NO: 97894 - DNA, 529 bp, Heterodera glycines
tttggggttctccaatttataatgaaggcctctcatcaaaacgaaaagcaattcatttttttgcaaataatttgccttggataaattcaattcggccaccgcccactcgtcgacaaatgtccccactttccccccccccctcaattgctccctcctccctcttctttttcccttttccactaatatttctttggctgtgttagcttctttcttcactttccatgcgtgctcaataaaaaccgaaaaattgtaatacccaaaacacaaaatatttaaaattcgaatcataaagaaatagtcgaaataagcagcaggtggcaaaagattgagcatctcaacgactttttcatatccaatgtttaataatgtctctgtatttcggggaaaccaatcaaaaaactgcaaattattgttaatttttgtctgtgtccatgcagtcgatcgactatcagatcgaattctttgttcgcgccattgccatttggcctcgttttcttttccctcaatttagccgttcaattccaaaatg

SEQ ID NO: 97895 - DNA, 105 bp, Heterodera glycines
tttgacaaaatgtccagaaataaaaccaattgtccgtacaattcatcatgaattttgtccgaatccctccgcccttaacggcgtttccgtttcagtccccaaatg

SEQ ID NO: 97896 - DNA, 423 bp, Heterodera glycines
ttcattcgcattggacatttttattattttattctcctccgtcgctgcactcctccgacctcatcaatttgtgcatttatttttattggtgtttattaataaattgttgatacacaacaattttggcgcagtcagcagcagcagataaattctgcacatcatcaagccaaatcaaggctaattctgcaaaatcttcaagccaaatcaaggcatattctgcacaacctccaagccaaatcaaggcataattcagcaagcctaattttggcatttcaaaagcctgagcggcttccatcggacatcaataaaaactgatcacctgggtggtgtaagttccgctgggtgcggtttctcatcgacaaaaactgatcacctgggtggtgtaaagttccgctgggtgcggtttaatcaacaatcaaaatg

SEQ ID NO: 97897 - DNA, 230 bp, Heterodera glycines
ctaaaaagctcaaaaaaggccaacatatgtgccaaaaattgaaaaaaaactgtcaaaaaataagtgaatttatcactaactggtactaaccaatactaagtccctcacttaatgctaactcgcttgcatcaatcactagtgtgtacttattgagactacacaccttggtttatagataactttaaactcaattcactactccttcaaacccatcccaaccccttcaaatg

SEQ ID NO: 97898 - DNA, 1003 bp, Heterodera glycines
taaaattttccggggattttcccttgtaaaaatggaagagccgatctcgagttaaaaacttaagttccataaaataaacttggaatcgctagaggaggtcaaaatataggcctatacaaaatttcaagaaaatctgacccgaggaaaatttttttgaccctagtaaaaatttcaataattttaatacttttttagccaagtccacaatttaaggccaacccaaataaaatttacaatattctctagaattttcccttcaaaatgagcataaaatggttttatttgctctagtattcaccaagttataagctaagaaaatttcataaaattgtcgatgttgtacgtaaccaacgctttttgaatatgattttttttgacacgaaaacttttattaataaaaaatatttctgccttcttctgtaaaagaagaaattgaaattaacacacaacataaggaggactcgaacctgagaccccccttttggtgactaacgcacagaccactaagacgaaaaaaccaacttaattgtacttggagcgcaaaattgaatcgccgtgtatatgaatagagagagccctgatttttttagatttttcctattttttacggattgtacttgatgaaagaaacacgaaaatcacattttattaaaacaatttttgaagttttttgccttcaatggggttggacaatgtgccaatgggaaacgaaaaatcattgacaaaaacggaaggggcggaaacattttggcataaaatgaccgattggaagaggaagaaaaagggaacgcaacagaggaggaccaccaaagaggagaatattttgcaaaatgatgaccatttgccgggcgttttaccttatcctcaaccaacaaatcaatcaaataaatcaatttgacggataatttttcatttgtaaaggttaaatccgcccttttcaaattttgaaaattggcaaacgttatgattagggatggtaattattagggatgccacaaatatg

SEQ ID NO: 97899 - DNA, 249 bp, Heterodera glycines
  unsure (1)..(249): unsure at all n locations
atgctttgagcgggttatctgaccatcgcttcatcttntcattccgtggcactttccgcaatcggactctctctccccatattcgccttgtctcttgggccccncaattggaagtgctttcccatccgaagaccaaagtctttttgacccattccggactgaagaggttccaattttggctcttttgcctacgcattgtttttcagtatcaaagaatcgctgtgttctggcactccgatgctaacaatg

SEQ ID NO: 97900 - DNA, 1003 bp, Heterodera glycines
ttgttttattgcaaatcaaaaattaaaagaagaaataagtataaatattcaaaaatgaaataaacaaattaaaacaaaaattaaataaattaaacattttaaaaggaattcataaggtataaacattttaaatattcggtctttgtttatgaaataattcaaactcatattgattgggaatgaaatctgaacgcattcaacatgggaagcagacaaaagtctgattttttgggtctggacaattaatttcaaaaaattaatttaaataagagaagaataaatcgcagaaacataataaattaacaagatacggagataaaaaatttaaagaaaaaggaatctgtcaaaatttttttataatagaagtgaaaaaataaactatcagaaaaaatgattataacttctacccttaaaatatattttataaatatgtagctcattattaggttattaaaatagcaaaatttaaaaatttaaattaaataaacaattattcattttataaaattaaaaataaaatggcaaaaaaagcaaaaataatataattaaatgtttatgcataccaagaagaatattagccgagtctacaagataaaaaatttaaaaatatagaaaaaattcaaagcgaaataaaagtttatttgtgatttattttaattgctagaaccattatcatactaataatttctaaaaaaaattgcaaaataaattttgaaatatttattttaaaaaatgcgcgtccacgctaaaaacacctgaaagtacaaaagaaaagtgatgcccaagaatagattcaatgaaaaattctataaaattaataagaaatacattaattaccggcatttaccggaataataaaattacgggtgttttttaacctgaatcattctttaactgaacagatcaagatcgaagccaaaacctggctttagcggggggctgaagttaaaaattttgatttttaggtgtgtatttttcttttttcagtcaatttttaggcatg

SEQ ID NO: 97901 - DNA, 145 bp, Heterodera glycines
ttgtagcagaacaaatgagacatagctgacaaattgccggggcttttatactcccagaaaattaggccacgcccacttttgaaagctatttaagccgagattttctcacacaatcaaatcattcttgcaaaatcatcatcaaatg

SEQ ID NO: 97902 - DNA, 91 bp, Heterodera glycines
aaaacaaaggcatttgtgtcccattgcgggatgaccctttttggagagcgttttccacggagtgccaatcgtttgcgtgccgttcatcatg

SEQ ID NO: 97903 - DNA, 1003 bp, Heterodera glycines
aaatgaatttgcaaattatctgaagtaaaaaatgccgaatttatctaccgtatatgctctaattatagaccagtctctattatcccgcagtctccaattatcccccagtctacgaggtgttttgaaaaataatccctctatcataatcccccagtctctattcttttaaatttaatctaaaattggaaattcaaaaaacaattttcatgtaattagtagttttttactttgtcccatggtcacaccctcctcgctgacccttctattctatcacttttccaacttgaaggtaaaaactgaaattttcagaagacctaaagttatagaaataattcgcggttgggttttataccatttttattcgttttaattacctcattttttcatctcaattagtgaaaacaacagcaatcgctcggttcaattttgaatagagttgtacaggaacgggactttttgggttgaaaaaccgggactttttggctgggaaaaccggaaattttcccggtcccgttctaaactggtcaaaaccgggacttaggtaatcagttgtccgtgtttttcagtaccaggtcccggtcccgtacaacactgtacttctgaataattttcaatagtcggatttgatgaagattttattcgttttaattgtctcatttttcatctaattagctcaatttacttaatttggtttgttagaacacaaaaatgaattagacagaatttgtgttccaattataaccaaaggcacaaaaacgaatttggaaatacagcgaaaggcacaaaatataaaatttaatttaattttttcttcctccccgcctttatttttgtgtctcttctgtgttttgtgcttttccaattgcgcaccctataaaaggacaggtcaaagtgacaaattcaaactcaaattcaaatcatcatcagcaacaaaaacagcaacaaattcatttaaattcccacaaataattaattaattaattattttattttctacaaaatg

SEQ ID NO: 97904 - DNA, 233 bp, Heterodera glycines
  unsure (1)..(233): unsure at all n locations
tcaaaaagaaaaatatncgatgaagggaagcaaagcgccaagactttttgaattactatttcctctgatgtccattatcccatcccccgattcttcaagtgtatccgagtatataaagccgaccaaatccctttccagtcatatccttcatccctttcattccatttgtttgataaattttgttttttcagttcatttctgttaaattttctgtgcttaccaattcaaaaatg

SEQ ID NO: 97905 - DNA, 134 bp, Heterodera glycines
ggtaaatatggcccatggcatttacccatctttgaaatgcttgaggccattcaaagcagtgccattttgtcaaattcccggccccgcacagtttcggcgcgtgccctcgctatttgctgtcttccaccgtcatg

SEQ ID NO: 97906 - DNA, 372 bp, Heterodera glycines
  unsure (1)..(372): unsure at all n locations
ttcnattccaatcaattcccttattattccccgaaaattccccgtaatgtcgaacgaagtggacacacnnnagaggaagtgagtgcccttgaggcaatgattttggagacaagcgtggacccaatggccacgctgggggccaaaatgctgaatgggaaggagcgtcattcgtgacgaatatcnntgaganaagtggtgaggaagtgaaaaagtgccgggacaaatgatctcatggagacggaagaaggagagaaaaatgagggaatgccattcgtggcaganatcctgaatgtggttaatgaaatgagtggcacggaaatgccatagaaagctcaaaaggagggttttgggtttattttagatgatgaaatg

SEQ ID NO: 97907 - DNA, 151 bp, Heterodera glycines
ttttcattaaaagctgtcataaattaatgtttttttaaaactttctcttaatgaaatattattattttgattttttaataataatttttgattgaatttttatttaaaaatttaaaagaaaaattattaagcaattattaataaaaaaatg

SEQ ID NO: 97908 - DNA, 184 bp, Heterodera glycines
ggccaaaaatgaatcgtccttcgtccgcctatatatagggaacgattcgaagaaaatgctcacattttgcgtctgttagtatttttatcattattttctatttgccaattgcatcaaagcatcgttctgctgctccttcatcgaccacatcaaacggaagaagtcatcacacggagtcatcatg

SEQ ID NO: 97909 - DNA, 790 bp, Heterodera glycines
aaaaaagttataaggaaaaaacctccaaagtttttggtttttttgtaatttcatattataacttttttgaaaattgtctaagcgcgaagcaatagcttagaaatagcttctaaacatattaagctttcgaatgataccaagattgttagatttggttgacaatcaaaaaagttatagtcaaaaaactagtgctggcgccgaaacgccgcctactccgaattgatatgccaaaagatgaagtataatggatgaaaatgccaaaagatgatgtaggaaaaataccaaaaacggaaggaagaaagggcacaataaaaatttacaaaaaaaaataacaaaaatttctcaaaaattaaaattaaattttcgaaaaatttaagatttttattttttagactaattgtgaaaaatcattgtaattcataaagaaagaaaatttatgtataagaaaactgatatttggtatctcagttcatttgagattcgtgtaaaaattatttttaaataattatttttgaacatgaaaaaagtttttgacattttcgaatttatttaaatttttcgaaattgggaacgacaaattatttaaaataaaggattaataaaatttaaattggaggagatgaagcgcgcacacacacacaaagcatcaaaatggagctaattcatctgcggcgggcagaacaatggaagtgcgcgaaatttaggcaagaaacaaacaaaagttcaaattgatcgattcaatttttgtgctttcgtaaatcggcaaagcgatcggacagccggcgaaatg

SEQ ID NO: 97910 - DNA, 683 bp, Heterodera glycines
taatcaaaaatgtccacggccaagaccggcataatcaaaaatgtccacggccaagaccggcataatcaaaaatgtccacggccaagaccggcataatcaaaaatgtccacggccaagaccacataagcagaaaatgccatgacgatgactcgcagcattatggatgagttgggtctatggatgagttgggtttggatgagttgggggtgactcccaaaaatctgatcaaaatgttattctataattgttaaaaatgggattttttaattttcgcctaatttttcaggacttttttgcattttttcgtgcttttttggatttttttttgtgacttttttgcctttttatgactttttttgtgactttttggcgattttttatgactttaagtcgactttttgaaggttttaatgacttaaattcccagccctagtgatgatgatatcgaataagatgtttcaatttctataaatgcacaattattattaagtaaataatataggaaatttgtttaattctcttcgatatgttgcttcggtcgcttcccttcggccgctcctttcccccgtgtcttctgcgacggagtgcctcttcattcacgtgggctttcaatccatcgatgtttacaaacattgactacttgtgagtttcgctttagaggcctcacttcggaacagttcatg

SEQ ID NO: 97911 - DNA, 636 bp, Heterodera glycines
tttcaaaattttggtttaattacccaagtttgaggtcatttcccggaataaattttttattaattctgtgtctcgtccctgcctaccccgaccccagtgcccgacctttggccccgaacgcaatcgggacaaattggcgctcctgcagctggatctgtgaaccacggactgactcaacgaatcccgttgacacaggggaagggaaaagcaaattagagagcctagacaaggaccctctgaggcttgtctagtgttcatagtttcgtgtagttattgtcctccgaggcataacttcacgagggacgtagcggacttagtgtttgccctccgaggaaacatttcgtccgagcagagggttgtaaggtgttgtgtagtggacgtagtacttgccctccgaggaagtacttcgtacaaaaagggtgttaagcgcgcactaggccacttacaaataaggaaaaaaggcaaactaacagtcctccgaggctttagtttatccataaggcaaaaggcaaacaccttgtcctccgaggcaggtgtttagtcacagaggtcccatcaaaagccccagggccaagaccagactgatcccggcaaaagacacaaaacaacacacgcacaaccaaactgcacgcaatg

SEQ ID NO: 97912 - DNA, 163 bp, Heterodera glycines
ggggggggggagttgccagcaaaaataatttccaggggtagaaattgttaccttcgcaagttactgcgatcattcatttttacaataaaaataaactcaattctgctgctcacagatcacacgaccgactgatatcaaatcgttgcgcgttgctgaaattatg

SEQ ID NO: 97913 - DNA, 76 bp, Heterodera glycines
atttgggggactgctgcttactttgggtgtcggtactcaaaatgaatgcacgcatcgccaacagtgggctgaaatg

SEQ ID NO: 97914 - DNA, 98 bp, Heterodera glycines
agtaatttatttatagtttaatttcattttttaattgttggtttcaaaatgccaattttaaggcgttaaatgaggctcgaactgttgtcgaaaaaatg

SEQ ID NO: 97915 - DNA, 81 bp, Heterodera glycines
aaaaagaaaagacgcgaaattaatttgtgggggcgggggacaaacgacgattttggaatttggaagaatgacgacgaaatg

SEQ ID NO: 97916 - DNA, 409 bp, Heterodera glycines
tttgtcgcaccaaaaatggttgctggatctaccccttcggggggattgtggttcgcaccaaaaatggtcgctggacctaccccttcgggggattgtggttcgcaccaaataatggttgctggacctacccctttgggggattgtggttcgcaccaaaaatagtggctggtcctgcccttttgggttatggaccggacatttttgcatctgcattcttaatgggatgtgtgagccctgactgatggatttcagcacaggacgactacactccacagcgaagaatgatgtctttgacctttatttgtgcattttttgttaataaatttttaacatatgtgtgcatttattggttaattacctcatatttttgccgcatttgtaatacttttctgatttgttgttttagatg

SEQ ID NO: 97917 - DNA, 103 bp, Heterodera glycines
  unsure (1)..(103): unsure at all n locations
acgaagagaatgttcagatcccgaaattcttcagggctggcacaaaggacatcagaaantactgcagaatgatgatgaagttccaaaatctttggcaaaaatg

SEQ ID NO: 97918 - DNA, 110 bp, Heterodera glycines
ttctcgggtaaaagcccgaatttggggcaaatatttaaaaaatagaaaataattaaattgtgtgtgtttacttcccatagggggcacagttcaagcggaccaactcaatg

SEQ ID NO: 97919 - DNA, 1003 bp, Heterodera glycines
tgatgtaataattggaagccaaactcttagaaaatggaaaatgaattttaatatttgatttactctaaccgaattgttttcattccaatttttcattctgtgctgtttattttattctttaaaatcttatatttaaaatcttttaattaaaattctgaatttctaaacatttgattcttgagtgcactaattcttgtaaatgaataattaaatttattaaactaaagtttttcatttaaatctttgaaactgggacaaatgcaatgcgttttctgtgaaaaatattttttcaaaaattgcgaataaccaaatttggtaaatttttgaagtttttgagtaaagctatggaaaccagcgccaaaaattctcttttaatacttaaatatctcatatgcttataacctcaaaaaatggttcttgatctcatttcttgggattttttttttttttttttgctataactcaggaaggaaaggattaaaacaaaatctctatttttgaatacaatggaatcaattttaacattgagaaaattggaacagattacgcgcaatgcgcacgcctttgtggtccaagggacggacaatggtgccatttacgagtgcgcgagtcaaaccaacgcgaacatgtcgccgctgatcagtcgggtgacactgcgcgttgactgtaagcgtaattaatttttcctatttgtataatcatttttcaatcccatttaatttggccattttatatgctttaaaaatattaccattttttaatcaaaaattgtcaaaaaatttagaaaatgccaattaaagtcccaaaaatggcacccataaaattgggacattttggatataaaccataatattttaatgatctgggccctggtctttctttcattttttaccgtgattttccccgcattaatccccggctttgcgcctctgttacctaattgtccaattcccctcaaatagaccctccggcaagtgtgttcattttcggcaataccgtaatg

SEQ ID NO: 97920 - DNA, 614 bp, Heterodera glycines
ttcaaaattgtatctagcgcagaaaaaagataaaagtcttcaaagtttgaacctaggtttttgttacgccaaatttgggccatttcagggaaaagtcgtaaaactttttttctatactttacaatttattttattatttaattacatgtaaaatattaaaaaattcgtaaatcaatacatgcgttaatattgtatgacgttttgtcatattttcgtcgtccctctgctgtcattataaacatgggagaagggagaaggcaggcaatggcattgtggggggggggagaaggccggcaattgctaaaagccaacaatgaaaataggcataatgtggggtgaagacaaaaaaaaattatagtttttattgtattctatgaaatttatatggcagagaaaaaaagtaatagcattttgcatataatggaaacagaaataaatgaaaggggtatagaaaaaaatgaaataacacaaaaggaagacgcacacagccgaaagaattaggcaaaatgccacgtttggcaacgtggcaaagttcccttatttaatcagaaaggaaaggcaagaatatcataattcaatcaacatttgaagcaaaggaatcaacaccagacatg

SEQ ID NO: 97921 - DNA, 998 bp, Heterodera glycines
aaaagggaaaggaatgaatggccaatgaatgggggggaagggacgggacactcgaatttgagttgaaatcattaaaaatgattaatttaatttaaaatatgttgaatttactaataagtttagtccaaaatgttatgcttttcgtttggacttttcatcttttttttgtgaccaaaattcgaatttgttttcaatcatttatttattttttgcgatatttaatattttttctgggtaaataaagaatataaatttaaaaaagaaaagaaatgcaaacattgtatcaaaatcataatgaacgaaaactttttgataccattttatcgccctataaaaagatgccctttttgcatatttcagaccgagggccgagcccgaaaatccgaagttgttcaatagttaaaattaatttttaaatttatgttgaaatgaaaataaatagtttaaatcaaatagccaagaaaatggtaccatttatggccaccccattttttgcgtgtttcgcttttggcttcgtctgtccgtccgtccctttatctcctccaatggttttgttgccaatgtttttggttgttcgccgcgactgatcatcaacagccattcttggcccagtccatctcggcactctccgaaccgaccaattcattaactaattaaccaatgtatttattgctttgccgcattcccttttgctccttcagaaattaggaagaaatgaacggaccatttatgaaattatttgcctaattggtttttggcggtggcggcgcaccaatcgcagcatgaaaattgcacttgagcaaaaagcgaactcattttcaggactaaaaaagcgcaaaagaaagtgcaaaatgagaggacattgtgaaatttaattaaatgaagaaaagggcaccgaaagaggcgtatttaagacgaagaaagagggaaagagaaggccaaacagagaattagtattttatttttcatttttatttaagagaattaaaattgaaatg

SEQ ID NO: 97922 - DNA, 349 bp, Heterodera glycines
tgtaagtgtgtcgttaggagaatgaaggtgctgatccaaatcggacaagattctctaaccgacctaataaggaatccttggtcggtaaacgatcggcatcaagaccagtcaagtcggacgtccaggacgccttacatgccattgaagtcgagccggaggaccggctcttctgcaaaatcctgtggttaaaaaaccctgctcacccgtctcaggcgacaatctgttggtctatcgctacaagcggctcgttttcggcgcgacatgctcccccttcatcctcgccgccgttcttctccaccacttcgataggcacgaccacccattcgccaaggaattggccgcgaatatg

SEQ ID NO: 97923 - DNA, 1003 bp, Heterodera glycines
gtgaaaccggcaccgtccgtagggtttaggacctggttttcgcgcactttgcggacggtaattctcccatttaaaactaaaaggtttgggaccaaattttcgcgcacttgggggagggggctaccgtaataaaaaaaaaccaaaaggtgtggagccgaaatttaagggcgttactgtaaccaattctaattaaaattcaaaggttcgtggccaaattttcccgcattttgtgatactgtaatataaatttgacttttaataaaatttattttatccaaaattgggggtcatctcaccccccccccccattttttccattcaattgacaatattgttgctttgcatattctgcctgcgagacgatgtgcggctaagggaagagaagaagggacagagtgaacagtgtatgctatctctgcttttctctcttcctcttcggcgcacttcatccaaattggtgtcattctttgatcaaacgcatctgcgttttgggccaatagccatcgcggcaaatgtgtgaaaagaaatatggaagagaaatcggggaagggggggggggtttgatcgcagattgcttttaggtgtgtccaatggtcaacattttggacaaaggatcacagcagacaatggccacgacttttggtcccattgaatgtaagtttgggatgggcgggatagtcatacccgaatacccacaggccacatcttcaccatcatttgtacaaaatttggcccttttccttttttttagcacaactgatcaaattcccttaccctaatgagcatcattcccatttctgttcgtcccaccaatttgacctggatggtcattgagggttgcgtatgcaaccggccggatgctgtatgcatccggccggttgattatacgaaaccggtagagtgcattaatgtggcccatttggggtcgtttaccgaccatctcctcagcaaaccgtgcgacaataccagcaacttcaatgtcaccgagttggtggctggaatg

SEQ ID NO: 97924 - DNA, 153 bp, Heterodera glycines
ttactaattctgctgggcggattaatgtgcacaatcaaaaaattaaaaaaaaacgaaaaattggcgaaaataaatgtttcattggacgcaaaaattttacgagcaaaaaccataaaatatataaaaactattttttatagatttgatgttatg

SEQ ID NO: 97925 - DNA, 163 bp, Heterodera glycines
gacatttggggattttattaaaacaaaaaaaatatttaaaaatttatcccaaattagacaaatttacaactgctttagccagagttaattccattgcaagaaaaaacaaaataatatttttaaaattaactctaattactgactctaagaaacagaaaagatg

SEQ ID NO: 97926 - DNA, 769 bp, Heterodera glycines
atcgatttaacaattagacaagttataaatgttttttctttttttgataatttttctttaaaatggtttttatttttgattttttgtcactattttcataactttttcattttagtatcattattagttaaccatttatgggtagcactttagcatttgtttgccccctaacttttataaaatatgtatcataccaaaagagtttcttgtcaagacctatcaacttgcaaatttcttttgggtataaaaaagcgattttttcggattttttgcggcctaattgagcttttcaagctcattcaaatgatatcaattttttaaagtttgttggcaagtaattttaacgtttggccccgaaataaccccggcatatcatgggaatgtaattttttttattatgttagtaattttattcaggactcccatcggcaaagttgggtttcaatgtatgggcgagccgattctcaagtacacaatggggaaaatatcgaaatccaagtacatttcatatcaatatggattaaaaaaggatgcgttggttttattttatacgcaaattccaattttgaattaggaataagatcggatttttcaatacttacaacttattttaagaacgctggcgagcaaataaaatagagaaatttcgtactattgtagaataaaaaaaaaacaaaaattttaaatttctttaaatttacaacccaaaatgggaaaattattcaaacaattttttaatttaaaattctaaaaatattttaagataatg

SEQ ID NO: 97927 - DNA, 199 bp, Heterodera glycines
tttttatgaaatataaattatttcgacaaaacatgccataactttgcttaaacacaatcaaattttacactttctttgtaccattcgatagccaagttttttctctattagcttgcagaatttcaaacaaaatttattaaaatgaaatataaaaaatctcaccgccttataaacggagaaaatttgattttaaataatg

SEQ ID NO: 97928 - DNA, 1003 bp, Heterodera glycines
cattaaaatgaaaggtcttataaacttataaagaattaaaatttttattattctcaatacataccaaaacttgttggtgcacagctagtaaaataaaaccaattattaattttattaaaatcatgcatgcaaaacgcgttaaaacttgaattaaaatgcaattttaatattccgcacacgaaaaaagctaatattcgtatctattcttccgattttagcagttttaaataatgttacatttataaagtaaaattgcttattacttttatttattttgtttccgaatttagcaaccagaatttcttgaaataattttatatttatgatattaatcatttttcggatcaaaaatatgactattattgtctttggtccaattatttgctgagaaaataatgtatcacttatttacattaaaatgaaaggtcttataaacttataaagaattaaaatttttattattctcaatacataccaaaacttgttggtgcacagctagtaaaataaaaccaattattaattttattaaaatcatgcatgcaaaacgcgttaaaacttgaattaaaatgcaattttaatattccgcacacgaaaaaagctaatattcgtatctattcttgcgatatttgtcgcgactcacgtcacgagaaataaaatggaaaagataaattttaaagcatgatgcaatttcattaaaaatgggaaaaccttaatttaattggaaatgttccccctcttcgtcgttctattcaaaaaatatttgtttgtttacattcaattcttattcatttctcacacaaaaatgtattaatcagcgaatgacaccctatttaagtcgtggaattgttattgaaatcggttcagtcggaataaaacatcattcccctgcttgtctactgtttgtcccaatttctattttgccaaaatttttgccgggccgaatttgcctctgtttggtcccgacaagtggtgcaacggccgggaacctatgcactgatgaatg

SEQ ID NO: 97929 - DNA, 1003 bp, Heterodera glycines
aattaacagccgatatgaaaataaaacaaaaccaaaatttatgaatcccaaaaattccatatattttgtctaataaaaatattgttaaataatgatgcttaaatatttattaaacgatacaatgagcaattttccatttaaaaattttattgattctctattatgaatgaacaaataattaactaattaattataaaaaacaggaccataaaaaattatcggaaagaaaaatataaaaacaaataattacaattgatataccgaccttttattcgggagaaataattaaatgcaatatgtcttaacattaaaatgctattgaaaatagcaatgaagaaatttacgtgggtgatgcaggaaaaatgaaaaatttgtaatatattcaaaatatttttatggtttgcaaaatatttattcaacattgaactcaaaaaagtattgacaaacactacggatgcattgaaaatcaaaaaccaaagctttagctatggaatgaatttatatttgctaaaaacgatacaagaaatacgcgaaatatttgataaaatcccaataaagctcaaatatttgccaaaaattgaaacaaaactgcgtaaattaactttattatttaattgcaaaaatatgtcccaaactaccaaacaaagtttatatgaggtaaaagttcaaaatgttctaaaacttactctgattgaaaagaaaatagaactgcgagaaaattaagagtgtagaataaaaatattctctgtacgaaaagtttttatgtaaatatataaaagaaaatccgttaaatcctttttataaagacaatttaacaagaaaatacagctattattctttttatgatacatattaatcaaaaattttgtaaaataattagatcagatctttgaaaactgaaattctaaataaaaatttcaaagaatatacaaaaaatatttttattatgggtaaaaaatattatttgttcaattatgtagagttaaataaaacgctcaaaatg

SEQ ID NO: 97930 - DNA, 249 bp, Heterodera glycines
gcattttaaaaaatttgggtatttttgtttttttgcttttttttgaatttttttccctcaccaattttgggattatttaaatttaccctccttttttttcaaatttttttggaagttgaaaaactcaaaaaaatgtttccaatgggatttttctggcatgttgaacaaggagtttaccatttaatttgatcaattttaacatgaattcgatttttcaaatttcgtttttttttccaaaaagaaataatg

SEQ ID NO: 97931 - DNA, 295 bp, Heterodera glycines
ggtatgcatttcgtattttgccaaaaacattgtgacattcaaaacatttttccgcctaatattttttgtttacactggtttaaaacaaaacacaataaaattataaggaaattgtaaccgttttaagtaaaaataaatgaataatagaatctcttcaagaaagaagggacctattaagatgagttaattgcatcgacattgacttgggggaggggggtcaaaaatcaaaagcactgacaataattgttctcgttaatgggaacgatgtacataatatgctaacccttgttcaatg

SEQ ID NO: 97932 - DNA, 249 bp, Heterodera glycines
agtgcgaaaccaattaaatgttcatttcccatttcacttctatcgcaaatgccaacaaatttaacgcgccattggccgctcctaatgaaagaaacaaaacgggtgcttacttatgtttttgcgcgtttttcttctttcaaaaattcataaatttgcgcgaaatttctatttaaaataaatttaaaaatattttttaaaaattcattttcgattttaattattttattttattgcatcattattaaaatg

SEQ ID NO: 97933 - DNA, 95 bp, Heterodera glycines
ttttgtgccaattgagcaagagaaaattacagtaattttccgttttgggcctacacctaaaaattttaaaaaatgcaacaaaacaatacaaaatg

SEQ ID NO: 97934 - DNA, 59 bp, Heterodera glycines
aaaattttgatgaaatattcggcaacgaatggaacaaaaatgaacgacaagataaaatg

SEQ ID NO: 97935 - DNA, 145 bp, Heterodera glycines
ttgtagcagaacgaatgagacatagctgacaaattgcagggtcttttatactcccggaaaattaggccacgcccactttgcaaaggtatttaagccgatttttcacgagcaatcaaatcagtcttgcgaaacatcatcaaaaatg

SEQ ID NO: 97936 - DNA, 154 bp, Heterodera glycines
accgacctcacatttcattggcgcggaggacggaactgttggagatgttgtccgagcgtttgatgccgtcgccctctcatcaaaagtcaaagtgggactgatcatgatcggtcgtgatgcgttgatgcgcaatgaaaccgccgacagcatcatg

SEQ ID NO: 97937 - DNA, 104 bp, Heterodera glycines
agagaggggagagggagagagagagaggggagagggtcattgaaggcggacaaaaaacgattaatgttaacgaaaattgccttaattacaggccgaatggcatg

SEQ ID NO: 97938 - DNA, 59 bp, Heterodera glycines
agtatctataataatatattttatactgtaattaaataaatatgttacagtgtgagatg

SEQ ID NO: 97939 - DNA, 1003 bp, Heterodera glycines
ttttttttgcaattaaatgagcaaatagccaccaaaaaatgtagtggttgcttaaaatcgcagtcatttggatgatttaacccgttttttaaaattgtctcttcttttttgtgttaattgcataatttagtattttaattcctaaaatttgattgattttctttgtttatcatttcaaattagataggtttgcatttaaattttgactattatgtaggtaaagtcgtaaattgaaacagtgggtaccggttgcgcattagttaatccatcgatttttatacataacatttaatggtaatggatgaacataaatgtacacgagttaagggggaggggggagatttgccgacaaaaaagttaaacatattaacattcaaaattttttgttgtcatacatattttacgttggtattcaataattgatttataatgacatcatcactaaaaattaaaatattttgtcttccgattccattttccacaatgcttttcgctttgaatattataattaatgcttattaaaattaggtatgcttctgctgtatgcaagcacactcattcattcatatgtttgcgcacctttcattcaaagatttcccaaaaaacagcgaccaaagtgttcaggggagaagggaaggggcaggtggggtgcatggaggcaagaaatgtaaaaaatgcattaatatttattattttcttatgtaattaactctgcttttctttgtattacatagaaaaatggctcttaattaaatgaaatatataaaaatataaaattgcatttttgtttttctgtaataataataaattaggtattttaaattgctttcatctccattatcatatcacatatcatttacacattttgacttatttcatgtgtcttaagacttaggcttgattgtttattgcttcactcccacatacacatattttttttctcatattcaacggccttgggcttttgctttccaattggtacagtcagtgtcaaacagaaatg

SEQ ID NO: 97940 - DNA, 174 bp, Heterodera glycines
aaatggaatacgacaggaaagcaggccactccaaattatattttgttttgtttcgaataaatttgaaattttcttcatagttaatatttaatttggttgcgttatttccgaactatctattttcatttgtttaattttttcctttttttgtcagttaatctagaaaaagtaatg

SEQ ID NO: 97941 - DNA, 133 bp, Heterodera glycines
aacacatggtgctctctctaaagcatgagaggcacatcgcgcccgtcacaaaataatacattttaaaaaacgttgacaaatttcacttctgtgtctcatggattaaagatggggtgaaaataaggaagggatg

SEQ ID NO: 97942 - DNA, 508 bp, Heterodera glycines
ttttttgctattgtttttttgaaaaatgcattaataaagttcagcaatttataaccaacggacgaataggctttttataaattaattttatatattttttagtagaatattcaatattcaaattctatttttttcgtcatttatcagattatgctaaatcatccatctgctgttggtacattttccatctcttctcataaatgatcaaccaacaattttagttgagctgtgctttctcccattaatatggaaataacttttctaatgtaaaagaaatattagcaaatatttaataaaaataaatcgaaaaaacaaaaattttttatacatttctttcttttttagtgtaaaaaatgtgccattttttgaatgtgaatttaatccttttgttattcactttgttcaatgtgctgctgaccatcgctcaactgtatttttattattattattttttactgaaattacatttaaattttcaatttaaagttttcaaaaaacggatgaaatg

SEQ ID NO: 97943 - DNA, 84 bp, Heterodera glycines
tgttgtcattttttccgatatctctataaaattgttcttttatgacaaaatgatatacaactaaatctccagtttttcataatg

SEQ ID NO: 97944 - DNA, 255 bp, Heterodera glycines
  unsure (1)..(255): unsure at all n locations
tattttattttaattaattntaaattacattttttgcatttagcccgaactgttcggcttacagtaccaaatgaaggtgacaaaattcaattttattctctctcttttaacaaatgtcttacaaaattgggccaagaatttttcatttttaaattttgggaccaattaatattattttattattttttgttttggttttagactgaattaagaattttttaattaaaggccactgatacggagaagcgaatgatg

SEQ ID NO: 97945 - DNA, 123 bp, Heterodera glycines
ccttaatatatatattttttttaaattgaggattggttgtgtttaaaataccgagcccaaacattgaaataaaaacgatctgaacggctaaacgatacgcaatgaaattttgtccagaaaatg

SEQ ID NO: 97946 - DNA, 56 bp, Heterodera glycines
tttttagataaatttcaaatggcaaaagaattggtgaatgggcaacaaatttaatg

SEQ ID NO: 97947 - DNA, 685 bp, Heterodera glycines
  unsure (1)..(685): unsure at all n locations
atgttaggaccaaaatttgaattcgttgtccaattattgcatatttaattcgtatgaatattaaatcattcgaattaggtcaatttcgcggcttggatttgtcanaattnaaattctgagtccgaatttgtgcatatntaatttcaattgtgtggtttgggctgatctaaatctgaattcgtcgtccgatcggtgcatagataattagggaatttttaatttagcagatacatcaaaattttgtcggtattaagtaaagcaaaatttcaaatttaccgacaaaacaagacaatgaaatgggtcaagaattgtaattaattagcttttttggatataaaaggcagtacgaaggtttactgttcataaaccaaattcataattcctttcaaatattgtttttatgcaaaaataaaatatattttaaattaactcattcgcctcccaccctgctcttttcgtttcttaaaatttttcacatttactgtttacattttaccatattgcattattccaataaatttaaaaataaaattttgtttagcatttatccataaactaacttttatttattccaaattttaaaaatgtctacatcggaatcaaaaaatggtaaaaaacactcaattcctcccttaacattaacaatctttcacctacagcaccggacgacgtcgactgcgaaatg

SEQ ID NO: 97948 - DNA, 1003 bp, Heterodera glycines
cccaaaattaacgcacaatataattacaaatatttaaaaaagttttcgaaatataaaattgcaaaatatgatataattaattaaacgaataaaaaaattaaataatgctattaataagttcttttttatttcaatacttgcatttttgaaataaataaatattaattataattcaatgtgtgtaaaaaattatcatgaaaaaataataaaaaacaaatgtattttttgttttaaaaaaaatgaatataaaataataattgagtataacctaaataaaacaaggatctctgcgatgaaatctagaacgtctttcgaagcgatcatttttttacaatcagaatataaaaatggatttaaatattgaaattaaaaatagtacatgaaaaaaaattattttattataggttttaatacgtgttatattaaagtatatataatataaattcgaaatcaacacaattatttttgaataataaattgaaattcataatgtatatcttattaaatataataatttttaaatccaagctgtaaaataaaactaattgtgaaattatttagataaacttatcatgactttaaatagtttaataaaaaataaatgaatatatttgcataaaaaatattttaataaaaaaagtaaaattgcattataacattctgtaaagtcacattttaaagtattattaaaatatttttattatttatgcttttgtttttaataaggaattaaacatttattaaggaattttatcaattttctaaaaatatatttaataataagttgttcaaatgtaaaaaataagtttatcaagtattaattgttccgatcaacatttacactggtcccagctcaaattatacatgaaaatataacattttacaaaaacagttggagccgactaatttccgacgacgatgtccgacctgccataagaccttccgcttcgtcctggcgcgcttctcgtatttgaacttcgaaacgccgtggttgccaaaaatg

SEQ ID NO: 97949 - DNA, 290 bp, Heterodera glycines
ttattgtacatatataaactaatgccatcataatttgttcaagacaagcccaaaaaccgaaaaagccaattcgatggcacaatattcatttgtgtagctaacggagcccttttacaaattttgccatttttttttgccttaggttagatttccataaaaacaatgacaatcctttcattgtcagtgaacactttggtggtgccgtttctctctgcccttccgttcaattgcgtctgtttttgccgaccgcggacaatcgccggcgcctcttcgccagcacagtgacaatg

SEQ ID NO: 97950 - DNA, 113 bp, Heterodera glycines
ttccaaaagagcaatatgaaatcatcatgagcaaccacacaagagagagacgcaacgtgcaacccgagcaactcgcttcgcagctttcagctgctcaactagccacaacaatg

SEQ ID NO: 97951 - DNA, 268 bp, Heterodera glycines
cgacccagtcccccctggtctataggagccgctggtaaaaaatttgtaatttttaatgagatttgttaatagcctttttgtccaaattgatcaaattataataattttgaatttttttcgagtgcttatttttaaggacattttgaattaaagaatttttttcaagtgatagggcccaaatttcaagacgttcttgcctcaaggacgaatcccatccctactttaaacagatcaaaaattaatttaaaaaattaatgcacgacaaatg

SEQ ID NO: 97952 - DNA, 1003 bp, Heterodera glycines
aaagcggcttttgagctaacttttctgcttctgtcggtattcgatagattggcagtcctatttttggcaatttttaatacattatattaaaatattaattaatttgacagggacaatttatattgtagcataaaattacagaatgtaatgttttattttttgtttatttgtgtcatatttttggaagtgttcatctattaccgggtgaagaagatgctggaggtatttcataccatcgaataaggcttccagcacgttcagcctttaataaataaataaattgaataattaatttttattaattttgaaattaaaagtgggttgaaattattaattatataattaaaagtgggttgaaattattaattacaaattaaataatatccatttcttcctctgccagttaacccggctaaaaagaaattataagtatttaaaaaaaaccatttacgttaattttttggaaattttcccaaaattttcgattttaggacgtatttaattgataattcaaatgcattaaaaaattgaaataatgatttaaatatcggaaaaatgcataataagaaaattagtaaacatataattaattatttttttcgtcctcaatcagtttcttctccgttttttcacttttcaactttctttccgctctaaaattttaaattattaaaattaaaatgtttttaattctataaaaatgccattacatccaattcttatgccgaacaagcagtccttttgttcacatggcttctcatcaatggtttttgcttaattaattaaaaatatttgacgctaaaattgttcatattgtaatgtaccaattaatttgttccgagaaactcaaaaaagttttggccaaatgttcaaatgccatccttttttccgaaactcccgcattggatcggtaaaaaccccaattttttttacatgacatcattttgatgcttttatcgaccaacacccatccgtgtccattaattgcttacatccacggatg

SEQ ID NO: 97953 - DNA, 349 bp, Heterodera glycines
agtgagtcatggcataacccaaacaatcaaattaaaaattggtgttcgactggtctcgtgccaccgtttctttctctttttttttctaagtgccgaggtcggaggcgcccatttgccctttgggtcgcctttgctgcacccgtggaagggcggctcgcaagcattgggcagtttgatcgacaagttcagcactcggcgccgctcctcttcctctgccgcaacaaaattggcagttgggggaaggctcggcacgacgcccgaagcggcggtcggacaatgggaggagggcacgtcgaccaatgcatttgacagagcgatcgaatgcatttgcgaagcgatgcaggaaatg

SEQ ID NO: 97954 - DNA, 94 bp, Heterodera glycines
tgttgcgccccaacaccgcagtgccagggatcacacatcagctccgtaagaagccttcactttcattgcgcctttgggttttgaacacccaatg

SEQ ID NO: 97955 - DNA, 1003 bp, Heterodera glycines
gaagaagaggaaaatcagtcattcatggaccaaaaatattttgaagtaaagatttttgtatggatgcaccaagaaataataggtcaggtttttcttgccatttgcatatttgtcacaatttgcgctttcgcatggatgataatggagcgtagacggcgttatcccatacgcttaagacgcgaccgtgtcgaaccgcaaagacgaccgaccctagtaatgcaatggctaactccagatggacggccggcattagtcatgcagtgacagattagtcgaaattgcctatgtacaaaaatcccacccacactttacgctaataattttataaaattttttcacattgcccaccccaaatgtgcattaatcccgatgggattctctatcagcaaattggggaagtatataaataggaaattcaccccatcacaccactctcgtttatgttcctaattgcctcctatacccgtacgtcctcatatttgttctgcagaaacatgaatcccaattattcataccccaacacttactcctacccggctatgaacaacaacgtacccaatcccgggtacaaccaggcaccccctccgggaatgggggtgcaacacaacaacccgccccgtaccgaatttccatcccaaaactacaacccgtaccaacaacctttttaccctcaccctaccaaccaaaatggtgcgtcaaaccctccggtttaccatttccctacggatgcccaaaataaccaacaacatactcacaaccaaacttacaatgctccggctccccaaaatccgctaccaaatcattcgactcaaaataatgccccagcggcggtccaaaatcctccccaaattacccaaaatcaccaacagccttagggcaacattttgaacggacaaaatgcggttcctttgaaccagcgcgttattcccccgccaaaatattacaaatcgaacaaagagaaaccggtaagaaaccgctccccattcttttcccacaaaacatg

SEQ ID NO: 97956 - DNA, 251 bp, Heterodera glycines
acttactgtagtcgattgttactgtataaaaacgggtttgcttcttttgcttgggaagggagcataaagttactgtaggtactttacagtaaaaaatgtttagttcttttgcttaggaggaaggattatttactgtagttgactttcacagtatgaaatgggtccgttttttattggggttgtagagataatttactgtcgtcaatttgtaagtaaaacaccaataagagcttgtcttgggatgggaaatg

SEQ ID NO: 97957 - DNA, 232 bp, Heterodera glycines
agttgccctgccgggaccgggaaatgggtgggggggggggaaaccttaattcccgtctcggccccgactaaccaatgttattgatgcttcatgtccaaattaacttttgcaattactttttataattacaaaataataaatctcgttaagtttttatgattgaattttttctgaattttaaatgattttgtttaaaggactaataaatttatttattcacactttaactatg

SEQ ID NO: 97958 - DNA, 771 bp, Heterodera glycines
ggaccccctccgttccccaaaagtttttaggaaaaaccgccgcaaaaaaatagggtgaaaagcaaaaaaaaaaaaaggtcgtcgcccgggagggaggtaccccccccccaagccgaaatcctgggaccgtccctggtggggggggggggggggtcaactgggccccaggccggttttttgtgcgataacttctttcatagttgaccgaattgaatgaatttgataccattcgatagccctatatgttctctatttccctgccaaaactcgaaaaatttcgttaactttcaaaaaagttagggccaacaaacttcaaaaaattggtgtttccgaaaatttttgaattaattttttcccagtccggtaaacaccaaaacacagccgccgaaaacacagctgggacataacacagccggagataaatttttttaaaattttcaaacttagaatcttaagagaaattttctttgaaaattctatgagaaaaaaaattttcagcgcttttttttgaaacttttttgaaaattcttagaattcgtcattaaattttgaaaaatagtctaaaatttcgttatttgaatttttttttttttaatttattcccggtgtgttatgtctcggctgtgttttgtgctgttccgcacacagtcgtcccagcagttcgtttttaaaacttgtcatacatttagtgaattcttttgctgttctgttcaggtgctcggtctctacggaatgattgtctctctgctgctaagttcctcctgaacaatg

SEQ ID NO: 97959 - DNA, 100 bp, Heterodera glycines
gtatttgaatgctttaaacccttcagggtttccgcggcataagttgagactgaagaaaaattcaattgttttgttaatgcgtaatttgaatatagaaatg

SEQ ID NO: 97960 - DNA, 222 bp, Heterodera glycines
  unsure (1)..(222): unsure at all n locations
tgtgcggcgcgtctccaacatcgacggcatccacctttgactaaaaaccggcaaaacgtcaaatttatttttatttttttgacattaattaaaattanaattttttgttataaatttgcatcaatactaagtaaaaaaaggcttctacaaacttaaaaaattcatattataaaataaatgaatgtcaattaacacctgttcaacagccaccgagtcagaatg

SEQ ID NO: 97961 - DNA, 1003 bp, Heterodera glycines
ttcgaaaaatacaaaatgattaaacgacatatttgtcaaaagaaaattgaaaccaaaaggaagtcataagttgttatctacgattaaatcggataataaaaattgttctgcggtaatgaaaataaataaatgatttacaaaacatgaaaaataacggaaggaatttttacggtttgagttcacagcgaaaaataactttcttttgcattcaaaattcaaatttggcgcctcttttgacctaattattttggaaaatccagctgttgctggcacagctgtcaacttaagtgattgatggctcaaaatttgcattcaaattggggaccggaccttatttcgcaataaacacgtgactcatcggccagtcagtgcgacgcactgtgtggaaaaggccaacaatactcgcggtcccgcctaattgactcatgaaaaacaaccacgtgccaggcggtccgcctgtcacctgagcgttctgcggtcgctataaaaagcgcaatttcgcaaaaatatttcactttaatcgagaaaaaataaaattgcttataaaaatattttacaaattgaattttatttcaaatttaccaataaaatatttattttatatttaaaaaaaacatatttcacttaaaaaatgtcccaggtccaaaaaaaattcttggccgtccccggtgaaaaaagaaaagaaagaaatataaaaaattttttcaaaaaaactattgatgaaataaaattaaatgaaaataattatatcgaaatatcaacaaccgaaaaaagtatgcccgattacgggattcaagaaaatattacaagatttatatttaaaaatccaaaaaaagaaaatcgaaaagagagctccgaaaactttaaaaaaataatcgaaaatttaattaaaaaagcaatgatgaaaaaaagaattgggtgggatgttaagaggatttctattgatttgttttgtgagttgctaaatgacccaatcattttgccggcccgggaccctaaaatg

SEQ ID NO: 97962 - DNA, 269 bp, Heterodera glycines
ggtaagaaaaatttgggaggaatttggacacggataatgcactttcctggccaatgattgattaaacatatttataattcctgatttaattattcatctgaatttcatttcactcaaattctgaaatttaaaatttgaaatgtttttgatgacttttcaatctattttcttcttcgatagtgactctaataataggtcactgaactgaaaagcccaggtttttatttttggctctttaaatctttaattttagtcttttgtccgttatg

SEQ ID NO: 97963 - DNA, 189 bp, Heterodera glycines
aattaccctcaaaaatattttggcatttgaatttgccaatccatggcttaaaagaagccacttttggattcttccccaaagctcgactttgatttggtttcaattaattggctgttaatttcttaattcaaagattgtaaaaataaaactccgcgtgtgcattgaaccaccttctcacagtgcgaaatg

SEQ ID NO: 97964 - DNA, 62 bp, Heterodera glycines
cgcggacgacgcgcagtgccgccactggcgctgccccgttgacgccgcctcgtcagcgcatg

SEQ ID NO: 97965 - DNA, 263 bp, Heterodera glycines
tttattcacatttttaaatttatttttggccattatggcaaagcacacgtgttttggcataacaaatgtgcactttatcatataataaaccaatttttattttcaaagaaattaatttttaaagtcagtttttctttgctaatttccattaaatggcatattctaattagcttatcaaatattatgaatgcttaaaattaaacaatatatttcatttttaagattttttaatttactgacacacaataaaatttgcgggaatg

SEQ ID NO: 97966 - DNA, 984 bp, Heterodera glycines
ccaaaaatttgcaattatctaggcacatatgccatagtttaagaggcgcaaaaatccgaaaatgtccttaggtatagacaaatctgcttggcaagctctattaatttgcaaaacatggtacaaaaaatatgccaaaaaatcagttgagaattttccgctgtttatattcgaatcttcgggaaggattttcagaattcagaagcacttactaattaatccctccccgtttgcggatgggttgaaaaaaaggcagctttatttttgctatttcagtaaaatcccattaaaaatttcaattcccatcacaaattgtcactaatgatgaaaattttaggtttttacctattttttcctgagctccctatggtctgaatgcacgaaaaacatgtttttttggggcggggggggggggttgttaggttacttttcgagttatttgcacctatttttagttttaatttttagaacttaaaaatcctaaaaaaaattaaaaacctattttaactatttggtattttgccaaaattattaacaaaaatgcaataaaaacgaaaaatataccccctaagaatcgaacccaaaaatttcaggaaaatacaccctacaccccaaagaaaagaaaattttccccaaaaattcgtctcaagaattttaattatttattttcttgacaaacgtttgactttaaaaaattatgtaactcaatattgatttggcttaattttgttgattttttgataaaattttacaattttacacccctaatttagaatagaacttactgacgcagaacaacaggtgaaaggcacttcgaccagcaacgatttgaacgttgcttcgagcgatgatgaataaaattgtgagtctgttcaattcaaaggtggcaaaacaaactgaggagcgctttgtcttttgcacaaggtgttaatagtttttttgtttcattattttcaggcttccgattaatcaaaaacagaaaatatg

SEQ ID NO: 97967 - DNA, 145 bp, Heterodera glycines
tttggaagcggaaaaacggagtataaaaaggaaagggaacttatgtgcaatggtcatcaaacattaattgggccgccttattgtaaaacaggcaaaaaaagcgtattcgatcggacgctttgggactttattaattaaataaatg

SEQ ID NO: 97968 - DNA, 1003 bp, Heterodera glycines
ccaaggacatttaaaatttttattatatgcaatgaaaaatgattaatatttattcaaatggcttgtatttttcaccggaatggattttttccaacattttttttgttttcactgatcattttcctaattcgcgacgacttttctgctttaaaaacgctttttttgcggcgtgttttttcaaaaaattttgtgggacagaggggaggggggggggggtgtccggcggtgccgacaggcgaatttgttaacagattttcaccaaaaactgcctaatttttgtgattttaagcctaaatttgcatttttttgacataatgccataatttaatccaaatattgttgaaaattacaaaaatttatcaattttctttgattttttttaaacttttcctaatactcatttccaaggacgtccttggcatccaaggacggataccatccctggcctattataatgaaaagaacaatatatgtgggtggtagatgcactaattagcgtaaattattaatgctctaattgccttctttaattggccaaatcaaagcatccatcatttgccttgatgagcccagcggtttttttttcaatttttcaaattaatggaataaataaaccaaggatgttttgtttgatttcaagtacattaaattagggatttggcgatttcaacaaatttttggcaaataaagaattgcctgcataacataaaacagaaatatttacctgagctattttttgcattgacgcttttattctcttctgaaacttaacgaaattttttgaaattttgtagactgattgagaacattgagaacacttagggctatcgaatgattatgcggatattttccaccgtttgcgttgtaaatgtgccccgacaattttcaacgattgcctaatgttacgtgttgtctctttccatgccggtgccgacgatttcttcatcgaatttcagcccgatgacagtgccatggcatcggatggacaagcggtggcaaaatg

SEQ ID NO: 97969 - DNA, 373 bp, Heterodera glycines
tcttttctgacagaagtgttcaaagtctttataatgttttattataaataaaacaaaaaatgaataaaagacagacaaaatttgatgaaatttttaattttttcgaaaaattaaatcatttgacccaaaataaataataaacttattaacacagtaaaaccaatccaattttcgatttaaattatgccaaaaatattatctaaaaactaaataaataaataattttttaatatatcaaaattttcaaataaacatttgaactttttctaatttcgattaaaaatgctttggcttacggagccgaacaaaaaaaaatggttttccttgaaaaatttttcgcgcagcgctcagctgacggaataaggggaacatg

SEQ ID NO: 97970 - DNA, 447 bp, Heterodera glycines
aatatcagtatataaatcaaagcgggggagagagaccctttgatttgggtttgcaaaatttttggcataataaatcgtgaattgaactagctgttatacctttcatccattttcgaccaaacccgaatccttaactctaattcaataagtcgaaaattttccttattttgaattcttgttctagttgtagttagggatttggatttttggtcaaaaagaaagatatcctgatcagaacgactcataaaactcccagaaacagattttacgatttgacgacacctaaaaaatttccaattttattttccgaatttatttcatttggaattctatgaaaaaggaattgtcttttgctaattaggtagcaaattacgaaaagaacatatgctagcttagtttgggcttatttcatgggaaaattaggtgggcggtactgctgcgcatatg

SEQ ID NO: 97971 - DNA, 357 bp, Heterodera glycines
  unsure (1)..(357): unsure at all n locations
aaataaattggtgcacaaaatnagtgagaaattcctagaccttccagggcttcagattcaaaaaattttttgaataaaataatttcttttccacataaaaaaattaaaatgaagattttttcatagattatttagttgcgaagcaattatatatgaataaattttttttcgtcatttgtgaccttgaatggaaaaaatctcatttaaattgagcaaaagttcattaacagaaaagttgcttttttttggaatcgatgaaaacaatacaaatttaatgttaatttaattaagagaattattttaaaattaatattaattaataaaaaatcacttatttgtcttttgtagtagtatatg

SEQ ID NO: 97972 - DNA, 765 bp, Heterodera glycines
  unsure (1)..(765): unsure at all n locations
attttgagattttggccattttatgtccatatttttcgatttttggtccatattttatggccatatttcgcgatttantatccatatttttggactccctagttataacgtaatgaaaatttgaaactcccacaactttttttctgagatgtcaaattgcttaacattcgcttaaaaaaagattctccattacaaaatctttttttagataccaaatttgttcagtttagttgggaatgaagcgagttttacgccaattacgctatttggcgttatgagcaattttgtctaacacttggcttgacctagagcccggaaatttcaaatttgcggatcctgttgcaggattggaattcaaaaaattttgcaggaccggatccggccggattaatcctgcaaatcctgcattttaaatttgcaggatcccgcacaggattgcggattcttagaaattttgaaaaaatttcaatgaaatttccaaaaaaaaaaatacctgacaagaaattttaggggctggcgggatgcattaaaagggcgactaagatgtttcgaatgggtcagacggtaaaaagagatcggaaaccaaatctgttaatggtcaataaatttgactattttgcttttcaaaaatgctttttttcggcgcaattttttcaaaaactaggaacaaaggggtccgtctatgcagataggcgccgtctgaatttttttttttgaaaattttatcaattaattaactgattttgaccaaaaaatgaccaaatg

SEQ ID NO: 97973 - DNA, 176 bp, Heterodera glycines
aatccattactcccttccttcccccgtaaccgatttttgtatttagtcttagcttcttatttcgatacattgaaatccctaccatcttcgagtactgtaaaaaccgcacagaactgcctaatgaatactttattatttccgaaatcggcgacggtgacgacgaccaagtcaaaatg

SEQ ID NO: 97974 - DNA, 400 bp, Heterodera glycines
agctaatcaccaacaatcgtccgcaatgacgttaaactagcctaagccatcaacaactgtccgaaacgctaatcacccggctgccacgagtccggaatgacgttaaactagcaaagcatcggccaacccacacaacaatcgtccgcaatgacattaaactaaagaaccaaccaaacaacaaatgtccgcaaaaacgttaaactagcaaagcatcaattgtccgcaatgacgttaaactagcaaagcaccggccaccaaacaaccattgtccgaaaagacgctaaactagcaagcaatctatccgacggtcagggtccgaaatgacgtcaaacaagcaacgacaattggtcataaggacgttaaactacgtcaccaattcaagcaaaagcactcgagcatg

SEQ ID NO: 97975 - DNA, 622 bp, Heterodera glycines
ctcaattttttaaattacaatacaagcatgttaaaatttaaataaattgatgcttaaatacacattcttctagaagttttgttggaaggatttcaaataaaagaaccataatataaataaaatcattagaaagattactttgagttttttaaatatttgaaagttcaattacaaatggaaacaattataaatgagcttaaattatataaaatatgaaaatatttatatgtaaatgtatccgcttcaactcaagctaaatgaatgtgtatttaagcatcaatttaatcaaattttaacatatttataatttaaaaaatgataaaatcataggaaaaatctgatttttgatttttgcactttttttgaagtgacttagcacccaccctttatcctagttaaaaagccgactattgacacacctgtctagtaatctgttacattgattttcttgaattattgaattgaaatccttcttaaaacatggaaaaattgtgtggggcgtgtaataaataattcatataaaaaattaataatattattttattttataaataatgaaattgaagaaaagtaaaaattattttaataaattttcaatttaaagctgataaaaatttaaatg

SEQ ID NO: 97976 - DNA, 912 bp, Heterodera glycines
  unsure (1)..(912): unsure at all n locations
actgagaatatttttaagctttcagggccattcattgttaggttttgataaatttaaatttcttaaaaatttatatattattcggcatttcattcattttccaatttgttgcttatgtaagagttaaaagtattatgcataatgtttgaaggttgttttttttgttctattttttgttgtaattgccagggaacggatttatatgtgccaaaaaacctccaaaatatgtgctaaaaagctcaaaaaaggccaacaacatatgtgccaaaaattgaaaaaaaactgtcaaaaaataagtgaatttatcaaaaagatcacatttttttatccatttcgctagtacaattctaatcaaaaacatttcaattctttgtgacgtaaatatntttctcgctctccaagatttacttatttttctgtttttcatcgataaaattcaaattttgccttaaaaatgaaaaaagtcattaaaaaatatcaaaaagtgaaaaagaaaaaaaaagaaaatttttgatcatttttggatatcttgccaagaatttgagtgcaaaaaagctactttcgtaaaaaataaaaataaaatttccaaaaaatccccaaaatatgtgctaaaaaaaattagtgaattaatgacatcagatgagaacgaaaatgtgatatttgtgatagttaccttaaaaacctccataattatagttatctcatattaattactacccaattcgctgataaaaggaaaatttaataattgaattattataaaaatgttgtatcaaattaatgaaataatgattaaatgtggttaatattgattgaagaaaaattaagccatgctataaaattaataattacaaaattcattgcgaaaaatatttttataaaaataattcattatatttttacaaaaaaatg

SEQ ID NO: 97977 - DNA, 142 bp, Heterodera glycines
agttatttgtccgaatacaaagaaatccggccgtgaatggaacactagtcagacaaagccgaaagcacaattcaagagaacacatgcagaagtcaatataacgacaattggttcaacagaaaatggaacagtagccacgatg

SEQ ID NO: 97978 - DNA, 1003 bp, Heterodera glycines
  unsure (1)..(1003): unsure at all n locations
ttttttgagaatttcttttnaaagaaaaaanattnncgaaggattaaagtttnaaaaattnaaaatttcatcncctaaactcaaaatttggaagttttattgagtttctagggcaaattctatattgcctaatgaattgaagatgaaagaggtcttcaaaatatgcaaaatgcgtatacataatgtaaaaattaattatttaactataattaatttattttttaatccaaaaagcacctacacctaaattcttcaaacacagaataaaatttcttattaattaattttaaatttttaaaatccaaaatttaaatataaaaatccaaaaatgatttgccttttttaaataactttccgacttttttagccaacaggaaaagttcttttttttaatgtaaaggtgacattcttggaatttttgggaaaatccccaaattaacatacctatacaaaatatgcaaaatatatacacattatttttttcaaaatggatgccaaaattctccaattaaattcattggtaccgcataaatcccataatgatcaaaaaagaaggactaaaaaaattttcattttgaaaatttggtgccattttctgtgtcaaaatgtttggagatgacatctgcgctacttttagtggtcatccccccaccacaacattcaaactgtctccaattattttttttgttatataattctggcgttatgtgtcgtctcaaatttgccgccgccacatccccgcgcccccatctgccgctgcgcaatatgatttgttgttgaatgcgttttgtgtgtgctgtgcccgtacatacgcgtctcccaccccgacagggcgggggcggtcgcgtcatttcttcaaaagggcgcaattgccccccgggcgctccccccccccccccccccttttaccaaaatccaattcatcccaaaatttggatgatgactaacgaaagaaggatgaaaacggagcaggagagggtgacaaggaagaggaaaaaagatg

SEQ ID NO: 97979 - DNA, 1003 bp, Heterodera glycines
tattaattcatttttttatcaaaaaatttcatcagataaatgaatgaatgaatgaacacaaaagagaatggcgaagtcattagcaccaaacatggtctttgccgttaagcgtctaaccagttatccaaaccgagacatgacactaagctaaaaagagtattaccattagcatcataacaggatttcgccgttaagcgttgtcctgtagcccggctgaatggtcctaattagtcaactaaatgaatgaatgaagacaaaagagaatgccgacgtccttagcaccaaacatggtcttcgccgttaagcgtcgaaccagttatccaaaccgaactaaactaaaaagcgtattagcattagcatcataacaggatttcgccgttaagcgttgtcctgtagcccggctgaatggtcctaattagtcaacaaaatgaatgaatgaattcaatagaaatgagatgaattgaaaagcagaacacaaattccattgtatggggtgcgtatcctcgtcgagaattgcatgcatttatcgaaatgaataaattgagtttgcataaatctaaaaacgtaataattgtaaacaataaaataatttgaatattgggaaaggcaggtaaatgagtgaacggcaaaatgggtgaaggaatgagggagaggcgtacgaataatagaaatgcagttaccaaaaaaactcactttattttttcaatgaaattttttttataatagataataaaaaatatgccaccaaaaaacctatttgtaagtgcgcacttgcgacgagtgcagccgcaaaaatgaattgtcgagcacactaaattgaataacgcaattaccgcgtgccccggggaccatttgcacccggatatgcgaaagcttaaggaccgaaacccaaatggggttaaagtgcctaccgaagaattaaatctgtaatcgaaaaagtaaatgggggggggttcaaaaataaaatttaaaaaaggaataaattttagggcctttttagatg

SEQ ID NO: 97980 - DNA, 112 bp, Heterodera glycines
taaataatttattttcaattaataaaattttaattccttaattccccctaatcttttcgcccattttaaatatccttaatttctcctatctttttttttcggcttttagatg

SEQ ID NO: 97981 - DNA, 334 bp, Heterodera glycines
ggcatttaaatcccaaaataaacttggttcaaaattctgcagttttggttttcgttgtttgtatgtaaatttatgtgagtaagttctttgtttttctctctgtcttttttaaatcaataaatcgattaatgcttatttcacaattggtaacgctaatgcattggttaccatgcacttttaagtaggtacctatatcgatcattataatttcataattcctttgttggattcattttcttacattgaattaattacctaaaggagttttagatttactttttcgcaaaaagctcacacgtaaattttggcaccaaataattttatttaagaaatg

SEQ ID NO: 97982 - DNA, 119 bp, Heterodera glycines
ctgagaaagccctcgacagttgctctaatccgactcattgtctgcagtcgctacaatcggtcgctggaggaacagctgatcggtttcacgaagacggaaacaaaaagacatcagccatg

SEQ ID NO: 97983 - DNA, 101 bp, Heterodera glycines
taaaagcctaaaagattcagttctttaaagcccacctttttgactaatttattttaatttttttgaaacctaaattaaagccttctctaattttagtaatg

SEQ ID NO: 97984 - DNA, 140 bp, Heterodera glycines
taatgtgtgtaatccaaaaataagacaaaatagggactgtaaaaaagaaaagaaacgggatttactgcttgtaatggctgatcgaaaatagctgtgggagctcaaattgctgtgggagcaaaaagacaggggccaaaatg

SEQ ID NO: 97985 - DNA, 577 bp, Heterodera glycines
ttttggcctataacttttttctatgtaatccaaatccaacattgttgatatcattcgaaagcttaccatgtttagcagctttttaaaagagattgcttcgcgattagacaattaccaaaaaagttatactattaaaatttcgaaaagtcgaaatttttgaagttttttcttaatcaaattttttacaggcttgaaaatctatccgctttttgtaaggctaatagagcatgataagagctttcgaatgataccaatattgttggatttggatgccaaagaaaaaagcttaagtggaaaaacgagctggcgccgaaacgccagcgccgaaacgcgtgggtccctgattttttgccactttttttccttttttaccgtccacgagcctaaagccttggcataacctaagcaattgtacgagttgccttttgtacgagtagtcatgacacctctaaaagactaatttgagtttataccaatttgacacaaatgttagctgaagcatatttggagcgagtcttaattgcttaacaaatgcctaacattttatatattttaagtgcttttatttttcaaaatg

SEQ ID NO: 97986 - DNA, 388 bp, Heterodera glycines
tggttatttaaccattaccaccttcttattgaccgggcccgaatgtcatatatattttttattttaattatttattttaactaattatttttcaaaaattttttattcccatttgagagttattttttatttacgacctctctcgcgacataccctcaataataaaaaataaccgggttgataaagttcaatacaaattgtaagttaatgctagccccaatttattttcggaagatcgagtattttgttattcatttatgtttgctttaaaatgtatattttgtttagatcaataccaacaaaaatgaatattattaattttttatataacaaatttaatttttattaaaatctgttttaaaattaatgatccctaacttccagaatg

SEQ ID NO: 97987 - DNA, 378 bp, Heterodera glycines
ttattattctgtctgattttaattctaattgccctaattattccaattgaaacagaagagaaaaaactacaacaaaagtcatttgatgaaatatttggagaaaaatgggaagaaaaagaagaagaaaaacgaaatgaactcaaaaaaagagaaataattggaaaatattataaaataaaagagaaaataaaggaaaaagggagaaaatattcagcaaaagaatgggataaaatttatggaaaaatagcgaaaaaaatggggacaaatcgcacatatatccaacaatggatcaaagaatttggtcttcaaaaaaagaaaagttataaatcaaaaagtgatgaacgaaaacttgaaattgttcagaaatttattgaaatg

SEQ ID NO: 97988 - DNA, 162 bp, Heterodera glycines
aaatctgaccaactcttgacccattacgacccggaaaaggacatcattgtatctgccgatgcctctgattatggaatcggagcagtgatctcccatcgttttccggatggcagcttgaatgcaattgcacatgcttcttgctctttgtcgcctgccgaaatg

SEQ ID NO: 97989 - DNA, 324 bp, Heterodera glycines
ggatgtttaatttggatgcttcttgcagttggcgaaatgtcatttttgggtgggttggcgaaatgtcgtcgtgccgaattaattcattcttgctactattgtattcgaaaaattttctgattttcaactgttttttctaatgaaataattagaaagaatagaaaatgctacaattaataaagaaacaaatttttggcggaaacacaaaaatatggttgtgtttgtggcgctatacccttcctccgcttcttttttttcatttttaataggattggttaaatttggctaattccatttgagggagttcgagaagaggagctgatg

SEQ ID NO: 97990 - DNA, 189 bp, Heterodera glycines
  unsure (1)..(189): unsure at all n locations
gtccatattatataattaaatagccttaatntagtttataaactcattaaattataaaataaaaattcgttagaaaaaagagtgaaacaaattttggtaaaatataatgtgagttatgaattctcttttatatgcaaccatgcgaaaacggccacgcggaaaacgtcctggcccggccgacgaggcatg

SEQ ID NO: 97991 - DNA, 53 bp, Heterodera glycines
tgacagcgaaaacgaagggaattctgagcaacgtgaacaaaacgccgaaaatg

SEQ ID NO: 97992 - DNA, 609 bp, Heterodera glycines
attaatcatctcaccaaaaagttgatttatagtttacacaaaattaggattttcttgaatttttaagtcttataaatcatagctttttggtgagatgattcagcgcttagcttctgcttaatgattacttctaatctcccaataattaagaaaaaattcatccaggtttcattgcctttttatcgaccgaaaattttatttttcggcattttcttctgtaaaactcaaactttgcctcaataagtcaaaaaaatcacgaacaaaagtcgcaaaaactcaaaaaagtcataaaaatccgaaaaagtgtaaaaaaaagtcaaaaaaagtctcaaaaaaatgcatgttagaagtagggatcggatttttagtggcaaaaatcccaaaataattaactaaatagtggcaaaaatagtggcgaaaaagttccaaataattacttttaatagaaaacttttaagctctgatggggttttgaacaagcccaatttcgagaaagaattactcgattgagtaaatttcggcataaatttgaagagaaaaaaaggattttcgatgagagacctattttgattttggcagcaaatgtcgggacgcaaatgtccgaaaatg

SEQ ID NO: 97993 - DNA, 183 bp, Heterodera glycines
tcagtgcgacggtcgagttgaacccacggctgatgcaacggaatttggcatttattatgccattcttgaaaagcgatgttggtaaattcaacaaattatcacttattcaccccttaattaatttgcattttaactttttgtcaattaatttgcttttttatttccattttttagcccccaatg

SEQ ID NO: 97994 - DNA, 512 bp, Heterodera glycines
ggttgttgtgatagaacaactggaattttggggaaaggtgtgactcgtccgtcgggcaatgagttataccgtatcaaaaacctatactgtaattgacggtaaattactgtaatgcacaacccggtttttaaatgttcagcttcctaaatcatcgtgctaatcagccagtgtgtgatattagaagcctattaatgggcccaaaatacgctagactagactctaacaaaacaatactttatactctctgcgtttgtattttaggacttggtctgggcctggatctaggcctggacttttgctggatccagatgtccaagtcctggccaatttttgcaatcctggacctggatttttgtccagaaatccaagtccaggtccaggcttttttcaaaatgccaagctttactttattctaattcctcacattttgtggtggcgagaacgagttgttgttgctgctattgttggcaccagccgtggtcgtcgccgtgggcaacggcggctgagaaatg

SEQ ID NO: 97995 - DNA, 1003 bp, Heterodera glycines
cgcaagtgagattttgtgctaattttaagcacttttatatgtgcgtaggagcactgtaacttcgtctttcacgtagcacgcagcactgtaccttttcgctatataaaagcgcgcaaatatgatgcaaaacttcattttaatcacaagaattttttgtaaaataaaaatgaatacttttaataatcaacaaaatgcgccagcagagcaaaacaacaacaacaacaacaccagcaacaaccacagcgacaatgctaacgctcaattatggaaacttttacgaaaaaaatatattctaactttcaatctttgtcattgctgctcacaaacattgttcaattcgacaaaaaacaacagcggcggtaattatgcttttgagttcgatcccttaggaggggtaaaagtgcaatttcacatgtgcaggggatgtgtttcacttaatatgagactgagcgacatgaactgtgcaaataaaaacaacgattacaacaacaacaatcgctttagaagcagcttcactaataataatggttcaacttttggcaatttcggaaacaattgcacgaactttgatgctgggaataaccaaagcaacccatacaacaatgctaatgaaagtgggcaaatgttcaacaatgccggaaggatggattgatcacaaactttaatcaattttgcaaaatagttcatgtatttgaatcatcatttcataataaatttaaatattaatcattataaatttctttaatcccctttggtgtttgaatacacccgtaaatgtgacaagcgcatcgccggtagcggcatgatgcattagtttctcttttgtgccgatgcagaaatgccgcacatcccattgttatttgaatttgaccccgttcgcatcggtcaccgaagcgtcggaccttcgctacacagatggccacgatcccgcctcatacaaaagggcccatgggaaagtcgccctctttttttcaccattcatttaccctgcaaaccaaaaatg

SEQ ID NO: 97996 - DNA, 146 bp, Heterodera glycines
ttgaagcagaacgaatgagacatagctgacaaattgctggggcttttatactcccggaaaattagaccacgcccactttgcaaaggtatttaagccgaatttttcacgagcaatcaaatcagtcttgcgaaacatcatcaaaaatg

SEQ ID NO: 97997 - DNA, 498 bp, Heterodera glycines
tgcctgcaattagcgctacctagaagatgtatattaatgtctaattgaaaaaaataactgataaagtgcgggagaggaatgtaaaacgttatgaatttatacgaagtcaagttgtccatccagttgtaagtgtattaggctgcgagatcgcgaaaatgttaatgagcaacaaataaatgagcggatttgaagacggaatgaaaattttctatgtgacttcatttctctctaccccttcgttaattttactacacactactcgattggtaaaccaatgtacatgtgctgaatgaataagtcgagttaaatacccggaagataaacactaccccttgacaatactcaaagtttgggtgatttctttagaaaattcgatattctgttttgcccgtcaaagtgaatggtaggctctgattctctttatttatgaagtgcaccaaaaacaatcaaaaaggcaggatagacgtaaatacatatgcaaacacaaacaatgagatg

SEQ ID NO: 97998 - DNA, 433 bp, Heterodera glycines
ttttgtttttcaccccccccccccccctccccactcaaatggtggagggctttctttcaaaattaggggggaggggaagttccaattttttggggggggaggattttattccacgatatacggtaatatatatgatcggtgaccagcgatcagtgatcagagtgacctgtaataacaatgtaaatgtgttcaattaattttccattgctaagctcataaatccggcggcgggtggaaggtttgtccgccgaaaaattagcttcaattttggctgttcttttgtcaattcaccaaatgaatgaatggtgctcaccaatatattttttgatttgtgggaggaatttctatttttattgaatctttttaaaaaattccctcaaaatttgctttttaattttatttttagatttttgctcaatttttcataaaaatg

SEQ ID NO: 97999 - DNA, 350 bp, Heterodera glycines
tctgtgtgatttggggggaaagttggagggaaaatggacaaaaaaaacccctggaacttgttttatggcaaaaaaaaatttaaattttccaaaaagaaggggggggggcaaactacactgttacacttacccaaagttggttaaaaaaaattttaaaaattcctgactggataaaccaatttacaaaattgtaaaaatgccaaaaaaataaacatttccaaacaaccaatcaaagagccatggcgatttgtacctttcccactcaaaaccacaatacctcgcgctggtcgagcagttcacggaccagcaacgatttctgcaccggcacaaacgtgagcggagcgaacatg

SEQ ID NO: 98000 - DNA, 159 bp, Heterodera glycines
aaagaatgcaaaaatagataccctaattatcaattttattggaaaataaattataccttggtctttgtgcttctgtttgaatgtttttctgcataacaaatccttcctttgccttaattttgctgatcattttttcttttttgattccaattttcaatg

SEQ ID NO: 98001 - DNA, 225 bp, Heterodera glycines
tgaccccgttttttagcttttccaaagaatcgctgaatttttttcaacaaattaattttgaaaaaaatattttccggcggtgccaatcgccgcggcggatgagtgaattccaataaatttacaaaaaatttatccaaaaagggatcattgttagaattaaaaatctggggggttctaattttttaggtgtggaaaaacctgggcacgataaatttacaaaaaatg

SEQ ID NO: 98002 - DNA, 128 bp, Heterodera glycines
agagagagagagagagagagagagagagagagagagagagagagagagagagagagagagagagagagagagagagagagagagagagagagagagagagagaggagaagagaagagaagaagagatg

SEQ ID NO: 98003 - DNA, 69 bp, Heterodera glycines
cgtaacacttgccattagccttctctaaacaaatctcccatttcaagtgcttctgtgttggcggcaatg

SEQ ID NO: 98004 - DNA, 553 bp, Heterodera glycines
ttttattagtttactgaatacttgcaaaatgttttgtctttgtaaatattatgtagattactcgtttttgaagctattagatcctcgcagaattacatttaaagtaaggcaatttgtttcaacttgagatttatcatttcaaaataatgaatgagctcagtacatgcacctacatattttgttgggttttcttttcacttccctttggccgagctaacatttttccctgtccacccaaacacgttaatgttagccgaaaaagaaagaaaaatcaattcaattccttgcgtggtgaagataagataaaagcaaatgtgtacagaccagatgtttatgcattttttatgtgctaaaacaaaaaggaaaattattttcgctttctttttttttacatttaacacacaatatgtgattgttatggtaaaaacccaactcgtactattttagagtatctttttttctctgttctgttatgtatgcatatgcatagcttatcgcttatttttttagtttatctacctatcttttttttttgtttaattcacacacaatg

SEQ ID NO: 98005 - DNA, 168 bp, Heterodera glycines
gtcttggatttgtcaaataaatccaagacttcaaattaataatcaaaaattctcttaaaatttttttgaacccaattcaaaaaaggaaaaaaatttgcagtcaaaaaattattcgaatttctccaattttgtttccataatttccgaaagttattcggtatcataatg

SEQ ID NO: 98006 - DNA, 1003 bp, Heterodera glycines
caaaaacgggggcccaaacgcgggggcccaaaaactggggcccaaacgcccccgactctttcgcgacagtgcaaaaatgggcacttcgcgaaacgtgcaaatttaaccgaaagagaccgggcctcatcagtacggtgtctctttgggttaatttatttaaattaattattatttgtgtttcggccctaaaccgtatacacacaaagccacagcaatcaagcaaagcaaataaattttattaagcaaactaaatattttatattggtttttaatttaatcttttaactaattatatttgaatataattaatcaacataatttgttagtagcattttttaaatttattttgagtttgcaaggcttcaacatttgcattattctgtgtagaatcagttacacaaatacaagtctaaacgttttccattggctaaacaatatagcaagataaggggaaggttttcttggcctttgtggatttctttctgcttcccgtttgcatcctgaaaacagatcttatgaacgtggtgatgttttgttagtcgttcaaaaagatcgaagatcattagacaagctcgaaaaagtcctatttctcggaatttgacgtgtttgggtccccgtgcaaggtttttaggttaattttctttggcattttcaaatattagacaaaaattctgtaagaaagaagatgccttgctcaatacaatggaattaattgagtgccaaattaataattcaataaaaatgtatcattttaaggttattacacgaatttttggtgattttagggggacagcggtggaccgcttatgcaacagacacaaaatggtaacatttggacacaggtgagaaatcagacccaactagtacatactgtctaaaactggcaacaaattgagttatacattctttttactcctaataatttgaaaatcctagttacctaaaccaaaatataaaattaaactcacatttttgaaaattaaagtaatggaatgccaaaatg

SEQ ID NO: 98007 - DNA, 131 bp, Heterodera glycines
aatgcggtaaccaaaaattgcaagacatttaaaatgaacacggaaaaatgacggacgactatttttaagacgtcgtgccgaccgagggcattttgcccaaaagccttttatacaagccggccctgaacatg

SEQ ID NO: 98008 - DNA, 597 bp, Heterodera glycines
aaaaaattattcgaatttctccaattttgttccataatttcccgaaagttattcggtatcataatgccaaaacaaaacgaaatcgtttaaaatattctttctggacttgacttgatttcttgatatcgaagctgttttctacactatttctaaaacggttataccaaaccctcagatttttgaatccggttttcagaaaaaatgccttgtggtgaaaacaatatttcacatttcactccataactttgtgagttcggcacggatcgagaccgggataagaccattggaaagagcagctcgagctctacatgaaggtatggaaagaaaaaatagttatttctgggactttttcagaaatcagaattaattctccaatgtggcccaaattttaggcccccagccacagccccttgcttctcccagttttaagtcttggatttgtcaaataaattcaagacttcaaattaataatcaaaaattctcttaaaatttttttgaacccaattcaaaaaaggaaaaaaatttgcagtcaaaaaattattcgaatttctccaattttgtttccataatttccgaaagttattcggtatcataatg

SEQ ID NO: 98009 - DNA, 103 bp, Heterodera glycines
aagtgctttgaaatgttcaattatttcgcgtactgtttactgtacaaatatttcatactttaattttcctcaatcttattttacgatttttattgaaaaaatg

SEQ ID NO: 98010 - DNA, 1003 bp, Heterodera glycines
  unsure (1)..(1003): unsure at all n locations
ttttaaatctagaaaataagtgattcaaggacttgaagccatgaatcatagatttgacaaaattatataggtttttatntcatccggtaaaaacggttatcgtacccggaaaaaacaaatttaaattactcttggtaaaatttatgggtttaaaaaattccatagaaataatttgttgtagagtttttttatgtaaaatggattttgaagggtctccgaattggttcattttcaaaaacgaaaaaatcgcacaaaatcatgaaaaatgtgataataaaaaagggaaataatcaataagacacatccattaattaaaaaaaataattttggaagttaattagcactcaaaaatttgtagcgtttttaattgattattatggggttgctaaatactaggcaaaataatcaattgatttacaggaaaagttatcgtgatccaaatgcaattgtcctaatggtgtcgaacaaattcagtcgttggcacgaatttatccaaattgacctattaatagaagaaatatcaaaaaagaaaatcaaaatcatttatttgagtctgtttgaatgcgctgaaaagtaaaaattgttttaattatttttgggttggcactttaaaattgccaaaaagcaaaagaatgaaaatgcgaaaaagttgtgaaaagcttaaatacacaaggatatttcaaggattttatgcataaaaaatcaaattgaatgaaaaaaaatttaaaaaacataaattttaaagaaaaatttcaaaaatcctaaaaatatattttttaaaattgtttttaaaaaattgttttttttttaatttttatttttttttgcgtttgaatttaacactaccaaaaaaaaactcacaagaaaaaaacattaattgaattaataaatcaaaaaaaaaacttttttaaagcaatatattggagaaattttaaaatgtattttttttaaaattttatttctgggccttagaaagatactgtaatttggacaataaaacatg

SEQ ID NO: 98011 - DNA, 984 bp, Heterodera glycines
ttcaacgccaattatcgtgcagttttttcaatgtaaaatttctaaggtcttccaacgcagccatattatattaaatgctaataacacacaaatcaatgcaaaacaactattttaatgcaattgaaccgattttagtgaataaatgtgaattattaggaaattgtattttcgaatttttgttcgaatccgggttcgaggttcgaaatgggtcaaaacggatgtcagattcgaattctacggccctaaaaaccctaaagacaattttatctctgaaaaatttttgaaaattttttttcaaaaaaggggggcaccatcggcagtattaccgccaagtcaattaattattggcatcacacaaataaaagatgacatttgttcaaatcgtccgccgaatttttgggtttccgctgaaccgccgccgccgtctctccaattgggcatcgcttcacagccaatcactgttggaagacgaaaaacgaacgaatttaatattgtaactgacagaggaaggagaaatggtggcacgcagaaatgcctaaacaaataatgggacaaatttcacggacaaaataattgaaacgggtcgaacaatttgaggccgagttgaggacgaccaaaaaatgggaaaatgtccttccaatccaaaggtcgttgcaaacccatctgaaaaccgaaaaaaatttaatcattaaatttcattcgcaaatccaacgattgctgcttatattcaccaattttgaatgttggaaactgtagaatattcaaccttttatagcttttgagagatgcaaatgcaaattgaatatcaaaccaacttcatcaaaaatgtgatttcagcaatatataaatagacaaattttaggcatcacttcatttctacaaatttcttctcttttgcctatccccttccaattcctccgcattttccgttttctttttttagccctattttccccttccaattgtgctccccagtccattatg

SEQ ID NO: 98012 - DNA, 458 bp, Heterodera glycines
ccttaaagacatattttttgaagattttgggtgaaaaaatttttccactcaaaaatcctgtccaccccctttggtcccgaatcccaaaatcacttttatttttataacttttttcaaaaaagtgataaaaatgctaaataaaatttatataatagagcaaaaaattgcgcattttatcaatatttttgtataccttagcacattgtttggagtgagttatgaatttttatgtgaaaaattgaaattttcaagtttttcaggaataagttttattgtttgcaagatagaaatcccaaataaatctcataaaattctccctatttttctctattttttaaactttaaatggactgaattggacctttttgatgggagttatgaattttcaaaatgtagcttaaattttcaagggccaaaaaattctaaaatttcaaaaatttttaaaaaattccaaaatg

SEQ ID NO: 98013 - DNA, 495 bp, Heterodera glycines
ttcttaatagttagaatattaataaaaaatcaaaatgcattaaatgaatttatttaatatctttttgtttttaatctttttttattattattcttttttctctaaacatctttgccaacagtaaaattgtcacgtatttcatagcattaaatcgatttttcactaagctttttataaaaagattgtcgtaaataggattaatattaataaagctcggtattcaaatcgcactcaaatttcaatttcccccccccgggggcgcctatcggcaccgccggaccccgccccctcccactgttccaaaaaagttttttgaaaaaacattgccacaaaaacagcgatttaaaagcaaaaaatttaaaagattgtaaatttattttaaaaaaatacagaatttacaaattgttgagcctattaatcccaaaaaccagccttttttgttgaaaaattaatataaaaatggaaaaatgaattatatttaaagaaaaaaaaatg

SEQ ID NO: 98014 - DNA, 149 bp, Heterodera glycines
  unsure (1)..(149): unsure at all n locations
atttttggtataattggccatttttntggatccgtcttcttgaacctaaattcgttgtgctcgcggcgatgccagtgataggtcgtcatacaggccaaaatttttccaacatggtttcaaaagtttgtttttgggtaaagcttaaaatg

SEQ ID NO: 98015 - DNA, 741 bp, Heterodera glycines
taacttttttctcacttggtcaacttggtcaataactacattcttgatatcaatcgaaagcttaaagtctttagaatattttgtagacctaaattctggaagaaaagcaacagaaacaaaataattcttgaatgtactcgaaaaagctacgttacgagttttctcgttgtaattcttctcttatagccaagtatttgctttttttacatttaaattcctgggactttaagctttagtttgataccaagaatgtaggcattgaccaaataagaaaaacatggccaaaaaactgcacattggatgcctaaagtctacatagagcaattgcttctcttttccttttgttcttgccgcctttgtccaaattttctatttgcatattattattatggcattagcacaattctcgatgtttgtccaactttcgggactatcgatgtcaatttttcctcaggtgaatttgtggctttggactttgcattgggtcaaaaatgagttggcgcggagaagtgagttaaatgatcagcaaaaatgctgatcagtgaatcaaatggcggagaacagatgaaacacattaatgagggaagtgcgcagccagcaaaataaaggcacaaattgttggcattttgttacaaatccatttcgaaaatttggatcaattaattgaacggaaagagtcatttcggcaaacattgcaaggtaattaaggcgcgccaacgattcgtcaactcagccaaaatg

SEQ ID NO: 98016 - DNA, 315 bp, Heterodera glycines
gaaaaaacaagaaaatacctaaattcatgtcccgggattcgaaattggtacaaaaaatatcagatttatgttcagcgactccgaaaaccattagaaataaatcacatttgcggttaataatattaccccaaccccagttacatagcttaaattagtttaaaatatacaacaccagaaaagcaaaacagacaaaatgaaaagccatcctaattttccaattaatacaaaatgaaaagccatcctaattttccaattaatacaaaatgaaaagccatcctaattttccaattaatattttcataaagcattaaaatg

SEQ ID NO: 98017 - DNA, 133 bp, Heterodera glycines
  unsure (1)..(133): unsure at all n locations
tttaatctttnaaaaatattattttttaaaattattatttaataattttggaatgggagtataaaccaaaataaaatcagtatagaaaaattcagaatttttttctctatcgatatgcaaaaattaggaaatg

SEQ ID NO: 98018 - DNA, 418 bp, Heterodera glycines
ggtttgggggcagggcgtaaccataattaacgacgtgcttccctaatagttttcaatttaattggtgcgtttttccaaggggtcgaacttcgacgagcggaccccgcgtatccgtccgaattgctttgtcgcaccagggacaatttgttgcgacaattcgacatcgacgacggggacgtactcgcctttgtttagtggttcattacgagtgacagttctcggcaaaaaacaatcccaaaatgtgattcactttaaaattgttttctcatcccttttgtttctttccgatcctttcattttttaaatggataaaatattttaaatgataatgtagggtttttcgataaatggtcgttttaaaaattaaaatattttagaaaaatttttgtctatcgctaattggtgactcaaaaaaatg

SEQ ID NO: 98019 - DNA, 883 bp, Heterodera glycines
  unsure (1)..(883): unsure at all n locations
tatgtcccctctcttaacagttcatttccaggtaattacctttatgctgtttgggtaggggtcggaattgacaaaagtactttcatgttgaggatcatatcttctaacgcattttatttcttaaatttaagtgcgaagtttgcggacaaattttgtcaattcattttttgtacaatgcgctgcttcacctttctctgaccatcttttatgtggctcctctttttcaaaggcttttatttgggatttacaggtgttcataacgtttgtaattgtttacatttgttcagttttaggaggatcgcaaatattttcacgacatttcgtctcattatggaaaaaatcatgcacataaaaggaataaaaaaatgttaccaaatgcaaaatttgtgttggatggacacgataaagaagtgaattgggagacaacggaatggtacttttctgactatttaggttgaatgtgttcaatggagttcaaaagggaaatatttgataacaatggacagtgaaattgtccgaatttggtcgccatggaccggcagaaccgaaaatggatacgctgaacaagtcccacccccctctattcattgacataattatttttttttgaataattaaggtcgttttgaaccatcgtccggtcaaatttacctacccaaaaatgtacaccgacgtcgaagacgaaaggccctcgtcaagccaaacactcagccaacggacatttggtagcgaaaatcgcactgacaatgagtcgcgttgttccaatgacaatggcatccaattgctgattgaacactcccctacgcggaacgtctttaatgccctcgacaatctcccgtcactatacgccnaaacaagggaagaaacctcaaaagcagaaatg

SEQ ID NO: 98020 - DNA, 180 bp, Heterodera glycines
ttggcactttaggagagagattgacatagtctccacagcggctaccgttacttgctgttggcggtggatgttctatcgaggcgaatgttcggcgcgcccgtaaagagtaagcgccctgtggacatgaaaagggcttttgaagagctatttgagcaaatgccaagggtgccagacacaatg

SEQ ID NO: 98021 - DNA, 74 bp, Heterodera glycines
taattgcgaggtgtatggtgtcaacaatcttcaaaagtatgcgctttgttaacaggtttacgctaaaatagatg

SEQ ID NO: 98022 - DNA, 1003 bp, Heterodera glycines
catccatcccaactctccggcgagcggcccgccgcccgcgcgcgtaggggcgagcttccatcgagtgaaacccctccaccagcaacgagacgaaccgtgccgaatttgtgcgttggttggcacaagcgacgggagggggcggggaaaacggttgtcattagagactgtacaggccctgagggcatttaccgagccgcccgtccctgtcccgttttttggacaaaccacctaggccaggccgccccattgggaaagtctcggatttttgggcgtttgtctcggatattgggaaagtctcggctttttggacgtttgtctcggatttcgtctaccgggctgcccgtccctgtcccgtttttgggcaaaatcaccgggaccaggctgccctgtaaaacgggattttttaccggacagcctagccacgatcaattttctaagccgggcccggtactttcaaattccggtatttatttgtgatgcatgctcgagagtcccgacgttgggaaagtgtcggctttttggggcgtttgtctcgaatttcgtcttggctaggcaaacttttggcctcaaaaccaaccaaaccaattgtcaatgtaattttgcatgaatttttgaatgcatgaataagaaagcttttttggaaaaagtttagctcttgagaagattctcgccttttcagtggtctcaatgttcaagaccattcttaacacagtattggcaattttttaagtcatccaaaagttcataaatataattttacatgaatttttagaatgtaagaaattttttgaaaaaaacgtcgtgaatttaataaattttatacattttttaaagatctgtcttctatagattagtctcggtcaagagtatcggcaatgttttttcccttttttcctccacgcgatgggaatttgtgaaagttgtttagactgtgctgaagcccatgcagaaatattgtccacgcattcacatcgtccgctctgacaacatttattcacagatg

SEQ ID NO: 98023 - DNA, 272 bp, Heterodera glycines
ttgtaattattttgacaatgtccctctactctgtgccttttagcgagtcattttccaggtgtcaatgattaaatagcatcacatcctatttgaatatgacagtgattggacagtggcgagacggggggggggggggtcattggattgatgattaatgggcgcgccgtatttgactgctcggtggggtggtggagattggcattgagaagccaatctgggctcatttccgttttcttcctcattcttattaaatattttgcttgtgaattatg

SEQ ID NO: 98024 - DNA, 54 bp, Heterodera glycines
ttttgtgctttatctgctgtttatatcccccaatccccgaatagggccaaaatg

SEQ ID NO: 98025 - DNA, 401 bp, Heterodera glycines
  unsure (1)..(401): unsure at all n locations
tatttataaatcgtttcacattttacgaatttttaattttatatttgctgtttaattatttttntagtaagattaaaaaataatgctgttattttgtaaaaataaaaatggtcatcaataataatcaatatgatgtggcaaatacttgtcataaattggatgaaattaattggttacagaatattacgaaaaaatatatgaaaaatggctatataattaattacttttaataaaaaattgcagtttataatgattaaaaaataagtagccctgcctttatatgagacgaagcttagttttgctcaggatattttttccttcgaaatttttttcaaaactcattttttcattttatattttaaattaaataaggtaaaatataaaaaaaatagtcttaaatg

SEQ ID NO: 98026 - DNA, 479 bp, Heterodera glycines
tcggaattccgttcgctttctgttcaattttaatgcctttgtttgtgtccagcaaaatttttgcaacggttttctctttttcaccggtacataaaacggaaacaaaaataaaaaataataaaatgcaaattttaaaaaacattttctttcgaaaattgccaaaatgaaaattaaagcagcctttttacgtttgattattatgttttatgaaaaataggtaagaatttaatcattattatgtaaatttgaaataattatgttaatttttgttttgtcaatattgatttgcttattgaatttttccaacataaaaaatttataataataataataataaataaaaataataaaagcaaaattgttcattgaaatatcaaaaatgtaaaaatgaaattgacgcacaaaaagagttaaaaaataaaaataaaaataaataataataataattgtgattacaattataacttttcacagggatg

SEQ ID NO: 98027 - DNA, 261 bp, Heterodera glycines
tgattcgttgtgctgttcattttccccaattgactttctccgttttgcctttggcaatgaatgccgtcttttacattttcagcgattgaacggcggaatttgcttatctgtccaccgcaatctcttctgccctcggcgcccgccatttaacgaggttaacctttgaacagatgtttagaggaaaagtggtcgaagtgatcacaaaaagggcgacaaaaaatgcgagtggcgggggggggggggtaattaaacggccaaatg

SEQ ID NO: 98028 - DNA, 1003 bp, Heterodera glycines
atcaaaaaaagcaagaccaaaataaataaattagaaaatttagcgaaaaaatgcatgaaggattaaattgatctggaagctgagcttgaaatattgagaatttccatccagcagtccccacaaactaatcttttaccatgagcaatttcttcgcctggatatgcatttgatatttctatttggaggaagaagataatagtgtaaatgaggcaatgcggttgaagacacatcaaaaataagtaattacaacgttaaaaataggtaatttaaaacaataaaaatgattattattattattttaactttaaattatataatatttatggttttataatatttaaaaatgcatttttatgaatagtagggtgaagtcattgtaaatattggcaatctcttctagaagatgaaacgcatgccatacactaagataatcaatgttttaatgagatataagccttattttatttctcacgcataaatgttttataaaatatattatgtaaaaataataaaaattcacgatgaatatggagatttccgtaatataaaaaaggtatgaaaatttttttgtttatttttttgtcaaaatctaaaatatttttagcgttttaagttttaaaataaaaactccggaaaatttttaatttacaaaagtttcgaatagcttttaataaattttgttgctaaaaattgttaaaaataaagaaaaaaatttttatatatatataaaagtttcacaaattgcatttctgttttttggccgccaagtgcacgccacgcacaatggtcatcaaggaaaaatggtgctatgtcgaccgacgaaaagtgcaaaaaccaagtccttgatttctgcatatgatttttcatctaattattagattaaagttaaagaaattacaaaaattatattatatttgaattcaaaaagttactatatatattatatatagtaaaattatcctatgcctagcctaaaactcagccatagcctaagcctagcatg

SEQ ID NO: 98029 - DNA, 83 bp, Heterodera glycines
agaacttcaaagggtggctgtgattcgccgacgccggcggttgtccctgtgaaaactgcaaaggtggaaatcttaaagaaatg

SEQ ID NO: 98030 - DNA, 101 bp, Heterodera glycines
ttttcatttttttcataaatttcaaaaaattttgcgaaaactttaaaatttaaatattaattatttttttttgaaaattcatttttttagggggcggaatg

SEQ ID NO: 98031 - DNA, 933 bp, Heterodera glycines
ttttttatgtgaatggtttccagcaacaacatatagacgcggcacattcattttcgagtggtgatataatcggtctcggcgttcatttgacaactcttgaaattatcttcacaaaaaatggacaccgtttgggtttttttaatttaaacaaataaaaataatcagggatcatttttatgtaagaaaaattgcgaaatatgtatgaaaaacttctgaaatatgtacgaaatatgtacaaaaatccagaaatatgtacaaaaatatgtaaataaaaatgttttaaatgtgatttttttggaaaaatattttttctaaagggtaaaacaggcacaaattgccataaaaatgacctaaaagggcttagaatcaccttttactattttaaaaataaatttttgatattccatttaaaaaaaaattatttttttggagcacattttcaaaaaaaaattttacttttcacaaataattctataaattctgaaaatttttgaaaaaattgcgaaattttggatttttggtggcatttaataaaaaattctcaaaaaatgcaaaattatgtaaataaaaggcccgatttttgttcgcaaacacaaaaaaagtgtttttcctgctaattatgctatggagaatccaggggaaaaacatgtatttacataaaaaatgatccctgataataaaactcgaattgatttgtaagattcaaattcttgaaagatcgattttgtttttgaaccggttcatcaaaaaaaatacatttaaaatagagacgatgcgatcggatatcgtctgattactatcgaactttttatcgtttttttgttgattttttcgcttttttgatcatattgttcaaatcacttctcggctctctaataaaaagcaaaaataataaaaaacataattgtttaatttacagttaccgccaatatg

SEQ ID NO: 98032 - DNA, 125 bp, Heterodera glycines
agtttgagaataggttaaggacatttcgtctccaagtcctctaatcattcgcttttccgagtatacctgcttaacgagctccagctatcctgggggaaacttcggagggaaccagatactagatg

SEQ ID NO: 98033 - DNA, 257 bp, Heterodera glycines
actgcaaaaatgaaaaatgagtaaattttaaatagcatatttcctaaaatagagccgacccccctaaattagagtccccgtgaaatagagccccagggggtttgaaaaattgagtcctacccccaccaagctttatcccccattaaaggggattgaacatttgtgccccctgttatccaattaatttctcgctgtttatgctgtcttggatcgaaaaacgtggcatttgaaacaaattttgggcaacacccaaaatg

SEQ ID NO: 98034 - DNA, 65 bp, Heterodera glycines
aaaatccgattatatttaaactcaagtatttatttttaatttcagctagaaatgagaacccaatg

SEQ ID NO: 98035 - DNA, 514 bp, Heterodera glycines
ccagcccgaattcacttcagtctatcattggatgtaagtggagagttgaagaaaacgcaacaaaataaaatataaggatgtaggatacgatttgcagcaccgcggcagtctgaggttcgcagtatcctccaaggcggtaatgaacaatagttcgttggagaaggcatttgtagtaagtttttgtagtatattttaatgattttcaacttatttgagctggttgtgaagaaatgagcatttgggagttattcagtgattactgcgttggaaaaggtttatatactaagttgacttgcacccgtaatgatgcagaggtaactaaaaaggaagaggtcaccgaaagtggtgtggtagaacactttcgattacgacgcaattgtacatcataatttcgcgtgcttcgtgtggatggttcgcgtaatatatgggttgtcaatgataagcaagatccccaacctacatgggatccattttaaaagtcaatcttttttgaaaggcgttggctgagcacatg

SEQ ID NO: 98036 - DNA, 534 bp, Heterodera glycines
catttgtcagttacaaatagagttgtacgggaccggggaattttgaaaaaaaccggggacccgggacttttcgggttgaaaaactgggacccttttggctgggaaaatcgggaaaaaaccgggaaatagtcccggtcaaagccgggacttgggtactcagttgtactttttttaagtgccagtctcggtcccgtacaactctagttacaaattattatttattattattattattttattattttttacttcctcattttccaaataaatacaacataaatctaaatttatgaatccactctctctatccatcatacattcattagttttcacgtgaaaaaaggcagtcgcatggataggcaacgagtgaattcatttccttccttttttatagccaacatataaaaccaaataagaataattaattaattaatattcttattaattaatcatcagtttaaaatattaaataatttgcttttatttttctaaaaattaaataatttaattttgccattttcagtgtataaaatg

SEQ ID NO: 98037 - DNA, 609 bp, Heterodera glycines
atagattgtttgaaaaaagccaaaatatgcagaaatatggattttaatctcctaaaacatgttttgcatgcatttcaggtctcccacagtccagtaaaaatttgtattttctttttatggatgccttgtcataactcgcgaatttccaattagactgaacaaatttgacatcaagtgaaaaatgaaaaagtagtacaaaggaaaaaaggcaatgaaatagtgcagacctttctttacacactggagttgacgcatagtgtgggggtggggctgtcggcaaatcggaggaaggaaaaaattcttgaaatttagtcaatttttcttaattaatttattaaaaatcttttaaaaatcgggtaaaatttcgaaaatgtcctcattaacatcgatttttttttgacaaactgttaataagttgcacaaatttcaaaatttttcaaggagtgctgaatgtttttgaaaaaggcacataaaaaagtggtttgtaaagaaaaaagaaagagtcatcaacaatttctgtttatggcctctggtccgaactaaatattttctgcaaaattttaattggtttttggtcaggtgtccactgattgggccggtcataaaatg

SEQ ID NO: 98038 - DNA, 1003 bp, Heterodera glycines
ttttcttcaaaataaataaattttattttgtattttgggttttaaaatgcttattcatacgatatttagctattttcgagatttttatgcttaaatttaacaaatttgtaaaattttgccctcaatttggaaaaatttatgtgcatattttgcatttttggtttttatgcgcatattttaagattttatatgcatataattcccaaccctattcataactttgctcaaaagtaactaaattaatttttgatttcattcggcagtgttaaatattctatattagcttttgaaatttgtaggataaaaatgaaagtttagtgctatcaaacgttaagaatatttattaatatgattatttttgagcaaatttataaccaatatcattaaattttttcatataacggaggacatagagctatcgtatgatatagaaaaatgcaaaagtaaaattattcttaagagggtgtttctttccattcattattcatcaatcagcagcttggaacaaagggaaatttatcaacataaaaaacgggcaaaggtgagggggcatttgcgatgaataaacaaaaattcccttaagggttgggttgttgattaatttattttgcttaatttatcaccatatatgtatgtatgaatagatagagcctcctatcgttgcggaatgaacgtgtgtaatgaattttaaaatgatgaatccccccccccccctccttttgcctttgccttttacgcctttccataatccttctccattcagcatcaccaatccctgtgcgtgctgtgcactgtgcgggggtgtgtttggttggcgaatgttcggtcgatcattttgtaatttcttttttccacgctgtcaatgcgtgcgtttcgttggcaatgactttccctaggctcattctgcacaaaattatattctttcggcaattccaaatctttttgctttaacaattgaatattaggccatcttttacgagtttctactttattttttcaaatg

SEQ ID NO: 98039 - DNA, 387 bp, Heterodera glycines
accagcaaaacatcaaaaaactcctcaccgaactcggctacataaattatttaaatataaatgagacagcagcggtaatttctggaattaatcattttaaatataaaatgaaaattaataaatcggaattttggataatgaaatgacaaaatggaaaaaggcgagcgggaacccagagaaaatcccgaaatgccataagatttactaaacatggaaaccagaaaatttattgatgagtgaatctagaatatatcaataaacaatgatgcagtaaaagtcgagaccgaaaataatggacaggaaatctctcaattttgaagtgaacatacccaaatataaaacaagattaaaaaaacaaataaaattatttattttttttagcaaatg

SEQ ID NO: 98040 - DNA, 326 bp, Heterodera glycines
  unsure (1)..(326): unsure at all n locations
aaatggcattggcacttntagcggacaaaaatcatnttgagtttagcagaacgaaaaaacgaattcnnaaattgggtcaaacgccaaaagaaaattttgcacaaacgctaattgaattcacttggaaaaaatgccataagaaaaagtatgaaaagcgtgataaaagcgaggaaaagccattggttggcacggaattggatttattttgcccatttttcaaccgattttctctaatgattgagcaaattgagcagggtaagcaaataaaaaataaataaattttattaatttacaaatcgaattatttagatcaaaaattgcacatg

SEQ ID NO: 98041 - DNA, 111 bp, Heterodera glycines
  unsure (1)..(111): unsure at all n locations
aaggatgagcgcttcacctttccgctgtgtgggtgggtgccgaccgaagacagcagcgancgtgccgtcacggtgatgacaagcgttcgtgggtgacggcctacacgcatg

SEQ ID NO: 98042 - DNA, 447 bp, Heterodera glycines
tactggcctaataaaaattatcatttttatcgttaaaattaaaaaaagttaaataccgtatccttaaaatagagcccccccccccgtaaaataaaaccgtcctttttaggggggctgaaaaaaaatctcccactaaattagagccttccctctgaaataaagccacccttctgctgagggggttggaaaataaaccgcccgccggagactgtattttaggaaatactgtaatataaaaagtcatttggtaggcggagtttttaggttttttttttgttaattggttgcttaattaggcaatttaaaaccatttattaaaaaattgtaaaggtacaatgatcaaaatcgcagtaaaatttcgtaaatctttgatcaatgaaataaaaacaacaacaaaaaaattacttgtcccagtgctgataacttccatagtaaacgataaacatg

SEQ ID NO: 98043 - DNA, 442 bp, Heterodera glycines
gtcgttctctgcccatggccagttttatgatggattttttgctcaaaacttgaaaatcttttggcagagtttgtgaaattgcgaaaattttactagcgatttttttttaattttatgatgaattaataagtttttttctaaatttttgaaaaaatcactgaaaaattttaaaaaatcttaagttttccttcaaaacattttcagatttaaaaattaatttgatgggtgcacctcaaaatattgccgccttttcaaactgagaaatttttctagaaaaaaaatttttcgaaaatttttataagaaaatttgaagaaaaaaattattgaaaattattttggaaattttttcaaaaaaaaactttgtaatttatcataaaatttatgcggcgatattttgtcccgtccccaatttgatggggggagggacgtgactgaatatatg

SEQ ID NO: 98044 - DNA, 1003 bp, Heterodera glycines
tgagtgagcctccaacccttttggctgtgataagattgttaatttcttttattcccaatttttgacttaattaattaattgtatttccctctcatttatttttgtccgttcgttctcaattttgaatctcccgccttttcattatcgattgttttccgctgccgactttttttttcctggtcacttgcattcagattggatattcgctcgtttttggttaattttaaatgtttgtgaattttcttcgctgtttggacttttgattgtaaaaggatttttgtttggattgtgtttggattttgggatacaattccccgttcctaattgttttgtgtggactacaacgtgctccactttgtacgacgtggcgctcctgctaaaagaggtgagatcaacggcaatttcgaaatttgtaaagcgcgaaaaggagcaacaaaaaaaaacgggaaacaaatcctacgagtgcttgaatgtaaagcggggaaacaaatccctaaagtcaaacgtggaagaaagaatctccgaatttgtttaagagggaaacaaatcccgtaaagacagtggaagagaaatcgccgaatttgttaaaaaggaaacaaatccttttcatcttatcaccactcgccgaaatcgtgtgaattgaaaatttgcaaaaacggggaaacaaatccctacgaaagtgaaggaaaagcagacaactaagtcaaaaagctttgaaccataaaacgagaaaacaaattctcacacaccaatggtgccggtaatgcgaagcccgccgttaacgcgacaaagggcgctaaaccttggcatacaagtgcgaaatgaaggcataggagatacgcaaggagaacagcgagttcagcaacagcacttcgtcgttgaaaatgctccattgcgcgaaaaccaacatcgccaaagtcgagtttcatcagtttcgtctgttttaggacccgaagcaattcatcagcgacttttggaaattccgagaccacgaaacggaatg

SEQ ID NO: 98045 - DNA, 300 bp, Heterodera glycines
  unsure (1)..(300): unsure at all n locations
gacttatatgcggatttgacgggaggtgtaaggcagctatacatttatgcaccaaatntaatcgaaaacacaattatcggcaaccagatggccncactcttaagaatagttaacgtcgtcgatgacccgggatcaattagtgaagttatatatagcaccgagtattttcatcgtctacagtcgaaacgaatttcagaaattacaattgaaattcacacaccgtttggtgaattcgttaaatttcactggggaagttgtattcttacattacattttaagaaaagtatattttaaaaaatg

SEQ ID NO: 98046 - DNA, 375 bp, Heterodera glycines
ctaaattctgggctaaatgcaatagacaaaaaattattcttgaatttactataaactgaattccgcattttctcattgctattttctatgtgaagattttgatgttttcttgagtttctaaattccttagacttttagctttcgtttgataccaagaatcaacaatataggcattgactaagttagaaaaagtccttgccaaaaaactaaagaaagttactgattggacgaataaactggaatagacccgaaaattaattattatttgatcaattagtaattggttaattaaaaacattagcaaaaagtgcactaaaattaattacccttaaataaattttcttaaatttcaatttcaaagtgcatcccaaaatg

SEQ ID NO: 98047 - DNA, 865 bp, Heterodera glycines
tattaaattgcatataaaactgtttaaattttttggacgttttcggttttctttgatcatcgacactttcggatggaattaaacgtcagtgtatagatttcattatgtcggggggggggcagagtggggaactgactgatcgacactgatcgcgcagtgactgcctttcttccctccctccccgcccttcccttctctccctctgctttcatctgcgcatcgctgtgactgactgcgagcggagcatcgcatccatgcgcccccgggcgatcaattgttgccgactttttctagaagtttcgtgcttaccttggaaaaagatatcgcgcattttggagacacgttttgtcgtcgcgggagaccaatcggtggaacagcgccacgtcgtctaaacggggaaaagggtgtcccttaatgaacgcgctgcagtcgaatcatttgctgtcctttccccccccccccaattgcccgtcgcattccttcgcccatcctccgccttatttgaatatcgaatttgaccagtttagctcattgttcggccacttgtgctgtttcggctccaatggcgcttctcccgtagttcctcctccttttgcctttcttttgcccttccctttgctcctccgatttgccggaatgtccgtgggttaacccggagaaagagttgcagaaatgggcaaatttgccggtgtttccctccaaatgcaatgtgaccaaagacacgccagcggaggaaagcggagacgaaaaggaatattgggagaggggacagcacaggtgggagagagagaggagaaagagagaggggggggggacaaacagagggagataaaagagtacggcacaggtattacttcaaccaatg

SEQ ID NO: 98048 - DNA, 165 bp, Heterodera glycines
ataatttcataattcattttttatttttttttgacaattttaatatattataaatattttctgaaacattaaacttttgtagcctgaaaatttttaaataattttaataaattttctatatattataagggttgctatcgtcgcaaatcgtcttcatgctccatg

SEQ ID NO: 98049 - DNA, 414 bp, Heterodera glycines
ggtgtcttaggatgttgcaccagacggggggacggttcggaagcggctcacttactaacatttcctattaacaatttctttgtcgctcggctgcttcacggcctcgcacccttttttggcattttcttattatcagacatttcttctcaatattttaatgacaacaattttaaaaatttatttggcaaacgttaataccaaaataagtgtaaacatataaccatttacaaataaaatcacaaatcaaattcaaagtcgatctttttcatattacaaagtgaaaacaaattaaaaatcctttgcttcttcaattttttactaagcaaaatcaaaaaaacacgtctctttaactatcaaattcttttctctttaacaataacaaattcttttatagaattaacaaattcaataatg

SEQ ID NO: 98050 - DNA, 424 bp, Heterodera glycines
attgtgaggaagaaccgctgatgatggtcatgatggaggagggggagatgttcaattaaaatttgttatttgtgtgtcatcggcacagaccacccatttttgttccgttaaaaattctttgttgttgtttttgttttcaatgatttttgttattgctgatgaagcatcgtattgaaacatgtctggaatatttgaaacaagaatatttcttggggcttgatttgactacttttgtccctcatgagcgttgggaattggcaaatttgcctcacttttggcccattgttttgggctgccttttttcgtacattttggttttatacgattgctttcattgttttcagtggtcacacattccgacgcaattacttcattattttgggattagtacccaacgcttttcttttgcagcttttgaacaatg

SEQ ID NO: 98051 - DNA, 202 bp, Heterodera glycines
gctgatcaaattccccctgaacacatccatttgtatatcgcgtggtcttgatcaaattccctgatcacatttattgtatatcgtattggaaccaatatttttcgatcaactttttcgatcactgccaattttccgatcacccgactgatcagtagtaactaattcccctccaaatatttcagcccaattgccggcacatatg

SEQ ID NO: 98052 - DNA, 175 bp, Heterodera glycines
ttgtcccagaaaatttgccaaatttggaaattaacgactttgaaattggagggttgttgaaaagcaattagttgaatttgcaaaagaaagttggttgaattattattaatttaggtcattaaaataatatgaattttttatcccttaagaattggtctgcccgacaacagaaatg

SEQ ID NO: 98053 - DNA, 238 bp, Heterodera glycines
agagggggggggggcatttgccagggcaattcgggtagcccaaaataggccattttttggtttgcattggcaaataaacgaacgaaacattcattaaatgtgcattattatttgattacaaaataaaacatatagaaaatataattgttattaaattctcatttttcatcggtcgggagaataaaaggcattggaagagtaattaaaagtgccaaaaggggcggaaggagtgaaaatg

SEQ ID NO: 98054 - DNA, 500 bp, Heterodera glycines
gctggaaaacgaagaaagcgaaaatatgaagaaaggtggcgaatgaacaacaaacagccctttttatacagcataaaaatggggggggggaggggcggaaattgcgaatgaaaaatgggaaaaaagtataaaatgaattataaaattagtatttggaaaattaaattttattaaattgaatattattacttctttttatcgatcaaacagtttctgataaaatttttatttattttaaaaaattataaaattttgaatgttctttcaaatgctcattttcaaggatatctggaattcaagaatattttaaaaattttccagaaaaaggccccaatttccaggacgtccttgccattcaaggacaaacccaatgatttattaatataaattccactttcgtaccatttaacccaaaccctcaaaaatatgagtgggcgacgataattatgtaaatattaaatgcttatttatttatccaattgtcaaatcaaattataatg

SEQ ID NO: 98055 - DNA, 265 bp, Heterodera glycines
ggtaggccaatcaatcaattaaaacgatcggtcggtcaatcaattaaaccaatcaaccggtatttaaatcaatcactcaatcaataagccggccaatcattatttcttcggcaaacaattgatcaaactttgctcgaggcatttgaaaggtttttatgggacgggaatgccggggcttattttggcattaattaatttaatttctttggagactaatttgcctcttttttgaaattcatttgcttttcggcgctgaaatggcatg

SEQ ID NO: 98056 - DNA, 752 bp, Heterodera glycines
tatgtgttggatttgatgacgctaaatccaaaactggatcagaatgacgtccatcttggtctgttccatttccattttcaatttgaatctaattaaattgcaagggaaaatatcgtgtccagacatttgcgacctgatatttgcgactatgtccaaaatcgggtcaaacttacattttttcaatcttagaggtcttaaacagcattgaatttaagaaaattcgttcttttgggttattaggaacaataattatgttgtttgaaagattaattattttttcaaaaatttgctgacgataaaactatcacataaaatcactttcaatcgcttatttaaagctgtttagtccattgaagatagaaaaaatgtaagtttgaacccaatcttggcattcaaacccggcattagttaattaactggatttcctatgattaggaattttatcaaacataaatatacttgttttccatttgaatgcattggcgtttttttacgacaatgattttataaatttttcgatcattaattttcctttttctgtgaaaatcacactcaaaaagtgtataaatatggccacttttcgagtcaaaaatcattccctccagttttttctcattttaatttttaaccatcaatttgtcttctaattgtgtcacacatttcatttagcgttcacacattttgccatctgtcaaccaatcatcatcgtcaacatcgtccgtcaacagttcaacaacaaaacgttcaaaatg

SEQ ID NO: 98057 - DNA, 190 bp, Heterodera glycines
  unsure (1)..(190): unsure at all n locations
ttaatatttcggccaaatttgagtcaaaaatgaactgtccagtgccaactagatccccggaattctcggaaaatcccggcggggtccagactcagtccggctctaatgtcaaccttctgaactgaacactntagaacaaaaattgtaaattaattttgaaattttttaatgggatgagtcaatcaaaatg

SEQ ID NO: 98058 - DNA, 464 bp, Heterodera glycines
ttttcctcgtcagatggtttccctgcgtttgtcttccttgctttgtcgggccaaattgtgcccttccacaaccgaacggcggccgaggcgaaggattggcaaagggttggcaattgaaaccaaaaaagggggcggggcgttttaattaaataattgataattttactctaattgtgatgatgtttttccgttattaagaatcggggccaatgaaccgtgacaatttggggaaacatttgctcggcactttttcccatcagccgacacaaagcgaaaaggagtaattactttattattattatttttaatttcattttgtcatttttccttttggataattttggccaattatattttccttatgattaattagtgttttaattttatttccgtttagtcagccgacggagcaaaaggccaaaagcaaacaaattttggaggaccaaagggacagcggagaaatg

SEQ ID NO: 98059 - DNA, 696 bp, Heterodera glycines
  unsure (1)..(696): unsure at all n locations
ccaaatttcaaattcaatttggcgactctctgaagaaagcaaaaagaatggaagaaggagaaattcatctaattgctgtcatttttactttatttatgtttattttttaaattcttttttttcaattttgattttggctttataatactaattactattttatttgctattaatttcgtttattaaaacgtcgattttgtgactcatttcaagtttcttcgaaaaaattcctatgaatcttaaaaattaatacgagaaacttcacaaaataatttaatttctcttaaataaggatggcatttcttgactattggttttaaactagggtttctccccgactccgagccnccccccccccccaggcccgtaccaaaggaatttttacaaatatttgttctattctcagatattaattaaatccaatttttcaattgcatttttaaataaaattctgaattggggcattcttttttaggtcatcattttgccttaatttatgttaattgaccccgataaatatgttaatataagcaactgcagaatcagcagatgttcatttattacttctccaatttgttaataatttttctcatttattacttcttcaatttgtttaataatttatcatttattaaaatttacatcttttattgtgaactttcattttaggaacttaatgaaaagtttgtcaaaatg

SEQ ID NO: 98060 - DNA, 91 bp, Heterodera glycines
tttttatacataatttctctaattttaatttgtttatctatcgttcaattctttgtgatttggaaattccaacattttctgggttcagatg

SEQ ID NO: 98061 - DNA, 102 bp, Heterodera glycines
tgtaaggctaaaataggaaaagagcaattaaaacaaaaaatttcgaaatgaaacagactttgtttgtcgtccaactttttcttgcactacgaggagattatg

SEQ ID NO: 98062 - DNA, 290 bp, Heterodera glycines
attggccaaaacaggacaaaaaattaaataatgagagttaaataggttaattaactaattgtccaactgccaaattaataaataacgtaatggattataatgaaatgaaacatattaaggcagaaacggtcacttgtaataatttaattggcattatgcaaaccatggcacgactgaccaaccccccgcggatattccccatcatagggctaactttgatggaacttttggcgaaatatgaaagttttcggcactttttttgtcatgaagtgctaaaaggcgatgaaatg

SEQ ID NO: 98063 - DNA, 645 bp, Heterodera glycines
taacgagcccgaaggggaatggccatggagactccagcctcaccctgtaacttgaacctaagtccaggcccctttctggtgttggctcgcactggttaggaacatgacagtctcgtgtaatcccacacgcaccgaaagccctagccctcgtaggcgaaggctgcgttgctggtttcagaactgtgagctagtggggttcggatggccgagtgtaccaacctgcttgctaacaggtagcatagagtaatatgctagtaagcagggcacgagaaagggccgtaaaagctccggctatgaaggaccttgcgaccacacgtgtgtctcccacgtgcggattcttgaagccagagtcttgcactgcgcgcaggatggagcctgtgcaactcctccctcgctgatcgcaggagtggaggatcaccactcttttttaccttgctagcttggggtaccaccttgagctggggccggccttgctagcttggggtacgaccctttgagctggggctggccttactagcttggcgcgccacccttggagctggggtggcgcaagatcacttgtatacggtctaaccaatacatttgaaaagcgatcaaagcgaaatgatatcctgtgatttggaaagagaaaccttaacccaaatg

SEQ ID NO: 98064 - DNA, 440 bp, Heterodera glycines
gacaaagactttttggcaagaaaacgcaaaaatattgcaatttcgaaaagtcattcatacaatttgctggaggcaaaacgaacacttggcctcagtcccattggaggattggcacgctttttgatgagcggcatattgggaaggaagaacaaaacacggacaataccgtaaaaggaatactataattcaaattaatatagtaaataataaaacaaattaaaattattattttaagttggcaagaaacaatttcaaaaatacaaaaggcaaaaaaggcgcacaatcagttgaaaagagaagaaaaaaaatggaaggattatgcgcttaaagaaatggtaatttgttgttattaaaagaataataacttttgctttattcagcccataaaatcggcaattgcaacaaataaaaaatatgacaaaaaaacactgctgaaaatg

SEQ ID NO: 98065 - DNA, 700 bp, Heterodera glycines
tggtcgccaaaaccgcaacggaaaaactgctcgaacaagcattccggaagggtaacccaatttaaattttaaataattttaattaatgctaaaatgggcaatggcgaaaattgtaaaaaagctggtataattttttgaaaaaccatgaaaataaattcaaaaaactacaacaatttgggactaagaattgataaatcagaatttgagtaaaaaaataaaaattgcacgagtatctattaaaaaccattttaagtaatttttctataaataatttgttccacagattgcgaatcggtcgcaaaggcgtgtacctcctgcggctggggggcctgccacattagtcccggagcagtcgcaagcgcctgttgcagggaggactactcgtacacctgctgcgaaaaagttagaaaaatatggggaattagggttatattttgaatcatttctatatttatgcgccccaactcatcgacgtctgccggaaaggatgcagctgcggatggggaagctgtttcccgtcagctggggtcaaaacacggatcggcgattgctgtgagaagggctacgcgtggcaatgctgcgctaaggtgagtataaagcgagcggaaaagccattaaatatatctatatatatatatatattcgcatgtttaaatgctgaatttagcctccacctgtgctgaaaggctgccaaaaaatg

SEQ ID NO: 98066 - DNA, 284 bp, Heterodera glycines
agagcagctcgagctcttcaagaaggtatggaaagaaacaatagttatttctgggtctttatcagaaatcagaattaattctccaatgtggcgcaaattttaggcccccagccacagccttggatttgtcaaataaattcaagacttcaaattaataatcaaaaattctcttaaaatttttttgaacccaattcaaaaaaggaaaaaaatttgcagtcaaaaaattattcgaatttctccaattttgtttccataatttccgaaagttattcggtatcataatg

SEQ ID NO: 98067 - DNA, 257 bp, Heterodera glycines
caggcatgcaaggaagaattgcgtgcactgaaacagggctgtgttgaatacgactcccgctatcagccaaaggtaataaatggataataaataataaatagatatatttatatcaaatgtaataaagcaattttgaacaataaataaattttcgggttatttaaaacaaaaaaattcataaaaaatggggcgactttctgttcattgtcagcatgtatatttattatgacaattacactcattttcagtttgtgatg

SEQ ID NO: 98068 - DNA, 290 bp, Heterodera glycines
tatttttattgacttgcatataatttgttcgcatatttttattgacctgcataaaagcgtaaattttttttccccttaatctgtttcttataaaaattcaattgtttcaaatcttaaatattttattaattgatcaattctcactaatggcacccgaaaaatttccagccataatcaacaatgtattcacttttgcacgagaccgatggtgccacatcagtaaatttcagtgcttggggtaattttttgccgggttctggcaagcagctggtcactgtttgtgcaaaatg

SEQ ID NO: 98069 - DNA, 151 bp, Heterodera glycines
ttttcaaaagggccgtcctttctctgtcatttcctcccccgcccccaaaaaagtgatcagagcgatcggaaaatgcttacacgaacacctattttgtgagttttaccatggatgatttggttttaactgtttagcaaacggcacaaaaatg

SEQ ID NO: 98070 - DNA, 350 bp, Heterodera glycines
ttatggaagacagcgaggaggaggagtaggagatgtgttgaggtttttatggagagcacttttactaaaattaaaatctgctggtacattattgggtagagaggcattagacactggaacacgtgtattggatacaatagagaaagctgaaacaccaaataaacaagcaataattaatgaagtaaagaagggaatggataatgtaaccgaaaagggaggggttggtcgtcaattcggaacgggaagaaaaaagagtattaaaaggaaaagaattattggaaaaactgtacctaagacagtaataaaaaggcgaaaaagatcagacgtatttggaaaattattttaaaatg

SEQ ID NO: 98071 - DNA, 136 bp, Heterodera glycines
  unsure (1)..(136): unsure at all n locations
tagaccgaacaattttgaccctaacttttttgaaattccataaagttttcgaactttaacaaaaaaaaagagaaanctttttttctatctaattatataaatacaattaaattggttctttcagaaaaaagttatg

SEQ ID NO: 98072 - DNA, 316 bp, Heterodera glycines
atgaaggtgcgaatgatgatgatgtatggcgccggtaacggacaagatgttgacccgcaagccaaattttaaggctagatattctctgatgatttttagcattcaaccaaaaaaacgctttacacgatttttcgcttttcatcttaaacaagtcgcttctatttgcatttgccatattatatatatagtaatgcgttaaaaaacgctccttatttccaccgaggtgctgaagatgtgcgaaaacagaagcattaatctcatgtttagcctttttcttttgcacacaaccacaatacatttgaagagtcaaataatg

SEQ ID NO: 98073 - DNA, 143 bp, Heterodera glycines
ggttggtttcaagaagaacattgacggtagttaaaatttggaattgacaaccaaaaatgggcaattttgctatatttttcaaacgaaagattttgactaacgacgagcaaaaatctttcgaatgtttattgggtttttagatg

SEQ ID NO: 98074 - DNA, 70 bp, Heterodera glycines
tagttttttaaatggggattttgaaaattaccgtgaatataaagtcaatgagtataatttttagaaaatg

SEQ ID NO: 98075 - DNA, 721 bp, Heterodera glycines
aattaataaattaaaaaactatgggaattaaatataaaaacatttaaaataaataaattattttttattgccgtttatttaaataattgtctttcttataattataattaggttgggttttgttttatgtacatatattgtcagtaaaatgattaaacattttatttttttaattttaaaataatttatttgttttttttacaaaaataaaaagtaaaattaaatatacttaaatagatattgaatgatcaaaattggcgccaacaatgtgccaacgaattattccacgcattgcagcgggaacgtgccaatttggaggtgtaaatcaattaatacatattgaatttcaaagttttaagaaaaattcgaatttttatcaattcaaaaaattgatacaatttttttgttcagtttaaatgaatttgaattgatttttctttttaagagaagcctttgggaataagcctaaatttctttagtccatgacgtaaaaaggggttgaattcagttccctatggaatttacgtttaccattgaatgccaaatttcttagcccatataaacaaactttttttttggcaaaacaaagttcggtcttttaaactcatttggattaaatttttaattaattattgccataattatgcaattaaaaataaaatcaaagacaaattgcaaaatgaaatttacgatataattaaatcactaatcatttcacatg

SEQ ID NO: 98076 - DNA, 716 bp, Heterodera glycines
aaatttggcattgacatttcaaaatacatcttgttttacgtgatgctcagtcggcgatgaagcttggcacaaacatccttggatgtgattcccaggattgttttttacataaaatgcaacttgtaagtctgtgttttcttctagttaaaaatgaaaaattaagtcaatcggtgatggtattaaaatttactcggattttttaccgctttctgaaaaaatcaaaaaagtcattaggaaaataaggaaatcatcagttcaaagagaatattttcaaaaactgcaacaggaaatggatttaccaaatcatgttttaattaaatcaactgaagtgaggtcagttaaatgtctttgataaaaattcttaaattcattttaaagatggaactctgtttatcaaatgtgtgagagattttatgaaaacaagacggctattggactgtttattggaaattctaatattaatattgagccgttttcgggttgtttgtcattttattttttcacacatttttttaagaaactgattgggaattgattcgtacacttgttgaccaactcaaacctatttatcacataacaaaagaactggaaaagcgggactcaacaattgcgtcgattattccaatttttcggtctctcttgaacaaattgagaaaatttaatagcgcattttctaatcgtgttgctgatggtttggagtcgcgaatgacaggatg

SEQ ID NO: 98077 - DNA, 386 bp, Heterodera glycines
aaaataaaaatatccggatccaattgaaaggcatgaaaaacattaattttcccatttttaaaatcattatttttgtcaaataataccgacgatttataattccaaaaatggggaacataaattaggggcgggtcgtttcggcgccagtccaaatttttgggctataattttttgttttaatattggtatcattcgaaagccgttcaaatactttattagccttacaaaaacacaaagatgttcaagcatgcaaaaaatggataaagaaaaaactttaaaaatttcgacttttttcattttataacttttttgaaagcaatagcttagaaacagcttggatattaagccttcaactgataccaagattgttggatttattgacaatg

SEQ ID NO: 98078 - DNA, 63 bp, Heterodera glycines
atcgaactcaatcattgttgttcatcaattgttaatcgtcgtgagcagtgagcatcaaaaatg

SEQ ID NO: 98079 - DNA, 69 bp, Heterodera glycines
tttgctaatggggaataattggcgagaaatgccatcgcatgctttagctattcgcgcgcactaagaatg

SEQ ID NO: 98080 - DNA, 632 bp, Heterodera glycines
ttggcgcattgaaatgccacaaataaatgccaacaatttcccccccccccccccgccccgggtggtcccctcacgtcctgctgggtgtgccctcccctcaaatttcggagggcattgccctgctggtggaaattaaatggctattttttcctgccattcggcactttcacatatttttttgggcatggaggattcaaatttcgcactgttttgccttatcctattttctgcaccctttccttttttctcctccaatttcggcatttaactatttttgtttaatcgcttaaatatcttagagatattattattattatttttgacgtcatcatgctgcgaaagatatggcaatgccgcatgagaatgaatttgccgagtctcgaaacaggggtttttaagaatggcaccgagacccaaacccaaattgctcactcaaagtgagacaattattatttaattccaaaaaaatgtgtgggtattctggattgagtttggcaattttcgaagctgccaattggcactgagactaaaaattcttcgagaccctctgatttaaacactcaaaatgtctatgtaaatgctaatatatttaattttgaattgtaaaattgtctaaattaattttcagcatg

SEQ ID NO: 98081 - DNA, 787 bp, Heterodera glycines
  unsure (1)..(787): unsure at all n locations
aaaagcaaaattcntaaaaatcgcacttttacaaacaaaaaaacagaattttgaaaaaaagtttttattttcagtgggttttagacaaaaaacgtttgaaattggaggcccgtttttggcagaaaatccataaaaaacaataaaacccctaaaaaacaattcacttttttgttgccatcaaaatgtttgtccaccaaaagctcgaaacatggcgaaagaagtgccaatttgagaccgagttgaagtcggtcaaaaagggaaaatgtccattcaaaaagttattatgtacacaaccagctgaaaaaaaatcacaaaaaaagccaaagagggaaatatggatatttttatataagcaaatacccgggacaacagtgattataagagaaaaaacttggaaatacgatgattgaatatttatttaaattaaaaaattattttttgacaaattctaattgaaaatgcaaatgaattatttaattgaaaaacaaataaatatttaattaaaaaaaacttattaatcataaaataacttaatttaaaattaaaaaatttttaattattaataaaagcaaaacatttaaattaataaaagcattgaaaaataacccaaaatataaagaaaaataatgtacaccgtccggcttcgaacttgccccacccaaaaaaattatgcccagaatccccaatcacacagggattctgaggtttaacgatgtcttagatgaaatctgatcttcgcgctttggtaacttcgctacctaggaacagaagaggtacaacagtgatg

SEQ ID NO: 98082 - DNA, 576 bp, Heterodera glycines
aagcgacagagtgtttttgttgttagacatttacttgttttctgaaatgtttcgatgctttggaaatttgtagttaaaaaagggcagtgaaaatggcaaatgaatggactttgggagaaagaatgagcagttggagaggcatttgcactgcttaaataccaaatttttgctgctgtggattaatgtttcttttcggtgtttgtcaatttgtcatgctcatcaattcattcattctccgcccattataaagactaattttcggcttgaggctattttggagagaaatacacatttatgtatgtgtgaagaaattgacggtgaattaagatgatgaattaaaataatcttcaattgggtaacaaaaaaaaaactgaaattttggatatgttctctttgtcggtgaaatgtatcattagaagcaattacgacaaagtaataccaccgatggtaccgcccttttttcgaagaaaaatttcaaatttttatattttggcattagcgacgcaaatatttattggtgtttgtgcgtggtgaacattgagtgtcggtgggtgattcaaatgcaattgaaaaatg

SEQ ID NO: 98083 - DNA, 234 bp, Heterodera glycines
tggtccgttttcactcacaaacagatagagatggagcgacgatcctcccgttcgcgttcccgttccgccacccctgcgttcgaccgaccctccaaattggaagcatctgctggacctacaaaggtttcccgtctcaaattgtcaagagtttgctctcccttcccccccccccccccacttgttcagacttcgactgttgcttttacctcgaattcgccgccagttgatcctatg

SEQ ID NO: 98084 - DNA, 1003 bp, Heterodera glycines
cattataaaattacccaatccaatgcgtgcgcagaagggccaatattcaagagaaataattaaaaatcaaagaaacttccaaaataattattaatattaaaatatatgataatgtaaaattaaaatgttttttttcccaaaattctttaaacagtaaaaaagcacaaattaatcaacaattagaaacaaaagaaacaaatcattattagatttttgaaattcaagaatatacttttaaaattgaaataaaattggaaattttttaaaataaatcaaatattaatgaataaaattgaatttttatttaaaaattcaaatacaaataacaaaaaagtgaataaaagaataatttgtgtcatcgcttcgcagagcgatgacgaagcacggaaaaagaaagaaagaaatgactaatcataaagcgaggacggaggccaaattgactgttatttaaccgccaccattttgccttttctgtcagttgaagcataaagagcaaatttgttgggcttttcaatcaataggcaaataatttaatattgttcatttaagcttgtaaaatttcgggttcctctggcggctataccagagaaggttcacttaatttattataacagtaaataagacgtaacaaagtggtgcaacggccgaatcctaaggcaaacagtttgtgtaaaataaaaagagtgcagtgggtgaaccattataaatgtcggaaccaatcagaatggctttagggataatggtcgagaatttaatcggtagactgaatgaacttctaccaattgtcagagcacagcagaggaacgaagagggattaaataaattgagagaagatagaatatttttaacagatttattagaaagaattgagcaaaaaaaccgtgaatgggatacatatataagagaaatatgagaagctcagaatgaggaaaatgaaagataccgcttatttacccacgatgggcgacatttttatgaatgggcagaaaggggaagagaaatg

SEQ ID NO: 98085 - DNA, 128 bp, Heterodera glycines
acaacagcaaattgatgtcccgatggatcgggacagccccaaacgaaattttcggatgcagcgaaattgaaatgcacaacatccgttttcgagcctcatcacggtgctacactttcatacccgtcatg

SEQ ID NO: 98086 - DNA, 124 bp, Heterodera glycines
tctgcaaaaaatataatttcgtagggatcttgggaaaaaagaaccagttttaaaaatcattaaaacggacactttccaatgtcacgccaaatgcccattttgacttaaaacattgtgccaaatg

SEQ ID NO: 98087 - DNA, 75 bp, Heterodera glycines
aatatgattaaattttagcttgtgctcgcacatcgtgccattctttcggcgtcttccgatgtttttgaggcgatg

SEQ ID NO: 98088 - DNA, 555 bp, Heterodera glycines
tctggaaatttataaaaataaaccacaaaaaagaaatttttcgaaatttggcaaatttttttaaatattttatttgcctccaaaaattttcgctgacagaatgagatttaccaaaaaatcttgagatgtatttggtctgcaatttttgtagctagatttgataaatttggcatttttttgaggtttaaatttattttttgtaatttttatgatattttttaaatttatttaaccaaatttttggtacatatttggccatttttgagctttttagtccatatttagcttttttaagtccaggtacatcatttccagcactaatgatgagtcacagcaaaaacttcaaaaaactctcctcttttcggcacttttgttcatccacctgtgtccatctcttcccattgtcagtttatgagtgtgagtgtttttttggtttttccattattgttaaattccctccctccttttgagcccctccccaattaaaaagttcaactctcttactcatcgctcacattgtcccctcccccgtccccctcaaactctcagaaaatg

SEQ ID NO: 98089 - DNA, 667 bp, Heterodera glycines
cggtgcgaatgggtgagcattggtgagtgcgtgcgcatgtggtgtgagtatgtattggtataagtacatgtgtgtgaatattggcatgtgtatgtgtagatagaggtagggtgcaagagcaaaggttttgtttgtgcattgcgatgcgtgtgagtgcatctgtgcaatgcgtgagtgtttgcaagtgcagatgcaggttacatgcaaatgcatgaggcgtggatggtgtgttttgcatattaagcctgtgtgtttcgggtgcagggcagagtgtagatgtatgtgtaagtgtgttttgtttgcaggtgtatgtgcaaatacaggtaatgtgcaaagtcatattggctgtgtgttttgcgtgcagggcagagtgcagatacaggttagatgcaaatgcatgaggcgtggacggtgtgttttgggtgcagacaggtgtatgtgtgtgtgggggtgtgggtcaggtggtataccaattgtatgttacatggtataacatgtatgctaatggttaggatgcaggcaggtgtatatgattgtattggtcacgaacaggtgtaattgtctgttggtttgcaggtgctggttcacatacagccattaatgtgcaattaaatctcgggaaaaggccccctatgccccaggggttcgagaatggttcgtaaaaatg

SEQ ID NO: 98090 - DNA, 75 bp, Heterodera glycines
tttgttgcattttgcgttctaatgaggttagtgtatcatattgttccatcatccagttgttttttttcggggatg

SEQ ID NO: 98091 - DNA, 56 bp, Heterodera glycines
tcttaaaataagattcgttagaataataatcatagaaattacagtgaattcgaatg

SEQ ID NO: 98092 - DNA, 879 bp, Heterodera glycines
atatcggacgaggcaatcaaaattaaaatttaatggaattttgaaaaaatattttaaataaacatttcttaagctctttttgctggtgctttgtaaagaaatgcgcgttatttttgtgcgaatgattggcaaaattttgccatttgtccggaagagaaatgctactgaaatggcgccattcacaacccaatacagtagccaaatgccgaagccaaaccaaacacagcacagtaaaaggcagatgcgaatgatcgatgtcaataacacggcaaatcattacgcagagaacaaattgaggagataacaactgatcaatcagtcagcagaaaagaagtttttgaaccccgagaaaaattggccaatggatgcttttcttttaattgttcattgactctttttattattttattagtaatgtatttttaaataaatttttgaaggagtgacagtaaataaactgttttaaaattattttatataaattgctatattaccttttttaaattacaaaaataattaatggaatttatttatttaaattatatttgttttattaaattacatttttaaacgagagaatctcttcacaatttatttgtgaagagattaatgatatggaaaatatgattcatcgaaagtgtcagtggtttccatccaaaaaagagagaaaatgtaaatgacggacatttttacaccacaatatgttatgttgatttgtacacaattatttatttttcttctcaaatgaaaataaatgtatttccaaaattcactttttgtattaaataatttcgtttttcaatttttctttccagttattaattaataataattctttagttcctctaattgcctctacattttccaaattgcggcatg

SEQ ID NO: 98093 - DNA, 159 bp, Heterodera glycines
attatttcgagaaatgatcgatctcaccaataggaatcggatttgatactctctttttctccgaaatgtttttgctgattatttcgttcgaataaaacgtacatttaatacagtggtgtgatctgctgttcttatttctatgaaatctgttaaaaaatg

SEQ ID NO: 98094 - DNA, 65 bp, Heterodera glycines
ttgaccgccggtgatgctccgcgtccgccttggccaagtcggccttggtgaaatggtacacaatg

SEQ ID NO: 98095 - DNA, 173 bp, Heterodera glycines
ttttgacaaaaattggtaaaatgattctgggtttttggcaggcaaaatgttttggcttttagtgggcgtgtctaaaaccgtgactcttttcaaatagtgtaggcgtggccacacttttgcgaatataaaagtaaaatttattaacctcattccaatttcattctcctgccatg

SEQ ID NO: 98096 - DNA, 76 bp, Heterodera glycines
  unsure (1)..(76): unsure at all n locations
ttatattaaacttaattagataaatttntcggaaaatcccacttaaaattattatgtcagattcataaaggcaatg

SEQ ID NO: 98097 - DNA, 207 bp, Heterodera glycines
tatataaaaacaagtaggatttgcttaataaagcgcaaataaaatcaattagtaaaaggatttgtattcattttatggttttttattcaaaaatatgaaaattaaaataatattattaatattaatcttcaaaaatacatttgataatatttatgcgggaaagaaaaacgaagaaaaaagctttgatgaaatatttggccaaaaatg

SEQ ID NO: 98098 - DNA, 430 bp, Heterodera glycines
tgttcacagcatcatttgatgtgctttaaaacggatagacgaaatggaaaaatggcagaaacaacaattttacgaattgaataaaaaactacagaatcttatggtgaattggggaggagaaaagcaaaaatttgcctcaaaagcgatcattattttgaaagaatgaaaaagcataaccttaacataattaaggtgcatttgattttccaaccaaatttctgggacgttgacgcctgtcacaaggacctcaaaattattgacgaaaacaatttgactgtccacagcaaggaacacagatcgggtaaattataattcaactgattattttaaaattaattttccctcaaaaggctgccgttccatcttcgcaaaacacccggttttgctaaagtctgacattttttatttcgaaatttcggtcaaaacaatg

SEQ ID NO: 98099 - DNA, 652 bp, Heterodera glycines
atttttactcgccaccgcaaaacggcaccaacgaaatggaaaagaggaagaacaacacgaaaacgaatatttcttgggctgtgcccctcttttgcttaacaaaaacaatggcatttctgcacaaaatttgacgacggaaaaccgacggaagaaatcaaaaaatgttttcttttttattttattaaataacgaattttggctgctttagctgtccgaatttgaattgtcaattcccgtgaatttggaccacctttttaagcacattatttggcttctcaatttgaaaatttaccgcctcaaagaggttcagtaaaataatttatattatgcaatataataaataattaaccattttgacaacaaacaaattttatcatagaaaaactttggcgatgattgtctccgtctaaagaattggtttgtttgaaattaaaattaagatgaaaaaatatacaaataaaatttaggattgaaaaggcagaaaaagaaaatgatcacgatcatccgaaattaattttggtaatttatatgtcaagtgaacaataaaaattcagactaattaaattttaaatttcttaattaggaggaaaaagtcttggcattattcgacgggttgcaaaacatttcacgaaatttattctcaaatccaatg

SEQ ID NO: 98100 - DNA, 522 bp, Heterodera glycines
ttcttcgactccattttactccattgtttgtgatttgtttttgacgggtgggagttgggaaaatttggaaatttttaaatagaatttgtcagcaaaatttcgaattattgtaatatgggagaaagggaacaatcgtatttttgattttttaacttggggttaaaaaaccttccttaataattgtaaaagaagaattaaagaaattccttttgacaaaaattttttgggtgtttaactaaaaaaaaaatacgaagaaataaaaaaagcgaaaatgagcgggagacgtattgtactcgggagaaaaactctcattgtcagtttgtgaattaaaaaaaattgaattcattggggttcgagaaggagggtaaatgatccccttactacacaccctagggtcaaagttttaatcgaattttgggtgtttttttatgtgcattctgctgattacatacccctgaaatttggtagcttcagcgtaactcgaactcgacccgcccttcctcgtcccatcatgcacaaatg

SEQ ID NO: 98101 - DNA, 782 bp, Heterodera glycines
ggtggggaggggtccgcggcagtggaaagagggggtccgtgaaagagagggggtccgcgctgccccgcgaaaagggcggagggcgacgagcggggaggggtccgcgccgcccgttgaaagggcgctgcgagccgcggggagggtccgcaccacttaacgcaaaataacacgacccgtccattccatcggtggccgactggttaacgcttcgggcccaccaccatctcgggttcaatcccgcgcggcgaagtcagagacgcagacacaaccacccaataggcacggacccgcccgctcagcctctctgcgctcagcggagaaaatcaatcaatagttaaggtggtctccccatgtagtaatatgtaatgctatttatcagtatgtaaaacgaaattttatttataatttatatatctgcatgataatattgcattttttacataatcacacttaaatatgtttagatgttcatttaaatttatttaattctgtaacttaatcattttatttaaatgctatcttaaatttaagctaaaagaaaaatttttatatcagatataaaaattagaaaatttttttaggaaaactattaattatcatctttttttcaattagaggcatgaatgtaattttcattcaggttgtcaaggtttattttcatttttattttatctcttttattgtgtttttgaattacaaattttttaacagtctaagatttcttttgcgttattaaatattctttgtacttttatttttttcttttagaatattcaaatatg

SEQ ID NO: 98102 - DNA, 1003 bp, Heterodera glycines
aaataatttttgaattataattaccattcttttaagagaaatatttttctcttttataataatttattttctttcattgtgtcagtaattttaattaaaaatcactgataattaattaatttacatttattaataataataatattttatggtttattttcacaaattaatgtcaaaatgagtttattattgtccaaattgaccacgtggagataaaaaaaagagttgtgatatgaaaaatgatcaacaaaatggcaaattcattctcattcatttcgattcactaatcattcgccgcttattttattctttcgtttttaattcgtccattttatttattatttatttatttttcgttttattttttaattacccattaattttcgtttttgttttttaatctctgtgtcttccaatgcctttttttaagttttcgtttattttctgatcaaaaatcattgatattcgttcattgctccaaatcagccgaatatttgtcttttttgcaattattccataatcttcgtcccatcattccccaccccccgtaattaccctaattaccttccaccttcccccgctaagatcgaataatcgttcagcattctgcgcaaaagcaaaaaaaaacaaaaactgataaaacaggacaatgcttaatcaacaaacagcgcaataagcaacataataaaaaaactcgtttaattatttattttattaattattttcatcaaaaaatatataaaaaaatattcaaaattgacaatttttttgataaattatttcgacgtgaattgagtgattatcgctccatcagcagacacaccaaaacattcatttttctctctctgattgactgtcaacgaaatttctatgaaattgaccaaaatgtcattgagacaaaatttgggaaatattttttctcgcttcgctttttccaaagatttttgtctttttaaatggaaataatttttaatttacaaaagcaattaaagcgcataaaatg

SEQ ID NO: 98103 - DNA, 407 bp, Heterodera glycines
  unsure (1)..(407): unsure at all n locations
tagattntggtcaacaatgaaaaaaggtgtagtccaataattgggctggcaacgaaacggcgggcaccgaaccggcgggcaccgaaccgtcccctaccgaaatttaaatcatatcaactgatttgaaaatatttgaaacttaagcgtatgtatttgttaggggtgtatttttccaataaattacccgaagttcgaacccaaaaaacgcgaagttttcgaagctcgaagtttcgcccgtccctggtcactgcggaaatgaattattcttttctattaatttaaaaaaatgcgctgatttcgaatctgagcccggcatttgaaaacattgattttgtctatgtttttcatcgagtacttaaacttcttaaacccctagggggataacaccgcattcgcccctcaaaatg

SEQ ID NO: 98104 - DNA, 356 bp, Heterodera glycines
ggcgagtccccgtgaataaaaaggagattcatcttttgcttattttaggtgtggttctctacaaagaaagaggagagtggctcgaagtttatgctttcaatgcaagaccaatgaatgttaaggaactcaacccgtgttagctctgtctcatattttgcgtccgttaaatgaatgtacgaaaatgtattaatagtaatctgtcatattatattgtgtttatggtatttatatgcaatggagattacttttttgtatttgtttcggctatcttttgttgacactcataaaagccatatttccattaagaccattgtaatattatatattttgtttaaaaaagcaataaaagtggaatg

SEQ ID NO: 98105 - DNA, 707 bp, Heterodera glycines
tcgaagcagcggagcattggcgacggcggcggcgctggtggtggtggcgcgttgctcacgcgactgacaatgatgagagaatggaacaaatagacggggaagaaatagtggaggaaaatttgtcagaaagagagagacggagagagagagttggtggcagagagacacacaaacagagagagaatgagaaaaggaggagaaaaaattgattggttttatttcttatttacttcccgcttaaacacaatgccatggtttagcaaatttgtttgttttctcattaccatatgatacagtaattgacgtatgaatttctgtctagggcagggttcggatctgtccttatttataagatttgtccttatttggagggtccaaatcttacaaaataaaaatgtccttattttggacccaaaaatcttattttttggctttgatgttcttattttgaaaaattttcgatccgaaccctggtctagggtgaaggaacgataaaaatcgtggaccattttttttaattgaaaaagcattcattttctcgatttttcatgaatcaaggcatgaacaataatttgttgagaatatttaatttcatatttgtgccgttgccatggaaaattaagtacatgaagacagaataaaacatatttcatgcattcatgtgattatagagaaaatttattaaatcataaattttaattaaaatg

SEQ ID NO: 98106 - DNA, 751 bp, Heterodera glycines
  unsure (1)..(751): unsure at all n locations
ggcagttcgccaatggttgaaacacaccgcgaacggctgattngacgacaattcatttggattaaatattttttttgttgttgtttttgattttataatattttcttgtttttgttacagacttataagttatgattttgttgttgttgaaattgagaaatttatgcttttttgaaacttacctaatttgtgtctttttttcaaaccaattttttattctttgaacatgactagggatgtcaaaaatatgtacaaaaattggtcaaatatgtacataaatatgtagaaaaaaatcctcaaaatatttaaaaaaaatgaaaatatgtaagaaaaagggtactttttcactttacgccacataaaaaaatatttttatttttctgggattttcggggtcgctgatcacgaatgtggcattcatttcgaactatttcgaaaccaggacccgaattcgaacaaaaaatctaaagtttaattggtaatagtaccgatggtatcacaccttttttgaaatttttttaaaaaatttcaaaagtcaaaaatatttattataaggttttcggggtcgctgagcacgaatatggcatccatttcacccaattccgaacccctgatccgaattcgaacaaaaatcgaaaactcaaatttttcgaaattcacatttatccaacaaaatcgctccaaacgcacgaaaaaagaaaaaaaaacaaaaaaaaattcaatgttcgcatggataaaactcagagacatg

SEQ ID NO: 98107 - DNA, 386 bp, Heterodera glycines
gttttctaaagaggcatagtccatttccagaatttattttgcataaatgacaataaattttaccgaattataattgcattttctttaagttttataatgtaaataccttaaagttcatattgtcggtaaaaatcattttgttatgaattttcaaaaccctaaggcaaaaagaagcgcgaaaaatcttcttctttttttgacttatagaattaaacataaaaatgaaaatattttctccagctcttagagtttttcataatgcattgattaattatttttcagttattttttttaatttttaatttaaaattcatcactcaatgccaaaaatttattgtgtatttttacattcaaaaattggccagatgtatggcggtacaaaaatg

SEQ ID NO: 98108 - DNA, 1003 bp, Heterodera glycines
aaccgggaaaaacaagcactggtaagaatgggggtctgagtgaaaaattagtgaagaaaattggagttaaaaagaaaaaattttaaaaatatattaatatattctttaaaagtaactctgtaaattgtgcggatggcctagtggctagtctccttgctttcccttctttcccctggttcaatccctctacagaaactaacatattttgaattttctttttgtatattcatggctttcctatcgacaaaatatgattactcataattttattttaattaacacatttttatcattttttgaggaaaatctgttaataaattacactcaaattttcaaaatttcccctggcggcgcctatcggcaccgccggacccccttcttccccaaaagttttttggaaaaagcgcgccgaaaaaaattatgtgaaacgtaaatctgaatttctataatattcgatcatttagtccaaaaatgattaattgtttgaaataattaaagaaatttgtttgaaaattttcattaatttaatttagctttaacctttggattttattaaataaaaaacaaaataaaaatttaattttgtattattttcagttgaaaaaaaaaattaaaatttgaattttttaaaaaatttttgaatttttaaaaattcccggttggtcccggttggtcccggtcccgaaaaaaaatcgaggtcccggtcccggcttctcatgtcccggcaagtcccggtcccggtttttgcaaaaattcccggtcccgtggcactctaataaattttaatgttggcaatcaataaatatatatttgcatttgcattaactattaaacgaagctttataatggcattttatttaaaaagtattataaatttattgacatttttttattgccaaatcatttttataaagaaaatttattttattattactattataaactattattttcttaattttattttttctcaattttattattacactatttagttaaaatg

SEQ ID NO: 98109 - DNA, 169 bp, Heterodera glycines
gctggagaggttagacggtgcactctctcgcccaaaaagaagccaataggttggcggtgaaaatcaatcgataaaaaaagtggtctgctattgtagtggcatttaaataaaaaataataattaatgatagttattattataacttcactaattatttctgttattcatg

SEQ ID NO: 98110 - DNA, 424 bp, Heterodera glycines
tcaataatgggacgacgcgaaaaacatgttttgcattttgaccgaattaatttgattaatttaagcaatttggaaatttttatcaccttaaactgcagaattgattacagtacaagaaagatattgtatcatttcccttggcaacttaaaataattatttgaaaaacgaatatggcggcatttcgtcacgcccactcatccaatcgccttcaccacaccactctcctaaatgccggtgttcaacatctgatcagaaaataaaatgaaaataaattaaacaatttaattgcccgtaggaaaaatctaaaaaagtcacaaaattacagtaatcgcttaaaaatggaatcggagcattagcaaacaatcattattatctcaattgtcttcgataacgctttttttttgcctccagcacattaaaatg

SEQ ID NO: 98111 - DNA, 228 bp, Heterodera glycines
tattttctctctctccctccctctctctctttctctctccctcacctctctctctctctcctgtttctctttctctctatttccctctctcctcgtttctctcacattctctacctctctttctgctgatttgtcatcattttgctgtttttaaagggatttgtttcaattgatttaattttaaatttcaaaggaaattactataagtaataattgtcctaaaaaatg

SEQ ID NO: 98112 - DNA, 260 bp, Heterodera glycines
ttacgattaagaaatagtttatgattataattgttaaaagcataaaatgaacctgcgaaaaaacacgtaattattgattgatagtgagaggggtgttagcgcgcagcgacctccagacgggctgtcccttttaatcgacaggccacgcccatccacaaacacatagacgagagtgtagtggttagagaaagatacaaaagggcgccaattcaaacacacagtgaaacccaagccaatttattgattttttacagattatg

SEQ ID NO: 98113 - DNA, 150 bp, Heterodera glycines
tagtaaaattggaaatatttctcatcttttcttcatttttcagatgatatttatttatttgattaaagaaaattaattttcaaatcatttgttttatttgatttattctgcggttgttctactgttattctgtgttatcttatcaacatg

SEQ ID NO: 98114 - DNA, 1003 bp, Heterodera glycines
tccaacattttctttttggtggttgttttttttttgaaatatttatgaaaaagcgggcattaaattttaagacttctcatcattgttagcatcatagatacagcagcttttgaatggtccaacactttttcttccatttgcctgtttaataattcacaccaattgcagaccgccatcacaattgcccattccattctgcaaattgcgcgcgatttggccaacccttccagcaccattttagcccgtccgctctccaaaactgtgtggcaggtaaggacatggccattttcgtaaaagttttcgaaattttctctcacaaatcagcattttcgggggggggggggggcgtagtgcggagccccgacatttgcgcctatgtccaaaatcggactcaaagttgaattttttcaacccctgatagcctaataagcattaaaattaagaaaacacggttttatggttcattatgatcaataattttttgtttgaaaattttattaatttttcaacatttttttgaagatcaaatgatcatgtacaatcacttttaatcgcttatttaaagctatttatgcgatcagtgattgaaaaaacttagttttgaaccagattttggacaaaggcgcaaatgtcgggccgcaaaagtcggggccgcaaatgtcgggacacgcgtagagtgcacccattttcacaagttccatcactaactcgaattccaagaactcgaaatgatcagttagattaggggccggaattgacaaattagatgtcagattcgacgtctgaaacccatgaaaaccgccaatagtgaccggattggttaaattggcgtcagattcgtggtcagcaacccagaaaatcaccgggaacaatttttcagattaaaaatcatcttaaaaagtcttttccgtttgttttaataaaattttaaaaaccaccatttttaattaggcccaaagttttttggccgtcaattatacgacgcaagtgaatgaatgaaatg

SEQ ID NO: 98115 - DNA, 340 bp, Heterodera glycines
  unsure (1)..(340): unsure at all n locations
ttgcattttntgttaacaaatttntgggcaaaacgccaaaatatgtgaaaataagttcttaaaattttttttaggttttaggtgctaaaaataaaaacctagaaaataggtgctaataacttgaaaagtagcttaacaagagccaaaaaaacatgtttttcgtgtgtttcaggccacggggagctcaggaaaaaataggtaaaaacctaaaaatcgtagccctacatattacactcaaaattgcataatggaaaaattcttcgaatttctccccacaaacgagaattaaaaaattttatgggtacatttttgaatataggcaatttttcgtaacaaaatg

SEQ ID NO: 98116 - DNA, 454 bp, Heterodera glycines
tcttaactttttttttaaattcgaatgtacctactttcatatatgtatttaattgtcatttgttaggtaatgttcctaagttttcgaacatcttacccaactaggtaattcttacacaaaaatgtcacgacacgggttgtgcaacatagtaaatgccagaatcccacaaagctgtggatgaattaagtatggagaattgggcatgactcataaacccataagttaattttagtgttccaaataataagtttttcaattggtggatttgattccggcatcgatttcgaattttttgtttattaatttccatttacatattttcggtcttttctaatttcatttgttttgtcagctattcgcaaatttttaaaaagtgcacctaaatttggcttgaactaaaaaaggcgcgccacttgttataaattctgcggaatttctacattttgtgaaaatg

SEQ ID NO: 98117 - DNA, 243 bp, Heterodera glycines
ctctagagtcaaattgggtagagaattccaattattaaacatttaatctctttaaaaacaaaataattctatttccccataaaattcaatgaataatatttcatttttgctgctattctttttgtttgtcgttttcgttgatttcggttagaatatttaaattattattttttgctacattttctgtattttcagctacattgaccataattgccgctggtctgtttctctgcgtgccaaatg

SEQ ID NO: 98118 - DNA, 97 bp, Heterodera glycines
ccttgaaaagggaagcaaaactttgaaaaaatagataaaacattaaaatttaaatagattaaaaaggtcaaatttatataattgcaagaattaaatg

SEQ ID NO: 98119 - DNA, 922 bp, Heterodera glycines
agtttagaacactttttaagccattatacggtcatttagagtcagaaaaaaaagtcattgacttaaattcccagccctaattattagggaaacggcggcggttcaatgggaaaatgacgaaaattgggacgccaatttgaacattgtccaatttgatctgtggtatggcaataattggattgggagaacagcgaaggtcgaggcctaggcttaggcttgcttgggcctaggcttaggcttgcttcggcctaggcttaggcttgcttgggcctaggcttaggcttgcttcggcctaggcttaggcttcagcttaaaggcgtgggcgggtggtgatttagtgatttgtgttcagcagacaaatctgtgcaaatggttgtgaaggagaagacgcaattgatgacattttgaagaaaaaatgttaaatttcaggacggattttttctcattttcacaccaatttttaagttacatattttataataaaaatttaccactattttgtttttatttcaagtaaaatataagcaattttgatgcttttgattgaatcaaaagtgattttaacttttttggaatttatttaattgcttttaaagaaaaaattaaaaaatgtagttttggcataatgctcattttgaaaccttttgaagaaaaaaaatgtacattttctggatgattttttttctcattttcataccattcaaaattttcccgccttctgaccacctattccctggattttcaaaattttgccaaaacttggtttgtcgaaatctgttataataacattttttgaaaataatattgcaaaaacatagtgaaaacaatgcataaataaagtgttttttagtttaattacctaatttctttttcgcaatcacaacttacgacaaaattgtttgcttctaattgccgcaaaatg

SEQ ID NO: 98120 - DNA, 361 bp, Heterodera glycines
aatctgtaattaggaaaatcggaggggaaaaaatcacattatgaaattttgatgagggaaaaatctgagtcgccttgatttgatttgacttggcgctcctctacttcggctgctatagaacaaaaattcaaacttttggaatattttttttgggacggtgtcccgcctcgtaatgggatcccgctaaaatcccgcgcgtgatcccgtctcgcttcagtatctatcttctgcctctgctttttttattttttcaaataaagacacaatgccaaaaggaaaatgttatcgtgtcaataatcaaaaaaatttaaataacaagaaaagcgagaaatgctaaaacttttacatcaccacaaacatg

SEQ ID NO: 98121 - DNA, 586 bp, Heterodera glycines
agcacggagcggataggatgatgattaatgatcatgaagatggtgttgaacaacatataattaatgaatgcaaatgataaaaataaatatgccacaaaatttaatttttcaaattgttcaattgatggacaagttaattcttatccattttatttttgttcatttccgatgtatttttcgttttgttaattttaaaatatgtaggaaggatgaatgaggagcaaaaagctaagatgtcttgcccattctgcgcttatttattcagaaaaagagagagaattcaaatccgggccctaaaacagataccattttctcaactcagaaatggctatcattatcaattattgaacattggcatccttttgattgtatttttacagttaaataccgtatcccatttctaccctaccatatttttggttggcattcttttacttgttttttaaagttagatactgtatcccatttataccctaccatattttctggggccgattttgttggtttttttctagacaaaattgattgtgacttcaactagttcaaaaaccgtattttgcttttgccccctcactatacattaatg

SEQ ID NO: 98122 - DNA, 1003 bp, Heterodera glycines
aatttggatatttctttttaattttactttttttcgtctttttatggctttttagtgccttttttgctgttttaaaactttttttagtcgactttttggcgatttttcgtggcttaaatcaccagccctattttttttttgcaaagagatttagcccaggatgtggttttgtagatcccctttttatcataacaaaaaaattgaaatcaatcaatcgtttttggcattctgtcgaacaaaataatgccgttatgtttttctttttttggcattttatccaacaaaataatgccgcttgttgtggtaatagcattgtctgttcaatcgctcgtccatccgttttgagccgtatttgttccaatgtttgtattcgtcatcaaatgggtcaaacacactgaaaaaacgcttcggtggcagctcatgcctggtcattaagaaattaattaattatttatttaaatttttatttttaattattatttcaatggtttttagccaaggcttcaatttgaatttaatatttgtaaaaaaaagaattgtaaataaaatataaatgaatgcattacacaaatgaatggcaaaattatgccaaaatttcaattttcataaaaatctaattgttgaatgaccttaaaaatttccattttttcttttctatttattattaacattgttttgctttaattgattttgttgttaagaaaaaattctgaataacaaaaatataaaatatattttctttagcaaacttttaaaattatttcattaacattattaaaccataaaatcaattaaaataatttgcaataaaatgcattctgcggaaaatgtataatttaaataagcttaaacgaataattactattcattttataatcattcgttattaatttttataaaaactaagataattttaaataagattattaaaacatacaaataatatttctttagataacaacaaaataattaatatttaagaaccaatcaaagaattaatatg

SEQ ID NO: 98123 - DNA, 1003 bp, Heterodera glycines
tgtctttcattcaggagaatattttcgctttatttcaatcattttattgcatatttccaaattttgctggaaattaaataatttttgttcgaatccaggtccagggttcgaaatgggtgttagaattgtatttcccaaccctgaaaacatataaacaaatttatttcgaaaaaaagttgagaaatgttcttttaaagagggaggtaccatcggcggtagtctacataaaatttttatgggaaaatgagaatgattgtgagtgggcaatggaggagatttatcaaagtgggcgggggggggggggagtgggggcggagactttgttcttgggcaatcgattgtgcagagaaaataaacattgaattgcatgttgcatttacaacactctgctttttttcctacacactttgttttcatgatttttcaacaataaaatccataatttttgttttaaaataaaaaggaagataaaacgccaaaataaatttaaataaaaattctcaagataaaagcatcgatctttacactcttgccaggttcttaaagatgaagataaattggagagtaaataggtattgaatgctttaattttagactgggtgaaatttctgaccgtaatttttaggggtttttgtctttggcaaggaatatcaatattaaaatacaatgctgaatggtctgaaaaaacaatactatcctttagttcaattgaagagactaaatcaaggtttgtaaaaagacaaagatcaagaattgaatttcctcttgttggacctataatattagtgtttagtgaaaatttattaaaaaaatcaagaaaagttattcctagactggtatgaggtactggaagattgttgacccaagttatatctttgctgccaatgttaaaagtctcctatgataatagtattgtttgttatatatttttctaggagtaaaaaaagagattttgtaagtttcaattacagatcaattttctgtttaaacataacgaaaaatg

SEQ ID NO: 98124 - DNA, 170 bp, Heterodera glycines
gctaaaaagcaattaatttttaattatgctaattaattttaaattattaaaataaattacaaaaaacctccctaattcactctttctatgagtatatcattacataaaaactgtgaattttatttaaaataaattaaaaatattcaaaaaaaattgcaataattcagatg

SEQ ID NO: 98125 - DNA, 286 bp, Heterodera glycines
tagataaagctaaaaaacataaaaaagtttcgtataaatggtacagaaaaaaattcaaagaaaaaaatgcgcaaagattttgggcacactctgtgtttctttttgctttttgcatattttcaaaaaaaattttttttgttgttgtttttttttgtttcattatgaatgaattttttttttcatttttttattggcttaagttaagtaaaatcactatgaatacaattgtgtccttgaatgataaggacagtccttaaaatttcccaagtgatggaagaaaacaatg

SEQ ID NO: 98126 - DNA, 957 bp, Heterodera glycines
tttttgcttaataaaagtcgtaaaaaatattttgaaaattataaataaaaaataaataaactgacctgctgcagaataaaaatgaatttccaattttcttaatttatctaattaattgacttgacttttttattcatttaatttattaccacatttattattatgagtgcaaaacgtaatgatatcgctaataggccgaatattatccctctgtttttataatacatttacttcccttattaacaaaattgttaatatatttctaattaaaagttgttcggaatgcgcggcgaatgatgaagcgaaatgcgcttccgacagacggaacaaattagcagcccattagcatgacttagtttactttccccgttttttggtccctaaatttgctatacaaatatttgaaagtgaaaatagaacggaaactagttaaataggttcaccaatatttacataaacattatggaagtgaaaaagaaacaaaatattaaaattaaaggggctaaatttatgcatttgaaatgtttacatttctaatgcataatttatgtatacaaaatgatttctgaaccttaaaattttgtttgtttttttcaaggcaaatgacagtctagacagacacttcctttcacggataacaaaaaatatatgcaatggaatagtttgtataataatattgatattatattaaaatggcacttttaggaaacgcgctgacagccattttggctcatttaggaaacgcgcatgggtggcactgtttaggaaacgcgtcagcacgcccccattgaagggttataccccaaaactatttttatcataattatttttaactattttaaagaaattaccaaattggaaacgtaacaccggcaatcggtctaatccgatgcacatttgcatcgccaatgcgaaaggacttgcggataagataactaattgaatgtaatagcaatg

SEQ ID NO: 98127 - DNA, 87 bp, Heterodera glycines
aaacggtgtgattaattatcaaatttactttttctcccgctttttaagaatccgaataacaaatgaaggagaaacattgtggatatg

SEQ ID NO: 98128 - DNA, 471 bp, Heterodera glycines
tttttgccgttcaccactctattgctaacagcgcctagcttgttaacagagtgggtgcgcgtggatgaactgaaaagtgtcgccaagacacaaaatcagcagcgcaaattttcaactactaacagtacctaactttagcaggtccaacaaaaatgttgtttattatcgcctagataataaacaaatgtagtccagcagcgatgactttcgattgctgttgacctctccctccaattaagagtccaaagtttggaaaaagtttgttggttgcttcaagcaaaccaacaaatccaaaactgcttccacatttccaataaataagcccacagtgcaatacgtaagggcgtcgccaattgttatgccggccgatggcaaacaaataatcaatatttatttggagcagaggggaaaaagacacaaaataaatggggaggaatttttaaataacaagaaggaaaaataacacaaatg

SEQ ID NO: 98129 - DNA, 83 bp, Heterodera glycines
aaaaatgaattttatttgtcttacaatggatcgaaaaaagatttaaattcttcaaaaatgtcgtgaacacaaacgatacaatg

SEQ ID NO: 98130 - DNA, 98 bp, Heterodera glycines
attggccaattaattaattaatcccttttccgttggccaacagttagcgaatttgatcatatgctcccattttgtttcagatttctctctctgtaatg

SEQ ID NO: 98131 - DNA, 578 bp, Heterodera glycines
gaaataaaaaaatagattttagggtcgaaaatcagaaaaaaattttcaaaattgcttcaaataatttttttaatcaatttattcgaacaaaagggtttaaactttatatttccgaatcctttattaattttaacaattttttgcgccgtattttttgaaaaaaaactttttgaggaccagggaggaggaaggaggccggcggtgccggtaggcgccgccgggaaaaaattgatatttgaatacaatacagtgtcagattttgtccaaaaatgaccaatttttgcaattttttgaacaaattttttaagaaaattaaggattttaaaggccctgtggtgccgataggcgccgccggaaatttttttttgatattttggctatatatttaacagtttttcgatcaaaaattattaattttgccaaaaaaaattcaattcttaccagtgtaattttactcccgtatttgggtgaaaatttacgggagcgggagcgcgattcctttacccgttgcgctcgcgtgaccataattgtgcgcatttagcgccactactcgcgaggtgccatatgaccaacacatg

SEQ ID NO: 98132 - DNA, 113 bp, Heterodera glycines
ctcgcgtataatccgtgcttttatactcggtttcattttctcgactcaaaaagccacgaaccattcttttaaggacttcgatccaacaaagttttggatttgcttgtctcatg

SEQ ID NO: 98133 - DNA, 524 bp, Heterodera glycines
taacttaaagaaaagaataactgtatcaatgaattcgtatattggagaatctgggtcccacccaaaattatttttctctcatgaaaagaccaacccgggggttttcggggcttcttatcaagaaaatatcttcttaaaagttttttggaataggctatgcaactaataattttgatacttaaattgaattttttttctgctttaaaaacgctttttttgcggcgcgcttcttcaaaaattttgtgggacagggggggtgatccggcggcgccaataggcgccaccgggaaacatttgtaatgtttaattcgatttgtttacagctttttgtccaaaaatggccaaaatttgcgattttgggctaattttttaagaaaaactttatgccataaatttcaaaaattctcaaccatgagaaaaaaattacattttgttgacataatgccataatttaatcaaaatattgttgaaaattacaaagatttctcaaatttcttaattttttttttaaacttttccaaatg

SEQ ID NO: 98134 - DNA, 443 bp, Heterodera glycines
tcttcaaagggaaaggcggcaaaacagtgatcagaaaatggttgggaaaaagtgatcagaaaaatgatgagaattttaaaaaagtaaagtggggaattggggggggggggttctctgatcgatggaggattgctaattataaaatgattggagctataaattgggaatgtaatggttctcggatcagcttggaagtttattctgatcaaaaagtgatcagagtaaaaaaaattttgggatttcactgatcagaaagttttcagaagcaataaatttattatctaataagaacaaaatttgattggctaatttatttgatcagagaatgatcagaaccaaacatttacgtggtgttggatttgatcggaaccaaaaaactatggttttttttcagtttgtcactttctgacccaaatttgcgagttctgtatgatcagaaaatg

SEQ ID NO: 98135 - DNA, 354 bp, Heterodera glycines
aattttaaaaaacaaccaaatctaggccccaaaacggaaagtacccaaaaattttttatcatcaatcggcagcaattgaaaaaaagagtttttttttgattcttcattgtttaaagattttttttttattattttggtttttctattttttatttttggtctaataaatattattttttttaatgttaagtgggttctgttttgctatcaaaattacaaaaattataccaaattcgaaaaaagagataaagcaaggacccggaaaatttttttttaatttttacttgcggatcagtgaattttatgctgctccatggtgtccaattttttatgaaacaagcatgcaaagggatg

SEQ ID NO: 98136 - DNA, 781 bp, Heterodera glycines
tgtcgcagcagtcgtatagaaagagggatatgctaaagcgacggaagcgacctgcgctgattcgatcaggcctgatcactactaatcaatgtgtgtatgaatgtcactaattgttgtgtgtcaagagtgagatatatgcataataataatggaaatgagaaggaccataacgattaagcatcaagtaatcaatatcagtgatctgatcagaaagtctgatcaattacttttaatcagcaaagcacctttttaggcagtgtgatcagcaaattaggacagtgtctgatgatcaattgatcagagttccggttggaataaaactgattaaggcaatacaaatggaaaaagacaatgcacagattacaaaagaaggcatgcaaaaatttatgagacgaaaagatttttgagcaaaaaaaataaatcaaaagcaattaagatttaatgaagtgattgattagtgtgagtggagtaaaagagaatattaaaaaacatcattaccaccaaaaagtgcatttcgaaacatttttaagtcaatttttttttgtcaaaaagcaaagttcgatcgatcagaataaatattagcaaaaatgtgtctcagcaccaaacactaaaaaagaaagcaaaatattacgtcaactaaacccgaaaacaacaattttcatacataaattttaggctattagggccccacacaaaacgcttaaatcgtaaacaaaagcacaggcccccgcggggggggacgacgagggggggggggggggggggcccattccaaccaatg

SEQ ID NO: 98137 - DNA, 350 bp, Heterodera glycines
tttctttaaatttaaaattattataaaaaacccaaaaaatgattacttttgttctcaaacaccaattgatcattgatttttctcgggccattacgattaagaaatagtttatgattataattgttaaaagcataaaatgaacctgcgaaaaaacacgtaattattgattgatagtgagaggggtgttagcgcgcagcgacctccagacgggctgtcccttttaatcgataggccacgcccatccacaaacacatagacgagagtgtagtggttagagaaagatacaaaagggcgccaattcaaacacacagtgaaacccaagccaatttattgattttttacagattatg

SEQ ID NO: 98138 - DNA, 102 bp, Heterodera glycines
ggtaggccgagaaggataaattgttttaaattccatttaaggatcgtccattgggtgacttatcttccctctcctcactctgatgaaaactgccagaaaatg

SEQ ID NO: 98139 - DNA, 668 bp, Heterodera glycines
cttttcccccttgtttttttacttttttactccttgacacagaaaattcagtgattggtccaacgacggaattcaattcactgcttccatccgaccactttcattcattcatttcatttgatcatttggaaaataaatatttaattcgtaaaataaaataaaatatttttaatactaaataattaaatagtattacataatattaattaattaatcaattagcaaatgaattgcttttttctattgaccgtctttctgagcttggtcattaattgctcagctcctccaatacggtaataatttcttatgtaatcaaaaaccaaataaatattttaaaatttaaaagcattttaaaatattggggtccaagcattgatccaggcctaagcctggatatttgggcttcattttcacaatctctgctgctaaatgtgtggtcgttcgtccgctttttcttctgctatggcttttccccctttttttttcacttttttacacgtcgacacaaaaattcagtgattggtccaacgacggaattcaattcactgcttccatcccaccactttcattcattcatttcatttgatcattttaaatcaaataattttttaattttcattaattaaatagtattaatattcattaattaattaatcaattagcaaatg

SEQ ID NO: 98140 - DNA, 159 bp, Heterodera glycines
ggtaaattaaatattataaattagaattatttattttctaaaattaaggcactccgttggtccgacgaacagtgccgtcaaaatgacattgaatgttccgctgaaaatcgacgcgaaatacttggcccggcattgttaaacattcattttccactaatg

SEQ ID NO: 98141 - DNA, 207 bp, Heterodera glycines
agtcaataaaaaaaaattcagcataaatttaaaaaaaaccagaacattaaacccgtttaaactttatcaaacaatttgcaatttttgttttttttttgacattttatgcctttttctaaaaacttaaactttcatggatttattggaaaaaactcccagaatatggattaactattaatttatgtatccattaagaatggcctaatg

SEQ ID NO: 98142 - DNA, 148 bp, Heterodera glycines
aagaaattcttcatttgaccgttggaaattctcattaaaatttggattttttaaaaatcttaaaaaattatgcacaaaaatatgaactgaaaatttttgaatatttttgtttaaacttttttttaactttacattcagaaaattcatg

SEQ ID NO: 98143 - DNA, 318 bp, Heterodera glycines
ggggtgtattttaggtttttataaaacgattaaaaggtgcttttttgccgtgctaattttctttaaaaaataaaaaaggcagggacggtgaaaatttggtatttttaatgaaatcttttaagaaaaataatatattaaataaattgtcaattttcctttaaaaagtaaaatacattttttctgtttgtctgttttgtacctatttttttgatcgttttcggttaaccgaaacgttttgttaaccgaaatgctcggtttcgattatcggtttttttcataaaatgtaatttttctttctccttttcagccgtgcccatg

SEQ ID NO: 98144 - DNA, 135 bp, Heterodera glycines
tttgaaggcccctaactttttttgtaaaactcgaatcaaaaagtgcccgctgtgagggcactccgccaaagtgtcctctaaatgctggtattttttaaaattttttttgagcaaacccctggcctgcaaaaaatg

SEQ ID NO: 98145 - DNA, 151 bp, Heterodera glycines
tttttgaagagatttgtttttctccaatttcagattcatctttaagaaaataaatatttaagcctaaaattaatctattgtaaatttgccaaattcggcggcatttggtcagtttggagcagccgatgcccccccccccccggcgggcatg

SEQ ID NO: 98146 - DNA, 69 bp, Heterodera glycines
atttccgttggttcaaatcttcaagtcgaattatgtagctggccgaagaagtggtggcatggagaaatg

SEQ ID NO: 98147 - DNA, 77 bp, Heterodera glycines
caaagagagcccaatttcttaccacattcatttggtacagatacgtctcgacccccgaaggcgacgtggtaatgatg

SEQ ID NO: 98148 - DNA, 323 bp, Heterodera glycines
tttatttttttttgcttttccgactttttgtttgcttgctgttgcttatttttgtgcgctgtttatgttttaagatgcttttcagttttcgttcttttcttcactttgtttgtgtgcatgcttacaattagcttgtttgcctgagttttacggcatttttgcagtttttttttggttttttgcattttgatggatttgcatcactaattgcatgaatgctgttgctttttccgctattcccttcgtttataagtcccccattttttgatagtttatgtatcaaaatacagtcttttcattttcagagtgttcatgccaatatg

SEQ ID NO: 98149 - DNA, 958 bp, Heterodera glycines
  unsure (1)..(958): unsure at all n locations
aaaatggggtatgaaaagtttattggggaaaaaaagacttttacaaaataatacccctgggagaagggagtgggaaacatgatttcaaaattttcaattttttctagtctaatctactcaaaacggctcagaatcnaataaaaataacattcacggtgcgaaaaatggggtttgacaagtttattggggaaaaaagactttacaaaataatacccctgggagaagggagtgggaaacatgatttcaaaattttcaattttttctagtctaatctactcaaaccggttcagaattcaataaaaataacattcacggtgcgaaaaatggggtttgacaagtttattggggaaaaaagactttacaaaataatacccctgggagaagggagtgggaaacatgatttcaaaattttcaattttttctagtctaatctactcaaaccggttcagaattcaataaaaataacattcacggtgcgaaaaatggggtttgaaaagtttattttgaaaaaaagactacaaaataatacccctgggagaagggagtgggaaacatgatttcaaaattttcaattttttctagtctaatctactcaaaacggctcagaattcaataaaaataacattcacggtgcgaaaaatggagtttgacaagtttattggggaaaaaagactttacaaaataatacccctgggagaagggagtgggaaacatgatttcaaaattttcaattttttctagtttaatctactcaaaccggttcagaattcaataaaaataacattcacggtgcgaaaaatggggtttgaaaagtttattttgaaaaaaagactacaaaataatacccctgggagaagggagtgggaaacatgatttcaaaattttcaattttttctagtctaatttactcaaaacggttcagaattcaataaaaataacattcccggtgcgaaaaatg

SEQ ID NO: 98150 - DNA, 270 bp, Heterodera glycines
tatttttttgtaggaagattaaataatttaaagccagtcattcgagaattccgcgtaagcttttaataagcgtgcgatttaattaaaccattccaatgagagcgttaaacggacaatttgtttttacgttgttttaagtatccttcttttgccgtagctcattcatcggaatgaattaatgaagtttcatagaattaaagcttccaaatgactctaattgtgcaattaaattgacaattagtgaactatttgttagagaacattataatg

SEQ ID NO: 98151 - DNA, 1003 bp, Heterodera glycines
gcagttttaacaaacgcgcatgggtggcagtttttaacaaacgcgctagcacccattcattgctataccaactaggtatcctctgcatcaggaatgacattttttcgggaattaaaattaaaaatataatagaaaatttataaattttttaatttggctaaattttaaaattcataaaagattacaattttaaattaaaaaaaatttttaataattgcgacaaaacttggttataataattaaaattttatagtgtgaaaaagctaaacaatttccatttttgttattttcaagaacatttttgtaatttgtagtttgaatgtttctgtccttctcaaagattcaaaatgcaatgtcaaatttgaaaaaaaaattttttttttttgcaattatctaaaaatactccttaactattgttttggtattttcaaagacaattctgagtttttaaacaatttttggcatttttttgaggattcaaagtcatttttggaggcagattttagtgcatatttcggcattttttgggtttttagggcatatttgagggatttttagtgcgtattttatgcgcatatttgccattttttagtgcatacaactaataaccccataatgattaagaagaccaaataccttatcattttttatcatatgtaaaagccaaacaattttctatttttgaattattttcataaatattttttgtaatttgtagtttgaatgtttcggtcctcttccttcaattactgataaaagtatttatccattcattcattcgttggtcatgtgtgtacaaatcattgaattaacacttttaatgagaaggtaataatgctggcatatatatatataaaaaaaagaaaatcagctaaacacttgcagaaataattaaattaatttagtcacaatttttcaaataatttgagtccaattatattttaattttcattatttttaatttaaaaaaaatattaaataaaataactttcagactccgatg

SEQ ID NO: 98152 - DNA, 294 bp, Heterodera glycines
ccactgctgattgtgaactgtgatgaaacaattttatgcctccattgtgattggcatttgtctttttaaaaatttgcttctttgacttggaactttctgtcattatccaccattagttcctaattatgtccaagaagcaataaattttttatgaatcaagctaattttgcataattaaaaagtcttggggcgcatgcgtctgtttgtctatgttttttcgatttggttttataatacccttttttttcctcggttttcatttaccataatttgcccatttttattaaaaggatg

SEQ ID NO: 98153 - DNA, 386 bp, Heterodera glycines
ttttgtcgtcgaaatgtggagaggcgaaggttttgccgaagagagctggtgaatcgattcgtttgctttctaatgaaagtggcgaatggggcacagtgagccccttttatgtcgctaaagtggagggaacgcccatcccattgacagacaatgcaaatccccggtgggagcagagaaaaatggacgtgagagagtgtgagtgagagagtaaaacggcgtccaattttaaatggattttttttttggcacgaaaggagtctccgcgcgcctcaacaatttagccgccatttttcttagcataaatagcgcccacggtcattctcttcctcactcttcttcttttgctcatttgaattcgcttcactcatccccaatcagctaaaatg

SEQ ID NO: 98154 - DNA, 610 bp, Heterodera glycines
atgaaaaacccggtttaaaaggaacgatagaaacgttggcaactgagagtaaacgtggagcggataatgttttagagaagggcggatttcggcgtcaattgggcacaggagggcgaagaaatcgtataaaagctaacaattcctccattctatcacatcaaacgctaattggaaaaacaataacaaaaccgttaattcaaagcaaaaagaggcttcgatcagacgcgtttgggctttattaaaaaatgacatttcacaaaattgacgcgagtagcatcgattcgattaccaatgccgttgattttttcagtatacctccgacaaatgttaccgtatcatcgtcaaaggttttcgagattttgccgagtaatccactcaccgacactccttatcattttaaaatacactcgagccaaaactacattgacctgtcaaagtgttaccttttgaccgaatttcgaatgcgaaaattgacaccaccaaatggtgaatggggacatttggatgctactgatcaggttgtaccgatacaattgatcgggcacaccttcatgcgagacctgaaaattgcaataaacggtcgtgaattttcaattctaattcactgatg

SEQ ID NO: 98155 - DNA, 390 bp, Heterodera glycines
tagggagtacaataggtttggtttggaacacacccccctcccctcctgggttttgatggggcggcaactttaaagggctgcgcccctcccatagggtttgggattgtgcgggaaacacccgcgagaaacccgcgaggttttgacgccatatactacttgcatacttacttaggattagggtctaaaaagccacaatttttagaaaccaagttttttggagttcaccttattgtcggggattaactgaaaaatcgtttctgggtttgcttggtccggaaatttgtttgtattcggcatttttaattttctctgatccaattcccagtaataaaaaatgataaatcctaaaaattgcattgaattagttaaaattcccgagaaaaacaaatg

SEQ ID NO: 98156 - DNA, 531 bp, Heterodera glycines
atttgtatttggtagagaaagattaccgtaattattttaatagagccgccccggggctctgtttttcaacctcccctcccccctcaaaaggggggctttatttcggaggggtggctctaattcaggggggggggggctataattcaataaatacgatatattattttattcgtactgtttttcgacaaaaaatcgtcataacttttatttaagtcggtcaaattaaacattcttggtatctttcgatagccctagatgttttcttttagttcacaaaatttcaaaaagtttcgttaaatttcaagaaattgatgatcaaaaatcgaaaaaaaatttgtttcatttataacattttattcaaacaattgtcaattttttgaaacttggtatgcaaatagagaattttaagggctttcgaatgataccaagaatgtttaatttggtcgactttgacaaaagttatgacgaattttttgtcgaaaaatttgagtttgattctgcatcaaatattattttctgctgttaagaatg

SEQ ID NO: 98157 - DNA, 94 bp, Heterodera glycines
gaaattcattttccaatttaatattagaaattgaaaaataaacctttgtgattgtttttttctctattattttcagctaagaaatttttaaatg

SEQ ID NO: 98158 - DNA, 279 bp, Heterodera glycines
aggacattttgtatttcacaatattttgacagattttatctcagtcgtttttcttgttgtttagaatctcaatttatcatttacatcgtgtttattccgtaaatgagtatcaataattgaattaaaatttttatttatctattatacattcacattgtgttgttgtctgacaactgtttgtgtaactgaattattttacctgcatgagcattagtcctgaatgggagagccatggttatttattatgttttttaagatatcctttctatttgacaaatg

SEQ ID NO: 98159 - DNA, 368 bp, Heterodera glycines
ccaatatttcaaaaactacgtaatgacaacaatgacttcacaggtgaacaaggggtgcgccggcgcactcccccccccccccccgtaagggggggcggctgtaaaggagggggggggaggtcgtaacgaagggggaaaaatttaaaatttgagcaatttcttagcggcgaaatccatacaaaatttaaaaaattttcccggcggcgcctatctcggcaccgccggaccgccccagccccttcccaaaaagtttttggaaaaacgcgccgcaaaaaaaaagaaaatatgagaaatttatgtgatcctttttttcatgactggtcatttctattttagggcaacaacagcaaaatgcaccggcgacaatg

SEQ ID NO: 98160 - DNA, 242 bp, Heterodera glycines
agtgccaagctgagcttcgcccgtccctggtcggtggtcgggggataggcccaaaaaagtcgggggccggggggcaacccaaacaaaaagaattgaagtgtttttgatttgtaattgtgcagagaattaggtaaagaatgaaatacatttcttttatcagataaaaaccgagccttgctaattatttatgattggctttttgccttaccgaaatcatcgctttctgaagcacattgccaatg

SEQ ID NO: 98161 - DNA, 418 bp, Heterodera glycines
caaattttaaaatcttgataattcgatagccctaagtattatctattattctgcaaaatttaagaaaaaatagttaagtttcaataaagttatgacctgagaagctcagaaaaccaagttttttttcaacgtttttgcccataacttttttgtggcttaacaaatttttttgaaattttttaggctaatagaaaacacttagggctactgaatgacatcaatattttaaaatttggttgtctttgagcaaagttatatcaaaaatctttccatttgatggtttcttgacaaacgcccattttaatggtttttgactaacgtcatagcacccttacatatatattaatggcaatttccgtttatttctttttagtgctaatttcaatttttaatttcagctttgaaattttcgtagatg

SEQ ID NO: 98162 - DNA, 369 bp, Heterodera glycines
  unsure (1)..(369): unsure at all n locations
agcaaaagatattatgcgccggtcgctgctcaattccccgaaattcgagcagattcattcgttcgttttgcgctttttattccaacaatttccncaattccttcaatttttcaatgaaaatgcgttagattttcccgcatttagtcactttggtttgttaattggcaattttaaaaatgaatgaatttttctttagcaaattttgagcacaacgaaatcttttcgctgtacaaaaaaattcttcaaaatggcaattcggcagaagcgatttccgcggaaaatattctgtcattgaaattgttaactcagtccataaaatatcgagaacaaattttggccaacgacgcgttggaaaattcgcaaataatg

SEQ ID NO: 98163 - DNA, 66 bp, Heterodera glycines
ggtcagtattgtcgcggtttttgggtgcaaaatcattgcttcttttaagggggcggtgctcggatg

SEQ ID NO: 98164 - DNA, 442 bp, Heterodera glycines
agaaccaagatttttgtttgagcctctgggtcgggaatggaaccatggtcgaatttgctggatcaaaatttaatccaccccattttctgggtccgcttttcctaataaaaagtggataatgatggggttcatacaaattccggtttgaccattgccctgtccgaactcgggataaacacaaaattttgcaagcaaatgcgtgtcagcataggcttctgttattttttttattagatccggtcctctgtgtttcgaaccccactaattttttcgtaaaaattgccgaatttcgggaacttttttatggggtttactgttggtcccttttccggctttttttctaataaacaatggaccaaaatcaaaaaatgcctcccctccaggagaataccacgccacattctctccttttcaactgtcactacagtttttgcatgccatg

SEQ ID NO: 98165 - DNA, 1003 bp, Heterodera glycines
agctgagaattttgtaatcatttcatttcaattaaaaaactattaaaaatattttattttgaataaaacaactattatatatttcacaaaaaatcagtccaatccattttattatatagagcaaacatttttattggttttgcattatttattttggaaacaaaatatattttttgcaaatccactttaataaaattaaaagaattcaattaataatttattccttagaaatttcaaaattttccgttccctcaattctcttttacggatttaaatgcttcccatggcgcgctacccattttcaccagcaatggcatctcgctccaggctaacacttttaagctggtgaattgactccaattttggttgagacggcaaatttttcataaagccagggtcccggtagtcgtgttgggtcgtttctaagtgcattttcttaatacctgctggttggactcgatacccggaaccgagaaatttatttttttgcggattttttcaaataaattaaagctgagctttttaaacgatcaattctatctctttctttttgggatataagagagagagagagagaggaagagatagagaatgaaaaaaaaagaaaagaaggagaaagagccagcgataaaaaaaaagtgagagagagagactgcgagagactgagactgtgataaagagagggagaaaaagggaaacaaaaagacagagttatatcgattaaaagaaagaatagagaaaggttattaaagcatatatcatcattttgacaaaaattacaaaaaaccccactaatttaaaaattttgccgagattttcccttgtaaaaactgaagagccgatctcgagttaaaaacttaagttccataaaataaacttggaatcgctagagggggtcaaaatataggcctatacaaaatttcaagaaatttaaacaataggaaaaaattttttacaaggctaaaaattttacaaaattacattcattttcaaggtgcaaatg

SEQ ID NO: 98166 - DNA, 1003 bp, Heterodera glycines
cctaaaatggtgttttgtttttatagaggaaaagaaacagaaaattaaaaaatataattggagattaatagagaaaggatgggtagtggagagagtgcagtgtttgtttctctgtcggcgcgggtgggagggttagaatggtgctgagtcgttatataaaaaccctcaaaaagggcgttatataaaaaaccctcaaatggttttttttgtgtttttattgatttttccttgtgttttgggcgttatataaaaaaccgtcaaatcaatcaaattgtaagacatttcatcaaaattgggcgttatataaaaaaccctcaaaaagggcgttatataaaaaaccatcaaatcttattattaccgtattaatttagaaaaaacaatcgtgccaataaaataaaacctatataaaataataaatcattttaaataaatattttttatacaatattgacattaaatgtaatcaattattggatttatgtaaatgttacgtcatctaaaaaaaaattattcgctagatttatattttttattattcatattaatggaaatgcatggattgaagctataatcaatcctcaagaaattaattaaaaattgagcaaattttccaaaaaattattgatcaaatgctttctctttaaattgttcgtttaatggttttcgctgataaactgaacaaattttgcaaaatttgctgcagcaagattttttagggtttctttgataatgtgaattctttaaattgttcttaatgggtttttgcgataaagtgatcaatttttctaattttgtgctttcatgtgattgtgcattggcttgacaattataaaagggttaatttttcttaaaaattatatttttataaaatggctaaattaaaaatatttttctttgcatttttgattttgtcacaaaataattttcgtttggcgaccgcgaaatttcaattgatttggaaaactttaacaatgaatttttgtttcgaaaaattggtgaaatg

SEQ ID NO: 98167 - DNA, 66 bp, Heterodera glycines
aaaacccgttaaagtataaatcacaattaagtcaatattttgccatttattttatctagaaaaatg

SEQ ID NO: 98168 - DNA, 247 bp, Heterodera glycines
tctcctggggatttgaccgcaaacttggtaccaacatttgccttctctagtctggctctaccaaacactcacacgatatttgaaatgctaacgaaaaaaattcttgccgaaaaaatggctatctcttttttctcctggggatttgaccgcaaacttggtaccaacattttccttctctagtctggctctaccaaacactcacacgatatttgaaatgctaacgaaaaaaattcttgcccaaaaaatg

SEQ ID NO: 98169 - DNA, 79 bp, Heterodera glycines
taaaacacaaaatataagcattttatagaagcgaaccaccgtggaagaagcacaaaacaatcaaagaaaacataaaatg

SEQ ID NO: 98170 - DNA, 977 bp, Heterodera glycines
actcactctccttttatttctctcgcgattcttatttcattctttttctctcttttcactctctctctctctctcttgtgtcatatctttcctttttattcgctctctctttctcttacatttccccaatccccatcgttttctctcacaaattagttttcgctctccttctctgtttctctctctcttctctctccctctctctcatttgtcctctctctcctcttttctctcttctcttctttctctaattctctttctcccccactctcttcccccccctctctatctctccatttcactctctcctctctctctctcttttctctgcctctacttcacctctctctcagtctctttttttctctactcttttctgtctctcccttctctctccctcctcttttctttatagctttttcgaataaggaaaaattttcaactcaaaaatttttattgaaaaaatgaaattttagcaaaaaatttttgaaaatttttcaattcttaggagtgtattttctgaaattttttcgagtcatttcttaagcgtgtattttccagattttaatgcattttcaatggaatttttcggaaaaacgccaaaaaaggcaccaaaacggcaaaatgccagaaaaagcatttaaggcacgaaaatcccgaaaaaggcaaaaaaaggcataataaaagtcaacgtagaagcctcaaaccaagtggaaaatgcgttttttatgcttaatatatcgaaactagtgcgtagaaaaaaaggcatatgcctcaaaatgcgagctctactgataattaaggattgtattaatttatttataaaaaaatgccaatgtttaaataaataaatatttaacgtaaaagcgatagaatgttttagaaaaaaaaaattaataaggcatagttcgtgagactaacggattataaatcccatccccaataatgaggctaattttcaaaatttggcatttatg

SEQ ID NO: 98171 - DNA, 166 bp, Heterodera glycines
  unsure (1)..(166): unsure at all n locations
atttttctcgacttaatcacccatccttccatcaatcactaattaatgtctnggaaggtntaaattaaattgagatatctatctttatatttttgtatggttttgttttctcctaggctttgcccagcgtccgttgcctgcgctgccggtgcgcaaactgagcatg

SEQ ID NO: 98172 - DNA, 203 bp, Heterodera glycines
tctggaaattgatttcagaattattttgcattttaagaattgacatttggctttcatccgttaccgcctttcttaattagtgttgccaaaaaaattttcgtgcccatcgccaccggcgcaattaataattaaaatgcccaaattaataattaataatttttctttgtaaaaaaaacaaaaattaaggcagcgagttgcgcatg

SEQ ID NO: 98173 - DNA, 58 bp, Heterodera glycines
gaattaacaaaaatattgtcgttttatttttaaaaataggctgacgcttcgtctgatg

SEQ ID NO: 98174 - DNA, 141 bp, Heterodera glycines
attaagtaaactaataaaatttaggcagaaattcggcgacagaaaatactcgagtgcgtgaaagctgaaccccgaatcaaaccgacacggcttttggcggaggtgaggcgttcaactgctgacgagacctatgtggcgatg

SEQ ID NO: 98175 - DNA, 329 bp, Heterodera glycines
tctaaacagcattgaattgagtgtatgcaacatttcaaaagtatattttatttttttttttatttcgtaactaaaatgatgacatttcggttttaattgccatgaaattttacaaattttactgcaaaaattgagaaaaaaaccaatagggcgacagtgattcttgagtagttatgccgaattttttgtcaaaaattattgccaatggttgtgggaattggcaaaaaaaataaaaaatgagattaaattgtcattattttatttcaagaaattattattggggaaaaaattggttactgtatttataaaaaataaaataaaacaaaatg

SEQ ID NO: 98176 - DNA, 1003 bp, Heterodera glycines
ttggttgcttatagggactgtctctctcattggataattttcttttgtctgttttccatttcctttgtttatgtgctttttgcgtatttttgtttctattcatcagctttttgctttttctcgctgcttggtatttccgtcttatgaataaaaatgtgttttattttattacactgcaattggggctgttttatggtcgggattttctcgcgaaaaaaggtattttttaggacaataaaattgttccgagtcagcgtaactttctcaagtcggtaatcctttggaattgctgtcccaccggaaattgaaattgcttataaactgagagcccttgtgaaactaaatgcgcttcttcaagttcgactttcctagtcggttcaggttctcatatccggaaaattctcggcttttcatgatttagttcctactctcgaaaattcatataatatgggggtgtcatgagtcttgacaactcgaaaaaacttgcatctgctgtttgtagaattatttctaaaacatcaaaacagtggcatattaaaaaaattttttagtttggtgaattttcgatatttatcaagacttgcccaaaataccgaagtaagcaaataagatatgatggagggactgaaatttcatgaaaaattgtctcctacaaattctctccaatatcgagccgagaacatagagaagcaaagaaaaagagatagtgttagtgagcaggacagacaacgaaaggaagaaaaaaagagagaaagagccatcagcgggaaagagaaagcgaactcacactgctgaacacagagaaagagagagagagagagagagagcaaaaggaaaaagagacaacgcagaagagaaagcccctcgggggaacaaaagcgaacggccatttcttctgctcttgggacacacaacctacagcgtcttcttcccatgccaatcagctaattagccactaattaaccccaaataacaaaactgtcccctgcttctcccgacaatg

SEQ ID NO: 98177 - DNA, 164 bp, Heterodera glycines
  unsure (1)..(164): unsure at all n locations
aggaataaacgcacacttaaaagagcgtgttttattttgacncaatatttncacnagaaataatcgttttccgtattcttcaaatcatttgggcacttgccatttagaccaagagattggcacttatntcatgatttctctgaagcaagatccttcccgnaatg

SEQ ID NO: 98178 - DNA, 686 bp, Heterodera glycines
acatgaaaaacatttcaagttaagttaaaataaatggaattatcgaaaagaaaaaaattaaataaaaattttcaaaatgtaaaaatgattggcatatattatgaagaacggcaaaattgttaaatgacagaataatggcaaaccaacaaaatgaagaatcatttaaggattaacaaaacaaaattttgaatttggtcgtctaaattagctgagcggcaagggattagtataagaagaaacttgcagaattcaaaaaatggaaggggattaacaaaatgcaaaagtacaattataagagaaaaaataaagatttcgaatgatttaataaaattatatttaaatatatttttatgttttcaaacttttacaaaaagcaacaaactattttaattctaaaactaacaaaaaaaatcaaaaaaggcaaaaaagtattaattaaaaaaaatttttaaatttggtcggcaaaattagctgagcggcaaggatcaattgccgtaggcaaaaaaggagcatccaatgaaaaggggaggagggactaattaaatataaatagtaccaaaaatgtgacaaattctcattttgcttttcagttaacacttatttgtttatcaattttgctttaatatttttttgaaattttttttctaatttaccaaacaaatttagcaaattttttcttcataatg

SEQ ID NO: 98179 - DNA, 941 bp, Heterodera glycines
tcaaatcgaaaaattattatgtaatttaaaaaatggatttgttatttttttaatagattagaaattttttatttataaaaataaaattaattgtccacaagattatatccgtggtgtcgatgaagataacgtatatagcaacattttatttgtttattttaaataatgaaaattttaacttgaattaaaaaaatttaaaaattttttatttaatgaaccataaactcatacatatatgataaagattgaatgtcaatcatattaattttaagagttcggtttaaatcatattattaattcagcaaacataatcgtcgatcaacaaaatatttatcaatttatgcgtaaatgatttgttaaaaaccatatattttctttctcctgtattatttaatattataacctaccattttaactcaaatttatttttgaattctttattttcttatggtagtattccataaattttctttgcagtaatgataagcataactttaattttgtaagaactgataataataaaatggtatgctaattaagcaattgtgattgtttgattaataaataagtatattttaaatgggtttgataggatacatgaatagtgaaaatttatttagctttatgtttgtgaaaatttaattgaaaaatatttttgtgaatgtttttacacataaatgtttttttttataaattgccatgagctatcaattagagtgccacgggaccgggaatttttgccaaaaaaaaattatttatttataaaataacctttaattcattgctttcttatttaagtaaatggaaaaaatggtattaaattgtaaaacaaaaagccaaagtagtatttgaaaaaaaaagtatttcaattttctattcttgaaataaaactattattttaaatttaaaacatatattacagcttcgaatccttctgcatg

SEQ ID NO: 98180 - DNA, 207 bp, Heterodera glycines
aattttttttaaagggcaaaaaaaatttcacaaaataaacagagggcggttgctggccttttaaaaagcaattttatttttggacatgtctcgatttaaataaaattgaaatttgctctaagcatatagagagttagttatttttgagaaattttcaaaattttttcattgtgtacttttcgatttgcataactcgcaagcaggatg

SEQ ID NO: 98181 - DNA, 382 bp, Heterodera glycines
ggtgtggaattgtggtcccgatggaaaaatagtaaaatttggcgtaaaacttatacacggatgttgtaaagtttaaaaagagctttcgaatgagcttttgaatttatggagaaggaattttttgaaatttataacacaaaatcccagaatgagaaggacaatgaaggaacaaaacaaatgaatccaaatttccaaatacaaccataaaattttttaagtgttgaacatgacgccaaatttttctaaaaataaaaaataaattttggtaaaaaaacgagtactgatataaatgatggataaaatcaatgattttgtaaaacctaagctcagatgcgtaatcagtagggagtgtaattatatggatataaaatcgcgaaatatg

SEQ ID NO: 98182 - DNA, 1003 bp, Heterodera glycines
  unsure (1)..(1003): unsure at all n locations
tacaaattttgaatatttaaagctaaaagatttataataaatttattgtaaattctaggcaataaaattcaaaaaatactcaaatttgataacagactttcaccaaaaaaaagcaaacttgcgatttttaaccatttcatgaatttcgttgacaaatattcataaaaaatatctataattttgaaaaatttacaaaaccaagttcgtaaaaaatttaagaaatagaaaaacgaaattcatttcttgaaaaaatttacaaattggaaaaaaaaattaanatagaatttcgtaaaggttcaactaatgcaattcaataacgtaaggattttgagttttttgcacaaaaattttgcttttttccattttttcgatttttgccaaaaattttacgaaatagacccgccaattccaaagtattggcgaattgactgcacaaaatttaaaaatataatccatttcactttaaaaaagccaaaaaaaaaatccctaatccgtatcaagaattgtacggatcaggatcgggattacggactaggcacccatacggattacggatttacggattaaaaatccgtaaaatccgtagtccgtaaaaaatccgtattggccgaaaaaaatacggattacggactacggatccgtaaaaatccgtatacggatcccgtccgtatccgatctctattaaaaacagtaattcacataaatgcgagtttttgaaattataataaaatataaaaataaattcaacaaaaatacaaaaagattttgtgaccgacatttgggaaattcaaacaataaatacgagcttttttcatgttttaacggaaaagtgacttttaaaaggaaacaaaaaacgacaaaattaaatggataaataggagaaaggaatgtttgctgatatttacggataatttccgcggaaaaaaaccaatttaagatttatctacactgattaatgatcaattactagttaatggtctttcatttccagattctcagtatg

SEQ ID NO: 98183 - DNA, 138 bp, Heterodera glycines
tatcgggcgaattgggaacgcctttctcattaactcagatttgtttggcatcaaaagtgaagtctgctaccgggtacaaaaaaaatatttaaagacaaatttacacaataaatcatttagattgcctgtaagcacatg

SEQ ID NO: 98184 - DNA, 216 bp, Heterodera glycines
aatatggtttttaagaaaatcgatcaagagtccgtgaattcgataacatcagctttgtccatttttaccttaccccctacaaatgtttctataagtagttcttgtgtacgtgaatatttaccgcttaatccgttaagcgatatccctttccactttaaaattcatccaagttcaaattttattgatttaaataaatgttatattctaaccgaaatg

SEQ ID NO: 98185 - DNA, 635 bp, Heterodera glycines
taggaatatgtttgcactgagataaaattactgtttatcttaagaaatgcaaaattattgcccagcagaaaacaaaagcgatgcagacaatgtgagtcaaaatctcaaagtctatacacaaatgtatgtgaattgttgttctcatctcagttctcgagagagagagagtgacgactaggaaaggcttaaggccaaaggcatttaaataaaacgccaaaatgttacataagttaaaattttcgttttttcattttttttttctaaaatttttatttgtttcaagacaatttatgcgttttaccattcaattacttcaaaaatcgcaacgttgttataaacttctttttacaaattacaccaaacaagttgcttctgtgtcgccgcttttaattcatagtcaaaatttgataagtttttcggccttccgcaatttttgctcttcaattgagacgaaaaaggaggaaatcggccgaatcaaatcgcaattggcaatcatttttacgtgtaaagtctgttccacgagacaggcatggcttttgctttatataagcaaaccctttcgattatccccaaatttaggggcctaagcaattctcgcgttcagcttatgaaaacggcgttgtgctgatccgatg

SEQ ID NO: 98186 - DNA, 471 bp, Heterodera glycines
ccatataagagcccataatatggtttgtgattaggaatataactacctctcaacaattttatattaattttcattaaagtaaatttatgatttaaactaattttaacaaaaatctttttaattgtaacacttttatcaaattgagggaggtccataattcatttttttgcatgaatttattttcattgaaaagtttgtgcagaagaaaccgacgttatcatttttttcttcaaaaatatttttttcttcactttatcaatgttttcgtttttatggggacattaaagttctgcacattttcaatagcacttttgtattaagtacatacttaaattgttgtgaataagatggaaaaaatcatcattaagaaactaaaatttttttatatttaaaaaaaattcaattttatttgttgaatttatttttgaagaaaattgtaccgcacttttcatttcaaattagcacataatg

SEQ ID NO: 98187 - DNA, 1003 bp, Heterodera glycines
ggatttttagtccgtaatccgtatgggtgtctagtccgtactcttggtccttatccgtattttctcaaaataccgatctctaattaatacattttttaaacaaaattatcaataaataaaaatagaccattcttggcataattgttaacagattaaacccaaattttcaaaaaatttttatttcgttgaaatttaaaattcaattttcatgactaaataaatcatgaaaacaatatatttcaaaatattgacaaaatatcgaaacaattaaatttcaaaattcgcttggccgagtccaaaaattcgtaaatcttattaaaaaaattggctcaaaatcgaaaatattcagcactttttgggcaaaatctgttaacagacccatgcaaattttcaaaaattttcccggcggcgcctatcggcaccgccggacccctttctcctgaaaagtctagaaaaagcgcgccgagaaaaaaagatggattgaaaaagaaaaaagtaatcagaaatttttgatcattttttgaataagattcacttttttcaaattgccggatccgaaaccggtttccggattgggaaaaattaaaattttcacatgttaatatttgtaaaaaccggcaaaatttcatttattaatatagaaattcgatgcaccagaaatgtcgccgccaaaaagacataatgttgccgacaaaataaaaaattttaaaattttcaagatattaaagcatacaaaaatatttatgataaaaaataaataaataaatataaacaaataaaactttattatggaaattataaaaaattttgactatatggcataaggtaaaaatttaaaaaccccgaaccccgaccccgaacgattttgttaaccccgaccccgaacttgctgaccccgacaaccccgaaccccgacttttctaaccccgacgttcgggggtgcaaccctaaattatttacaagtaaaaacttaaaatactatgtttagctacaaatacgaatg

SEQ ID NO: 98188 - DNA, 1003 bp, Heterodera glycines
tttttctttataaaatatttagattttatttttttttaatgttatttttgtatttatttaatattcaagttattttaaatttaattttaaaaaattattattttataaataaaaaaaaattattattttattttaataaatttaattaattaaaaaaacaaaaaaataaatctaaaaaaaaatgaagtatttaaactaaatattgaatagaaaacaaacatcagaaatgggactcgaaccctcagccatcacagaaccaaagtcaggcacactaaccacttgaccactgggtcgcttgtctgcatcctttttaattcccttttccttttccttcttttttggaagaaatcccgatcaaaggtgcttgaaatccctttttagagcatttcccggacccggacccaaacaaccctggtatcattcgaaagccaagagtttgtagatcatgcgaaattgtttcattttttgatttgaccacttttaaggcatgcaaaaagcgttcaaaaataggacaaccaaaaaaagtgcaaattttgactcgttttccgaacgcagttcgaacaattcttaaccaattgggatgccgatagtttttccttatagccagtccaaaaccctatcgaatgataccactcccgacccgtaacattcggtagaaagtcttaaattagtttttaagcttgaaactggggtatattattcttatatagggaataatgaatttgtggaccgaagtaaagaataagcttatgtttgtttctcatcattcggctcattttatcttttaaatttccaaattaattaaaatttaagtcggcgagtcggcccgcaaccgttttggccgcccttacatttcgggacggccgctgctgttgtgcgaccggcagaaaatcatcaaaatgtaccgggagggacgccgaaagattgcaatcgcacgcgaaattggcgtcacacattcatgcgtttccaaagtgatcagaaggtaagtgagtgatcggagatg

SEQ ID NO: 98189 - DNA, 330 bp, Heterodera glycines
acccccgacgacattcgaaaatttaacaaatcaaaattacccagaaattctgtaaattttccgaaattgggaacttttctaattggttttttaaatttttcttttattcatttatgttttaggaatgtgtgttctcctcattcttcgccatcaactattttatctcaatttggctttgcattaataggtaaacagaattgaaaaaagtgccgttgatggaaatggatttggcagagtctcaaaaatggctaaattttgggattgaaccaccagaaaagaggtcaaactgtggtaaaaccgaacagaaaatttagcaaagtgttcgcaatg

SEQ ID NO: 98190 - DNA, 182 bp, Heterodera glycines
tttgaattgggcttgcctttaccggcctatgcttcttcccccgtccaaattatgcattttaattggccttaattcagttgcctttgatcgctttgctcattttttggcaatgacactccttaattagtttatggaggaatgccactttcgaacattggccaaaaagcgaaccatttaaaatg

SEQ ID NO: 98191 - DNA, 80 bp, Heterodera glycines
tgtcaaaccaaaatcttaattagaggggcgccactttggcacgggtgccaatacattggggctgtcaagagtctcgaatg

SEQ ID NO: 98192 - DNA, 369 bp, Heterodera glycines
ttcgggggttatcgggccgctgattacaaatatgacatccatttcgaccaattccttactatcgttttcagcgcatatgaaaacctataaaagtggttttgggtgtttttgagtttgggagctcagataaacacctttgggtgggtcactgatcagtgatcactaatctgacgttcatcttgaacaatttctacccctgaatcgaattcgaacaaaaaccgaaagtccaaatttttgaatttcactttttatgttcgtatctgtacagaaggatcggcactatgacatttcgccaactggacatttcgccaactaagccaaattcggacgtttcgccaactacccataaatcggacattttgccaaatg

SEQ ID NO: 98193 - DNA, 1003 bp, Heterodera glycines
acatccctattaattattagccccggctcaaaaaattgatcccaaatcaatgcaaatgttgtaaaaaaacaaaacattgtttttcaccaaaataagagaaattgttgtgtacataagttgaataaattatatatatatatatatatatatatatatatattgtttaattttaaattaataaacagagaaataaatttgatttaaaaaaaacataattttttctccatttatttttcgtaataactaaatatgttaattcatatcttgctcacaaatcaacaatgttttgttgaaaaataatcatttgttttcccccaattattttgatcaatttgttgaccgtgggcaaagcgactaaaaatgagagaaatttggggggggggggtcataacgaaacattactttctcctgctgctgacctacataaattatcataaacaaattattggtttttgggtgtgtggcctattagccgattaattctttacgtttttttcgactcgaaaattcctttttcaaatttccttgagaaagttaaatttgcggcagaaaaaaaacaacttgcgaattggcacaattcggattatatgaattttattttatgcaagtccataatttggttttttatgaaacaaaattccaaaaaaaaataaaaataaataaaagcatcttaaatattttcattgccaaaaattgccattaataatcagattttgatttttaaaattgttttaatataaattttgcaatcttcaattaaattgttaaaaattaattttttattttaatttattcttttgaatttgttatttttaaatgtgagattgttttttattgctttgacaaaatatttttgcaaaaaccttttttctgtttcatttttgtgcatttcattacaaatttgttgtataaaattaaggaaaaaaactattttattataatgaaaagaatcggccaagaaagtgttaatggcgggcaaaagccaaggaaaagcaagaaaatg

SEQ ID NO: 98194 - DNA, 209 bp, Heterodera glycines
cgcgataaagccatatgttgtggagagaatgtggcattttccgcagaaaaggatcgataacatttccttgcattcatttatttattcttcatgatgggttggccaaatacaatttcaaaatatcggaggaatggaattttaaatgcaatttattttcagatattttttgtattatttattcttttcaattaaaaaacatcttcaaaatg

SEQ ID NO: 98195 - DNA, 798 bp, Heterodera glycines
aaaattctaaaatttagttgtcaatattattttcctccggtcgtgtgaactgcaatagagccacatcttttttgaaggggttaattcctttaaaaaattatgttattcacctctcagctttacaccatgacgacaaagaagaatttgatgcagtaaatgggaattttgtaagtgcaaatttgcgaaggattccggtgataagcaaagtcataatgtttccttaaacccaaaggttacaaaaaattaaattaattaatcattaattatggcggaattttatttacattgtattgcttaaaagcattatgaaagaagctcaaaaaacgcatttcatttgaacgtcaaaagctgcgtcaataaaaaaagaaaaaaaaacaattttttcggagtttttgaaaaaagaattttggcaattggcattattaatattcagaatgccaaatattttttgtgttttttcaaaaaatctgtggcaaaaaatatttagaaaacaagttttttgaagttttctggccataacttttttgaaacacaacgaaaaatttttgaaattttgtcttctaatagaggactattttggctataaaatgataccaagaatgtttaatctggatgattttataaaaagttatggtcgattaaaattgttaaattattttatggtcctgtgaactgcagtaaagccaaacgattcccattaagatttgcttgtttgaaaagataattcaagaaacaattatttattctggcatcaatcaattgtataatggcaaaagtgtgctaattgcagcaaaaatg

SEQ ID NO: 98196 - DNA, 1003 bp, Heterodera glycines
ttataaatttttcatttctcttgctgttgtcaaaattgctttatcccttctttgtagcatttgaaaattgttttctgatctgattgacgaaagcttcaaatgttttccaagtattttttgattattttatatccattaaaataaatattatttatatatatatatatatatatatatatattttttttttgctaaaaattgaccgatggcattttgccttttctccattataaatctttttcacttctcttgctgctgctgctgctgctgtcaaatgtgttggagatttattgctttatcccctccattaggctgctgatgaatagtggaaatggtgaacagttgtccgcccccccgtctcatctcccaaaaattctcctcccctcggggcaggggtcaaattttgtcagcagaataaattgttcgtattagctctgttgtaggtaggtccattttgatcagaaattgctttttttattgaaaataatattaataaaaataatttaatgctaaaatattttataaaaaatttaatttaattaatttgttcataaaaagattattttatcaattattttttattagaataattacatatgtttatataaaaataatttaattatttttctagcaattactcaaaaatttactctaaaatattataaaaatacttttattaataataataataataattattattattattattattatattttggaatgtttcatagacatttcttttaattcattttccatttgttgttattcacacttttttaaggaaattagaaacgatttgtcatcatcatcttatacatgtataaattgtcacctccttcttctcccgttttttgctgccaaaaacaaaaataaattattatttttattaaataataatttccattaatagagttagtcctcgaccccgaaatccccccgacttttcgtccccgtagaaccggggactaaactacattaaattttttgcagaaattatg

SEQ ID NO: 98197 - DNA, 1003 bp, Heterodera glycines
  unsure (1)..(1003): unsure at all n locations
tttatggataattaaaagaaaattggcgttcttatacagtcgggtcagaagtattgcttaaaatttttttattaattagtatttaaataatttaattcttaaaataggcaaaaaaatatttaaattacttaatagcattaaaataacctaaaaaatgtatagagcgtaaaagcggtcatggagtttttgggaaaattcgttaaaaagaaaattcaaaaaccgaaaaactctctagagtggcttgcatgaaaactttgaaaattttcaaaaatgaaaaaattattggatagagcttacggaactcaataaaattttggaataaaaaagaaatttattaagaatcatttctgagaatttgttttaccgactcaagttgactaccaagaaaagtaaaaaatttctgaaaatttttgcggaaaacaccaaaaactacattttagtaagtataaaaattatttttttaatatatataaaaattaattgagggtttgaatacaccctttttgagatgctctttcgaattacaagactgaaattgtaaagtttaggaacaaaatctcagcaagccattttcttgttcgagactttatcgacataatttcaccatatatctggcatttcttaatcggaaatcaatttcaccaaattattatattctcataaattttatttcgattaattcgtagtaattcataaaaaattttctaaaatgttaattagttttttgccagactctgattaacaatttgctgtgaaagttatctgttggtcgatcattagcagagggatggacaaatcatcacatttaacattgggaaaatagaaaatcgaagcaaatgggccaccaccattgatggtcgaaatgattaatcgtagttgggttgggaaatcacaaattcaataggtaatttggccgtacattttcattcattgggtggcttttcccnagagttntacgctcatctctttccccttttctattccgccntaaatcgtggctatg

SEQ ID NO: 98198 - DNA, 139 bp, Heterodera glycines
acaacaataacaccaaaacaccaattgttgttgttgttggagaagctaacggcccgtagggaaaaagcattctctgttgttcattatacttaaaaaaataagagaaaaaattttaaattttagcataaagaaaataatg

SEQ ID NO: 98199 - DNA, 54 bp, Heterodera glycines
tcctttatttacgctcaaaaacttcgttccttcccgccacagagtccgatgatg

SEQ ID NO: 98200 - DNA, 305 bp, Heterodera glycines
gcggcatcacctaggggtggatagcacccttacggagttcctaactattgggtacctcactcgcgaacagcggtgaaaagggtactcaaacagtgcctccgatgtcgaaggatgaatgcataccagtttgcattaccaaaaaagcctccactgccggaggaacgtgtctgccgacaaatggcttttaagtcaattggtattgactttttgagaccaatggagacacgattggcaggacataaagtcaaagcattgataattatactaacctgcctcacacgagagcggtttacttagaagccatg

SEQ ID NO: 98201 - DNA, 176 bp, Heterodera glycines
tttgagatgaaatcgtcgatggaatgtatgaaacttttggtggccaaagaaatggaaaaatggaaatatgccatccttttacaggcgcaaactccgctttttattcgttttttatttttacaatttaaaattggcttttgccattccctccccctcagaatgatgacgtacaaatg

SEQ ID NO: 98202 - DNA, 854 bp, Heterodera glycines
gcttaaatttcaaaaaaaaaaatttttttttttgaaaaaatttacggcattaattggactgggaaatcgttaatgggaccttttgctcgagcacaaatctcgagagtcgagactgaaagctgattgaagtgatctgagatcagctagtttccccaccccctcggagaaattcataaaaatgaattcttttctcaaaaagttgaattttgaaaattaaaaaaaagaaaaaacttctacttaagaaatttagaaaaagaaaaaactcaaatttattgtcggcggggggattagtgcacccgtagtgatcttgataagaaagccatcaaaccgagattcgagataaaaaaatgccatagaaaattttgcccgttttttgatttttggctatctttagttccctggttttatcccgaattggaaatggaattggaaaacgagattacaaaggcacaattaaacttcaccaaattttagtcccatccaaaaatacacatatatcttcttgtggagcaagttttgtgagattaccgtataatcaaaattacagtaagcatcgcatagaaatttagttttcttggtgctaatcttgctaaaatattataatgaactatgccaaataaaaatgccattgcattattaaagcattccaacccctctgtctcgtaacatcaagttctttttacaatatatgaatggcacgtatcgcccaattattatagtatacccaccccgttttgtgcgccgccgccactgccaccgcgtgccttcaccaagtgctgctccgtgttgaagtgtgccatcaatgcggtgtcggacgcaaagcgttgcccgtccgcgcaaatgtcgcaaaaatg

SEQ ID NO: 98203 - DNA, 712 bp, Heterodera glycines
ctgaacagtcaaataaatgctcttttgatatgcttttttgttgttattgaattttatttggcatcgttttattgactcaatttttgttttaattggacttgttttctcaaaatgttaaaaaaggtgtgacaaatattgtttttttaaataatctggaaaataaattcgttgtagatttgtttatttattgtttgctttgtctaatttaattaaaaaagcactctcagatgggcattgtcactttggtcctccgtttacccctccggcggtgtttccttttgattcttccgttggcctttttgtcctgcctttttctgttcttcgtcatttcccctatcagtatcagaattattcatcagaaaggtgatttccttttgcctttacaaatgtgtttggtattaaaatgccaataatcactaaaaatgccaattgttacggtgtttttcccgtccgtttctttcgctacgaccgtttgggtccgttcggcaatttcacaaacgtcgcattgcgacagcgcgtcggatgcgtcgacccttccaatggtacctttggcgtttgtctgtccatttgttgtttttgtttgaaggtgttccgatgagtgtccaatgggacaaagttccctatttctatcccatccaaataatccaatttgggctgggacaatacaatttggacagaaaaggtaagacggaaatgtggacaaaaggaaatg

SEQ ID NO: 98204 - DNA, 79 bp, Heterodera glycines
tattttggcatttctgtggcccgccatttatttgaccaatttggacagcgacgagaagctgcactttgcgcgcacaatg

SEQ ID NO: 98205 - DNA, 75 bp, Heterodera glycines
aagtcattcaggaatacatatggctcatatccacctttgccgtccaaagacgaagactcacccatagcgcaaatg

SEQ ID NO: 98206 - DNA, 322 bp, Heterodera glycines
aattaatacataaatttgtaaaatgtcatgatgaaaaaatgaataatagatgtatatacgttataataattaataatatttaaataaaataaaaataaatattattttttaattccattttatgattcggatcaaattcgcgcatcattccgagatcacgctcacattatgatggtgttatcattaaaatgattcttgaaaacggctttaatgtgttcatccacccaaattataagaaggaagttctttgcttgttcgatttagcacgaattaaggcatttaaaaatataattaatttattattaaattgttattttagatg

SEQ ID NO: 98207 - DNA, 311 bp, Heterodera glycines
tctgaaatggccaacacataaaacgaagagtgaatgaatgtgttgatcaccttggatggtgcgcggctgaacaatggccgccaaaggggacggctgaatgaaggaggaagtggccaattgggagaagggcgacggacggagcgcgccctcgcccagcagagaatggccaatgcgcgaggacgacgccgccatcgcatttggacggatcgaagccgcgagcggcggagggggaggcgacgacgcgtcccttctcttaagaggagcgacaataacaattgaccgttttgataaagctcatccacctcgtcatg

SEQ ID NO: 98208 - DNA, 257 bp, Heterodera glycines
ttataaaccattttaaattactatacctacgcagtgggcaaatagttaactaattcttgtgaattattttgccttttttgtgagcgatgccaacctttgggatttttgttgcagtacgggcaaattgtcggggcgtctggcagcgcttggcccatgtccaacagcgggctgcccgaggaatggatgcttcatgagacggagaacaatggcattggcaccgtttcgtcatcaccaatcaccactaacttgccatgatg

SEQ ID NO: 98209 - DNA, 104 bp, Heterodera glycines
aagtgctttgaaatgttcaattatttcgcgtactgtttactgtacaaatatttcatactttaattttcctcaatcttattttacgatttttattgaaaaaaatg

SEQ ID NO: 98210 - DNA, 625 bp, Heterodera glycines
atttccgcacctcgggactattttttatgttgattagaggtcataagagattgattgaaacatgttttttgcggttttttagcgggcccaattctgcactacacccgttcgcccatttcagttatttatgtcacctatgatatttgaatttactcgtaatttgatgccatttttcaattacatgaatttccagtggtaaacaagcaattataataagtgttgtgctgtgttgataatgatacttatgcccgcattccgctttcgaattcgcgcaaatgcgccataataatctgctgaattttcccctctcccaatccaaccaaagctgtgtaaattttttgtgagaaaacatttttaaaaatataaaaatatatatgtacttttgtaaaatgttataaatgagaaatgcataatgtgaatattagaataagataattttattttataccaaaattttattcataatatacttaaaaataattgagatgaatgaccggttttgcgaaataatttattttggtttatttatttttgaatatttttcaattggttgaaagaataactttttcaaattgttttatcgatgacacttactatttaatattttaaaattaaatttaaaatg

SEQ ID NO: 98211 - DNA, 144 bp, Heterodera glycines
agggaagggaaggaaaaacgaaagaaagagagggaagagaaaagccgaccattcgttgagcatttgtctgtgttcatcttccgcttcaggtcaccagccattgactctttgcgccaattcggtaaatatttcttggacaaaatg

SEQ ID NO: 98212 - DNA, 701 bp, Heterodera glycines
tttttatacaaaaaatttccctgaaattttttaattgacagttttttttgcacaaaaagcgattcgtgccgattaccattttttgtctttacgcctttataaatagagacggaatgaactctcattttcattctatctgtaatcattcaacaattgtatttctctgcaattattattataatgtgtttcggccggaagaagaaagggaagcgacagagttcgcctgagtacaccaaagtggtgagttgtttttttggttttctattccagtttacatgaccataaaataatttgacaattttaatgcattaaaactttttctaaaagcatccaaattaaatattcttggcatcatttgatagccccaagagtccttcctctattagtctacgaaggtttaaaaaaattcacccaaaattcaaaaacttatgccaaaaaatgttcaggaaagcaattttttaaattttctgatcataacttttttgaaacataacgaaattctttgaaattttgcaggctaatatagaactctttaactatcgaatgatacaaagaatatttattttgatgcttctagaaaaagttatgatccattaaagttgtcaaattattttatggtcgtgtaaactgcaatagcgtcgttttttgtcatttaatcattttgtttattttctttaactcctcttcccacctttaagatg

SEQ ID NO: 98213 - DNA, 153 bp, Heterodera glycines
gctgatcgaattaaataattttaatatcttttgatagccctaagtgttttctctcatttgtctatgaaatttcgataaatttgcatgagcttcaaaaaagtaacgaccaaaaagattccgaaataaagagttttgtgaagtgtttggctcatg

SEQ ID NO: 98214 - DNA, 171 bp, Heterodera glycines
caaaaactagactataaaagctttacgcggcggaggattttgtgttcactctacgcctgcggagcctgcgtaggggtctgtacgcggcggaggacttttgtcttcactctacgacagcggagaaacttgttcactctacgcggcggagaacttcactctacgaggcggatg

SEQ ID NO: 98215 - DNA, 71 bp, Heterodera glycines
ggttggaaatttttggaaaaaattaaaatttcaaaaatcccccccccccatttttaggtgccaatcgaatg

SEQ ID NO: 98216 - DNA, 211 bp, Heterodera glycines
ggtcgcgtcttttgtttttggaaagtgcagcacataaaccaagttttagtggttctactggacagcggatgaccattacacgggcgtgggcgagtggcgcgaattcactccgctgtcggttgcgcagctgaacaaagctgtcagggagaagaagacttctgttcgtctgacggttgcccagcgcgtttacttcatcgacctgaacgagatg

SEQ ID NO: 98217 - DNA, 406 bp, Heterodera glycines
aatatgaataaattcaaattcatttaaaaccttccaaaataccatggaattggtttttaatcaaataagggtttagtaatagactaattttcatcatcacaaaaaattttacaacttagaaaagtttttattattttttcgggctctctaaaacgaaaaatgttatcttttaaaaaattgatggcatttttccattaataacggattatccactggtgaattgtttatttggtggattgtctaaaattgattgtcatgtagaaccaaatcattatatccccttatcggtcgttaaacacagacctaaagtgcaataaaatcaaaaaaaattatttgtaattgttcaatttaattaattatcaattatattgtcctatttatttaatttttaacacagataataatg

SEQ ID NO: 98218 - DNA, 63 bp, Heterodera glycines
tagaaattctatccgtcatatcggcttttggaattttaatgagtaaatcagtaaccgtaaatg

SEQ ID NO: 98219 - DNA, 605 bp, Heterodera glycines
aactcgttttgcatagtccccaaatttaccaaaataaaattttaattttcccattacggtacttatttatttttgaactggttttttaacaattcaataaattttttttaacttttgggaaagtattaaaacccaatacgaattcactgatcggaaagtacagaaaattggcagagagtgcatgtgtggaaactgattgttaaatcgttaccaaaaaggataaaattgacaagtgaattgtggtcagagtgatcacgatcaagagaaaaacagtaaaaattgtgcggaaaagtgagtgtgcccgttggattgtgagtaatcacggcattatttggcaaacaaattggtgttagacagagagtgtaccgtcccgactgatcagagagtgatcagggtttatcatacaaaagaggccgagagggcgatacaatacataactttggcttaacatattactaaccaaaatcaaaatacatcacactcctgactacctcgaaaggcgtttcaagcataagccaataagcgaccttgagcgggaaagacgtaagcttgagagagaccgaaaaagaaaaagtggaaaaaacttaggagaaaaccgaaatatg

SEQ ID NO: 98220 - DNA, 684 bp, Heterodera glycines
taatttgttttttcggcactatctacaaaaatttttctcatctttaactagggccgtgactttttagtgacgaaaaatctcaaataattaacgaaaatagtgagtaaaatgccaaaatagtgataaacagtgggaaaaaagtgcgatataggaacgaatagtgacataatttttagccaaaaagtaagcaaaataatttttattcgcgcgttgcatttgaaaatgattagggctaggattgttaatagcgaaaaccaaaattggtacctaaaaataatttttaaattaaaaaaccttgccaagaaagtgcatttttgagaaaaatttccatctcaaaggaatttaaaaatttttgcgtcgattttttggggggggtgtctttttataaaattttaaatcgatttttagaggtgtatttttcattttttttcattttacgtaaaatcagcgtttcttaggcgtgccctttgaaatcacggggcatgttttgccgacgaaaattggacgataatcgccattgtgcggcgtgcggtcacacggcaaaaatcccattaaaaaatctttttcttcgcatcgaactggcggattgcttggatcctgaatgcacacaatacgcaaccgttttttcgactgctgctgaaaaatttttgcagttgaaggccgtcgcgattgatgagatagatg

SEQ ID NO: 98221 - DNA, 144 bp, Heterodera glycines
gcttgtgttggattttccagtgtcggaatttccggtgtcggattttccagtttcggattttcctagagccgacgttacgacccgcagcgaacaacaccacgcccgctcaaggtggtcatgccaacaaccacacaccaacacatg

SEQ ID NO: 98222 - DNA, 1003 bp, Heterodera glycines
agaaatgtcacttgggctcgtctaatcgtgggttttactttacccgtttacaaaatttggctgtccacagtcacttgatccggctcttctcttgctggaaatttgttttccctttttccgatttttccacacttgtcgacacctctttctttcttattcggcgtcgtttttccctttttccctcatctgttgtgctttcaacattaaaaaaagtaccgaatgatttttgtcccccctttaaaaaaattcaaaaatgttaatgtaaaaagtttgctgaggtttggggcgtcgctgatcacgaatccggcatctttctgccaatttcgaaccccgggcccaaaatcgaacaaaaagtcaaaacttcaaatttttgaaattcgcattttcgactaaaaatggtttgaatataacggaaatattctctatgctctgtttcataattactggattcgtgaatacgacttgaaaactagagcccggaattttgaaatggccgggaccgggacttggaaaatggaccgggacttggaaaatggaccgggacgggatcccggggccgggactcccgtttttctgggactcccggtcccggtcgtttgtccaaaataaccgggaccaggagtcccggcaaaatcccggcgggctcccggtcccgtccgacgcattcaatgggagggaaaaattgtaattggggcgtttcagtaactcatcaagaattagaagataaatatattatgtaccacaattttaaaatgcatatttttaaaattctcggtattaaggtttaaaagcacaattaaaattcaggaagtggactcattggcaaaacaaattctatgtagtttggcgttatgtttctgctcactgatcaactcttctgttttctttgtaaacaaatttgttttctttttgttgccttttcatttttgttttcatttctgtttttaatttacaaatattttcgtaaattttcccaatttttagtaaaacaaaaccaaaaatg

SEQ ID NO: 98223 - DNA, 628 bp, Heterodera glycines
gtttcttaaatgttgaatccccttttgacaaaatcatttatttaatttaatgatcaattttcacttatttattttgtacaacttttcttctctctcttcaccgatttcctctcccatcctaaccaatcgttacactttactgtaaacccaagccaagccaatttgtgtccatcccagctcactctcgactccaccccttttctcttttgctatttaaactgaattcattccttgcattattacccttttttttactcactttgactcattcccattttacttgcatttctcacttttgctaaataaactttcattaacaaacctaaagtcttacttttgattgggaaataagtcgggaacacaacatctttttggtgccacgacccgggagcaaaaaaaaaaaaagttcccttttcccaaatttctgagcaaggccgagtgccgaattgctgtcgagggttggtcgaagctgtgtgctcccaaccgaagagactaattgcggagggctagtcgaagctgtgtgctcctagctgatcaaacggataattatttgagttagtcgatctgtgtgatcctaaccgggctgtgtgccaatttcaaaaaaaaaaagtggaaaaacagtaaaatg

SEQ ID NO: 98224 - DNA, 380 bp, Heterodera glycines
aatatttggtaggtgttatgtggtgataccctccttcaccttagattttttgtaatttttttctgctgtattgtaaaaaaaaaaatgaaaatttgaaccttcattatcatcatcttaaatatcgaagaaaaaaaatagggagccgggtcacaaaagcaagagcaagtatgaaaattaaaaaaaaatttttttttgctttatctcgaaatagaaaaaaattacggggttgctgacctaataaattttcttaaaagatcaattaatgtattcatttggctaaattggccaaatgtgtacggctcggcctttacattttttaatagttttttttttaattagattcgtgttcgggcaatcaattcggtgggctgcagtgcatg

SEQ ID NO: 98225 - DNA, 53 bp, Heterodera glycines
ccccccccccccccacaaaaaaggtctgtgccctttatttgctgttcggcatg

SEQ ID NO: 98226 - DNA, 110 bp, Heterodera glycines
agaaattttctatgcaacaaacgctctcgaacatgaaacgaagtgcggtgcgccatggccattttatttttcaaataatttttatatttaatagatattccagaaaaatg

SEQ ID NO: 98227 - DNA, 166 bp, Heterodera glycines
aatgatattattataccgtatttattgcattatagccccccccccctgaattagagcccccctctgaaataaagccccccttttgaaggggggggggtgacaataaagccccctgaattaaagccccctccaaaaatgaaaataattccagtttttttacggcatg

SEQ ID NO: 98228 - DNA, 575 bp, Heterodera glycines
aatttctgttaatttttacattttttattgttaaaattattgttgaatttatttttaaactgtttattttacatttttatgctgaaatttaaaaagttgtttttactgtgatttcatttttctgtacttggggcccaaacgaccctggggcccaaaaacgagggcccaaacgcgggggcccaaacgcgggggcccaaaaactggggcccaaacgcccccgactcacatatgtaatatgtagaaaaatccgaaaatatgtaaataaaagtctcaacttttgttcgcaaacacaaaaaagaaagtgattttcctactaattaggttatggagaatctaggaaaaaaatgtatttacataaaattagcatccctataaatcaccaattatgataataaaatttattaaatgcattcccactgactcagcaccatccatcccatcgcatcacatttttctccactcggttttagaattggcggaatcactttattaaccaaaaataaaagaaaagtgaacaaaataaaacgaaaaagcattctttttaaatatttgtattttcaaaaacttccaaaatg

SEQ ID NO: 98229 - DNA, 97 bp, Heterodera glycines
ggtgcggaaatttggacattcagtagcagcatctgttttttcacatctgtttaaacaatccttttcacaattccttttatttttagattataaaatg

SEQ ID NO: 98230 - DNA, 261 bp, Heterodera glycines
agtcctcagccgtttgggggctgggaatgctcgcttttgcgttgaatcgacctcctcccatttccgtttgattctgaacgcgcggtcggtggtccacgactcgggaaacgttctctgcagagttcgcgaacagagcacggcccaacagttggaagaagcggctcgacgagtgactgagtctttgcggaaaacactcgcttctctgccggacaatggcattgtggacagagcggtgattttggcaccgaatttgccagcatg

SEQ ID NO: 98231 - DNA, 135 bp, Heterodera glycines
taaatctgtaattttaataaatatttttattattataatttaatttgtttgaggatccaatttttgctgtgtttgattctgttgcgcatggccttcaaacttttctaaacgttccttcaattgaacgaaataatg

SEQ ID NO: 98232 - DNA, 457 bp, Heterodera glycines
ttaaataagtgcaaatcaaaagggtcctccctttggtttttgataaatttcaaaatccaaagtgttaatgagttccttcttgattcgtcctttcttgttttcaattattaaatttcgtgaaatgcgtaaaatatggtaaaaaagcaaattctgtatcaaaataaaacaaaaaaattttagtccaaaaaaagtgaaaaaaatttttaactgggtttggtgctgcggtagcgccggattggaccatttccccccatttagccaagtggtgcatatgcacgcggcccctccggcgccaccgcagcaccaaacccagcgaatttttgtacaacagcagcagcagcaacaaatggtgcctacattgccaccccaaagtgcgcatgacccgtccctgcacccgccccctcttccgcacccgcacctttacatcggatcgcaacggtttaccgctgcgataatg

SEQ ID NO: 98233 - DNA, 125 bp, Heterodera glycines
aataaacttttgcttttattcctccgccttgtaaaaagtaaatcatcctttatttaaggcatgaattgtatcaatcatcatctatttaaggctagaatttatcaattaaaaatactttaagaatg

SEQ ID NO: 98234 - DNA, 673 bp, Heterodera glycines
ataggcgacaccatgaaaattttttgtgaatttaattagatatgacaaaaaatagtgtaaaatttcaacaaaaaaaagcttgccaatttcttggaaaatttattccaagtcaagaaaaaacccatggaaacatgtgttcataattttgaaatactaaaaaaaagaatttttttctagcaataaatatatacacatgaatatttttaaaatcttttaattcgtcagtgacgaagggacagcccaaaaagaatgcttcaacgggaaaagccgccaaaaaagtgaaaaaagcggatgtcaaaggagcggttgattgaccaaacaattcttttttgaatgtataattttttcccagtgctcccaagtgtgcagtttttcagatttatgttaaattttaaggatttgagtgtaaaagttgtacgggacctggacacggacaactgagtacctaggtcccggttttttcccggaagttgggagcactgttttttccatatttgcgatcagatagacaataattgtccactcaatgttagtaaatgaagtatgtatgtttaagttggtatgaatataaaacatgttttttcaaagacaaatttttctatattttgtcaatattttgtgcatttctcacactactaaaatgcgataagaaagatttatttgatcggcaatg

SEQ ID NO: 98235 - DNA, 72 bp, Heterodera glycines
ccttgagaaactaaataatgaggtgtactagtactagtataaagaaaaacccactccattgcagttggtatg

SEQ ID NO: 98236 - DNA, 130 bp, Heterodera glycines
ggtaaaaaatttactttacggaattttttgaaaatttaaattgcatttttttaaaattaaaattgtgtcaattaaggaaatatttttaattttcgaaatttttccatttttagcactcaatgacctcatg

SEQ ID NO: 98237 - DNA, 591 bp, Heterodera glycines
tgggccgagttccgaatgatgagacacaaatagcagaagaattaattgcgttggataaagcctggatttttagggtttcctattttttacggattgtactttggatgaaagaagcacgaaaatcaattttatccaaaaaatttttgaattttgttcgtcttaaattgttgccaatgggaggcgaaaacccattgacaaaaacggaaggcgcggaaacattttggcataaaatgacgacggattggaagaaaaagggaaccgcaacagaggagaatattttgcaaaatgatgactagggaacggatttttaagcgcgaaaaagtccaaactaaggccttaaataagggcgaaaaaaccaaaatttggccaagaaagaaaataaattacaaaaattttggtcaatgaaaaaataaatttatgtggaaaattttttgaaaatttgcaaaaatgtgatctcgtcaagaaaaattttcgaataaatgcgtcaaaacgaagaatttccgagcgaaaaatgtgtttttcgtgcatttctcgtcgagttaaagccgcagaaaaataagcaaaaacttaaaaatccgatccctaatgatg

SEQ ID NO: 98238 - DNA, 164 bp, Heterodera glycines
ggtacgaaaccgtaatcttttataaaaactttatgacaaagttaattttctgtaattcaataatgaggattttttacggctgaaatgaggattttcaaaattttgagatcgaagctctgggttaattctatctttttcatatttaattttttagtttcgacatg

SEQ ID NO: 98239 - DNA, 316 bp, Heterodera glycines
agagtttagccagctgaatttttttgctcatttgtcagctggaactgctgctattcccatatgtaaacttccggcgcttgacaaacccttgggggaatttaatttattcttccattaaaaaaaatgggaaaattcttttatggaatttccgtaggaattttccgtgcccagcctaaaaattcgcgatttaagaaatattttcgttttgcactaaattttttgaaatttttgtttctcgccaaagacctaaaaacgcctaaaaaataattttttaaaaataaaaattcttattggagattaaagatggaggagaatg

SEQ ID NO: 98240 - DNA, 63 bp, Heterodera glycines
acacaattagcaatgtgaaaaaatgccaaaaaaaaaaatttgcggcgcctcacatcatggatg

SEQ ID NO: 98241 - DNA, 186 bp, Heterodera glycines
tttattccaatttcaaattgcaactttctttcatttccttttctttctttttgggttaacggtttttccaatttgttttctctcatcggctttttatcaatttttcaaagtcatttagcttttccgtttctccaaggttttatcttttatcagtgccatttgataacataattcgcgcacattatg

SEQ ID NO: 98242 - DNA, 64 bp, Heterodera glycines
tttctttcgattgctttttctcattcccgagtgcatttttcaggcaattcgtgttcaaccaatg

SEQ ID NO: 98243 - DNA, 776 bp, Heterodera glycines
tctgaaaaaatatttatgaattgattttgctaaaaaaataaaatagtgaagctttaaaaattaataaaaaattttaaattcagaattactggagttagcatcatagcagtgcttttccttgtctttttgatgctctcgcaaaatctggttcgcttctgaccagtttataaaaaaaaagttaagcctaaaatttttcccatatttaaaaagcaattaaaaatttttagattttttattcatctccctttttgatagtgaaagcatcagagagccttatttaacttttaattaacatttggtgcgtttcagagcacgttctaaaaaatatttatgaattaattttgcaaaataataaataattaatgaaaaagtcagaatttcgaaaaattttaaaaacaacaagcgttggcattttttcaggttaagttagtcctttacaatggagaaggcctgcaaaatttggagagattatatcgattttagtgcgctaggttcgatgaaactttttaaaatataagcctaaactttttggcctgtttaaaaaggaattaaaaatttttaaaatatttattcatctcccttttgatagaaaaagcatcagagagccttaattaacttttaaataacgttttgtgcgtttcagagcactttctgaaaaaatacttatgaattaattttgcaaaaaataaataagtaatgaaaaagtcagaattttgaaaaattttaaaaacaacaagcgttggcattttttcaggttaagttagtcctttacaatg

SEQ ID NO: 98244 - DNA, 63 bp, Heterodera glycines
ggtaattacgccgtcgtttcgtgtccttttacactttttcagattgacggagctaaaaagatg

SEQ ID NO: 98245 - DNA, 1003 bp, Heterodera glycines
agtcagcgcatgactattttagcaccaaaaaaagccaaagatcattttgattcatttaaatattattttattttatattttaacaatacattatttttatttatttaaaaactatatatttaaaaataatattttttatttaattaataaactttacaaaaaaattaattaaatatttttccatattctcaaaaacaaacatttgcattcaaatgccgagaaaaaatggtgtttgcgtgccactaaagcttcacataattttttaaattctttttttatcaaaaaaaaggattaaaatttaaaaatgaataaattaaattgtgtttaccgcttctttccccccacataatctcaattttattgattcaattgatatatgtacttaggtaggtgtagtttcttcttcaaattacgcgttcatcagggctacatgacatttcgcctactcgacatttcgcctactaagccaaaaacattcatttcgcctactaacccaaaatcggtcatttcgcctactgtcatttcgcctactattcatttcgcctactgacatttcgcctactttcatttcgcctaccaagccaaaaacattcatttcgcctactaattagtaggcaaaatgaatgtttttggcttagtaggcgaaatgaatgttttttgcttagtaggcgaaatgaatgtctttggcttagtaggcgaaatgaatgtttttgggttagtaggcgaaatgtcagtaggcaagatgtcggtaggcgagatgtcgagtaggcgaaatgtccgtacacccatattttctctgttttcattcctttttttggtttccgtttttagtctgctctgaaggtcctccaaacaaaaacgtccgggggagaaattgagcaaagtgcgacggcgggagctcactgtacaaacaatacgtgcaaaaaagtagaatcaaattagataattaaaaaaattctaattgtttttccatttcatgtgttcaccggtcccgagagcgatg

SEQ ID NO: 98246 - DNA, 98 bp, Heterodera glycines
ttcccccccccccccccctagatacgcccttgacttttccatatttaactgattgcattcgagtttttagcgagaaattgcgccatttcaatgaaatg

SEQ ID NO: 98247 - DNA, 398 bp, Heterodera glycines
cctggaagaaaaagaagagattaattaaaaccgtaattggtcactctgttttaaaccatatttggtaaattcaatacaagcaaatgaatgtgttcaaaatcaaaggcgcccgaattttcaaagaattttcaaaaaaaatggaaaatattttcagcgactttaaaaaaattttctggcaggtttttttctaaaatttttaaaaatagagaaaattttttcatttttattgaaatttttaattttctggcatttcccactttcagcctgctgattgaatgactgactgaccagcagggtggacatgccgccgtggatgaccggcacgaacatgtgctgcaagcattgaccatccgctcctcccgggtgcccaacgaggtgagaaatgcgagcgcaacatg

SEQ ID NO: 98248 - DNA, 70 bp, Heterodera glycines
ttagcaaagtgagggagaaagggtaattaaagggagggaaagagccaaagggcgaaaagagcgaaaaatg

SEQ ID NO: 98249 - DNA, 1003 bp, Heterodera glycines
attaattttgaaaatattttgtaaaaaatattttagaattaaagaaataataaattttcggtttatagcggtcataaaatcctacgtaatattttgatttatttgtaaaatgaaaaataaatatttttctggaaaaataattaaacatttaagaggaaaaaaattgtccaaatttttcgtcttgatgcaatttattgccagttttaacggttggttccaaaaaaaaatttgaaaatttgagccacatttgttgagagattttgttcaactatcaaaaaacggagtaatttagagctcgacaatgcgtaatacataaattccggaattcagtacaaaagcccttgaattcgggtccaaccgattgcgagaggggggggggcagcggcgagcagacattcttttttgcttttcataaccctttttgcgggatgagctttttgaaacaattttataaatttttgtttaaaaacttaagttttgtagtttgtaagtatcaaattcttagatttattgtaaatgttgaccgatttccaatttcttaacagattttgcaccagaatgggttcgtccttcgatgcacccttaataatttgaagcaccccactttctcattgttccctatttcgccatttctttttccttcaaattgcaattgtttaaattatttaattttaattttatttaattttttgattttttgtcaattttttgcgatttttgggtttattttctttcatttttcattaaaaaaaattcaaaagaatttgcctttttgtcgcaaaataaaacccaaaattttatgtttcctaatgaataaccaaacaatccaacgaaaaagcgacaattagtcataatttgaatgagcaatgatacaacaaaatgacatttaaaaaaagagtttggaatggaaaaacggagaatttacggagcccaagaaagcatcgttattaaaaaacataaaaattaaattgtcgaaaatatttttgataaaattcagagaatg

SEQ ID NO: 98250 - DNA, 521 bp, Heterodera glycines
acttttgccatgccaaaattggtcccaataaatggaaaaggaaaataaaattaaataaaattcaaaatctggtcaaattctatcgcaaattttaattcatgcgcaatagaaaagacaaattgctctgcatatcaatggagtttgtgtcactttctttttcaactcctatttcgccattcatagtttcgttattttgtgccttctccatccacagcaaaatgtcaatttaaattatcgtagcaattaattaggcaattagttaattaattaattaattgcccatttcatccctcgccatttatttatacaaacgcagcatttcattcggcgaattttctttcgcctactctttttaggcgatcacaaatcacaaaatagttcagacttaaaacacacaactaactgtaccatttttggatcactcacgcggttaattagtggcataaattgtgacaatattttcgtatttaagcgattgtttctgtcatcattttgtcaccaatttctcaacaaaaaaaatg

SEQ ID NO: 98251 - DNA, 90 bp, Heterodera glycines
aattgctttgtctgcttcatgaattctcatattttattaattatgtatttgtattttttaattaaatttccatagtcggccttgttcatg

SEQ ID NO: 98252 - DNA, 265 bp, Heterodera glycines
ttatttttataatagaaaaatatatttgatatttgccattaatttctacacctaaaaaaaggaccccaatttaaaatatttttacagaaataaaattaaaaatctttcattttattaatttttgttaatttatttgtatttaaacggcctaaatttcattaattagcttatatttatcccagtatttggtatcatatgtaggcatcatatacaggaatcatatcatatgtagtcatttgaattgaaacagcccaaaactgatatg

SEQ ID NO: 98253 - DNA, 170 bp, Heterodera glycines
ccatttaagtaaaaaaaaacttaaaatagcaataaacacataaaaaatgcaaataaaaaatcatatacgctataaaaaaattctttagtgctgtatggaaaaggaatgattacaatgaactccaagcaattaggacaaaattcgtgaaattgttcggcttcccaagaatg

SEQ ID NO: 98254 - DNA, 784 bp, Heterodera glycines
atcaggggcgtagctagacccttggcttcgggggggggcttaagtcaaaaattaggatttaggggtgtatttttcttttttccgtcgatttttaagactgtattttttgtttttttgtgaaatcccgaattagtgggtgtattttacaaaatttttcgacgtatttcgccaaaaattactatttttcccattttgatctccatttttcaaaaaaatatatggtaaaatgggggtccggcggtgccgataggcgacgccgggaaattttttgagtattttaatgtaattttgttaagaaaattgcttaaaatctcaaaaaaattcgctaaaaaagtgtaacatataaaaattgttaatttgcccctatttcaatcaaattaaacatttcatggtatcattaaataatgctagatgttttctataagaatattaagttacaaaattttttaaaatggtaaaaaaaagttatgattataaaattctaataagtctccttaagttagaattttttgtctataatttgcttgaaactcaatgaaatttctaaagttaaataaagaattcttagagctagtttaattttcgttttgaatgtgaaactctttgtataatccaggcttcccattcgtccttcaaatgtaaaaaaattttttttcttgatggaaaatttctatgttaggaaattttttttaaaacaatttcggcggcgggattttgtcccgtcccatgccctatgggacatacggtaatatattgtataaacatttttccaggacgtttcatg

SEQ ID NO: 98255 - DNA, 250 bp, Heterodera glycines
aacaaaatttattaaaaagattttttttttaaatatacaaaaaaaaattttaaaccagctttttcaaaaatatgcaaaaaaaaaattaattcgccaaagatgctttttggcgcctcattatcccaaatcacttttaatgacccataattttttaagtaaactttaaattttacagtcatgtaaaaattaattgtttataatccacagattgtttatttaatataaatttttaaaatttaaaggtaatatg

SEQ ID NO: 98256 - DNA, 66 bp, Heterodera glycines
agagtcatttatgacgggtcacatattttgacaaatacacattcgtttttgcattacaattaaatg

SEQ ID NO: 98257 - DNA, 675 bp, Heterodera glycines
attttatctttttaatttttcaaagggaattccctgttctccgaggtcccggtaacgccaaatatggactataaaagctcgaaatatggataaaaagtttaaaaatgaacaaatatggactaataattgcaatctatcaaatgtattatttcgtgagaggactgcaatttttttttgtcttttaatttttagaaattttaatattattataaacgatttaataaaggaataaatttttaaatgagtactatttaacaaaatttttaattttttgttttaaaaattaattaaaaatgctatataaaatttaggtttattgaaacatttaaaactctgtctgaattgttgagagtttttttttacattttcaattaaattctttcttcaaacacttatttaaatagattctacttatttcttttgccttgctctaacaattttatttatttcattgaaaatcacacttgtaaaaaggatcggattagtaaaatgctaattcgttttctcatttttatgtgaattattctttggaactcttgtcgcattaatttaaattaaatttatttcataacattttaataaattttttaattaatttaagagtccatttcttttatattttttcaattattctataaaagtattgtttttaattcagttaaaattttcataatg

SEQ ID NO: 98258 - DNA, 205 bp, Heterodera glycines
agtgatcgaccaacgttgatcaacttgtattgtgttccgtttttcattgcattttcgtgtcacttcgtcccccacccctccgtcagattgcatttggttcccaagacggcgtcgtgtcctttgttgacattcgtcaggtcaatcggcagttacccgtcgccttcaaagtctctcaacatccgatcagtcgggtaaaatcagaatg

SEQ ID NO: 98259 - DNA, 1003 bp, Heterodera glycines
cgaaaaaaacttaaacagaatttttaaaaattcaagaaactggctatttttcaatctttatgaagattacttgtttttgaaaaaaatttcttgaaacttcttattaataaaactaagatttttttttgaaaaataagtttcaaattttttgaatttttctggtgacaagctgtgagcggaacataatgactgcacccaaaaaagcactggtaagaattcgagacagctaaatattaaggaggtatgttgttgttcgaatgcaaaattttcagaatttctgacaccggtttttctgtttccggtcaatctggtcctggttttaacaaaaatcaaccgaacggtttcgtttaacacttaaatacaataacaaataaatgaataaatcggctagtctaacttcgtcactcacaaaaacccggtcttcgctatgaattccctcattagtaaatggccatttttatttgccttaaattttgataattggttaacaaatatattcccattaaccaatttccaatcgatttcttaatttgccttaaacaattataatttttcttatcattctgaacactactgtgaacattcgtttgattttatgttctgtttatttgtttgaaatttgtttggaataaatttatcattttttgctttttgggactctctttcatttttaattcttatggccatataattacattataattatcgggtctttcagctcccagtacctgttcaaaaaagtaaaagatcgctatcggattttcaattcgacggcaccggtactaaagaatcactggtaagaaaactgtagtccgtgcggaaaattattgaaaaaattgtggaaaatagaaaaaaaaacaatatttaatgtgcctgctgcggattgtgagccacaaatgtccgaaaatgccctagccttggccgtaacggattttaaatatgcaattgcaattttttgtttctcctaatgtcaaataaaagcaatttgctgcttccggccatg

SEQ ID NO: 98260 - DNA, 130 bp, Heterodera glycines
ggtggcttcactttactaaataaatgacaaaaatgttttttaggacccccacggcgaattgcgaggcaaaaacattttgcacagagtcgacgaatatgaaatgtcgaaaattgcctccgaaaacaaaatg

SEQ ID NO: 98261 - DNA, 251 bp, Heterodera glycines
tgctggggcccaaccgttccggcccaactgagcgagtccgatattttcctctcgacatttaaataacgaatccaaaagcatttttggacaaaaaagaaataatattttgacgcaattccatgcgtttttaccctttgaccgaattcgtgcattgtttcttcccctctcttcccacccacctcctcgacaacactgcacaacaaactaatttaaatagaactaaataattatttgttttatatttaaaaatg

SEQ ID NO: 98262 - DNA, 520 bp, Heterodera glycines
tttttttcattttttcaaatccgttgccacggcaaatgcgcaaagaaatgccgcagcaggggaggagaaggtttaagaaatttgatgaatttgtgatggctttaagtgtcatcacaacgccaagcaaatgcagagaaaaaacaattggggcaaaatttgaaattggcacattcaaaaaattatggtggcattgatgccaccgttgaaaattgagtccatcatgagggcaaattgtaataaattttttaggtaggactaggcttaggcttgcccggacttaggtttaggcttagcctaggctttatttttgtaaaatttcaggtgatttttgtacgagttgccactgacccgcgaaaattttctctccccttttttagcattttaattgcttttggtatatgacgaataaaatttgctaatttgttaatttcaaaaatattccttcttggatttattattgtatgtacaataagtgagaaaaaggcgtcaacaaaaggacacaaaaaaagaataaaaaatg

SEQ ID NO: 98263 - DNA, 443 bp, Heterodera glycines
ggggggggatataatcgaagaatacggtaaccgaaaactcagattttataagaaaaacaaaaagaaaaatttgacacaatctataaataaaataataattgaaaagattttcaaaagaatttcattttaaattaatttgttaaataaattccataattaaaaatactaaccaaataatttttagcattttgagtttttccattttttagggtccacatatttatgttatatttaatattttatcaatacaaattgcataatttggtaattagttaacttccaaaaaaagatttattaaataattaaaaattttgtgattccatttaaattcccttaattcggcattcttccccttttcgtctttactatatcggataaaaattgcttcattttaattaattgccacaattaataaattaacttttaaatcattgccccaaatg

SEQ ID NO: 98264 - DNA, 912 bp, Heterodera glycines
actaaacaattcacaaacattaaaataacaacaaaacgccaagtaaatttaaaactaaaataaatattcaatataacacatttgcacttatttcgacttgtttgaactttgtaccagttcctattaaaacttgaaaatttttctaaatataaaaatgaatatgaattcgtgaacttttaaaaaaggttaaaaaacatcattttgaaattatttaattgaaatgattctgattaaaaaatgatagattatgaattcagagaattttcaaaaatttttgtaaaaaaaatttaaagcaatttggttatattttctcagacctattgctagcctattaaaaaattaaactagaagatttatttaagttttatgataacaattttttaataataatttgtttaaaaaattccaaacttagctttaattttgcttttttattattattatattttattattttaaaatttatatattcctatattttatctatttttattcttatttcatcaaaatcatatatatattcatcttttacagtcgataaatttatttttatattatgggaaaaatttttcagcggttaaatttattaatattaaatttacaatagagacaatgatttaatgctgacaatgacgcattagttaattgattgagattttttattttggcagttgaaaaatttttttatatattattttatatataatttttatattattttataaattttgtatcataaagcctagcgatttattcgtttagttgttgaagctttacgccataccaactatacataggagaagcttaaagcataggattttggaaaaacaagaaattagaaatgccggaaatggcttaatgatggcctaggaattatatttttaaatataaacacattaaaattggtttatg

SEQ ID NO: 98265 - DNA, 71 bp, Heterodera glycines
aaattgagcaaaacattacggtggctgtgcgaagccgcgaaaatgagggatttgtgagggcattggcaatg

SEQ ID NO: 98266 - DNA, 162 bp, Heterodera glycines
gatttgtcaaataaattcaagacttcaaattaataatcaaaaattctcttaaaatttttttgaacccaattcaaaaaaggaaaaaaatttgcagtcaaaaaattattcgaatttctccaattttgttttcataatttccgaaagttattcggtatcataatg

SEQ ID NO: 98267 - DNA, 217 bp, Heterodera glycines
atattgcaattattgccgacgtgttggacatgttgccaacgcctgccgtattcgacttcgggattaccaggacgaacaacgaggatcctatggcaatactcgcttacaaccacagagacgcactcctgcaaccggagcaaacgcaattcaacatgacagatcaatcgaactgcttaacgaaattgcgtcgggtctgcgaaatctgtcacttgacatg

SEQ ID NO: 98268 - DNA, 1003 bp, Heterodera glycines
ggcgccgggagagaaggttttttttgtttaaaataaattattaataaaaaacaaccacaaataaatataaaaaccacgcttttttttcttcttttttttttcttctccccccaccccacaaaaaaaagagaaaattaaatttgggtggggagagggggggttttttttgttttttttttgttgtggaaaagagaaaaaaaaacaccccccccccccacacaaaaaaaaaaaaaaaaaaaaaaaaaaaaataaaaattttttttttttttttttttttttttttattttttatattttttttttttggggggggcggggggggagaaaaaaataaattttttttttatttttaaaaaacccgcgcgcgcgcgggggaaaaaaaaaaaaaaaaaaaaaaaatattttttttttttttttttttttttttttttttctttttttttttttgggggggggcggggggaaaaaaaaaggggttttaaaataaaaaaaaatttttttttttttttttggaaaaaaaaaaatttttttttcctttccccaaaaaaaaaaaaaaaaaatattttttttttttttttgggaaggaaaaaaaaaatggggggggggtgaaaaaaatttggggcccttttaccaacctcgcccaaaaaaaagtgtggggtttttttacccccccccccgggaaaagcaaaacccttttttggggggaaaaaaaaacaaaggggggaaaaaaaggccgcgggtgttttttttccccccggggtatttttcgggggaaaaaaaaggggggatttgggaaaggtttaccctttttcttttgggggcggtgggggcccaaatttggggggaaaattttttttgggggtctctgggggtgggggcttttttcaattttttttttttgcatcttggaattcattttaattatttaaaaaaaattaataatggcacaagcgtttctccaaatttggcgcttttgtctttcaattagcatttcatttatatg

SEQ ID NO: 98269 - DNA, 858 bp, Heterodera glycines
ctgcctaaaggagggatcaccagcccggcgggctgtccaagtctaccctccctccgacggcaactacccggtggtcgtgcaacttttaaaagagcgattcggcgacacggacgatttacagcgggcaattcgggcccggcttcttcatttggcaccggcaaaggacaatgtgaacagcttgacgacgatgatcgacgaatttgagcgatgcgtttgccaactcgagcagctcggagcgaacgtggacgacgactcatttgggccattgctggaagccaagttgccagtgcgagtgctcacggaattgcggatcagagaaagcatgatgggatcgaaatggtcagtgcgcgagttcaggagagcggtggcagcgcaagtgcggtgcatgcgatcagctgagtcagcattagcagcaatgaaagacccggaagtacgcactgatcaccgaaccgagcgtgatcagacgggacgaggaggcaaagcaggtcgggagccatttcaaagggcatttatggtacgggacagccaacaaacccgtgcgcagcccaacggaacacgaaaagaagagcagtacgggacgaatgcccgtttcaccgggcgaacagtggcacgcggcaacgagaacggacacacgggtgggaatggaccccgcttcgcgcaaaatgggctccctccaagcttcgggagggggaattgttcgttttgtctggagagcggacatcggccgagtgaatgccgcgcctatccgacgccacaggcacggaggaagcgactaattgaacaaaagcgatgcctgcgttgcctgggctctgatcacacattcgaccagtgccaacgaacggtccgatgtgacgcatg

SEQ ID NO: 98270 - DNA, 626 bp, Heterodera glycines
gaagaatcttttcatttttggaaaacttatgaccaatttagaatgttctgaagacttttaaggtcacaatttttaatgttttatcagaaccataaaaatgaatacacaaaagtctgtgctctaacctttggttttctgcaaatcttggcccatggctgaggaagttaattagcttcttaaatagtgaaggtggcttgtttattaattatgactcatattgtgaaattttaatatattttatttgggactttcttctcttcttcctcccctttttctgcttttttatgattctgttcatttttaggtacggaaaaaaatatggaaaagagttgggaatcattgacacttcggtgaagagagtaccgcgttcattcttttattataccggcaagagcccttttattctttgacttgctgtgttttgtttttcatattgaatttcctttttcactattttcacgacgctattcatattaatttggtatttattaattcatcgtattattattttataaattcatccactgcgatactttcttttccttattaaaaatgttttaccaattaaatatttttacctgaaaagtattttctactaattgtaagtttcgacagataaataaatg

SEQ ID NO: 98271 - DNA, 82 bp, Heterodera glycines
atgggtgcgctgtgtacgatgctctggaccccatcaaagtggagacccttgttttattcagcctctcaaagatgaacctatg

SEQ ID NO: 98272 - DNA, 51 bp, Heterodera glycines
aagttgctgtccaattccgtggataattttattccaatagcgccaaaaatg

SEQ ID NO: 98273 - DNA, 82 bp, Heterodera glycines
ttactattaaagaaaaattcctgttttttcatttttattattttgtaattctcccgtaccgttttcagttcccactaagatg

SEQ ID NO: 98274 - DNA, 547 bp, Heterodera glycines
tttgttaaggccgagcacaatacggtgggtgggtgggtgtacatgttggacatgcttttgtagcgcaaattgttggctttttataatagtacagacatatgaattttttatattttagtcaatgctgatcaaaaaaatacacatgaaattttaattgctttttgacactgatcactttggtcaaaagtcaagcttcgataaaacagatttgatttaatcaaagtgttatttcgaattcactgttttttttgtttcggacacttctaataacttagtcatttcgatcagatttggctatcctaattctaccccctgaccagttcatttgattatttatatagactttccgatcagttgtccgggttccaatcacttattcaattctatcagaccattaaggggttttgctcgcttttacccatgattacatgtgctggcctagtcagtctaattaggccagttaggcactttgatctgatcatttttttacccaattatccctaagcctattaagcctttgttaatttttagcaatcctgacacgatg

SEQ ID NO: 98275 - DNA, 151 bp, Heterodera glycines
actgttggtataaaaaaggctagcttttagtatttcttaataaaaattgaaattatattcaaaatcataaaaaggtaaatgaatagacaaatttttaaggtttattttggttctgcaacagtacagctgttgcgtgaagttgctggaaatg

SEQ ID NO: 98276 - DNA, 185 bp, Heterodera glycines
actgtttccgatggcgatgccgatagaggctaacttcttaagtagtagttagtaaattgagttttcaaaaaacccatcttttccctttcatctttacttctctcccattttcattattgttatttctttagagacacgaccctcacaaattgatcgaaggttgtcttatcgcgggcgttgcaatg

SEQ ID NO: 98277 - DNA, 126 bp, Heterodera glycines
tctgaaaattaattttcatttaaaattaaaaaataatttttattttttataatttgtgaaataattttcaattttccataaaattttgcaaaatttcaccctcacatccaattgtggttccggatg

SEQ ID NO: 98278 - DNA, 98 bp, Heterodera glycines
gcttaaatttagaataataatcatttcttgtttttatttaaatactttgatttaattgaatttaatttaccaagataataaagaggctctggaagatg

SEQ ID NO: 98279 - DNA, 799 bp, Heterodera glycines
agtcagtgcacggacggacggacagcccctaattaagaaaatgggggattagtaaaatcaaatttagccttatgaccggatagacgccgattcaacaacaaaatctaaagtttaaattttttgaaaattagcacggaaatgctaaaagtaaaaaaagggtcttcaatgttttttttgcccattttgcaaaaattttggtcgaccccttaaaattggtttatttttgactcaaatcactttttttgatcggtgtcacagctctatttttttattgcatattattaatttattcaataatgtaaatagaacagaattgcttttatgcgagcgaatttatgtgtttttttaaactcgagcctggcccggtggtgcctgaaattgaccaggcttactaggcttaggaaagtctggggtttgaaatagagtagcttcggctcaccacatatataatttttataaaactttaattatgtagattgtgaatatttttaaatgatctttaatagtaatttaaaattaaaatacttttttatttttaatttttaaaataataatttggctttaatttgatcacttgcacttttcgtagttcgtctcatagcactggaaaaagcctagtttcggtcgaccgcttttgaaagtccccagacttaatgaaaacaattatttaattttaaggctcgccaaagagttatgtttatggagaatacgatgagatggtaaataatcataattaattttaataaaaaaatttttatttccggtggctctccgccgcggaacattggcgcgaaaaatg

SEQ ID NO: 98280 - DNA, 1003 bp, Heterodera glycines
tggaaaatttattgacgttaatgaggaaaatatgtagagttatggtgtttcgttgtgattactccgcttttatatggaacaaaatgatgaaaaaaaatttgctaattattgccatatatttattttttaaatttaatttgctctcattaaagcataaaccgtttttctgtgtataaaaagtcgatgtggaaccgttttttaacgcttatttgggtgcgcgaaatgacatttgtccgatcagttactcgctccgatttccaaacaaaaaaaaaactttcttaaaaaaacaactcatttgtgcgttcatgaatgatgctaatgatgatgaatgtgatttggaaagcaaaagttatgtcattacaagacaattaagtaattgcaattcataatttatagaaatattacataggcagcattagaaaataaaaaaagaagaaattatcagtcattatatgcctattgttttgtttaatgaaattaaaatatttacatattaattggacaagatccgactatgttaaaaaaattgatttttttaaattttttcttagtttatttttacaatagttcctaactttgctttattttaattacattttcttttccacttgattttgagacattattttctgttggatgtagaaaaaaaaatttctttgcaaaaaatatagtacggaaatttatgttaaaattaaataaaaaatattttttctgattttaatttcttcttttatttgtgctgcattgatttagcatttatttatgtatttttatattttattagatcaaatctcctatagcatcgacggttggtgttttcatcggttctgtcagcaaatgcattataataaaatgctaatatgtaataatgaataaattattatttttatctctttctgttgactgttcccaatttatcaactgtcatttcattcattatatgaaaagcaatttcaataaaaaaatataaaaatattttatttatttactttattatcaaatg

SEQ ID NO: 98281 - DNA, 59 bp, Heterodera glycines
ggtgaccgaagccgaaaattaacatttttaatgccttttaggttgccgattttgggatg

SEQ ID NO: 98282 - DNA, 304 bp, Heterodera glycines
attgtcttaattttatagaattgaggaaaatgcctttcggcacctttcactgaacactttttgctttcgtttttttgactccgatcccaactcattaaagtgatttgaatgattaatgaattgtttttacagtgttaaaaaaataaccgcacagaatcagagtacgtacgtaattttctagggttttttatttcaattttcaccgcaaatttgcgggtcaaatgaaaacgtcggattttgccttttttggcgaaaggtcgtcggcacacgcattaataattagaattaattaactttaaaaatg

SEQ ID NO: 98283 - DNA, 1003 bp, Heterodera glycines
ttttatcattttttttaaatgaaaatccgtacaaattgttgagcctattaatcccgaaaaccagccttttttattttagtctgagtggtgaaatggcaaaaaaatttttgcttataaaaggaaatttgggtcgtttgactttggcaccatcgacagaacctgatgaagatgatgaagaattgatgaaatttgattttggaaataatcgaggattaaacttcaaatatatttttacaaaatatttgcttgctttaaaatttaagagctttatttttggtttgactttttgaaataaaagaagcaactttataaatttggatttgtattcacaaaaattctcaaaattggtcccggtcccggtcccgaaaaaaaatcgaggtcccggcaagtcccggtcccggttttgcccaaaattcccggtcccgctcaactctattaaaaatcaacagctggcgagtagaattgtaataaatgcttgactcgtatttgtgcgaattcctctggcgcaaaaatgtcaaaaacccgtggcaataattttggcgcgtagctttagaattgtacgcgccctctgttgatttaaaaaaaattcaaactttggccccaaaaacggaaaagtacagagctttttgcttgagctcctctgacttgacttttgccaagctttgtttttctggttcccattacctaaaatttgaaaacttctaattgtttctcaaaaaatttaagtccttatcaaaattgtttttcttaaaaattttcaaaaagaggaaaaaaatgccaacacgaaagaattttgtttttttcccataaattggcgtattgagtcacaaaaaaaaaataaaaataaaacgcaattaacttttttgtaactcgctttaatttttgttacccaattacccactttataattgcatttttattcgttaatcagttttttttttaatttttcaaggtcacttccggcgctggtgggccaaattcgccggtgctcaatttggacatg

SEQ ID NO: 98284 - DNA, 491 bp, Heterodera glycines
tttgcgccgccccccccccaattttgattatttaaagcataattttctcaatcaattttaatgtttaaagttaatgtagcattcggaattaaaacttccattccaattacattttaaataaaattcaacattaggtaattatcaacaaattttactaaaactataaattaaacgcaaatgacaactaattaaaaaaacacaacaataaatcactaattacaaaggtaaacacttaattttttgtctttggtcaacgcatacagtaagagcaatgacaagttttttttcttcttcactgccgagagtagcaagaaataaaattatttttttaatgaactcaatttcaatttttccggcttttaaacacaattttgaatggtctgatcaattcggaataggttattaactagtgaattttatattaaacttaattagataaattttcggaaaatcccacttaaaattattatgtcagattcataaaggcaatg

SEQ ID NO: 98285 - DNA, 296 bp, Heterodera glycines
  unsure (1)..(296): unsure at all n locations
aaagtccttaaaatgtggccgtacttaccgtatttcctcgattataagcnccttctcaattagaagacccctcgaatataagcctcctcttgaggggggttgaacaataaaagcccagggacttataatcttataatcgaggaaatactaaaagcaaaaaatgcgaattaccaatttctacagttcccaatatattcgaaaatgggaataaatttttaacttaaataccaaagttaaaacgcaagaaaaattgttgatagttttggctcgtcagctgagtcccattataggaaatg

SEQ ID NO: 98286 - DNA, 1003 bp, Heterodera glycines
atggtacacaattggcacaccaaaagttttaaatttaaaatattagtccgaattttgcagaaaatcttacttttttcatgataaggcctaccagtatgcaaaattttagttttcaatttttaaaattaaaaattcaaattctattcatcatctattcccttatggactcccttatgttttctgttttaccatttttgcattagcgccaaaattattgtgcaaaaatataattattttattatatgtataagacaccaaaaaacattttttggaggtaacaaaattaattaaataatcaattgaagcaattttttttttttgcaaaatttgcaaaagtaagcttttttgtttgagtaaattcatctcatacatatgtaaataaacgaatctgatattttatgcatcatttgaaacaaagaattttacatctttacattgagattttatggtgatgatagctcaaaaaaattctaatcaaattcttattttattattagaaaattatgcttagtttaaaattgaaataattaagcctaattaaaagcagaaatcatacttatattatattcaatcaaatttctttaattccgattatttttttatcattattgctttgaccaattttcagctctgattatttgaacttagaatgaaaaaattctttgtaatttggctcattttccaatgcgatttttttggcgaagtgttcggcaacgcttgtaaatcaaaagaggaagaaccaattcaacctattcgcctgctgaggatgagaagtggcgtatccgagaagcttgtatcgggtaaaaaattaaaataatttttttttgttgttatttaaaacgcaccaatttgaattggtttaaaaattaaatttcataaaatgtttaaaacattccagcaatacactcaaaaacgcttttaagataccattggatttattaaagaaaaccaacaaaagcattcaacaccaaaaaaaccagttacaataacaaagcccaaaatg

SEQ ID NO: 98287 - DNA, 995 bp, Heterodera glycines
atttttgatcgctaatgagtgaagagatgcgaaactgttcaactcttaattagtttttaattaatttattcttttttaagtattttcttttcaccctgtcaaagctcggttttgtaatccattccagtggggacgattgctgattgcacagcacccatttttttattattcattatggagattttttcttttattcattcatcattttgtagaaatattttgcctaatcgttgggaaagatttaatcacaacaaaccatcttttattcatttacatacctatttgagagaagaaaataatttttcgtttttttattttacattggattttcacctttcagttttcttaaactttttgcattcatatttttgattcaacattttcgaaatgaatctgccgatttacattgcacaatctgtgttttaaaaaaatttctgtatttaatccacattttgtttttttttattacattcttggattcttttaggaattgatcaattttaagactttcatcaatgggtgcatcacaatcttgtgctaatgcccaaaatacaaaccaggtttatgaattgattgtctatatttttgaattccataattcgctatttttggaaaacatattaagaattaaattttatgaagaaaattaccaaaaaaaattatctagtgttttttttcaaagaaattaatgaaaatattttgaattcctcattaactttttcacagaaaaaacaattttagggggatggtacaaatgtctccgaagaaagccgtctggaaatgagtaagactgcaatttttttaaagtagctaatttaaaaatatttagttaagagaataagttggcatttgcggtgccgacaaaaaatttttgttaaaagcataacagatataaataaatgttcttttatcatcctcaagcaatttgtactcttttcaacaacaattaattaggttcaaatttagtcaaatttgtggtggagaacgcgcaaatg

SEQ ID NO: 98288 - DNA, 63 bp, Heterodera glycines
ggcaagtgccatcgaatgcgtacctttacgctctcaacggcacttatgcgtacgttagcgatg

SEQ ID NO: 98289 - DNA, 984 bp, Heterodera glycines
gaagcgtcaaaaattatggcattttcttttgttttgtgtttttgtttgctttgttccttccgttggagtgagtcaccgcccccataaataagcaagcgttgttctgctggacagagtcgggctgcttctgctgctttccactatggccccaatgtttatgctaataccccaccgccttagtgcttcatttttcccactgacttctttgcccattcttctttcgggtggctttacccttcccgtccctactccgtccccccgggggcaattccatcgattttcaagctgtccactgtccactcccaacttcgccacccccagcctgcttcattgtcctccaatgctttttgaggctttagccgtccctcgagataaaatggcatcgatttggtggtgtccacccctaatttgccatgcttctcccctcccccaacaatgcttcatctccccaaatgtttataccatgaaatccctatcgattttcgtggtgtccaggccatcccccaattagtgccaccacaatgccctcacttttattgcttcggcgccagtctttgccaccacttcccgtccattgctctcatggtcacttcctccgaatttcagtagaatttatgggtcaattacaaatttgtcgcttattttgttaatgcgaatttaatttgccaaaattaagcatttaaaaattaagttattattttataaatttaaattgacgcactaaaaattctttttaattcgcttccttttattgtttttgtttaaatattttaaaattcatcaatcccattaattaaatattttaataatttagattaaaataaattttattattttaatttaacatagattaaaaattaacttttactagttttaattgcaaatttatttcctcatttttcatttgattcaatttttaaaattaaattaaattaaattatttagctttattagtctttcttcatcacattttctctcaatatg

SEQ ID NO: 98290 - DNA, 255 bp, Heterodera glycines
  unsure (1)..(255): unsure at all n locations
atttttcaataatnagggctgccaattttatgtaacccttattattcgaaattttaatgatatgaaaaaatggtaatgcaattaaaaatacgaatattttgaaattaatttgataattaattttgttctcagtttcacggcgattttcacaacatcagcgcctttgttttgaacagaactcagggcattttctgtgccgcgcaattgcgctctttggacgtgcctttggtggcggaaattcccgagcaaagaatg

SEQ ID NO: 98291 - DNA, 107 bp, Heterodera glycines
atgagtcgagaaaaatctgctcgatttcaacacaccgtggcaactatgaagttaaaagacttccttttggcgtgaaatcagcgccagccatcttccaatcggtaatg

SEQ ID NO: 98292 - DNA, 64 bp, Heterodera glycines
ttcaggtcatgaactcttccgggagtcggcccttccgttggagcatcagcagcatctcctgatg

SEQ ID NO: 98293 - DNA, 542 bp, Heterodera glycines
tttgtatatttttttttgcgatttgcgcctaataatttaccaatttttgtctcaattctgcttctgttttcccaaacatattttccaattgccttcaatttctctttaattgcatcaaactttgtgataatttgtcttttattttaaatttttataatatgaaaattttgaattcattttatttactcagccattttctgccttttaaatattttattaaaatccagcataaatgacattcataaatttgtttgattagttgtattggtaattctcaattatatttcactctcattaatttcatcatttgatttaaaattaaaaaaaatcaattttattcaataaaaatcttattgtgataattaaatgcattatttttaattttttttatttatcttaatttaaagaaataatttagcaatgaatttacttcaaattttcttatttattgttatgataaacgcacttggttgttcaaatggtattaaatttaaaataaaaaaagtaaattattaatttttctttctagcccagcttaaatg

SEQ ID NO: 98294 - DNA, 226 bp, Heterodera glycines
gaaaaagcttatggaggagttcatggaaagactcattcccgagctccaattttgaggtaaaggcgggaagaccaaacagtttattcgggtgcctacgaactcgcacaacattttgaactgcttttggcatcccggagaacaaatcaaatttctgtagccgactctgttgcagaattatcctcaaaagttgaggcattgagccttgggcaatatcaaagagaaaatg

SEQ ID NO: 98295 - DNA, 470 bp, Heterodera glycines
atattaaaaatgaattcccaatttacaaaacattactaataaatttattgtttcatatataaatttatttcgactatcattttgtgcattttacttatcgttcgttccctaatgaataaacaaatgacgacaaaataataaaaaatctgtgtgaaaaactcagcaataaataaataaattattaattagattttttggtttaataataattgggttatatttcttcatgcaatttagcgaacatcgtttcattgaactcgttttgttaagagtaatggtcaaagtaaatgtacaattaaaaaacggagaaggattcgcattttggttgaaattgcgaatgattgatcaccagaaatggtgctttaattttggctataaatattcgttttgcattttcaaaattcaatttttattttctaaaagatttcttttattttacataattttgtttcttctttcagataaaaatg

SEQ ID NO: 98296 - DNA, 948 bp, Heterodera glycines
tttgctctttttttgcaccgcatgatatctcattagaatttttataattcagttcaaaaaataaaaattggtatgggataaaaactgttaacaaaactggcaaaaatttcctattttccccggcagcgctattggcaacgtcggtgcctttaaaaaatattcatcaggcgaatttaaattatgaagagaaaaaaacttccgacttaaacggtgactattcacagttttttttaaatgaaagttgaattgatcaataagcaattgaataaaaaaccaaaaagaatgttaggaaatgcttcaaaaattgtgatttggtttttaagttaaagaaatttttgaaaaaattaccgattcacgcgttttaaaatatgaaaaatgccaaccttgaaaatcgaaataatgatgcatattgtaatttaaaaataaatttattttaaattaattaattttctttttcttttaattttttacagcttatttgttagtgccgaaggctttcccaaattttttttttaaatttcgaaatcggtactggattgtacctcttctatacacatacatatttggagaaacttcttcatttttattttacaaatattattttagatttgcatagccgcatttgataatatgtataaaaaaattgtaaaatcaaacatttaattgatttcattggctaatgctacgtgttttattctgcaaatcccctgctgctggagttaattcattttgtaaaaagtcagtttcattttaattttttctttttttgctaatttatatatttaaaattccaacaaaaaacagatggaaaacaaaatttttgcaaaatgtgtcttcatttccgtgttctttattcagtgcttttgtgctggtgacgttaaaaaatggccgtgtctattaaagttcggcgggagttcgtcacctcagcgttttacattgcgcgaaatg

SEQ ID NO: 98297 - DNA, 879 bp, Heterodera glycines
  unsure (1)..(879): unsure at all n locations
taagatttctaatcatatactaaattactaagctgctattaanggattctcaatattgccaaatntaaaatcccgctctatacgtattggaccanagtttataagacatatattcgtcctcttttagaatatgcgcctgaaatttggaatccgacatacaaaaaagataataaattagaaagatgccaaaaatattttacaaaaattgcattatttaaatgcagacttccttacataccttacaaacaaagacttgatttattcaaactttagaagaaaggagaaaaacaattgatttagttcaggcattcaaaattattaatggtctcactcatcttaaaaaagacatattcccacaattttctggtcacatcccttataatcttagacgtaaagttgtgttaaaatcacaatccagtaaaacttcaaattcttttatcaacagaacggccttaatatggtctaaactcaacaaagatataacagatgctccatctgttgacagtttcaaaaaacgtataaataaatggattgagttaaacaaaaatttagtctgtaaaagaactccttggacttgatattaatttactaaaatctaacgtgtaagtggtcaccccttcgttggatattttatttcttctgaataaaagagatttttaggctctaaaaaccgccaaaatagacactaaaaaatggaaaaaagggcactaaaaaaactcaaattttggggtgtaaaatgacaaaagtgttcaaaaagtaaaaaaaaaataggaatttatctttgaaaagtgataattcgattattaaaaattagaaactttttttttgattaatttaaatattgatactgttaattagagatcgacattttgaaaaatg

SEQ ID NO: 98298 - DNA, 784 bp, Heterodera glycines
tacgaatcctacaaaaaatatagtacttttaaaaatatttttgccacaacttttccgttacatggcaacaaaatgccaaacattaggtgccactgggcccatttaaataattcccttggggcacatttttccattttgccacctccgatgcctaaaaatgccaagcgaggcggcaccatttgcaatcgccaaaacggcaaaaatacgacaaaatgaagaaagtgttttatttaaattttatatttttaaaataataaaataaaattgagaaattaaaatttaaaattaagtttgtttttaaatatttcatatatatgaagattttctaaattcattcattgtttgttcttttggtgagcaattattcatatttaaattttttcattttaaattaattttcgaattctttaaatttatttttttcgcttttttatatttaaaatccaaatcgttgaaatttgttcctctttttggaagaaagattcactattcctgatattatgcataaaacaattaaagcatttttaaatgcaaaaacattatttttttaaaatatttttaatataagttttattaaaataattaatgttaaattaatattcattagtggattcttctttctaacaaaattcccaatttaattaaaggcaaccaaaagcattctacatcagcatcactactgaatcattcagcatcaacaaccgaattgatttccaataaaacaaattcaacattagggggtaaaaaaaatgtttaaaaaaaatcgtaaaaatattttgagatg

SEQ ID NO: 98299 - DNA, 1003 bp, Heterodera glycines
ccagtattacttagaacccaatttattagcccgccaggcaatatgttgtcaaaaaacactcggagacacaataattaaaaggggaaaaaaagagataaaatccttacaatatacgtaatttataaaaattttgtcaatttttaacgctttcgcggttttcggcggtgccaataggcccgccggtcggtgaaaggattaaaatttagttataatttgtaaaaaaactttttgcaaaaagtttcgagtatttggtaaaaagtgtcatttcgtcattgctaaatattctgggcgcaaatgtgaaaggcgcaaaaatggaggcgctaatgtgccatttcattaattataatatcaaatttttgagtttctcccaatgttttcgaaaagatgttagttgaaactgtaataatttaataagatccctttttatcaaaatttaaaagtccgtaaaactgaaaataaccctaaaaagaatttaaaaggaaaaaaattaaaccaaatatttgatgaataagtttttttttgtcattgtgttgtccattcaaaagagaactcaagcaattaagaatgaaaaattatattcgctaaaatatttttcataatatttaaattttaatttataaatttttgcttttttgaaagataagcttttgtttttcgataatacttattgcttcacatttcgtaaagttagttattccattgacgttattaaaagaagcaaatgcattttatcacaaacccaaaaaataataactcaatgaattgatcaatatattcaaaaatggcaattttttaatatttctaaatatttccatatttattatattcataaaaaaatttatacataaaattttacaattttttcctttcctttctccatttttgctctacactttggatattttacgattagaaacataaatattgtaaattattaaaaaactttattttattttaattaaataaaaattttggttttcttttctttcagttacagaaaatg

SEQ ID NO: 98300 - DNA, 233 bp, Heterodera glycines
agggtttgttcgttaatgagcattcattcactgttttaattatgcaattaaattcaagaagaaatttggcaacattttcgtttctgttgttttgctgggagaagaaaagcaatttttgacggatttatcattcaacggccaggcaaagaatgatttaaatatttgcttattaaattaaataaatttttatttatttttcgctttttgccaatgtttttttgccaaaatcaatg

SEQ ID NO: 98301 - DNA, 874 bp, Heterodera glycines
tccttgaaaattgttcaaaaaattttcaaaaattaattttttttaaaaaacttaaagaaaattttcaacgaaaaattctaagagaaaattagaatttttgaagaaatatttctaaataaaaaatgtaaaaaaaattcataactttactcaactgcaaccaatattttatggtatcattcaatagctttaattattttctatcaaaatattaatacttaaattttttacaaagtatataaaaaagtttgtattaaaatttaaaaatttttagtttttgaaattctagtgtttaatagattatacaaaaggttttaaactccaaaaagaaattaaatttcaagtcattaaaatgcaattcaacgattttttttagaaaagttcataattttttatttattaatttacgaataaaaattaattttcccatgtttttataatattccaaaaatttttaaaaatatttttcaagttttcaaaatttttcaagaattttcttgaaattaggggggagggcagttttaagaaacgtgcatggcttttagttttatggctggcagtttttaagaaacgcactagcaccataaaaaccacattgagaagtgcccggcgaaaatctcctttggctcccgtccgtacatcttccaaaaaaataatgaatattgtgcatttattgtccgtacatggtggcccccttttttggtgcaaatggaccgttatattttgtgttcctgttttaaaattttttaatccaaatttgcttacaaaaaatcgccgaccaaaaaacaagtttggaaaaattatcatcacgttaattagaaattctattttttatttatttacttatcacataaataaatttcatcagatatgcatg

SEQ ID NO: 98302 - DNA, 73 bp, Heterodera glycines
agtaaggaattagaaattaaataattatttattatttaattttaagaaacacaaagaagaaaccgagggtatg

SEQ ID NO: 98303 - DNA, 230 bp, Heterodera glycines
  unsure (1)..(230): unsure at all n locations
agaagaattgggtgacacanncgaatcgggcatcaatttcgaccaaccttgttccccgggtccaatttggacaaagtcgaaaattcaattttttggattctgcatttttggttttgtcaatacttcaataaaatgtaattttaaaagatttaaggaaaactgtaaacaattatatttgattattttaccataccaatcaattcacatttaggctgaggtctgtcagtatg

SEQ ID NO: 98304 - DNA, 59 bp, Heterodera glycines
tttttcctgatttaaattttcattttttcacacaggtcaaaatatcagacttcggcatg

SEQ ID NO: 98305 - DNA, 112 bp, Heterodera glycines
  unsure (1)..(112): unsure at all n locations
cttctacnttgaacgcaaaaaatttgacaaagaaataacagccgagttgcagcgcgcttcctgtgaaattacacgtttttgggctcttcaacgggcaccaattcaacagatg

SEQ ID NO: 98306 - DNA, 222 bp, Heterodera glycines
ttggaaagcactctttggacggggaaagggtaaataaaaaatccaagtgaaaaagtgccctttcgcgggaggccttccctttccccattcgtttttgttagctgtctcgtgatccaaatttaatttcattttgtcgtgttatagtgcataaattcatgctttggatttcaaatagctgtctgccaaaaagttttcttttttcatataattttttcgaaaatg

SEQ ID NO: 98307 - DNA, 165 bp, Heterodera glycines
ccaaaatgaatgaggggggggggggcggcatttgccgaattgaccgctgtcacagtcactttttacgatcacatttctgctgctaatgttgcctttctgctcccatttaaaagccgtgtcgccctccgtttgcccattttccgtgccattctctctctcccgatg

SEQ ID NO: 98308 - DNA, 190 bp, Heterodera glycines
ttgttttggatcattatgaatgatgaagagagagagagagtgagggacaaagagatggagagaatggagaaagagcaaggaacaaagacagagagatggagagagaacgagggacagacagaaagatggagagagagtaggagaatcgagaaaaagagagcgagggaaaaatatataaagcaagagaatg

SEQ ID NO: 98309 - DNA, 672 bp, Heterodera glycines
  unsure (1)..(672): unsure at all n locations
tataaattttgctcaaagaacgtgtccaaagattcgccgcgcattttaattcaattaaaatctgcaaagaacaaatattatgctcaaacgtgtccaaagatacgcnccgcatttaattcaattaaaatgtggaaaaacaaaataataaaggagtggcaaatttgaaaagcacatttacgctatcgtggcaaaacgtacagcgaaaattcaaatctagatacattcataggcatcagccaataaatgtatcccttttacccggtatataatagagaccaaagtgtgtataatttaattgctgatacaatttaatttacatacatttataggcatcagccaaaaaattaatgcgcttgtttagaaagggattatagaaagggattatttaaatcaataacctatttattctgcattttttttacatcaatcaattcttaaacggcaaaaatttaataaaatcctatataataaagttgagtgtctgtatgtatgtttctgccattgtttgaatttgtgtggcattatgttttgtttttgcattaaaatgcattaaaaattatttaattaatttgaattacgcttattatgtttatatacataacaccaattatttctccttattcttttatattttatctcgtaatttttttacattttagttaaataaaaatg

SEQ ID NO: 98310 - DNA, 260 bp, Heterodera glycines
tttgtgcccttttttacattttatgccttttgtgcgtgatcggacattggggcgaagtcattaaaaatctgaccaaaaataatacgttaaacaataaattttataaaacaattttaattcaaaagtaagaatataataaaaaaaatatatattggtttaatgatttttaccaaattattattcatttccaatgataaaacctaagcttttttgacagccattttcataatatatacaaaaattttacaaaataagaaatg

SEQ ID NO: 98311 - DNA, 324 bp, Heterodera glycines
ctttattaccataggtttttgtcattaacaataatggaaaaaaaatttttttcttttccgattcataaaaatttaggatttataaatggctttttactcgcccctttttttttcttaaactttccctttttctctgctcatccggtccattattttgggccacaaaaaaatgccaacggaacaaacgccaaacggacgggcgatgttcccaaacgcgccgaatgctcgaaacattcacaatgatttacggtattttaccgtcaaaacggaaagtaatcggccgaacaaagctcagaattgacagcgcaccaagtgaccaaaatg

SEQ ID NO: 98312 - DNA, 584 bp, Heterodera glycines
tagcactttgaagaacggagagaaaatgacggctgacagctttttgccgacgaacggagagaaaatgacagctggcagctttttgccgacgaacggagagaaaatgacggctggcagctttttgccggcaaatggagagaaaatgacggctggcagctttttgccggcaaatggagagataaatgacggctttttgactacgaaaagagagaaaaataaagctaactttgcctgtttttgaatggagaaaaatgtgttttcttgagctggtagttggatttagtgcaattaaatgtttaaaggtttttaatgaaaaattgattggacgcataaaaattttattggacgcataaaaaatgatgggacgcataaaaaattgattggacgcataagagtcgattggacgcataaaagtcgattggacgcataaaagtcgattggacgcataaactgtacttgagccaaaatattcattaactttgctttgatcgaaaactcagaacaaaaacagtgaaattttatcgattgatttttactcgttcggtcaatgtgttgagtgagtgagtgcatttgtttacgtaatg

SEQ ID NO: 98313 - DNA, 159 bp, Heterodera glycines
ccccccccccctagatcgccttgcacctggaagggaggggggggggggggggtgtggagtcacgcagaattttacaagacaaaaaaacagttggtcctcacgcgccccgccccttttttagtcgaattttttatttttgttttactccatttacagatg

SEQ ID NO: 98314 - DNA, 284 bp, Heterodera glycines
ttcctgtaaaaggacctgccccttcgaaggattgtagtctgacaaagactttacctgtggggattgtggttgtttaatatctgcattcttgaatgggatgtgtgaacctggctgatggattcagcaggacgactacacattgcggcgaagaattatgtcgattgatctttattatgcatattttatatgaataaatatttgtattgtgtgcatttaacggttcattcgcctcatattttttgccacttttcatatctttcttattttttttttgtttcagaatg

SEQ ID NO: 98315 - DNA, 1003 bp, Heterodera glycines
  unsure (1)..(1003): unsure at all n locations
ttataaattttgtctatataatgaaattttgtatttttttttcgtctgggagccaaagttcaaatggtgggtgctatggagaccaattatggttaattgataaaaagctttgaaaggtaattcacacaaaacctatagcattaatttcaataaataattttttttgacctaactaattttaatattatattttcatgattccaatcctttgttattaaaaaaaattttataaaccaaaaatcaatttttatctaataaataataagaaaaattttcccaaatttttctgttaatgtttggtctatttttgtattaatttctaaatttttgtcggtttgccgtaattatttttgggaaactgaaaaatttgtggtagttcatttttatcctgcgaaaggattgattgccactgttcaaataaatggatatgaaaagaattgttgcgtaaatgacatgagaccgcgactctcgagcagcaataataataaaattgaccggacatttggacagtggacattgggaccgaaccggacaattggacattacgacagtgaatgacttttttttttatcctttctctctatattccttatccttttctctttctcatccatctctctccgctctccatatcactttcttctttctctctctctatctatcccttctctctgtccctctttcgttttctctctctttcctattttcttattctctatcattttgtctttttctctctcttcatccctttcatcttttttcccttttctctctaactcgctccctcttctctttatttctctattaggaagggatttataaaaactggtctgaattttgttttcattgctanagatattttagtaaataatttgtcatcaactttcgttaatgttgtaaggattattcgacgcatttccctcatttaattacttcccattggccattatccattcaatcacatttatccttttcacacgtttttccttttctcattgtaatg

SEQ ID NO: 98316 - DNA, 96 bp, Heterodera glycines
tgttcaatgatgacgacttgatgttttttgacaattttccgcgtcgccccttttatacggagccggaattttttcacgcgacattgccacgaaatg

SEQ ID NO: 98317 - DNA, 99 bp, Heterodera glycines
ttttcctaatttaatcaacatgttggctttttaattcttcaattcctccgttcattaaatttctgtttatttggctattaaatttattttacaaaaatg

SEQ ID NO: 98318 - DNA, 244 bp, Heterodera glycines
gggtaccgtacggtcgggcagagaccgtatagcccgtttacagccactcggagcgccattccacccaaaatcgtagcgtaagcccattataaggcgcttagcgcaaagaacggccctgcagagtacgcacaatttagttttaaggaatttggggtaccgtataagcctgagatggtactgtatagcccctgttcataaacttacatgggcacactgtaggggacggtagctgccatacagtatg

SEQ ID NO: 98319 - DNA, 411 bp, Heterodera glycines
atccgagaaaagcaaggaaatcctttgtggaagcaaaaaggaaggaaaaagtgagcgaatgaaagaaaatggaaggggagtgatggcttttatagcaatgcgtcgaatacgactgattattaaaatcttcggcaaaataaattagtataaaagtggttgctcctcctccgccatttttcattattattttcctttcgccatttagtagatatttcttttcgctttcttcgaatttttctcatgacaattcctccaaaaatgattctatacatttttgcatattttttctcgacattttacccttttccttctcatttttggtctttacgatgtttttgaattgaatgaaattggaacccccgatggcttccgtttgaaccaaacaatcaaaattagaaagacctgcatatg

SEQ ID NO: 98320 - DNA, 70 bp, Heterodera glycines
ggtaaaaaccctaaatatgaataattaatttaataattatttcttcagcagaccgacaacagtgccaatg

SEQ ID NO: 98321 - DNA, 1003 bp, Heterodera glycines
atttttgctcaattttcagctttcccaaaatttatatacataaaaataaacaattcctgtaaagcatattaactaaaaatttaattaaaattttttttttaaataaattttcggagttttactttttttcacccttttcactgccctctttttcgctctctccaaaacacacacactctatgccagacaatgaatgaacaagcagcacaaagcgctttatggccaagccggagtaaacataatatgatcataaattgcgcaattaataccccccccccccccaactaaacacaattggcggtgatgatgccctccaaatgtcccgggttgtgtcgcgccctcgcgccgcactccaataacaattgggtgcttaaataaaaaaataataataatttgaataaataaataaaataatgctgcttttctccattcataaataataataataataataataatcacattggaaagtttttattgttattaaaaatgacaatcaaacaaatcaaatacattttgtgatcaaagaaaaaaaaaatttttgatcaggtcaaattataatgcattattgcttatttgtcaagttttattcaatgatagttggcttgaactgataaattctcaaaaatctaatcagtatcggtgtctggttagaaccaagccttttgttaagtcttaaaaaaaattttttcaatgaacctcaaattatccaaccaacaaatttttcctcttcattgccctgagttgtcattaattatgctaattaatcatttatttataattaatgatttagactatcaatggtctttcaaaaagaagtagttttaatcagttttgatcagacactcaatatttggtaattaaccgtttttgtttattcaatactattttttgatctttacaaattatcctttggctagctaattaacgtgaagcaattaattagaagaataattagtcgtttaatattaaatatcccaatattaaaaaatcatagcaaatg

SEQ ID NO: 98322 - DNA, 695 bp, Heterodera glycines
tttttagagcaaatacagaataaaggaaaaggaaaattctttttttggaaagaaaataaaagctttcgctttagaagaatattcaatcaaagttatttcataagaaaaattgtttttgcttttgaaaatgcacggtgtgtcaataacaaactctttttgttgtttggtgtcttaatcgagtgtgcatgtgagcaataacaaagaaagaaaagggaaggagagagaaattgcaaaatctttcgtgccaataaataatctgtttttccgctcaaaaaaggcaaaaaaacacggaatgacacacccaattagtataatagataggaccgggcccggtaccggtttttactggatccggaagccagtccagcgatttttagaaaaatttggattgaccggttttttggattacagattttgagagaccgggttcggaaaccggttgcttctgaaaaaatcagtcaagtccggcattttgaaatctatctcggtctctggttagcattacctcctccttctcttatcggcaacataccgtgcttttctttctttcttgccgatctttctatttgacaaatataatttacctatttatgagttttttagtgtcatgattttaattttcattttataaattttagctaaagaaacttttaacaaagtaccatcatttgcattgattttgcaacgaccaaatg

SEQ ID NO: 98323 - DNA, 413 bp, Heterodera glycines
  unsure (1)..(413): unsure at all n locations
ccccataattgtttgagtaccccaaacgggacactgaaaaaaaatcgatttttttgttttcgggggcagtccccccganccgatgcgcncagatttatggggagaccgatcctttccggaatagcttccctatagcctgtactnaattctgcgttggattttgctccccataattgtttgagtaccccaaacggacacttgaaaaaatcgatttttttgttttcggggcagtccccccgaaccgatgcgcccagatttatggggagaccgaatccttcgggaatagcttccctatagcctgtactttaattctgcgttggatttttgctccccataaatgtttgagtaccccaaacggacacttgaaaaaatcgatttttttgtttcataaatatttttttcagaaagtcatg

SEQ ID NO: 98324 - DNA, 202 bp, Heterodera glycines
tagcacttttctctctctccgggcctcaaacggttttcggtaattatcgcaaataattaatttaaaacctattaaattattattttttaaataattttaaaaataatttcgaaattcttagcccaactcactttttcaccgatcgtcagtgaagttgcgctcgaaaattgttgaagaatgtttgtatgaatacagaaaaatg

SEQ ID NO: 98325 - DNA, 63 bp, Heterodera glycines
ggtcgtcttttaaattttattattcgttgttaatcttgtaaaatgaatttcaggggcgtaatg

SEQ ID NO: 98326 - DNA, 170 bp, Heterodera glycines
tgtaaatacgatgggaaaaaattaaattgtaaattactaaaaataaatgtttttaggaataaaaaagttttttaattaaaattcttaattttgctaataattttaagagaatgcgaggaatttaaggaccgaggaataagggcttggtgctggaatagggatttaacatg

SEQ ID NO: 98327 - DNA, 410 bp, Heterodera glycines
ttgggccaatggacgaggaaagacaccgccggacaaagcttaaaacagagagcgagggaataaatgataaacgccggtcgaaatccatcccacggaaataaattttgaaggataaattggcacggaaatgcagcaaatttaaaaagagagtcatgggagaggcccaagaaggaatattgcgaaaacgattaacaaaaataaaatgttcggcggaacggttggaggaggcggggggggggaggggggaggcgccgcttttgcatggccaaagggacggacggggcattccgccaacagaaaggcacaaccccgcactaacgggagaaaatggttttcgaagaattgtgccgagaagagaagggcattggttagagtgaatgaatggcaaaaggattttggagtaagaaatg

SEQ ID NO: 98328 - DNA, 750 bp, Heterodera glycines
cgtagaaaacgtgttctagtttctgtttggacttaggcctgaataccggcttagttggcccgaaataacaagagacccgtctaattcaatttaaactcataaaattaagtcttgaacagaccgaaccttgtaatcttataaattgtaaataatacatcgtgtatggcattgatataaaattaatggtaatgagtttagcaaacaagcacgcttaatcgagtgaatattcgttaagaaaactttctattcctaactttattaaatttactattgttttaaattagatagttgcaatttatagacaattaaaataatttttattttttaaatccttaatttggtgcccaaacttcccggtgcccaaatttatggtgcccaagcttccgcccccccccccttctttctaaatcttttaaaagaatttttggtgaacatttttaaatttttcgaaaatgtaccacaaaaaaatcggtaaagaagagatattaaaattaatttttgaatattaaaataggattttaagcctatttagatcattttattgatttcaacctttacgaagaagtatttcaaaaaaaaactattttaaaaattttattttcacagtttgctacatattttgagttttatttatacatttgttttttttacatattttatgtaaatattttgctagagggtcgagtaaaattttctgaaaaaattattaggttcacggaaagaacaccaattccaaatactaaaagtatg

SEQ ID NO: 98329 - DNA, 803 bp, Heterodera glycines
ttttaattagactgccccaaaaaagtcataaatagggaagagattttctgtgttgaaaaatggataattaaaaatttattataaattattcagaaattagcatatgtccactgttcaaaaaatccattgcggttcctgctgcaggattgttcgggattgggacacagaaattttgcgggacggaacccagagggattaatcccgcaccagcaattttcaaaaaaagcaggattgcggcctggcgtctcgcaaaatcccgcgggaacccgcatcttgcaattttcaaaaatgcaggattgtggactaaaaatccgcaaaatcccgcgagaatcccgtaccaagcaattttcaaaaaatgagggcttacttactgggattcccgcaaaatcccttggcacccccttctcgcattaacctctcgtcttcatcactaatctcatcactatccttctcttttaaattctaatgaaataaaaaatcgcttccattcttgaaattttgcacaaattatttcataaacttttttgttaattttgctggccgaaatagcggaacaaataaataacatctgacgaaaaatgaccttacctttaaattgtcattagaaaaaaatgattaattgtatgtaattacacgtcactgccgatggatggttctcttttcggtcggtcattatttgatctcctcattttcgaaacattattaaatattatttattcatttctccacgcctttaatcgcaataacaaaattcataaaataatattttttctttaaaaaaatcaaaaaaataaaataatatg

SEQ ID NO: 98330 - DNA, 1003 bp, Heterodera glycines
gcattttttatacatattttatttacataattcgcaaatattcttacataaaattagcagccctattaataatgcagaaatgcaaaaatgaatggataaatgagtcaattataatattttcgttttgctcttctccaattgttgagtcatcattttgccctaaattattgttgattgacctcgataaatacattaacataagcaacagcagtcagcaaatgttcatttattactacaatttttaaaatatcatatttctttattattattattatttattttttaattaaaaattcactttatttgtccaaaaaatggctctattgcactttatgagtccaatcgactttttatgaaaccaaaggtatttaatgaatccaatcaattaacaatacctggtttttataaaataattttgttcatgtttgaacaaaccctatctttttgatgtcattcgaaagtagaaagcctaaagaagtttaaatatataaaattttagcgtttaggccatgtcaaaaaaagatttgattaattaaaaaattgttgatattttcgtttgtaattaactgttagaattatcttgttttctcgtattattacattattcggactttgtgctttcgaatgatacctaaaatatagggtttgttcgaacataaacaaaacaaaattattctaaaaaaccacaggtgttgtttgttaattgattggactcataaagtgcaatagataccaaaaaaatttcaaaaggcttgttacatacaaacagtactcaaacttctctccatttctcatcatcaaacccaatttgacaattataaaaaaattgaacagaaggaaatgtcaatttcaaacgattcaacaaatagtgacgatttttcgtctgatgattgtgataacgagaaaaggggaaacggtagaaaataaaatttgggaaacagtagaaaattaatataattaaaaataaataaatgaaataaaaatgcttttctttttagaaatg

SEQ ID NO: 98331 - DNA, 67 bp, Heterodera glycines
gcaaagtgcctaacaatcatttaagctaacgcgtacgcaaacgctggcccaagtggtcggcatcatg

SEQ ID NO: 98332 - DNA, 93 bp, Heterodera glycines
atggtggaaagagagccaaaaaacgaaaaacataaatagacgaaagatgtggaaaagaagcaatttgctgtgacacatacagaaacacacatg

SEQ ID NO: 98333 - DNA, 1003 bp, Heterodera glycines
tttttcaattatccagcaaaatgaataaatttttttaaaaattaataaattaatgatatgaacgtacaaatgaataaaattcaacctaaaaataaatttatttttattaattttgttatgtaaaaagttgaataacattaaaattccaaaccaaatcaaaatcaataaataatttaagaaatacaaaattacttatgattcacgaatttattacaaacagtacatcaaaagccttacaataaaatataatgaatgaataataagtattgataacataaacgggttttattacccatgtttgtgtttgaggtagctgtacgtgaaaaaggatgaaaaaataatataagaaatttaataatgctaataatatattttataattgatatcttttgtaaagaaataaagttaaataaaaaagcatacaatttattctatcatttgaaacaccgctaaaatttttgtgtgttgataaagccgatttgaatcgaaaaccttgatattaaaaatcaaaaaatgggtcatagagaaattgaaagtcacatatgaaaaaatatttttaaaatttaatttatttaaaaaattattattaactataaaatattcaatgagtccgatttcgttcacggatcgcccataaaatataaaatcgaactatcttaattttgttgatttttccaatggaaatatttatttctttttccgagaaatgtgctttgttgaccgaccttgaggctggctgtactaaaaccctaaaaattggagccctactaataattttgaccaaaaaaaacacccattttaaacattttgtttaaatatttagtacacattttggtttttttccatgaaaatctattgtaataagaatcgcaaaatttggcaagtttttggacaatttaagtttttggaagaaaacgattttccaaaacaatgtttttcttctgtattttgtgaacatcaatcaatggaaaacggcaaagtgtgctaattgcaacaaaaaatg

SEQ ID NO: 98334 - DNA, 1003 bp, Heterodera glycines
ctttagaccccgtggggttcattaaattttcccttattttaggagacgcaaatttaaatgactaaatatgtgtgctcaatgcacgtgatttgcattttcaatcctcctttccttcttttaattttaaatttatttatttattgtttttatttgttttttgattttaatatctttttctatctttttcaatttaattattattatttatttagtcatttatttatttatttatgattaactgattatggcttttcaaattaattgatcccctaagggttaatgaaattccgattaaaattgagcagattttaattttcgccaaaaggagcaaaacacttttttagaccccgtggggttaattaaattcaccctcatttttaagagtacctctaaaaaaatgcctaattcattcgtaattttattttttagtcttttattttgtttttgtctctctttttgagctccatgaattagttaaattccatttttgagggttttctggggtctgtccctttttcgatcaccccttttttttgactgtaaagatttttgaaccacgtatgggaggtttttttttgaaccgcaaaattccgaaaccatgcatggataatttttgaatattttatttttgaattaggattttcgaaaccatgcatggataaacttttgggtttttttttttgaaaataattatcgaaccacgcgtgggataatttttgatttgatacttcttgttgattcccagggggttgctggggcctggccaggactctaaaatgattggcgctttgcgcaacacaaaaacatcccctgaaaagtcggtctaccactcgaatccccctcttcccatggcccaagccctgtaagcatagggttggaaccatccggtgctaccagtaaagccgtgatgtcccactacccagtgcttatgagggaaattagtccaggggaccctcttacgcgtccgtaattaggcccctcagggcttggaagggaagggatg

SEQ ID NO: 98335 - DNA, 370 bp, Heterodera glycines
attgctttatggcacacaaaaagttgcaattgctttctaccgatcactttcttccctgagagatgaacgcattttcaacgctcggcttatgatcgaacgatcaacagcaattgtaagattttatgttgcaaaaaaaattgtaattatgtaaaacgactgtaaaagttaaatttaacagttttaaagttacaagatttaaaaattatcaacttatattcgtttaaaattgtttattttgtaaaaataacaccaaaaaatccaaatttaactaatttttgtattaaaaaatcaaaagcaattttctaatgaaaaaaagataatttaaaatcatatttaattcatttgtagaaaataccaactgtggcaaatg

SEQ ID NO: 98336 - DNA, 151 bp, Heterodera glycines
ttttgaagtctaatcggttttacattttaccatattcaataattaagtcgtgttaggaccaaatttttcttttaacattttcagaattgttatttttctgtcaaacaaatttcacaaaacaagcttaattctgcagcagaaacatccaatg

SEQ ID NO: 98337 - DNA, 497 bp, Heterodera glycines
accgtaattgctgcttaaacattgaatcatttttcttgacttgtttagtgagtgaggaaggcccaacaaatgctgtatcagtgtgcggagaaataaaaaaagctccgtcctcttcacatattgttgtgttgttgctgttggacatacttatttaacttatttgttctttttctgataaaaccgtgtagactttctttttttgcaagttaaaaagacatttgaagtgcaaagtaaggcggcattagcctatttacctagttggtttttcacattgatttgtcattttgcttgatgatgcaccaaacatcattatcattgtcaccctcgtcctgatcgatgccacaaccccgacccttaaccccgatgggggtcggggttaaatatacacccctaagaatggaatttttgtggggcaaaaggcaaaaaagttataagaaatttgaatttttttaaccattttgccaaattttattaaataaagtaaatttctagggatg

SEQ ID NO: 98338 - DNA, 583 bp, Heterodera glycines
ttccgccccccccccctccccccattggaaaataatgaagaaaattgttctattgttgcatcattcattttgtgagtctctcctataaaagcggtaaagcaccaataattttcattttgggattaacaaattaaatgaattaaaaaggggttattattattaaactcaaaatcactttctattttatgcgtttttaaaataaattatatcataagttctttttaaattttacttcgacaaattcaacacaaaatagaacaaaagttctcttttcgtttttgtcttttgttctttccttccattcgccgccacttttattttcccccgagggaaaagcacaaaacacaaactctaaaataaaataaaataaaagcggagagtatttaagtgacaaattcattgggtgatgacaacatttttccttctgaattattttcaatttgtcctccttttttgatcatttaatctctctttttttaatttagcatttcatcgcttttcctaaaatatttttcatttttaaatttgcccaatttccttccaaaacgccaatttatttctgctcctccccaccctcaaaatg

SEQ ID NO: 98339 - DNA, 1003 bp, Heterodera glycines
cccggtcccgctcaactccagttcaaacacataattttttttttcttatttgccggtgcttttccctgggttctgttgtgccggcattcaaattctatatgtattgatggctctattgcagttcacaaggccataaaaattgaaacgagccgttttggcatatcttttgtctttgttagttcgacgaatggcactaacaaaatactcgcgcactaaatcatgtgccattgagagcacaaatcatttttgaaagggaaacaatttcttggcatttcaatttttaccttttatttttaaatttttcctaaacacttttcaaaaccaaacaatctttggcctctgttctcacggaaagtgtaatatcccccttctgccccttccctcgtcacgtttatcctttttatctctcccccttatgcactcatccgtcgtaacctctgatcacgtgaattcataagtggaggacattgaggcgaacttctggcgccggatatgcccacggcaatatttgtgttcacagcaaaaaggggatgaaaagcgtagtccccccctgaggggggggggggggggggcgctttgatcactttcccagggcaaagcagcggctgtaatcgctcaaatcactcagttcgatctctgtgcccatctccgcccatcactttacatgcataccatttcatattaataattatgcagcaaaacaacaaatacatatggacacaaattaaagagataaatgtggatttattttccattgttttatttaattaataattaaatgcattttttatattttatattattatgctaatttagcttagttaacggggcttttcctttcttttttgctgctgtcggtcatttcgcccaccccgcttttgcataatccaaacagcaaatagcaaatcgacaccaacgcatcagcataaaaaaatgtaaataaaaatgaaaataaaaataaaaagaaataaattaattatttttaattgcagcgaaattaatg

SEQ ID NO: 98340 - DNA, 85 bp, Heterodera glycines
gcctcccctctcataactctctctgacctttacacttatataaaataaaaatttcaaaaaactcacaattttcagacacccaatg

SEQ ID NO: 98341 - DNA, 182 bp, Heterodera glycines
ttggtggctttgtcaactccaatatacactaatagaggactttggagctatagatttataccaattttttaatttgaagcttctataaaagttatgatgcattaaatttagcgacgcgtgaagcttctcactccgccattgcgcgagcgagcggtgcctatgttccgccatatctgagaatg

SEQ ID NO: 98342 - DNA, 106 bp, Heterodera glycines
aaatttacagtttcgcccgaaaaaaagtgtttttcatttcttttttttccattttcaagcaaaaataatcagatcccgtgttgaagcagtggtcagccaaagaatg

SEQ ID NO: 98343 - DNA, 181 bp, Heterodera glycines
aactaaaagccggcttcttcgttttcaaccgggaaattggagaagcacgacgaatcgccaacagaatcaaacaaacgatgccggagccaatggagttagacaagagcccgggacgtcaacgtcaacaagttcagcccggcccggaacgtcaacaagtcaacaagtgatcagctcgttaatg

SEQ ID NO: 98344 - DNA, 881 bp, Heterodera glycines
tcacgacgcactgatgcaaaattggtcaactataaaattatttaaaaaacttactcgttcaaatttatcgtggtttgccttttgatagaacaatcctagtaattctcgtttacagcggtcagaaagtttttatgcccttttcttgatgtagtgaattaatttttgtcggaattaggcatcgacagctcaaaaaggtttggtatcgaaaattgaaatgccggcaaatccctaaatgagagctcgaatcggtttccagctaaacaaagctcattatatttttcgctaaaaaaccacaatttttgagttatatgctgaccaaactaaagaatttttggtagcacaatcgaaaaagcacactagcagataagaaatgttgaacaaaatctatcctcacttttcacatattgtcagctaaaggattttgctatttttgatctgcatttaggttatattttaattatgtattaaacacagaatttaaatataagttataaaacaaaaatatttgtaataagattgataattttcaattttacttgtccattggaccactcagtttttaacgaggcgctggtttataagtttctttttaacaatttctaccacattttcagcagttcattagattaattttgatattaatatttgtgtattctacatgaatttaatttaataaaataattcttttttttaaatttcatttttcaagccaattttatgaattgtttggtcaattttttgtttatttaatgaatttttttctttaaaacatagtttgggacttattttgcttcctttaaggcatttttaattaatcaaaattttaattaagaagttttttttaaaaacttcgcctaatttacaaaaagttatcaatgatg

SEQ ID NO: 98345 - DNA, 536 bp, Heterodera glycines
  unsure (1)..(536): unsure at all n locations
tgctnngaaaaattgaaattaaaacaaataagtaaaacaaatgactaaaatctaccgggttgtgatatgtgtgacgttatgggcgacgcttttgagaatggaacagtcggagaagaagaaattgagattgactgaggaattccttttgttattttctatatttaaatgaaaatggtagcaacaaaaagttttaagtttagaaattgtaactcaaaaatgaaaattgagtataaataatcggatccatcgatcccacggtgagtcaccgtcggtgtcgttttaaaaaaagttaaaacgaatcgccaatctaatgtcagattcgagattagcgtccttgaaaactccaagtttcctgttttccgaaaataacaaaagaaaacatgggagccccccccccccattttgccagatttaaattctaaattttgtcagaaaggataccctttaaataaaatatcaagaaatggaaatgctgatatgaacaacttaaaaaattaaatagattttaggatgcaagtatcttaagaattgaaatg

SEQ ID NO: 98346 - DNA, 66 bp, Heterodera glycines
  unsure (1)..(66): unsure at all n locations
attcaaaaatgcaatggccnngcggcggcgggacgcccctaccgggaggcgcaaaaagcaaggatg

SEQ ID NO: 98347 - DNA, 1003 bp, Heterodera glycines
aatatatgaaaatattattgtaataatgttcatttattgtaaatgaaaagaaatgatggatgaaggtgaaaagacagtaaattttatgcagttctattagtttgacgtcatttagttattaattgatttagtttttaattgattattatatttacgcatagaaaatataaacagtaataacaattaataactgagtaaaatattgattttccaactgcttcgtgaaatctcatgctttttccaaccgttcgcatttcccaggtatttcacgtgaaaatcattgtttaagtgtggcgaagtgacaaaagtatacataggagtggtgatttttccgaggaggggtcatttcagtcccaaaaaatgatttgaataaataaaattttaaaaaaataaaaaagggccaaataaagcaattttgcttttttaataaatttccgccacccgagacacagactcgacctcgagtcttgagaactagatcgaagcttgacccgagattttccatattataagggaaatggacccaaaagccgggacagtatatcaattttcacgacccaaatgcaaaaaattcacgatcctctcgacccctggattgtttttggcgatccgcagatcagggtccatatctcgctcaaattgcaggcgagaaggaatatttgtatttgttgagctattttttcttttttttaaattgaataatacgattttccatactgacggattgtccactgacggtttgtcttggcatagtagggaaaggaaaataccgtatttcctcgattagaatccccgggacttctattattcaaccccctccaaatggggcttatatttgaggggcgggcttctaatcgaagtgtggcttagaatcttggaaatacggtattagaagaagtacggtatgtttatccggacacccttagaaggggagaagggaatattcacaaataagtacggtatgttttaattgccagcgcttcttgctgcatatcgcgcgatg

SEQ ID NO: 98348 - DNA, 1003 bp, Heterodera glycines
aattcaaaagcattttgaagctttcttttggttttgaatcattttattgccctcttaaatgccctagcgaaaacacagccgaggctttgttccaacatgtcctattaaaagaagaattatattcgcttttctatcctttggatgatgtcataacgctagaagtaactataatcccagatgtcgacaatagaccaagaaattaattttataaaaaacaaaattacgagaaattggaaaatttctggaaaaatacttaaacgatcaaataatctcgaaatttttgcaaatatgatttttaaacgggtgaaaaatttctacataacagcatttagtgcacctggaatcgaaaatttatatttttcattcttagaaatgctcgaaaaaattcaaaaattacccggtcttattatgggtgaatatagaaaacaggccttatctatgcagaaactagaaattggcatcaaagaaacagatatatttaaatgtcaagaagcagagaatatatccgatgccaatttttcggagataaaaagttatcaaaaaaagatagggaattataaatttaatatcaaaatgttgtacaatgaaattagagtaactgcagtaagtcatttgtttaggcctgaaaaagaaatattttttagtccgtttcttacagaaagaaatagagaaattttttattcattatttcgacatatctaataaaatcgcaactttttttttgcaaaaacgaaacgttttcgttactaatagaatcgcatgatttttagtgtaatatttgagccttactgcacaaaagaccaaaaagttttgcaagtttgaaggtcatttactaatttcgtttgctgaatttgaactaaattagggttgcgtcagcattacaatgcaaaaagcgactatttaagaaactctaaattttcattaccgatatataattttgccttcaaacattagtttatgctatttatttttgatttaacattttttttcccattaagaaatg

SEQ ID NO: 98349 - DNA, 1003 bp, Heterodera glycines
atgtaatcttttgcgaaacacggatttacacttgcaaatccccggaataaatgaatactaatctccatgtttaattccacgagatcttgttggtccatcttttaggaattttactcgattttttcaaaatttacagccttttatttattgacactcccccggcgcatcacttccaattttaggcccatcatatattttttgataattttccaccaccaccgctgctgctgtttgctgtggtctcctcttcgtgttgtactttcattttgtgccggtgccttcgttgaaatttcattaaaaaaaagacatgaaaaaatcggtgcaacagtcgtgccccgagctgcgcaaggcgcactccgtcacccactcgtccaactactcgctggacaaagtcaagtcgctgcatgagcgctccgcgcgtgcaatgctccactctcacgaggttttttgatgcgttcccattccaaaaaaaggcgcgcatttttcacacattttgcacccctcgtctccgtttgattttctatgtcaattgttttttacgaaatttttaaatttctttcggtttgcagcgggtcgttgatcatgacgaatctgattatttatttgggttaattcaccttattcctaacccgaatccaaataaaatgttaaagtccaagaggggaatcggaattggtcgaaatgagtgtcagattcgagaccagagcgaccccgaaatccaaattttcataaattttcatgacaataaattgcaagctaaagggctcatctctctttggcgtatttaacaaattcaaaaaagacagtttgtaaaacaattttattctgaaattcggaattggcaaaatggatgccatattgtataccggcaaattgttattataactcgaatatatatatatatatatatatatatatatatgtatatatatgtatatagatatatatatgtcgatgcctggagcttgacgacaatcagttgcgcgaaattatggccaggatg

SEQ ID NO: 98350 - DNA, 63 bp, Heterodera glycines
ctcccaataggaacttcaaacgacttagtctcgtgcatttgtacggcgagaagacagaatatg

SEQ ID NO: 98351 - DNA, 414 bp, Heterodera glycines
  unsure (1)..(414): unsure at all n locations
ttttaatttttancattttgacgcataatttttccttactataatgaaacaatttttgaagaaatatgagaagtaatcactttttttttgaggacaaatcacaaaagtcaggacattttcgatttttattattatgcctacttcaaaatcataaatttttttagcaatatttgatggcataaattcaaattaaaatctttaaagagaaacaaataatgaaaatgactttgtgccttgtaatattttctatatttttgtttgctttaaaaattaaatccggcaaaatccgaccaaattttgacgaagtatttggcaatgaatgggataaaaaccacagagaagaacaagcgattaaaaattgaacagaacgatgaaattgaaaatatggaatttatttattttgattaacaaatg

SEQ ID NO: 98352 - DNA, 184 bp, Heterodera glycines
  unsure (1)..(184): unsure at all n locations
tgtgagtgttcttcattaaacggctttttgtcatccccgagaggcctgttttggaaaacccataaaaattgctttnttgnttgtccaaaattcggttgcctcggacagaccctatggtttttttgtttgtttgttcatccttccattctccgcagttgactggcgtgtccgaccgttggtgatg

SEQ ID NO: 98353 - DNA, 1003 bp, Heterodera glycines
acaaaatgctttacgattttagaccccctaaatttgaggatttttagagcctaaaatctacccctattttgtcaaatgtagcttgttaaattgcttttaactggtttgaaactcgaatgtgaagactagggtaggtcgggaccgggacctggacacggacaactgaataccaaggtcccgtgttgaccagttttgaccgggaccgggaaattcccggcttttttcccggttttcccagccaaaaagtcccagtttttcaaccaaaaaagtagcccggtcccgaaactttggtcaagaaaaatacaaataccgaaccaaaaaatgaaaaataattttgggaaaattttgaaaattctgagcaaatcgccaaaaaatgtgatcgcgtcaataaaaatattttttatcgcatttaaaactcaacaagtgaagaatttctaatcttttaaaacggtcaaaatacacaaaagttggtttttagctttgaaatattcccttattttttagatgatattgaacattttgcgcgtaaagccttttttaacggacaacctaggcactaatccaatcccaataatttgaatttataaaaatttttaaaaatttgccacacatagcgatagataaatttattaatccattaaaaacaatttgctcaccttttaaagtttgctctcacatttcacacgcacaaaataatattcaatgaaaatggaatttatcaatcaaatgtttgcacaatgactttaaattttatgaattctgtcagaaaatggctgctcacaaaatcatataaaatacgtttaaacgaataaataaaattcactcccaaataaaataaaattaattaaaataaatacaataatccacataaaataaaacaatgaacaaatttgtgggcatatttgtcgctgttttgctccaatttgtttcgccattttcggcattttcccgcgtgccaacgacgaccaccgaacgaccgataatttatgacccaaaagaaatg

SEQ ID NO: 98354 - DNA, 372 bp, Heterodera glycines
ttccacctgaaacaacggcagaaccaaatttcggacatttttcaatgctagaaaagcactggtacgacgagaagctaaataggcggacatatatttccaacatcacacgacgattgagcagagggatatagcccccccccccgaacatgtcgcggattattcgatttttaagacccgaatgccttcagaatcagataaaagaattgcgcatgaaatgagcatgattttggtaaaaaggtcaacacctaatgcaatgattagaaattttaaatttagatttatgtgttcgatgtattaaaaaagcaaaaatgggcatatgacgcaaatcagcccacctctgattttttgcctaaatccaacaaaacattaatg

SEQ ID NO: 98355 - DNA, 976 bp, Heterodera glycines
taattagctaaaaaggcaacaaatccaatttacggcattttgaagaatttttttatcaaattaaaatagggcaattaattcaaagaaaaatttaaaaaaaatcgaatggaatttcttgaagacaaaagaaagaacagcaaattgagttaaagcaatgggaaagtgttggaagggatgggaacagatcaatcgcaatggaacaaacatttgttatccaaacagcggacggatttccgatcgaatggctcagctaaaacatctgccgacgaaaatgtgtgggaggagggcgaatgacagagaaaatgtttaaagctgaatcgatcggttcattaaacaattaaattttgaattaattgaaaagaaaaatattaaggttggtattgtatagaaaaggtgccctcaaaataaaataaagcacaaaaagtaattgataaaaagaaattggaaaataaattcatccatttcttcagaccgtaacttccactgaagctgaattccgtccgcattgtgaaacagaaaaagtcggaagcatttgcattttgaaagggactaaattattcacaataaaatataaatttttaaatattatttattttctctcacaatttccaactttttttttgattaatttaattattctggtttttaacatttctatttgtgaacaattgaaaaaacgcatgactaactcggattggcataacacttgaattggcatttctttcttatttatgaaagaatgaaaaaattgtgcatatgacaccaaagaaattataaatgtcaaaaaatatggccatataaattgcgattaatgcttttgggttttcaaaataaattttcaaaaataattttccgcttttaataatttcaaataattttccgcttttaataatttcaaataattttccgcttttaataatttcaaataattttccgcttttaataatttcaaataattttccgctttttccaaatg

SEQ ID NO: 98356 - DNA, 450 bp, Heterodera glycines
tgatgatttatcatcattttgatgatatcaaggagtcaatgatgattttatttttgagatgatgatttgctaatttttgagaaatttgatgatttatgctgattttttggaaaaatcctcaagaatggcgatttttgtgtaaaactgctatcaaaaacttccaaattttcaaaattttggcatatattgtgttatctgtgtttgacttttattccttataaattttattgtttattttgtttattaattaattagttcatccattttactacatttatgacttcaaagagcaaaattttcaaaatttgatgatttatgctgatattttggaaaaaatcctcaaaaatggctatttagcctatcgtcacagccgacacccaaaattcccctaaaattttgtaaatttgacctatatattgccaattttcagtgaaaatctgtttaaaaatg

SEQ ID NO: 98357 - DNA, 414 bp, Heterodera glycines
gtcaacaacagcaacagataaaaataggacagctaataaaagacaactcggactggctgtgtgctttggcgaggaccaaatcctctaaaaagtgtaggaagattttacgtcacgcgaacagcgatcagctattagcgctagtggaaatttgtctgaatctcgtcgcttcacgtttccgattgactacacgacagaaaaaaagattgatgccctatgttgagactgtgcgaaggatgagcagagcgagaagtgaacgcggcgcgagacgtgtgcttgttcagaaaggatcgggatttggggggttgtttgctgccctcctaacacccgtgctaattgaagtagcgaaatcatttgtgaccaaaaacgcataaataccccacaatttgttgttcacgctcacatttttgcaaaatg

SEQ ID NO: 98358 - DNA, 153 bp, Heterodera glycines
tttttgctttttaattcctataataatatgatttgcttatgaatggatgaaattaattcgtatataattaccgtatcaaatttttgtcgggattgtttcacctcctccaatggatgcacaaaagttgagttaccaccagccctacaaattatg

SEQ ID NO: 98359 - DNA, 69 bp, Heterodera glycines
aaggcccagtcatttgaaacgcctttttttgtcagcacaaaaaaagcggatgaattattttgggagatg

SEQ ID NO: 98360 - DNA, 841 bp, Heterodera glycines
  unsure (1)..(841): unsure at all n locations
gatagaaaagcatcagagagccttattatctttaaattaacatttggtgcgtttcagagcacgttctaaaaaatatttatgaattaattttgcaaaataataaataattaatgaaaangtcagaatttcgacaaattttaaaaacaacaagcgttggcattttttcaggttaagttagtcctttacaatggagaaggcctgcaaaatttggagagattatatcgattttagtgcgctaggttcgatgaaacttttaaaatatacgcctaaactttttggcctgtttaaaaaggaattaaaaatttttaaaaattttattcatctcccttttgatagaaaaagcatcagagagccttatttatcttttaattaacatttggtgcgtttcagagcacgttctaaaaaatatttatgaattaattttgcaaaataataaataattaatgaaaaagtcagaatttcgaaaaattttaaaaacaacaagcgttggcattttttcaggttaagttagtcctttacaatggagaaggcctgcaaaatttggagagattatatcgattttagtgcgctaggttcgatgaaactttttactttttggcctgtttaaaaaggaattaaaaatttttaaaaattttattcatctccctttgatagaaaaagcatcagagagccttatttaacttttaattaacatttggtgcgtttcagagcacgttctaaaaaatatttatgaattaattttgcaaaataataaataattaatgaaaaagtcagaatttcgaaaaattttaaaaacaacaagcgttggcattttttcaggttaagttagtcctttacaatg

SEQ ID NO: 98361 - DNA, 225 bp, Heterodera glycines
tctgttctgccagcttcagtcaccgattttgacttctccctcacagtgcagaaactggagaagcttttcgccaaacccctgtcaatcttcatcgataggtatgaatgccttaaagcggtgaggggagagggcgaggagtttcggcacttcataaatcggcacaaaaagctgatcaacgacttcaagttcgacgatttgaagaaagagcaattttatgcattaatg

SEQ ID NO: 98362 - DNA, 182 bp, Heterodera glycines
aatgttcgaatttctccatccgctatatcaatggcttttattttattcaattattttgatttttaatactcgaaataaataggttaaacaaacaaaaattggtataaaattcgaaaaaactgggatcttttttcatttaaataaaaataactcttaaaataatccattcacctgaaataatg

SEQ ID NO: 98363 - DNA, 1003 bp, Heterodera glycines
tgacaacagagcaactcttccgtcaattacaacatttaaaacagcggacaacaaaaagaggaagcaacaaaaaagagcagagggacaacaaatggacaataattaagagggaaggatgataaaaaagaaagaaaatgtcatcaaaaaaaaaaattaaaaaaaaacaataaaaaaaaacaaaaaataaaataaaagggacagaaaagagcaacagccatccaagctttggttgtgaattaaaaatggggggccattttcattggggagggaggtgtaacatattctaattatcacccatgagcaaagacgaacccttcacacatttccttttttggccaatcgatgttattcatcttttccacattccccccgttcaccattttattcactatttctcttttctctaactctcacaaatccccgcaaatccccgccccttttccgttcaaatgtttcccccaccaatcagtcagtcgcatcggaggagatgagagtcgcgtcggaggagatgagagtcggacgtcggagcgatcaaagacaaattaattatttattaatcatttatttattcacgcatttaatccgacataataaaagagccatacgaacgattggaccctttggacttcttggggatcagggcccgattcctaagattaagacccttcagtcctgggacaatccgtctcctcccatcccgctctggcatggatcctcacgtcttactaatagcaattgactaagctttacacgataaaagtttcaaaagtttaataagagttactgtattcctaattttttccaaaaaataattgaaaaatttttcaaaattggtttttcctgtaattttctcataaaaaatttttctaagattttttcttctgattgaaaattgtcaaaattttcagggggggggaaacgacggaaaaggggcgggctttgaaggaatgcgaccgcgcatatcaaacatttcccctttctttttcagatcaaagttttcatg

SEQ ID NO: 98364 - DNA, 83 bp, Heterodera glycines
gaagaggtgcaacagtgattagaagaggtacaaaagtgattataagaggtacaaaagtgattagaagaggtacaaaagtgatg

SEQ ID NO: 98365 - DNA, 113 bp, Heterodera glycines
gacaattttggcagaaagtttggcattgtttgtctaacgcggccattgcattctgtgcccttttggcatccgtttcgaaatttgtaattgaaaaaatgattgtttaataaatg

SEQ ID NO: 98366 - DNA, 734 bp, Heterodera glycines
aaaatttatgagtcaacggcaaaaaaaaaaaaaaaactggataatatcagcccatgcttttatatttatttaggcaaattttgccaacaacagcaacaccactttccaaatccacgcgattcgtcaacaccaaaatcaaacagcaacggatcatcaccatcatcaatcacatccaataaaccattttcatcatcaaattgtcttggaaataaaagtattgaaaatatgaatgacatttgattattttaattgagtttaaaattaattataaaaaacaaaaccatgagaaagcattaaatttttaaaaattcaactcacaaaatattttattaaaaagcaattttgttccaaatgaattaaaagaattttgagaaaaaattaataatttaattataatttaaataacaataacactccttggatgtgaggccaatttttcaattttgaaaatctcattgatgccttaaaaagcttaataaaaaagcctcattataggtcataaaaaattttattttcggcacataaatttgggattacatataagaaatatgttattttttaagcagatcgccatcataaaacttaaaataacttattttaataaacacacatttattacagtatacagcacacagtcgtccagtaatactgtggtggccaacggtagtggtgccaacagttcaacagcgactacagcggcatttgttgccgaagatagttgttgcaaccaaatg

SEQ ID NO: 98367 - DNA, 509 bp, Heterodera glycines
agtgggagaaaaggagaaatagagagagagagctaaaggggaaaagaaaaagggggtaagacacaccaaattaaaacaataataatttaaatttataaataaacatcaatggagcatcagcagagcaataaacattgataaaatggacaaaacgaagacggaagggaaatgggaaatgaaagagtgacccatcggaagaggtcaaaaacggagaaaagaggagagagaaaaagggagaggcagagagaaagggtggggggagagattattaattggtccattggaaatggtcgagagtttggacagagtcgagaaattcgcaaaattaaattcaatttactaatacatttttgtatatgtttggcgatttgatctttctttccattgtagcaaaagaaagtgcgaaaccatgggacacttttttatttctttgccaaaatattaagaaaggtaattaaagaaatgaaaggagagaaaatgagttggatgaatgaacggacgaacgaatg

SEQ ID NO: 98368 - DNA, 72 bp, Heterodera glycines
ctcagctcggcctctgctgctggctgttcctccgttgccaatttgatcagttcgtcgtccgttgaggcaatg

SEQ ID NO: 98369 - DNA, 642 bp, Heterodera glycines
tattgcctatttttcatcgccccaggggtaagcattcaatgtttaaaatttcactttgtatttggctttgttccctcccttctccccgctgctgatgagcaaaaaccggtcaaattgtgctcgtctgggccatcaccaccaatgaatgttgtgctcccattttaaacattttactgccgctaattacgaattaatgatgcacacattttgcgccagaagcaaaatgcggcagctttaaacactttttgcgagtaaaaaataagtaaataaacaaaaataattattattgtaaaattaaaagtcggacgacgtcggagtgctttttcattctgggacggcgtcaaattgggtggggggacagtgtggtccaacccatcgcacgatagaaattgatgagcatttcgcgtgtttatggggctaaattaattgaaaaccgaaaattagaaaatacataattcaatttattttccaaaaattcaatgtcttttaattggcaaaagatttttctaagctttacacaatttttagcctaaatttgcatttttaagttgtttatttctcaaaaatgtaattctttacaaatctgacattaatataaaaaagactgtgttctcttcgctttactgatttagcaaaattatg

SEQ ID NO: 98370 - DNA, 56 bp, Heterodera glycines
  unsure (1)..(56): unsure at all n locations
tgcaggtcaaacncgaaaancattggtggaacgtatgagacttttgttcagcaatg

SEQ ID NO: 98371 - DNA, 304 bp, Heterodera glycines
taaaaatttccacccactaaaaataagctataaaaatatttgttattttataaatatagccaaaaattcaattttttgtatcaaaaatatgtactcttgtcttatctccaattctactcttccacctcctcctcctcgtcgtcacttgcgtcagcagcagtcggcagcggcgtcaccagcgcagtacagatggttgggcaacaggaagagggaaaggttgctgcaaatgcacggcgtcagcagcgcaaggaattggaagctgggcccctgtactgcagtttctgccacttgttcggcacccatg

SEQ ID NO: 98372 - DNA, 329 bp, Heterodera glycines
aacaattgtatgtgtacgctcctaagctgattgatgaatccataattggcgacaaaatggctccattgctgagggttgttaatgtatctacaacacctggagggacggacgtgcccgaggttatatatactaatgaaattttccattctcttcaaaacaaacgagtttctgaaatacaaattgaaattcagaacgcatttggacgacacataaagtttaactggggtacttgcatcatcacgctacatttccggcgtaaatttttttgaatcaacattgaaaaacaacgaggtgccggtcttctgaagaatttggcccgtttcctgatg

SEQ ID NO: 98373 - DNA, 61 bp, Heterodera glycines
ttatgacacgctgcccgacacgcccggcgcaacggacgacgcggtgtcctgtgcgattatg

SEQ ID NO: 98374 - DNA, 308 bp, Heterodera glycines
ggtgcgcgaaaattttaaattaaattaaaaatcattttaaaatttgcaagtttttttaaagaaaattagaaattcaaaaatttttgttttttggcgagcggggaaacggctggcgcggagggggcgggcgaatttctctccctagtcactttttttattcttcaaccaaaattaaacattcaagcaccatcccttttgccaaagttcgactcccattgagtgctgtaaccatttttggcaatttaaaaaaatatttattttaacaaattaattaatagatttgtgctaaggttttacacttttaaatg

SEQ ID NO: 98375 - DNA, 119 bp, Heterodera glycines
tttacgacttgttctgtaaatccttaaatcctgttcatgatccgatactatttctgtttctagtttatacatttaccaatccatccaaatataaaaattagaaaatcttaaaagttatg
